United States Patent Application Publication US 2018/0126003 A1 - sequence listing, part 175

SEQ ID NO: 309713 - DNA, 1168 bp, Artificial Sequence
  derived and/or modified sequence
gtctggccccgcaggctcggtgaatcgaacgttgagcagggcggtgggtggtgcggagtgccgagcggcctcacccccaaccgtcggcccagtcggacggttccgaggcgttgccgggagccgggcgcggctctgtgtggactcggagaaacgcgggttatttaggaggattcgatggcaattttttgtggaacagaattggagcagaatacagtagcaacgtgcctgtgtggtccctgcgcctgctgccagcactcgcgggggccttgtcggtccccatggcctaccagatagtgttggagctccacttttctcattgtgccgccatgggagctgctctgttgatgcttatcgagaatgctctcatcactcagtcaaggctaatgcttttggaatcagtgttaatatttttcaatctattggccgtgttgtcctacctgaagttcttcaactgccaaaagcacagccctttttctctgagctggtggttctggctaacactgacaggggtcgcttgttcctgtgcagtgggcatcaagtacatgggtgtgttcacgtacgtgctcgtgctgggtgttgcagctgtccatgcctggcacctgcttggagaccagactttgtccaatgtaggtgctgatgtccagtgctgcatgaggccggcctgtatggggcagatgcagatgtcacagggggtctgtgtgttctgtcacttgctcgcccgagcagtggctttgctggtcatcccggtcgtcctgtacttactgttcttctacgtccacttgattctagtcttccgctctgggccccacgaccaaatcatgtccagtgccttccaggccagcttagagggaggactagctcggatcactcagggtcagccactggaggtggcctttgggtcccaggtcactctgaggaacgtctttgggaaacctgtgccctgctggcttcattcccaccaggacacctaccccatgatatatgagaacggccgaggcagctcccaccagcaacaggtgacctgttaccccttcaaagatgtcaataactggtggattgtaaaggatcccaggaggcaccagctggtggtgagcagccctccgagacctgtgaggcacggggacatggtgcagctggtccacggcatgaccacccgctccctgaacac

SEQ ID NO: 309714 - DNA, 791 bp, Artificial Sequence
  derived and/or modified sequence
ccgagcggcctcacccccaaccgtcggcccagtcggacggttccgaggcgttgccgggagccgggcgcggctctgtgtggactcggagaaacgcggttttgacgaagtatattatgggcagtacatctctttttacatgaaacaaatcttcttcttggatgacagtgggccgccatttggccacatggtgctggccttgggaggttatttaggaggattcgatggcaattttttgtggaacagaattggagcagaatacagtagcaacgtgcctgtgtggtccctgcgcctgctgccagcactcgcgggggccttgtcggtccccatggcctaccagatagtgttggagctccacttttctcattgtgccgccatgggagctgctctgttgatgcttatcgagaatgctctcatcactcagtcaaggctaatgcttttggaatcagtgttaatatttttcaatctattggccgtgttgtcctacctgaagttcttcaactgccaaaagcacagccctttttctctgagctggtggttctggctaacactgacaggggtcgcttgttcctgtgcagtgggcatcaagtacatgggtgtgttcacgtacgtgctcgtgctgggtgttgcagctgtccatgcctggcacctgcttggagaccagactttgtccaatgtaggtgctgatgtccagtgctgcatgaggccggcctgtatggggcagatgcagatgtcacagggggtctgtgtgttctgtcacttgctcgcccgagcagtggctttgctggtcatcc

SEQ ID NO: 309715 - DNA, 429 bp, Artificial Sequence
  derived and/or modified sequence
atgtggggcttcctgaagagacccgtggtggtgaccgccgacatcaacctgagcctggtggccctgaccggcatgggcctgctgagcagactgtggagactgacctaccccagagccgtggtgttcgacgaggtgtactacggccagtacatcagcttctacatgaagcagatcttcttcctggacgacagcggcccccccttcggccacatggtgctggccctgggcggctacctgggcggcttcgacggcaacttcctgtggaacagaatcggcgccgagtacagcagcaacgtgcccgtgtggagcctgagactgctgcccgccctggccggcgccctgagcgtgcccatggcctaccagatcgtgctggagctgcacttcagccactgcgccgccatgggcgccgccctgctgatgctgatctag

SEQ ID NO: 309716 - DNA, 894 bp, Artificial Sequence
  derived and/or modified sequence
atggcctaccagatcgtgctggagctgcacttcagccactgcgccgccatgggcgccgccctgctgatgctgatcgagaacgccctgatcacccagagcagactgatgctgctggagagcgtgctgatcttcttcaacctgctggccgtgctgagctacctgaagttcttcaactgccagaagcacagccccttcagcctgagctggtggttctggctgaccctgaccggcgtggcctgcagctgcgccgtgggcatcaagtacatgggcgtgttcacctacgtgctggtgctgggcgtggccgccgtgcacgcctggcacctgctgggcgaccagaccctgagcaacgtgggcgccgacgtgcagtgctgcatgagacccgcctgcatgggccagatgcagatgagccagggcgtgtgcgtgttctgccacctgctggccagagccgtggccctgctggtgatccccgtggtgctgtacctgctgttcttctacgtgcacctgatcctggtgttcagaagcggcccccacgaccagatcatgagcagcgccttccaggccagcctggagggcggcctggccagaatcacccagggccagcccctggaggtggccttcggcagccaggtgaccctgagaaacgtgttcggcaagcccgtgccctgctggctgcacagccaccaggacacctaccccatgatctacgagaacggcagaggcagcagccaccagcagcaggtgacctgctaccccttcaaggacgtgaacaactggtggatcgtgaaggaccccagaagacaccagctggtggtgagcagcccccccagacccgtgagacacggcgacatggtgcagctggtgcacggcatgaccaccagaagcctgaacacctag

SEQ ID NO: 309717 - DNA, 657 bp, Artificial Sequence
  derived and/or modified sequence
atgaagcagatcttcttcctggacgacagcggcccccccttcggccacatggtgctggccctgggcggctacctgggcggcttcgacggcaacttcctgtggaacagaatcggcgccgagtacagcagcaacgtgcccgtgtggagcctgagactgctgcccgccctggccggcgccctgagcgtgcccatggcctaccagatcgtgctggagctgcacttcagccactgcgccgccatgggcgccgccctgctgatgctgatcgagaacgccctgatcacccagagcagactgatgctgctggagagcgtgctgatcttcttcaacctgctggccgtgctgagctacctgaagttcttcaactgccagaagcacagccccttcagcctgagctggtggttctggctgaccctgaccggcgtggcctgcagctgcgccgtgggcatcaagtacatgggcgtgttcacctacgtgctggtgctgggcgtggccgccgtgcacgcctggcacctgctgggcgaccagaccctgagcaacgtgggcgccgacgtgcagtgctgcatgagacccgcctgcatgggccagatgcagatgagccagggcgtgtgcgtgttctgccacctgctggccagagccgtggccctgctggtgatctag

SEQ ID NO: 309718 - DNA, 471 bp, Artificial Sequence
  derived and/or modified sequence
atggcataccagatagttttagaactccacttctctcattgtgctgccatgggagctgccctgctgatgctgattgagaatgcactcatcacccagtccagattgatgttactggaaagtgttctcatcttcttcaacctgctggcagtgctcagttacctgaagttcttcaactgccagaagcactcactgcctctatgggcccctcggcccaatcacgtccaatgtctgcccggacaactgcgaggtcgcacaagttctgaccactccgggagcgcaactggtggtggactttgggtgccagggcattccgaagagaggctgtgggaaacttgtgctctgctcgcttctttcccccctggccatttgcctcacgatgtgcgctatgaaaatggccggggatcttcacaccaacagcaggtgacatgttatccattcaaggacgtgaacaactggtggattgtgaaatag

SEQ ID NO: 309719 - DNA, 471 bp, Artificial Sequence
  derived and/or modified sequence
atggcctatcagatcgtccttgagctgcatttctctcactgtgctgctatgggtgcggcactgttgatgctgatcgagaatgctctgatcacccagtcaaggctgatgcttcttgagagtgtactgatattctttaacctgctcgcagtactctcttatttaaagttcttcaattgccaaaaacacagcttgcctctgtgggcccccaggccaaatcatgtccagtgtcttcctggacagctgcgtgggaggaccagcagcgaccactccgggagtgccaccggcggcggattgtgggtgcctggtcattctgaagaaagactgtgggagacatgcgctctgctggcctctttcccacctgggcatttgccacatgatgttcggtatgagaatggccgcgggtcttcccatcagcaacaggtgacgtgctatccatttaaagatgtgaacaactggtggatcgtgaagtag

SEQ ID NO: 309720 - DNA, 471 bp, Artificial Sequence
  derived and/or modified sequence
atggcctaccagatcgtgctggagctgcacttcagccactgtgccgccatgggcgccgccctgctgatgctgattgaaaatgccctgatcacccagagccggctgatgctgctggagagcgtgctgatcttcttcaacctgctggccgtgctgagctacctgaagttcttcaactgccagaagcacagcctgcccctgtgggccccccggcccaaccacgtgcagtgcctgcccggccagctgcggggccgcaccagcagtgaccacagcggcagcgccaccggcggcggcctgtgggtgcccggccacagcgaggagcggctgtgggagacctgtgccctgctggccagcttccccccaggccacctgccccatgatgtgcgctatgaaaatggccggggcagcagccaccagcagcaggtgacctgctaccccttcaaggatgtgaacaactggtggatcgtgaagtag

SEQ ID NO: 309721 - DNA, 471 bp, Artificial Sequence
  derived and/or modified sequence
atggcctaccagatcgtgctggagctgcacttcagccactgcgccgctatgggtgccgccctcttaatgctcatcgagaacgctctgatcacccagtcacgcctgatgttactggagtctgtgctcatattcttcaacttgttggccgtcctgagttatctgaagtttttcaattgtcaaaaacatagtctgcccctatgggccccccgtcctaaccacgtccagtgtcttcccggacagttaagggggcgcacttcaagtgaccactccggttctgccactggcgggggcttatgggtgcccggccatagtgaggaaaggctgtgggaaacctgtgcgctgctagcaagcttccctcccgggcacctgccccatgatgtgcgatacgaaaatggtcgtgggtcttctcaccagcagcaggtgacctgctaccccttcaaagacgtgaataactggtggatcgtgaagtag

SEQ ID NO: 309722 - DNA, 471 bp, Artificial Sequence
  derived and/or modified sequence
atggcctaccagatcgtgctggagctgcacttcagccactgcgccgctatgggggctgccctactaatgttaatcgagaatgcactgatcacccagtcacggttgatgctgcttgagagcgtgctaattttttttaacctcctcgcagtgctgagctatctgaagttctttaattgccagaaacattcgctgcccctatgggcccccaggcctaaccatgtacagtgcctgcctggacaactcaggggcagaacaagtagcgatcattcagggtctgctactggaggtggattgtgggtccccggtcactccgaagaaaggctgtgggagacctgcgcacttctggcatctttccctcccggacacctcccccacgacgttagatacgaaaacggacgggggtcttcccatcagcaacaggtcacctgttatccatttaaagacgtgaacaactggtggattgtgaaatag

SEQ ID NO: 309723 - DNA, 471 bp, Artificial Sequence
  derived and/or modified sequence
atggcgtatcagatcgtgttggagctgcacttcagccactgcgccgctatgggtgctgcattgctcatgttgatcgagaatgccctcatcacccagtcccgattgatgctactcgaatcagtcttaatcttctttaatctgttagccgtactctcctatctcaagttttttaactgccagaaacattctctaccgctgtgggcacccagacctaatcatgtgcaatgccttcctgggcaattacgaggtcgtacttctagcgatcacagtggatccgccacaggagggggactatgggtccctgggcattcagaagaaagactgtgggagacatgcgcactgctggccagtttccccccaggacaccttccacatgatgtaagatatgaaaatggcagaggttccagccatcaacagcaggtgacctgctatcccttcaaggatgtgaataattggtggatcgtcaaatag

SEQ ID NO: 309724 - DNA, 471 bp, Artificial Sequence
  derived and/or modified sequence
atggcttaccaaattgtcttagagctccatttctcccactgcgctgctatgggggctgccctactaatgctgatcgagaacgctctcatcacacaaagcaggcttatgctgcttgaatccgtgctgatcttctttaaccttctcgccgtgctgtcatacctgaaatttttcaactgccaaaagcattctctaccactgtgggcaccaagacccaaccacgtgcaatgtctccctggtcaacttagaggcaggacttcgagcgatcattccggctctgcaaccggaggtggactctgggttcccggacatagcgaagagcgcctctgggagacctgcgcccttcttgccagtttccccccagggcacctccctcatgacgttcggtacgagaatggtcgtgggtcttctcatcagcaacaggtaacctgttatccgttcaaagatgtcaacaattggtggatagtgaaatag

SEQ ID NO: 309725 - DNA, 471 bp, Artificial Sequence
  derived and/or modified sequence
atggcctaccagatcgtgctggagctgcacttcagccactgcgccgccatgggcgccgccctgctgatgctgatcgagaacgccctgatcacccagagcagactgatgctgctggagagcgtgctgatcttcttcaacctgctggccgtgctgagctacctgaagttcttcaactgccagaagcacagcctgcccctgtgggcccccagacccaaccacgtgcagtgcctgcccggccagctgagaggcagaaccagcagcgaccacagcggcagcgccaccggcggcggcctgtgggtgcccggccacagcgaggagagactgtgggagacctgcgccctgctggccagcttcccccccggccacctgccccacgacgtgagatacgagaacggcagaggcagcagccaccagcagcaggtgacctgctaccccttcaaggacgtgaacaactggtggatcgtgaagtag

SEQ ID NO: 309726 - protein, 346 aa, Artificial Sequence
  derived and/or modified sequence
WRGGGCTSPATLGAARGAVGIGKEGQYQPLIASLTWGLVPLSQAQEIVNRGSDTDVWKTILSEVRFVHVNTSAVLKLSGAHLPDWGYRQLEIVGEKLSRGYHGSTVWNVEEHRYGASQEQRERERELHSPAQVDVSRNLSFMARFSELQWRMLALRSDDSEHKYSSSPLEWVTLDTNIAYWLHPRTSAQIHLLGNIVIWVSGSLALAIYALLSLWYLLRRRRNVHDLPQDAWLRWVLAGALCAGGWAVNYLPFFLMEKTLFLYHYLPALTFQILLLPVVLQHISDHLCRSQLQRSIFSALVVAWYSSACHVSNTLRPLTYGDKSLSPHELKALRWKDSWDILIRKH

SEQ ID NO: 309727 - DNA, 1041 bp, Artificial Sequence
  derived and/or modified sequence
tggcgaggaggcggttgcactagccccgcaacgctaggggctgccagaggggcagttggaattggcaaggaggggcagtaccagcccctcattgctagcctgacctgggggttggtgccacttagccaggcgcaggagatcgtaaatcggggcagcgacaccgatgtctggaagaccatcctctcagaagtgcgtttcgtgcatgtcaacaccagtgcagtactgaagctcagcggtgctcacctcccagattgggggtacagacagctggaaatcgtgggggagaaactgagcaggggctaccatggcagtacggtgtggaatgttgaagagcatcgatatggcgcaagtcaggaacagcgggaacgggaacgggagctgcatagccccgcgcaggtggacgtgagtaggaatctgagcttcatggcccgattctccgagctgcaatggcggatgctggcccttagatctgacgactctgagcacaagtatagctcgtctcctttggagtgggtcacgctcgatacaaacatcgcctactggttgcacccgaggacttcagcccagatccatctcctgggaaacatagtcatttgggtgtcgggctccctggccctagccatctacgcactgctcagtctgtggtatctactgcgacggcggcggaacgtccacgatctgccccaagacgcatggctgcgatgggttctagctggggcactgtgcgctggggggtgggctgtaaattacctgccctttttcctgatggaaaagaccttgttcttgtaccactacctgcccgctcttacattccaaatcctgctcttgcccgtcgtccttcagcatattagtgaccatttgtgccgcagccagctgcagagatcaatctttagtgccctcgttgtcgcttggtatagctcggcttgtcacgtatcaaacacgctccgacccctcacatacggtgacaaaagtctgtctccacatgaactgaaggctctgaggtggaaggactcttgggatattctgatccgcaagcattag

SEQ ID NO: 309728 - DNA, 1041 bp, Artificial Sequence
  derived and/or modified sequence
tggaggggcggcggctgcaccagccctgccaccctgggcgccgcccggggagctgtgggcatcggcaaggagggccagtaccagcccctgattgccagcctgacctggggcctggtgcccctgagccaggcccaggagatcgtgaacagaggaagtgacacagatgtgtggaagaccatcctgtctgaggtgcgctttgtgcacgtgaacaccagcgctgtgctgaagctgagcggggcccacctgcctgactggggctaccggcagctggagatcgtgggggagaagctgagccggggctaccacggcagcacagtgtggaatgtggaggagcaccgctacggggccagccaggagcagcgggagcgggagcgggagctgcacagccctgcccaggtggatgtgtccaggaacctgtccttcatggcccgcttcagcgagctgcagtggaggatgctggccctgcggagtgatgacagcgagcacaagtacagcagcagccccctggagtgggtgaccctggacaccaacatcgcctactggctgcaccccaggaccagcgcccagatccacctgctgggcaacatcgtcatctgggtgtctggcagcctggccctggccatctatgccctgctgagcctgtggtacctgctgcggaggagaagaaatgtgcatgacctgccccaggatgcctggctgcgctgggtgctggccggggccctgtgtgccggcggctgggccgtgaactacctgcccttcttcctgatggagaagaccctcttcctgtaccactacctgcctgccctgaccttccagatcctgctgctgcctgtggtgctgcagcacatcagtgaccacctgtgccgcagccagctgcagaggagcatcttcagcgccctggtggtggcctggtacagcagcgcctgccacgtgagcaacaccctgcggcccctgacctacggggacaagagcctgagcccccatgagctgaaggccctgcgctggaaggacagctgggacatcctgatcaggaagcactag

SEQ ID NO: 309729 - DNA, 1041 bp, Artificial Sequence
  derived and/or modified sequence
tggcggggcggcggctgcaccagccccgccaccctgggcgccgcccggggcgctgtcgggatcgggaaggaggggcagtaccagcccctcattgcttcactgacctgggggcttgtgcctctctcacaagcgcaggagatcgtaaacagggggagcgataccgacgtctggaaaactatcttatcagaagttaggttcgtccatgtgaatacaagcgctgtattaaagctgagcggggcccatctcccagactggggctaccgccagctcgaaattgttggggaaaaactatccagagggtatcacgggtcgaccgtatggaacgtggaagaacatcgctacggggcctcccaggaacaaagggagcgcgagagggaattacactctcctgcccaggtagatgtctctcgtaacctgtcttttatggcccggttcagtgaactgcaatggagaatgcttgccctgagatcagacgactcagagcacaagtactcctcaagtcctctcgaatgggtaacacttgataccaatatcgcttactggctccacccaagaaccagcgcccagattcacctcttaggaaatatcgtgatctgggtctccggtagtctcgcacttgcaatatacgcactcttgtccctatggtatctgctgaggcgccggcgaaatgtgcacgatcttccccaggatgcctggctaagatgggtgctggcaggcgccctgtgcgctggaggctgggcagtcaattatttaccgttttttctgatggaaaaaacactgtttctgtaccactacctgcctgccctaacctttcagatcctgctgttgccggtcgtgcttcagcacattagcgaccacctgtgccggagccagctgcagcggagcattttctctgctctggtggtggcgtggtactccagtgcttgccacgttagcaataccctccgtccactcacttacggtgacaaatccttgagcccgcatgagctgaaggcgcttagatggaaggatagctgggatattttgatccggaaacactag

SEQ ID NO: 309730 - DNA, 1041 bp, Artificial Sequence
  derived and/or modified sequence
tggagaggaggcggatgcacttctcccgctaccttaggagccgctcggggagcggtgggcatagggaaagaagggcagtatcagcccctgattgcatccctgacatggggtctggtaccactgtcacaagcccaagaaattgtcaatagaggaagcgacaccgatgtctggaagacaattctttcagaggtgcgctttgtacacgtgaacacctctgcagtcctaaagctctcaggggctcatttgccggattggggataccggcagctcgaaatcgtgggggagaagctctcacgtgggtatcacgggagcacagtttggaacgtggaggagcaccgctacggagcttcacaggaacaacgggaacgggagagggaacttcactcccctgcacaggttgacgtatccagaaatttgtcttttatggcaagattctcggagctgcagtggcgaatgttagcgttgagatcagacgacagcgaacataagtattcttcctcaccactagaatgggtgactctagatacaaacatcgcatattggttgcaccctaggaccagcgcccaaattcacctcttaggcaacatagttatttgggtgtctggctccctggcccttgctatctatgccctcctgtcactttggtatttgctgcggaggaggcgcaatgtgcacgatcttcctcaggatgcgtggctgcggtgggtactggccggtgctctgtgtgcaggcggatgggccgttaactatcttcccttcttcttaatggagaagaccctgtttctgtaccactacctgcccgctcttacattccagatcttactgttgccggtggtgctgcagcatattagtgatcacttgtgtcgcagccagctccagcggagcatcttcagcgccttggtcgtcgcctggtactctagcgcttgtcatgtttccaacactctgcggccactaacgtacggtgacaagagtttatccccgcacgaattgaaggcactcagatggaaggactcttgggatatccttatcaggaaacactag

SEQ ID NO: 309731 - DNA, 1741 bp, Artificial Sequence
  derived and/or modified sequence
tggcgaggaggagggtgcacttccccagcgaccctcggagcagcccggggtgctgtgggcattgggaaggaaggccagtaccagccccttatagcttccctcacttggggacttgtccctttgtctcaggctcaagaaattgtgaacagaggatctgacacagacgtctggaagaccatcctctcagaggtccgctttgtgcacgtgaacacttccgctgtcttaaagctgagcggggctcacctccctgactgggggtatcggcaactggagatcgtcggggagaagctgtcccggggctaccacgggagcacggtgtggaacgtggaggagcaccgatacggcgcgagccaggagcagagggagcgggaacgggagctgcactcacctgcgcaggtggacgtcagcaggaacctcagcttcatggcgagattctcggagctgcagtggaggatgctggcgctgagaagtgatgactcggaacacaagtacagctccagcccactggagtgggtcaccctggacaccaatattgcctactggctgcaccccaggaccagcgctcagatccacctacttggaaacatagtgatctgggtttcgggcagcctcgctctggccatctacgccctgctgtccttgtggtacctgctccgacggcgaagaaatgtccatgacctccctcaggatgcctggctgcgctgggtgctggctggggcgctgtgtgccggtggctgggcagtgaactacctcccgttcttcctgatggagaagacactcttcctctaccactacctgcccgcactcaccttccaaatccttctgctccctgtggtcctgcagcacatcagcgaccacctgtgcaggtcccagctccagaggagcatcttcagcgccctggtggtggcctggtactcctccgcgtgccacgtgtccaacacgctgcgcccactcacctacggggacaagtcactctcgccacatgaactcaaggcccttcgctggaaagacagctgggacatcttgatccgaaaacactagaacaagagtgtggcaaagaacacccgtgctggggtcgggatgaggttgaagggtcttggtcaatgtacgtaatgagcagggtgggccccacgctgggaggacacgggctgggctgagcagggcctctagtggaacacatgggggtctcattgaaaagctctctgatgagcacctccttttgtgcaaagttaattttttctcgacaataaagatattccgtgtctttacccctgaactaagacacagggagtatttcagaggccagcgtaggagtcattgacaacaaaaagccgagaacccagggccagcagtggagcctcagcagaccagggcctggtccttgctaactgctgcagggtggagtttgatctggcagacccgatcctccttcatgaacacccagcaacctgagcaagtcccggccctgccctcagcgagcccggcaggcgtcctgggacagctcagtgttggagggccacctgaaccacgagccagggctggggcttgcatgtcattgtctatgacagcgtcaagactggcccttggcaccgtgctgtgtggaaaccctcccctctgagactccactgagacgtggctgagtgaaatcttcctcgtcagtggtcaaggtgtgtcatccatacagctccatgcctttgtcttttttaaatgtaattaaaaaaggaaccaactggcgtttgta

SEQ ID NO: 309732 - DNA, 1041 bp, Artificial Sequence
  derived and/or modified sequence
tggagaggcggcggctgcaccagccccgccaccctgggcgccgccagaggcgccgtgggcatcggcaaggagggccagtaccagcccctgatcgccagcctgacctggggcctggtgcccctgagccaggcccaggagatcgtgaacagaggcagcgacaccgacgtgtggaagaccatcctgagcgaggtgagattcgtgcacgtgaacaccagcgccgtgctgaagctgagcggcgcccacctgcccgactggggctacagacagctggagatcgtgggcgagaagctgagcagaggctaccacggcagcaccgtgtggaacgtggaggagcacagatacggcgccagccaggagcagagagagagagagagagagctgcacagccccgcccaggtggacgtgagcagaaacctgagcttcatggccagattcagcgagctgcagtggagaatgctggccctgagaagcgacgacagcgagcacaagtacagcagcagccccctggagtgggtgaccctggacaccaacatcgcctactggctgcaccccagaaccagcgcccagatccacctgctgggcaacatcgtgatctgggtgagcggcagcctggccctggccatctacgccctgctgagcctgtggtacctgctgagaagaagaagaaacgtgcacgacctgccccaggacgcctggctgagatgggtgctggccggcgccctgtgcgccggcggctgggccgtgaactacctgcccttcttcctgatggagaagaccctgttcctgtaccactacctgcccgccctgaccttccagatcctgctgctgcccgtggtgctgcagcacatcagcgaccacctgtgcagaagccagctgcagagaagcatcttcagcgccctggtggtggcctggtacagcagcgcctgccacgtgagcaacaccctgagacccctgacctacggcgacaagagcctgagcccccacgagctgaaggccctgagatggaaggacagctgggacatcctgatcagaaagcactag

SEQ ID NO: 309733 - protein, 1197 aa, Artificial Sequence
  derived and/or modified sequence
MHIKSIILEGFKSYAQRTEVNGFDPLFNAITGLNGSGKSNILDSICFLLGISNLSQVRASNLQDLVYKNGQAGITKASVSITFDNSDKKQSPLGFEVHDEITVTRQVVIGGRNKYLINGVNANNTRVQDLFCSVGLNVNNPHFLIMQGRITKVLNMKPPEILSMIEEAAGTRMYEYKKIAAQKTIEKKEAKLKEIKTILEEEITPTIQKLKEERSSYLEYQKVMREIEHLSRLYIAYQFLLAEDTKVRSAEELKEMQDKVIKLQEELSENDKKIKALNHEIEELEKRKDKETGGILRSLEDALAEAQRVNTKSQSAFDLKKKNLACEESKRKELEKNMVEDSKTLAAKEKEVKKITDGLHALQEASNKDAEALAAAQQHFNAVSAGLSSNEDGAEATLAGQMMACKNDISKAQTEAKQAQMKLKHAQQELKNKQAEVKKMDSGYRKDQEALEAVKRLKEKLEAEMKKLNYEENKEESLLEKRRQLSRDIGRLKETYEALLARFPNLRFAYKDPEKNWNRNCVKGLVASLISVKDTSATTALELVAGERLYNVVVDTEVTGKKLLERGELKRRYTIIPLNKISARCIAPETLRVAQNLVGPDNVHVALSLVEYKPELQKAMEFVFGTTFVCDNMDNAKKVAFDKRIMTRTVTLGGDVFDPHGTLSGGARSQAASILTKFQELKDVQDELRIKENELRALEEELAGLKNTAEKYRQLKQQWEMKTEEADLLQTKLQQSSYHKQQEELDALKKTIEESEETLKNTKEIQRKAEEKYEVLENKMKNAEAERERELKDAQKKLDCAKTKADASSKKMKEKQQEVEAITLELEELKREHTSYKQQLEAVNEAIKSYESQIEVMAAEVAKNKESVNKAQEEVTKQKEVITAQDTVIKAKYAEVAKHKEQNNDSQLKIKELDHNISKHKREAEDGAAKVSKMLKDYDWINAERHLFGQPNSAYDFKTNNPKEAGQRLQKLQEMKEKLGRNVNMRAMNVLTEAEERYNDLMKKKRIVENDKSKILTTIEDLDQKKNQALNIAWQKVNKDFGSIFSTLLPGANAMLAPPEGQTVLDGLEFKVALGNTWKENLTELSGGQRSLVALSLILSMLLFKPAPIYILDEVDAALDLSHTQNIGQMLRTHFTHSQFIVVSLKEGMFNNANVLFKTKFVDGVSTVARFTQCQNGKISKEAKSKAKPPKGAHVEV

SEQ ID NO: 309734 - protein, 145 aa, Artificial Sequence
  derived and/or modified sequence
MQGRITKVLNMKPPEILSMIEEAAGTRMYEYKKIAAQKTIEKKEAKLKEIKTILEEEITPTIQKLKEERSSYLEYQKVMREIEHLSRLYIAYQFLLAEDTKVRSAEELKEMQDKVIKLQEELSENDKKIKALNHEIEELEKRKDK

SEQ ID NO: 309735 - DNA, 3594 bp, Artificial Sequence
  derived and/or modified sequence
atgcacattaagtccattatcttggaagggtttaagtcttacgcgcagaggacagaggttaatggctttgaccctttgttcaacgccataacaggtctgaacggctctggtaaaagtaacatactcgattcgatttgtttcctcctgggaatctcaaacctcagccaggttcgggcatccaatttgcaggacctggtctacaagaacggacaggcgggcattaccaaggcctccgtgtccatcacatttgataactccgataagaagcagagccctctcggtttcgaagtgcacgatgagattaccgtcacgagacaggttgtaatcggcggacgcaacaaatacctgatcaacggggtcaacgccaataacacaagagtccaggacctgttctgctcagtgggtctgaacgtcaacaatccccattttctgattatgcaagggcgtattacaaaggtgctcaacatgaagccgccagagatcctcagcatgattgaggaggctgcaggcacccggatgtacgagtataaaaagatcgctgcacaaaaaaccatcgaaaagaaagaagcaaaactcaaggaaatcaagactattctggaggaggaaattaccccaaccatccaaaagctgaaggaagagagaagcagctacctcgagtaccagaaagttatgagggaaattgaacacctcagtagattgtacatcgcctatcagttcctgctggccgaagatactaaagtaaggtctgccgaggaactgaaagagatgcaggacaaggtaattaaattacaagaggagctgagcgagaacgacaaaaagattaaagctctgaatcacgagattgaggaactggagaagcgcaaagataaggaaaccggcggaatcctccgatctctggaagacgcgctggccgaggctcagagggtgaacaccaagagtcaatctgcattcgacctgaaaaagaagaatctcgcttgcgaagagtccaaacgaaaagagcttgagaaaaatatggtggaagatagcaaaacactggccgccaaggaaaaagaggtaaagaaaatcaccgacggtctgcacgccttgcaggaagcgagtaataaggacgccgaggccctggctgccgcccagcagcattttaacgccgtctcagccgggctctcctcaaatgaagatggggccgaggctactctggccggtcagatgatggcttgtaaaaatgacatctcaaaagcccagacagaagctaagcaggcccagatgaaactgaagcatgctcagcaggaactgaagaataaacaggcagaggtgaaaaaaatggattctggctacaggaaggatcaggaggctctggaagccgtgaagcggctgaaagaaaaactcgaagccgagatgaagaaactaaactatgaggaaaataaagaagaatcacttctcgagaaaagacgccagttatcccgagacatcgggaggttaaaggagacatacgaggcgctgcttgccagattccccaatctgcgcttcgcatacaaggacccagagaagaattggaatcgcaactgcgtaaaaggactggtggcctctctaatctcagttaaggatacgagtgccactacagcactcgagctcgtcgcaggcgaaagactctataatgtggtagttgacactgaagtgaccggcaagaagctgcttgagcgcggcgagcttaagagaagatacaccattattcctctgaataagatttccgcccgctgcatcgcccctgaaacattaagggtggctcagaacttggtgggcccagataatgttcatgtcgccctgtcactggttgaatacaagccagagctccaaaaggccatggaattcgtgttcggtacaacctttgtatgtgacaatatggacaatgctaaaaaggttgcctttgataagcgaataatgactagaaccgtcaccctggggggtgatgtgttcgacccacacggaacacttagtggaggagcccggtctcaagccgcctctatccttaccaagtttcaggaattaaaggatgtacaggatgaacttcggatcaaagagaacgaactgcgcgctcttgaggaggaactggcaggcctgaagaatactgccgaaaagtatcgccagttgaagcagcagtgggaaatgaagacggaagaggctgacctgttgcagaccaaactgcagcagtcgagttaccataagcagcaagaagaattggatgccctgaagaaaaccattgaagagagcgaagagaccctcaagaatactaaggaaattcagagaaaggccgaagaaaagtacgaggtcctggaaaacaaaatgaagaacgctgaagccgaaagagagcgagagctgaaggatgcccagaaaaagcttgattgtgctaagacgaaggccgatgcatcaagcaagaagatgaaggaaaaacaacaggaggtggaagccataacactggaacttgaggaactgaagagggagcataccagttacaaacaacaactggaagccgtgaacgaggcgattaagtcatacgagagccagattgaagttatggccgccgaggtagctaaaaacaaagagagcgtaaacaaggcccaggaggaagtgaccaaacaaaaagaagtcattacagcccaagacaccgtaattaaagccaaatatgctgaggtagccaagcataaagagcagaacaacgatagccagctgaagattaaggaactggaccacaatatatctaaacacaagcgggaggcagaagatggcgccgctaaagtgagcaagatgctgaaagactatgactggatcaacgccgagagacacctgtttgggcagccaaattccgcctatgatttcaaaactaataatccaaaagaggcgggacaaagacttcagaagctgcaagaaatgaaggagaaattgggccgaaacgtgaacatgcgggcaatgaacgtactcactgaagccgaagagaggtacaatgacctgatgaagaagaagcgtattgtcgaaaacgataagagtaaaattctcaccacaatagaagatctggaccaaaaaaagaaccaggctctcaatatagcatggcagaaagttaacaaggattttggctcaatcttctcgacactgctccccggggccaacgccatgctggcccctccagaaggacagaccgtgctcgatggattggaatttaaagtcgccctgggcaatacttggaaagagaacctaaccgagctctcagggggacagcgatcccttgtggctctgtcattgatactatcgatgctgctgtttaaacccgctcctatatatatcctcgacgaagtggacgccgcactcgatctgtcacatactcagaacatcggccagatgctcagaacccactttacacattctcagttcatagtggtgtcactgaaagaagggatgtttaataacgccaatgtgcttttcaaaaccaaatttgttgacggtgtgtctacagtagcgaggtttacgcagtgtcagaatggaaaaatttcaaaggaggcaaagtccaaagcaaagccacctaaaggggcccacgtggaagtctag

SEQ ID NO: 309736 - DNA, 3594 bp, Artificial Sequence
  derived and/or modified sequence
atgcacataaagagtataatacttgaggggttcaaatcctatgctcagcgcacagaggtgaatggtttcgaccctctgtttaacgcaattactgggctaaatggaagtggaaaaagcaacatactggacagtatatgttttctgctgggcatctccaacctatcacaggtcagagcttccaatctccaggacctggtgtataagaatggccaggcgggcattacaaaggcatccgtcagcatcacattcgataactctgataagaagcaaagtccccttggatttgaggtgcacgacgagattaccgtgacccggcaggtggtaataggcggacgaaataagtacctcatcaacggcgtgaacgccaacaatactcgagtgcaggacctgttctgctcggtagggcttaacgtaaataaccctcactttctcataatgcagggaagaattacaaaggtgctgaatatgaagcctccggagattctgtctatgattgaagaagccgccggcacccggatgtatgaatacaaaaagatcgcagctcaaaagacgattgaaaaaaaagaggctaaattgaaggaaatcaagaccatactcgaggaggagatcactccaaccatccagaagctgaaagaagaacggagcagttacttggaatatcagaaggtgatgagagagattgagcatctgtccagactgtacatcgcatatcagttcctcttggcagaggatactaaagtgcgctctgctgaagaactcaaagagatgcaggataaggtgataaaactacaggaggagctcagcgagaacgataaaaaaatcaaggcactcaatcatgagatagaggagctggagaagagaaaagacaaggagaccggaggcattttgcgttccctagaggacgctttggccgaagcccagagagtgaacacgaagagccagagcgccttcgatctaaagaagaaaaacttagcttgcgaggaatctaaacgcaaggagcttgagaagaacatggttgaagatagtaagacactcgcggctaaggagaaggaagtgaaaaaaataactgacgggctccacgcactgcaggaagcctccaacaaggacgccgaggccctcgcggccgcccaacagcactttaatgcggtctcagccggcctgagcagtaatgaggatggcgccgaggccacactggcaggtcaaatgatggcctgcaaaaatgatatctctaaagcccagaccgaagctaagcaggcccaaatgaagctgaagcacgcccagcaggagctgaaaaataagcaggctgaggtcaagaagatggactcagggtacagaaaggatcaggaggctctagaggccgtgaagagactgaaagagaagctggaggccgagatgaaaaaactcaactatgaggagaacaaggaggagagtttgctggagaaaagacgtcagctgtcgagggatatcggccggttgaaagaaacgtacgaggctctgcttgccagatttcccaacttacgcttcgcttacaaagatcccgagaaaaactggaatcgaaactgcgtcaaaggcctcgtcgccagcctgatctctgtgaaggacacgagtgccaccaccgcactggagctcgtagccggcgagaggctctacaacgtcgtggtcgatactgaggtgacaggtaagaaactgcttgagaggggtgaactcaagcgccgttacacaatcattccactcaacaaaatctctgcgcggtgtatagctcccgagacgttacgcgtggcgcagaacctggtgggcccagacaatgtacatgtagccttatcactggtggaatacaagcctgagctgcaaaaggccatggagttcgtgtttggtacaaccttcgtgtgcgacaatatggataacgccaaaaaagtcgcattcgacaaacggatcatgaccagaaccgttacgctcggcggagacgtttttgacccacacgggaccctgtccggaggcgcccggtcccaggcggcctcaatactgaccaagttccaggagcttaaagacgtacaggatgagttgcgaataaaagagaacgaactgagagccctggaggaggaactcgctggcctgaagaacacagcagaaaaatacaggcagctaaaacaacaatgggagatgaagacggaggaagccgacctgctccagaccaaactccagcaatcttcttaccacaagcaacaggaggagttggatgccctgaaaaagactattgaagaatctgaggagacactgaagaataccaaagagatccagcggaaagcagaggagaagtatgaggtcttggaaaataaaatgaaaaatgcagaggccgaaagagagagggagctgaaagacgctcagaaaaaactggattgtgccaaaaccaaagctgatgcatctagtaagaagatgaaagaaaagcaacaagaggtagaggctatcacgctggaacttgaggagctgaagcgcgaacacacctcttacaaacagcaacttgaagcagtcaatgaggccattaagtcttacgaatcccagatcgaggtcatggcagccgaggttgcgaaaaataaagagtccgtgaacaaggcacaggaggaagtcacaaaacaaaaggaagtgataaccgcccaggacacagtgataaaggccaagtatgcggaggtcgcgaagcacaaggagcagaataacgattcacagctcaagattaaagaactcgaccacaatatctccaagcacaaaagggaggccgaagacggtgcggcaaaagtgagtaaaatgctgaaagactatgactggattaacgccgagcgccacttgttcggccagccaaactcggcatatgactttaagacaaacaatcccaaagaggctggccaacgcctgcaaaagctgcaggagatgaaggagaaactgggtcgtaatgtcaatatgcgagccatgaatgtgctgacagaagcagaggagcgctacaatgacctgatgaaaaagaaaagaattgtggaaaatgataaatctaagatccttactacaatcgaggacctcgaccagaagaaaaaccaggccctgaacatcgcgtggcagaaggtcaacaaggactttggatccatcttttctactctgttacccggggcgaacgctatgctggccccccctgagggccagacggtgctggatggactcgaatttaaagtggcgttgggtaatacttggaaagaaaatctgacggagctgtccggtggtcaacgctcactcgtggccctttccctgatcctatctatgctcctgtttaaaccagctcctatctacatcctcgacgaggtggacgcagcgttagatctgagtcacacacagaacattggacaaatgctccgcacccacttcacccacagtcaattcatcgtggtatctttgaaggaaggtatgtttaacaatgctaatgtgctttttaagactaaatttgtagacggagtaagcactgtggccaggttcacacagtgccagaatgggaagatttctaaagaagccaaatcaaaggccaagccgcctaagggggcccatgtcgaggtttag

SEQ ID NO: 309737 - DNA, 3594 bp, Artificial Sequence
  derived and/or modified sequence
atgcacattaagtccatcatcctagagggatttaaatcttacgcgcaacgaaccgaggttaacggctttgaccctttattcaatgccattacagggctgaatggcagcggcaaatccaacattctcgactcaatctgttttctgctgggcatttctaatctgagccaagtaagagcctcaaacctgcaagacctagtgtacaagaatggccaggctggcattacaaaagcctcagttagcatcacctttgacaactccgataaaaaacaatcacccctagggttcgaggtgcacgacgagattactgttaccagacaggtggtcataggaggtcgaaataaatacctgatcaatggggtgaacgccaacaacacacgggtgcaagacctgttctgcagcgttggactgaacgttaacaatccacacttcctgattatgcagggtcgaataactaaagttttgaacatgaaaccccccgagattttgtctatgatcgaagaggcagcagggactcgcatgtatgaatataaaaagattgctgctcaaaaaaccattgagaaaaaggaggctaagctgaaagagattaagaccatcttggaggaggagattaccccaactattcaaaagcttaaggaggaacgtagctcatatcttgagtaccagaaagtaatgagggaaatcgaacaccttagtcggttgtatattgcctaccaatttttactggctgaggatactaaggtgcgctccgctgaagagttgaaggaaatgcaagacaaggttatcaagcttcaagaagagctgagtgagaacgataagaaaatcaaggctctaaatcacgaaatcgaggagctagagaagagaaaggataaggagacaggtggaatcctgaggtcattggaagatgcgttggccgaagcgcagagagttaatacgaaatcgcaaagtgcatttgacttaaagaagaagaatcttgcatgtgaagagagcaagagaaaagaactggaaaagaatatggtcgaagattctaaaacacttgcagccaaggaaaaggaggtgaaaaagatcaccgacgggttgcacgccctgcaggaggctagcaacaaagacgctgaggcattggccgctgcccaacagcatttcaatgcagtgagtgctggactttcctcgaatgaagatggcgctgaggccactctggccggacagatgatggcatgtaaaaacgatatatctaaagcccaaacagaagctaaacaggcacaaatgaaactgaaacacgcgcagcaagaactgaagaacaagcaggcagaagtgaaaaagatggatagcggttacagaaaggatcaagaggctttggaggcggtaaagcgactgaaggagaaactcgaggcagagatgaaaaagctcaattacgaggaaaacaaagaagagtccctactggagaagaggcgtcagttatcccgagacatcggcagactgaaagagacgtatgaagcccttctcgcgcgatttccaaacttaagatttgcctacaaggacccagaaaagaattggaaccgcaattgtgtcaaaggtctcgttgcttctctcatctctgtcaaggatacatctgccacaaccgcccttgaactagtggcaggcgagcgcctgtataacgtcgtcgtagatactgaagtaactggaaagaagctcctggagcgcggggaactgaagcggaggtatactataatccccctcaataaaatctcggcgcggtgcatagcccctgaaactctgcgggtcgcacagaatctcgtaggtcctgacaatgtgcacgtggccttgtcacttgtggagtataagccggagttgcaaaaagctatggaattcgtatttggtacaacttttgtgtgcgacaacatggacaatgccaagaaggtggccttcgataagaggattatgaccaggacagtgacattggggggcgacgtattcgacccccatggcactctctcaggaggcgctcggtcccaggcagcctctattctcaccaaatttcaagaactaaaagatgtgcaggacgaactgcgcattaaggagaacgaactcagagctctcgaggaggaactggccggtcttaagaacacagccgagaaatacaggcagctgaagcagcaatgggagatgaaaacagaggaggccgatttgctgcagacgaagttgcaacaatcaagctaccacaaacagcaggaggaactcgatgccctgaaaaaaaccatcgaggaaagcgaggagactctgaagaacactaaggagatccagagaaaggcggaggagaaatacgaagtcctcgagaacaagatgaagaatgccgaggccgagagagaaagggagttgaaggacgcccagaaaaagctggattgcgctaaaactaaagctgatgcctcatccaagaagatgaaagagaagcaacaggaagtggaggctatcactctagaacttgaggagctcaaacgcgaacacacctcatataaacagcagttggaagcagtaaacgaggccatcaaaagctacgaatctcagattgaagtcatggccgcagaagtcgctaagaataaagaatccgtgaacaaggcccaagaggaggttacaaaacagaaagaggttattaccgctcaagacacagtcatcaaagccaagtacgcagaagtggcgaagcacaaagagcagaataatgacagccagttaaagatcaaggaattagaccacaacataagcaaacataagagggaagctgaggacggtgcagcaaaggtgagtaagatgctgaaggattacgactggattaacgctgagcgccatctgttcgggcagcctaactctgcttacgactttaagacgaataacccaaaggaggccggccagaggctgcaaaagctacaagagatgaaagagaaactcggccggaacgtgaatatgagagcgatgaacgtcttgaccgaagccgaggaacgatataatgatctcatgaaaaaaaaacggatcgtcgagaacgacaagtcgaagattctgaccaccatcgaagatcttgatcagaagaaaaatcaggcccttaacatcgcttggcagaaagttaataaagatttcggatcaatcttctccactcttctgcccggagccaacgctatgctggcccctccggaaggacaaactgtgctcgacggcctggagtttaaagtggcactcggcaacacatggaaggagaacctaaccgagttgtctgggggacaacgcagtctggtggctttgtcactcatactgtcgatgctcctgttcaagcctgcccctatttacattctggacgaggtcgatgccgctttggatttgagccacacacagaacatcgggcaaatgctacgcacccacttcacccactcccagtttatcgtggtgagccttaaggaggggatgtttaataacgctaatgtgcttttcaagactaaattcgttgatggtgtaagcactgttgcaaggttcactcagtgccaaaacgggaaaatcagcaaagaggcaaagtccaaggccaagcctccaaagggggcccacgtcgaggtctag

SEQ ID NO: 309738 - DNA, 3594 bp, Artificial Sequence
  derived and/or modified sequence
atgcacatcaagagcatcatcctggagggcttcaagagctatgcccagaggacagaggtgaatggatttgaccccctcttcaatgccatcaccggcctgaatggcagcggcaagagcaacatcctggacagcatctgcttcctgctgggcatcagcaacctgagccaggtgcgggccagcaacctgcaggacctggtgtacaagaatggccaggccggcatcaccaaggcctctgtgtccatcacctttgacaacagcgacaagaagcagagccccctgggctttgaggtgcatgatgagatcaccgtgacccggcaggtggtgattggaggcaggaacaagtacctgatcaacggggtgaatgccaacaacaccagggtgcaggacctcttctgcagcgtgggcctgaatgtgaacaacccccacttcctgatcatgcagggccgcatcaccaaggtgctgaacatgaagcccccagagatcctgtccatgattgaggaggccgccggcaccaggatgtatgagtacaagaagattgctgcccagaagaccatcgagaagaaggaggccaagctgaaggagatcaagaccatcctggaggaggagatcacccccaccatccagaagctgaaggaggagaggagcagctacctggagtaccagaaggtgatgagagaaattgagcacctgagccggctgtacatcgcctaccagttcctgctggccgaggacaccaaggtgcgctctgctgaggagctgaaggagatgcaggacaaggtgatcaagctgcaggaggagctgtctgaaaatgacaagaagatcaaggccctgaaccatgaaattgaggagctggagaagaggaaggacaaggagaccggcggcatcctgcggagcctggaggatgccctggccgaggcccagagggtgaacaccaagagccagagcgcctttgacctgaagaagaagaacctggcctgtgaggagagcaagaggaaggagctggagaagaacatggtggaggacagcaagaccctggccgccaaggagaaggaggtgaagaagatcacagatggcctgcacgccctgcaggaggccagcaacaaggatgctgaggccctggccgccgcccagcagcacttcaatgctgtgtctgctggcctgagcagcaatgaagatggagctgaggccaccctggccggccagatgatggcctgcaagaatgacatcagcaaggcccagacagaggccaagcaggcccagatgaagctgaagcacgcccagcaggagctgaagaacaagcaggccgaggtgaagaagatggacagcggctacaggaaggaccaggaggccctggaggccgtgaagaggctgaaggagaagctggaggccgagatgaagaagctgaactatgaggagaacaaggaggagagcctgctggagaagaggcggcagctgagccgggacatcggccgcctgaaggagacctatgaggccctgctggcccgcttccccaacctgcgctttgcctacaaggaccctgagaagaactggaacagaaactgtgtgaagggcctggtggccagcctcatctctgtgaaggacaccagcgccaccacagccctggagctggtggccggggagcggctgtacaacgtggtggtggacacagaggtgacaggcaagaagctgctggagcggggggagctgaagaggcgctacaccatcatccccctgaacaagatcagcgcccgctgcatcgcccctgagaccctgcgggtggcccagaacctggtgggccctgacaacgtgcacgtggccctgagcctggtggagtacaagccagagctgcagaaggccatggagtttgtgtttggcaccacctttgtgtgtgacaacatggacaatgccaagaaggtggcctttgacaagaggatcatgaccaggacagtgaccctgggcggagatgtgtttgacccccacggcaccctgagcggcggggcccggagccaggccgccagcatcctgaccaagttccaggagctgaaggatgtgcaggatgagctgcgcatcaaggaaaatgagctgcgggccctggaggaggagctggccggcctgaagaacacagctgagaagtaccggcagctgaagcagcagtgggagatgaagacagaggaggccgacctgctgcagaccaagctgcagcagagcagctaccacaagcagcaggaggagctggatgccctgaagaagaccatcgaggagagcgaggagaccctgaagaacaccaaggagatccagaggaaggccgaggagaagtatgaggtgctggagaacaagatgaagaatgctgaggccgagcgggagcgggagctgaaggatgcccagaagaagctggactgtgccaagaccaaggcagatgccagcagcaagaagatgaaggagaagcagcaggaggtggaggccatcaccctggagctggaggagctgaagcgggagcacaccagctacaagcagcagctggaggccgtgaatgaggccatcaagagctatgagagccagatcgaggtgatggctgctgaggtggccaagaacaaggagagcgtgaacaaggcccaggaggaggtgaccaagcagaaggaggtgatcacagcccaggacaccgtcatcaaggccaagtatgcagaggtggccaagcacaaggagcagaacaatgacagccagctgaagatcaaggagctggaccacaacatcagcaagcacaagcgggaggctgaagatggagctgccaaggtgtccaagatgctgaaggactatgactggatcaatgctgagcggcacctgtttggccagcccaacagcgcctatgacttcaagaccaacaaccccaaggaggccggccagaggctgcagaagctgcaggagatgaaggagaagctgggcagaaatgtgaacatgagggccatgaatgtgctgacagaggccgaggagcgctacaatgacctgatgaagaagaagagaattgtggagaatgacaagagcaagatcctgaccaccatcgaggacctggaccagaagaagaaccaggccctgaacatcgcctggcagaaggtgaacaaggactttggcagcatcttcagcaccctgctgcccggggccaatgccatgctggcccctcctgagggccagacagtgctggatggcctggagttcaaggtggccctgggcaacacctggaaggagaacctgacagagctgagcggcggccagaggagcctggtggccctgagcctcatcctgtccatgctgctcttcaagccagcccccatctacatcctggatgaggtggatgctgccctggacctgagccacacccagaacatcggccagatgctgcggacccacttcacccacagccagttcatcgtggtgtccctgaaggagggcatgttcaacaatgccaacgtgctcttcaagaccaagtttgtggatggagtgtccacagtggcccgcttcacccagtgccagaatggcaagatcagcaaggaggccaagagcaaggccaagccacccaagggggcccacgtggaggtgtag

SEQ ID NO: 309739 - DNA, 4266 bp, Artificial Sequence
  derived and/or modified sequence
gggggctgtagggagggggaccagtggcagagggaccttaggtgatccttagaaataaaggctagcttctgttcgaccttggagtagggcgaagaggtgtagacaggcctggagaagcgaggtaaaagcctgagtaaaagcaagaagttggagaatatgagatacatctcatctctagtaaatacttaaatgacttcccctcctcccggagtcaagcacaattcggggatgcaatgacggacgtaggtgaagacactgcgggaacttacagacaaaactggtttgtggcctgtttgattcctgtcagaggtttgctgacccaagacagtatcgaaaatgcatattaagtcaattattctagagggattcaagtcctatgctcagaggaccgaagtcaatggttttgaccccctcttcaatgctatcactggcttaaatggtagtgggaaatccaacatattggactccatctgctttttgctgggcatctccaacctgtctcaggttcgggcttctaatttacaagatttagtttacaaaaatgggcaggctggtattaccaaagcctctgtgtcaatcacttttgataattctgacaaaaagcaaagtcctttaggatttgaggttcatgatgaaatcacagtaacaaggcaggtggttattggtggtagaaataaatatttaatcaatggagtcaatgccaacaacaccagagtacaggatctcttctgttctgttggccttaatgttaacaaccctcactttctcatcatgcagggccgaattacaaaagtattgaatatgaaacctccagagattttatccatgatagaagaagcagctggaaccaggatgtatgaatacaaaaaaatagctgcacagaaaactatagaaaaaaaggaggctaagctgaaagaaattaagacgatacttgaagaagagattactccaaccattcaaaaattaaaagaggaaagatcgtcctacttggagtaccaaaaagtaatgagagaaatagaacatttgagtcgtttatatattgcttatcagtttttgctggctgaagataccaaagtacgctcagctgaggaattaaaagaaatgcaagataaagttataaagcttcaggaagaattgtctgagaatgataaaaaaataaaagcacttaatcatgaaatagaagaattggaaaaaagaaaagataaggaaactggaggtatacttcgatctttagaagatgctcttgcagaggctcagcgagttaatactaaatctcaaagcgcatttgatctcaagaagaaaaatctggcatgtgaggaaagcaaacgcaaagagctggaaaaaaatatggttgaggactcaaaaactttagcagcaaaggaaaaagaggttaaaaagataacagatggactgcatgcccttcaagaagcaagtaataaagatgctgaagctctggcagctgcacagcagcacttcaatgctgtttccgctggcctgtccagtaatgaagatggagcagaagcaactcttgctggtcaaatgatggcctgtaaaaatgatataagtaaagctcagacagaagccaaacaggctcagatgaagttgaagcatgctcaacaggaattaaagaataaacaagctgaagttaagaagatggatagtggctacaggaaggatcaagaagctctagaagctgtaaaaagacttaaagaaaaacttgaagctgaaatgaaaaagctaaattatgaagaaaataaagaggaaagccttttggaaaagcgcaggcagctgtctcgtgatattggtagattgaaagaaacatatgaagctctattagccagatttcccaatcttcgatttgcatacaaggatccagagaagaactggaatagaaattgtgtgaaaggacttgtggcttctctgattagtgtgaaagacacttctgcaaccacagctttagaattagtggctggagaacgactctacaatgttgtagtagacacagaagttactggtaaaaagctactagaaaggggggaactgaaacgtcgatacactataattccactcaataaaatttcagccagatgtattgcaccagaaactctgagagttgctcagaatcttgttggccctgacaacgttcatgtggctctttccttggttgaatataaaccagaacttcagaaagcaatggagtttgtctttggaacaacatttgtttgtgacaatatggataatgccaaaaaagtggcctttgataagaggataatgactagaactgtaactctcggaggtgatgtgtttgatcctcatgggacattgagtggaggtgctcgatcccaggcagcttccattttaaccaagtttcaagaactcaaagatgttcaggatgaactgagaatcaaagagaatgagctgcgggctctagaagaggaattagcaggtcttaaaaacactgctgaaaagtatcgccaactaaaacagcagtgggagatgaaaactgaagaggcagatttattacaaaccaagctccagcaaagctcatatcacaagcaacaagaagaattagatgcccttaaaaaaaccattgaggaaagtgaggagactttgaaaaacactaaagaaatccaaagaaaagcagaagaaaaatatgaagtattggaaaataaaatgaaaaatgcagaagctgaaagagagcgagaactgaaagatgctcagaaaaaactggattgtgccaaaacaaaggcagatgcatctagcaagaagatgaaagaaaaacaacaggaagttgaagctatcactctggaactggaagagctcaagagagagcatacatcttacaaacaacagcttgaagctgtaaatgaagctatcaaatcctatgaaagtcagattgaagtaatggcagctgaggtggctaaaaataaggagtcagtaaataaagctcaagaagaggtgaccaagcaaaaagaggtgataacagcccaagacactgtaattaaagctaaatatgcagaagtggcaaaacacaaggagcaaaacaatgattctcagcttaaaattaaggaattagaccacaacatcagcaaacataaacgggaggctgaagatggtgctgcaaaggtatccaaaatgttgaaagattatgactggattaatgcagagagacacctctttggccaacccaatagtgcctatgatttcaaaactaacaaccctaaagaagctggtcagagacttcagaagttgcaagaaatgaaggagaaactaggaagaaatgtcaatatgagagctatgaatgtattgacagaagctgaagagcgatacaatgacttgatgaagaagaagagaattgtagaaaatgacaaatccaaaattcttacaactatagaagaccttgaccagaagaaaaaccaagccctaaatattgcatggcaaaaggtgaacaaggactttgggtctattttttctactcttttgcctggtgctaatgctatgcttgcaccaccagagggtcaaactgttttggatggtctggagttcaaggttgccttgggaaatacctggaaagaaaacctaactgaacttagtggtggtcagaggtctttagtggccttgtcattaatactgtccatgcttctcttcaaacctgctccaatttatatccttgatgaggtagatgcagccttggatctttctcatacccaaaacattggacagatgctgcgtactcatttcacacattctcagttcattgtggtgtcactaaaagaaggtatgttcaacaatgcaaacgttcttttcaaaaccaagtttgtggatggtgtttctacagtagccagatttactcaatgtcaaaatggaaagatttcaaaggaagcaaaatccaaggcaaaaccacccaaaggagcacatgtggaagtttaaactacaaagttatttcttcatcttgacctgtttttttaaatgtaaacttttaaggacttgagataactaatttgtttatatacaaaaattaatgttactgtgttacttaacccatgttttctctttatataatcacttatcgcttacaaatgagcatatattcctcatctcttaactagtctaattatggtccaattattgtggttgtgattttatgcatatcatcaaatgtttttttcttatgcgggtcttttatatattagggatcctgagatacccgattctatatgtaaaagctaatatacaaaaaagcagattaaattacatgataaatgt

SEQ ID NO: 309740 - DNA, 5909 bp, Artificial Sequence
  derived and/or modified sequence
cggcgcgggtgttgagagcggtgtggcaggtgttgtagccgctatggtgaagttcgctttgtagcggccccggctagagagttgttctgttccctgcctttgtgacccggaggagcttttggggtgcgtcaagcccctggcctgaggcagcgaactggtttgtggcctgtttgattcctgtcagaggtttgctgacccaagacagtatcgaaaatgcatattaagtcaattattctagagggattcaagtcctatgctcagaggaccgaagtcaatggttttgaccccctcttcaatgctatcactggcttaaatggtagtgggaaatccaacatattggactccatctgctttttgctgggcatctccaacctgtctcaggttcgggcttctaatttacaagatttagtttacaaaaatgggcaggctggtattaccaaagcctctgtgtcaatcacttttgataattctgacaaaaagcaaagtcctttaggatttgaggttcatgatgaaatcacagtaacaaggcaggtggttattggtggtagaaataaatatttaatcaatggagtcaatgccaacaacaccagagtacaggatctcttctgttctgttggccttaatgttaacaaccctcactttctcatcatgcagggccgaattacaaaagtattgaatatgaaacctccagagattttatccatgatagaagaagcagctggaaccaggatgtatgaatacaaaaaaatagctgcacagaaaactatagaaaaaaaggaggctaagctgaaagaaattaagacgatacttgaagaagagattactccaaccattcaaaaattaaaagaggaaagatcgtcctacttggagtaccaaaaagtaatgagagaaatagaacatttgagtcgtttatatattgcttatcagtttttgctggctgaagataccaaagtacgctcagctgaggaattaaaagaaatgcaagataaagttataaagcttcaggaagaattgtctgagaatgataaaaaaataaaagcacttaatcatgaaatagaagaattggaaaaaagaaaagataaggaaactggaggtatacttcgatctttagaagatgctcttgcagaggctcagcgagttaatactaaatctcaaagcgcatttgatctcaagaagaaaaatctggcatgtgaggaaagcaaacgcaaagagctggaaaaaaatatggttgaggactcaaaaactttagcagcaaaggaaaaagaggttaaaaagataacagatggactgcatgcccttcaagaagcaagtaataaagatgctgaagctctggcagctgcacagcagcacttcaatgctgtttccgctggcctgtccagtaatgaagatggagcagaagcaactcttgctggtcaaatgatggcctgtaaaaatgatataagtaaagctcagacagaagccaaacaggctcagatgaagttgaagcatgctcaacaggaattaaagaataaacaagctgaagttaagaagatggatagtggctacaggaaggatcaagaagctctagaagctgtaaaaagacttaaagaaaaacttgaagctgaaatgaaaaagctaaattatgaagaaaataaagaggaaagccttttggaaaagcgcaggcagctgtctcgtgatattggtagattgaaagaaacatatgaagctctattagccagatttcccaatcttcgatttgcatacaaggatccagagaagaactggaatagaaattgtgtgaaaggacttgtggcttctctgattagtgtgaaagacacttctgcaaccacagctttagaattagtggctggagaacgactctacaatgttgtagtagacacagaagttactggtaaaaagctactagaaaggggggaactgaaacgtcgatacactataattccactcaataaaatttcagccagatgtattgcaccagaaactctgagagttgctcagaatcttgttggccctgacaacgttcatgtggctctttccttggttgaatataaaccagaacttcagaaagcaatggagtttgtctttggaacaacatttgtttgtgacaatatggataatgccaaaaaagtggcctttgataagaggataatgactagaactgtaactctcggaggtgatgtgtttgatcctcatgggacattgagtggaggtgctcgatcccaggcagcttccattttaaccaagtttcaagaactcaaagatgttcaggatgaactgagaatcaaagagaatgagctgcgggctctagaagaggaattagcaggtcttaaaaacactgctgaaaagtatcgccaactaaaacagcagtgggagatgaaaactgaagaggcagatttattacaaaccaagctccagcaaagctcatatcacaagcaacaagaagaattagatgcccttaaaaaaaccattgaggaaagtgaggagactttgaaaaacactaaagaaatccaaagaaaagcagaagaaaaatatgaagtattggaaaataaaatgaaaaatgcagaagctgaaagagagcgagaactgaaagatgctcagaaaaaactggattgtgccaaaacaaaggcagatgcatctagcaagaagatgaaagaaaaacaacaggaagttgaagctatcactctggaactggaagagctcaagagagagcatacatcttacaaacaacagcttgaagctgtaaatgaagctatcaaatcctatgaaagtcagattgaagtaatggcagctgaggtggctaaaaataaggagtcagtaaataaagctcaagaagaggtgaccaagcaaaaagaggtgataacagcccaagacactgtaattaaagctaaatatgcagaagtggcaaaacacaaggagcaaaacaatgattctcagcttaaaattaaggaattagaccacaacatcagcaaacataaacgggaggctgaagatggtgctgcaaaggtatccaaaatgttgaaagattatgactggattaatgcagagagacacctctttggccaacccaatagtgcctatgatttcaaaactaacaaccctaaagaagctggtcagagacttcagaagttgcaagaaatgaaggagaaactaggaagaaatgtcaatatgagagctatgaatgtattgacagaagctgaagagcgatacaatgacttgatgaagaagaagagaattgtagaaaatgacaaatccaaaattcttacaactatagaagaccttgaccagaagaaaaaccaagccctaaatattgcatggcaaaaggtgaacaaggactttgggtctattttttctactcttttgcctggtgctaatgctatgcttgcaccaccagagggtcaaactgttttggatggtctggagttcaaggttgccttgggaaatacctggaaagaaaacctaactgaacttagtggtggtcagaggtctttagtggccttgtcattaatactgtccatgcttctcttcaaacctgctccaatttatatccttgatgaggtagatgcagccttggatctttctcatacccaaaacattggacagatgctgcgtactcatttcacacattctcagttcattgtggtgtcactaaaagaaggtatgttcaacaatgcaaacgttcttttcaaaaccaagtttgtggatggtgtttctacagtagccagatttactcaatgtcaaaatggaaagatttcaaaggaagcaaaatccaaggcaaaaccacccaaaggagcacatgtggaagtttaaactacaaagttatttcttcatcttgacctgtttttttaaatgtaaacttttaaggacttgagataactaatttgtttatatacaaaaattaatgttactgtgttacttaacccatgttttctctttatataatcacttatcgcttacaaatgagcatatattcctcatctcttaactagtctaattatggtccaattattgtggttgtgattttatgcatatcatcaaatgtttttttcttatgcgggtcttttatatattagggatcctgagatacccgattctatatgtaaaagctaatatacaaaaaagcagattaaattacatgataaatgtagctgatcatcagtgtttaattgatttaattcctaaggcaatattaatgtgttttctaaagtcattcaggtaaggaagaattataaatcaggtaactggaccaacaaagggaacacatataaagctattatgcatgcatggagccgtttgaggctagttttttaaggccacaactccagacccctgatttagactgagataggaaacagatcttgaaagaatccttattttaatgatacatgaatatcatgttcctatacgcttaataattggtctctacgttttaatgatacatgaatatcatgttcctatacgcttaataattggtctctacgactttaatgtttttgtttttttaagctgtgtaagtatttttaaatcaaagcttaggaggtgtgttgcgtggtactatctgctgcaaatttatctgaagtttgttaatattttccaagatttttgtcagccttttcataatccagtcattaacaacctattggtaaacaagaatgtaggtgccagtagactaaaccaaatttatttttccctgagtctgatatatatatgtataaatataaataactcaatccatctgttccaccaaaataactcaaaagttggatgattatttgtcttccgctttccagttcaaagggatgaaattcctttagaacttgaaagatgacactagcgaacaccatgagaatactgtctacagtttttggtacgtcatcactagaacagtgaccccaaactgaatcatgaaaggtctgacatgatgtaatctgatcttccatgtgttattttggccccacatctcttcttgattttttagtcttatttccttagtgttattatcatacttcccctgatatatggccgtacttcctggccctgggcttgacatttcccacccttcattctccatacatatgagatgtcagaaaacatgcagtaattgatattatgggacacattggaaaggattgaatctggaattagttctgtccactgtggaggggagaggaaataatgctgtaaatgttgagttacagaaagtccaatgtcaaatatagtttttttgtttcctttcaaatgtattacagactgtgccaaaacagttaccaattcacactgtcaatattaaagtataccatagtatacaaattagtcagtacttgctgttaattttaatatttctgatttaacagttagttattaagtggtacttcattgctgttttagccaacgttttaaaaataatttgggagtttgactattttggcttacgtactcatttccttttctctgctaaaaatgttttgcttgtgtgcgttcctgatttttgtcttgtataatcttgatctttgaaaaccctcaaacatgtattaaattgttgtaactttttttcattagagggaagacattaaggggattggggacatttgtttcacacatctgcagtaatatgagttaactaatatttaacaagctctttctttacattagctgctgttctcatttgtatgtattgtcatatttaatcctcagagtaacctagtgaggtaaatactgttgttgtcagcatggtgtaatcgaggaattgagtgagttgagcagaaaagttaggaaacttgctcagggtgataatacagttaggagtgtcagggcccatggacaaatcttgtcagtctccagaacctaagatatactacgtcactgacagcttgaacatttgtatttattgtacagaataaatttaagaaaaa

SEQ ID NO: 309741 - DNA, 3594 bp, Artificial Sequence
  derived and/or modified sequence
atgcacatcaagagcatcatcctggagggcttcaagagctacgcccagcggacagaggttaacggttttgaccctctctttaatgctatcacaggactcaatggatctggtaaatcaaacatcctagattctatctgtttccttcttggcatcagtaacttgtcccaggtgcgagcatccaatctgcaggatctcgtttacaagaatggccaggcaggaatcactaaagcctctgtctccatcaccttcgacaactccgacaagaagcaaagtccactggggttcgaagtgcacgacgaaatcactgttaccagacaagtcgtgatcgggggccgcaacaagtatctgatcaacggcgtgaacgccaacaatacacgagtccaggatttgttttgtagcgtcggcttaaatgttaataacccccattttctgattatgcaggggcgtattaccaaggtcttgaacatgaaaccgccggaaattttatccatgattgaggaggcagctggtaccaggatgtacgaatacaagaagattgccgcacagaaaactatagaaaaaaaggaggctaagttgaaggagatcaagactattctggaagaagagataacacctactattcagaagctgaaagaagagcgtagtagctacctggagtatcagaaagttatgagggagatcgagcatcttagtcgcctatatatcgcctatcaattcctgttggctgaggacaccaaagtgagaagtgccgaggagctcaaggaaatgcaggataaagtgatcaagttacaggaggaactttcagagaatgacaagaaaatcaaggctcttaaccacgagatagaagaactggagaagcgtaaggataaggaaactggcggaattctgaggagccttgaagacgctttggccgaggcccaacgggtcaacacaaaatcccagagcgcatttgacctgaagaaaaagaatctggcctgtgaagaatcaaaaaggaaagagctggagaagaatatggttgaagacagcaagactcttgccgctaaagaaaaggaagtgaaaaagatcacggatggactgcacgcactgcaggaagcaagcaacaaggacgctgaagcactcgcagccgctcagcagcattttaatgccgtaagcgccggactgagcagcaacgaggatggcgcagaggcaactctcgctggtcagatgatggcttgcaaaaatgatatttccaaagcgcagacagaagccaaacaggctcaaatgaagcttaagcatgctcaacaagagctgaaaaacaagcaggccgaagtgaaaaaaatggattccggatatcggaaggatcaggaagcattggaagccgtgaaacgcctcaaagagaaactcgaggctgagatgaagaaactgaattatgaggaaaacaaggaggagtcactgctagaaaagaggagacagttgtctagagacatcggtcggctcaaggaaacttacgaggcgctactggcccggttcccgaacctcaggtttgcgtacaaggacccagaaaaaaattggaacagaaactgtgtgaaaggcttggtggcatctctaatctcagtcaaagatacatcggcgaccaccgcactggaacttgtggccggagagcggctgtacaacgtcgtggtagatactgaagtgacgggaaagaagctgttagagcggggtgagctgaaacgacgatatactattatcccacttaataagattagcgctcgctgcatcgcccccgaaaccctgcgcgtcgctcagaacctagtcggcccagataacgtgcacgttgctctgagtttggtcgaatacaaaccagaactccagaaggccatggaattcgtgtttggcactaccttcgtctgtgataatatggataacgccaagaaggtggccttcgataaacggataatgacccgcaccgtgactctggggggggatgttttcgatccacatggaacgttgtctgggggtgcaaggagtcaggcagcctcaattctcaccaaattccaggagctaaaggatgtgcaagatgaactgagaataaaagaaaatgaattaagggccctcgaagaggagcttgcgggactcaaaaacacagctgagaagtatcgccaactcaaacagcagtgggagatgaaaacagaggaagcggacttgctgcagacaaaactacagcagtcttcataccacaagcagcaggaggagttggacgccttgaagaaaactatagaagagagtgaagagacccttaagaatacaaaggaaatccaaaggaaggccgaagaaaagtatgaagtcctcgaaaacaaaatgaagaatgccgaggcagagagagagcgggagctcaaggacgcgcagaagaaattagactgcgccaaaaccaaggccgatgcatcatccaaaaaaatgaaggagaaacagcaggaggtggaagcgattacactggaactggaagagctgaagcgagaacacacttcttataagcaacaactggaagcagtcaatgaagccattaagagttacgaatcacagattgaggtcatggccgcggaagtcgccaagaacaaagaatctgtgaacaaggcgcaggaggaagtgacgaagcagaaggaagtgatcaccgctcaagataccgtaatcaaggccaagtacgccgaggtggcgaagcacaaggaacagaacaacgatagtcagctgaagataaaagaactggatcacaatatcagcaagcataaacgtgaagccgaggatggcgctgctaaggttagcaaaatgcttaaagattatgactggattaatgcggaaagacacctctttggacagccgaattcagcctacgattttaagacaaacaatcctaaggaagctgggcagcgcctgcaaaagcttcaggagatgaaagaaaaacttggccgtaatgtaaatatgagggcaatgaacgttcttacagaggctgaagaaagatacaacgatctaatgaagaagaagaggattgttgaaaacgataaaagcaaaattttgacaaccattgaagatctggaccaaaagaagaatcaggctctcaacatcgcttggcagaaggtgaacaaggatttcgggagcatctttagcactctgttgcctggcgccaatgctatgctcgctcctcctgagggacagacagttttagacggacttgagtttaaagttgctcttggaaatacttggaaagagaacttgacagagctttctggcgggcaacggtcgcttgttgctctatctctgatcctcagtatgctactgttcaagcccgctcccatttacatcctcgacgaagtcgatgcagccctcgacctcagtcacacccaaaacatcggccagatgttgagaacacatttcacccactctcaatttattgtggtgtccctcaaggaagggatgttcaataacgctaatgtgctgttcaaaaccaaattcgtagacggggtgtccacggtggccaggtttacccagtgccaaaacggtaaaatcagtaaggaggccaaaagcaaggccaaaccccctaagggtgctcacgtcgaagtgtag

SEQ ID NO: 309742 - DNA, 3594 bp, Artificial Sequence
  derived and/or modified sequence
atgcacatcaagagcatcatcctggagggcttcaagagctacgcccagagaacagaagtgaatgggttcgatccactgtttaacgcgattaccggactgaatgggagtggcaagtccaatatactcgactcaatttgtttcctgctgggaattagtaatctctctcaggttcgggcctcaaacttgcaggacctggtgtataaaaacggacaggctggtatcactaaagctagcgtttccattactttcgataactcagataaaaagcagtcccccctcggatttgaagtgcacgatgaaatcacggtaacacgtcaggtggtgatcggcggaagaaacaaatatctcatcaacggtgtgaacgccaacaacacacgtgtgcaggacctcttctgcagcgtcgggttgaacgtcaataacccgcatttccttattatgcaagggagaattacaaaggttctgaacatgaagcctcctgagattctgagtatgattgaagaggcagccggcactaggatgtacgaatacaaaaagattgccgcccagaaaacaatcgagaagaaggaggccaagttgaaagagattaaaaccattcttgaagaggaaatcacacccaccattcagaagctcaaggaggaacgatccagctatctggaataccagaaggtgatgagggagattgaacacctgtcgcgtttgtacattgcctaccaattcttgttggctgaggacactaaagtgcggagtgccgaggaactgaaagagatgcaggataaagtcatcaagctgcaggaagagctgtctgagaatgataaaaagattaaagcactgaaccacgagatagaagagctagagaagagaaaggataaagaaactggcgggattttacgaagccttgaggatgccctcgcagaagcccagcgagtgaacacgaaatctcaatctgccttcgacttgaagaaaaagaaccttgcttgcgaggaaagcaaaaggaaggaacttgaaaagaacatggttgaggatagcaaaaccctggccgctaaagagaaagaagtgaagaaaataactgatggactgcacgccctgcaagaggccagcaacaaggatgcagaagccttggccgcggcccaacaacatttcaatgctgtgagtgcgggtctttccagcaatgaggacggtgcggaagctactcttgctggtcaaatgatggcgtgcaaaaacgatatcagtaaagcgcagactgaggcaaagcaggcccagatgaagttgaagcatgcccaacaggaactgaagaacaaacaagccgaagtgaaaaaaatggattcggggtatcggaaagatcaggaggctcttgaagcagtgaaacggctgaaagaaaagctggaggcggagatgaagaagctaaattatgaagagaataaagaagagtctctgctcgaaaaacggcgtcaactgagccgggatattggtaggcttaaagaaacatatgaagctcttctagctcggtttcccaacctgcgtttcgcctacaaagaccccgaaaaaaattggaacagaaattgtgtaaaggggttggtggcaagcctcatcagcgtgaaagatacctccgcaacaaccgcgctcgaactcgtggcaggagagagactgtataacgtcgttgtcgatacagaagtgacagggaaaaagttgctcgaaaggggcgaactcaaacgccgatataccataatcccactcaataagattagtgcccgctgtattgccccagagacccttagggtcgcacagaacctagtcggtccggacaatgtgcatgttgccctatcattggttgaatacaaacccgagctgcagaaagccatggagttcgttttcggcaccacattcgtgtgtgacaatatggacaacgccaaaaaagtggcttttgataaaagaattatgacacgcaccgtgacgctcgggggggatgtctttgaccctcatggtaccctttctggcggggcaaggtcccaggccgccagcattctcaccaaattccaagaattgaaagacgtgcaggacgagctacgtattaaggaaaatgagctgcgggccctggaggaagagctggcaggcctgaagaatacagccgaaaagtaccgccagctgaaacagcagtgggagatgaaaaccgaagaagccgacctgttgcagaccaagctgcaacagagctcataccacaagcaacaggaggagttggacgccctgaagaaaaccattgaggagagcgaagagacactcaaaaacacaaaggagattcagcggaaggcggaggagaaatatgaggttttagagaataagatgaagaacgcagaagccgaacgagaacgcgagttgaaagatgcacaaaagaaactcgattgtgctaaaaccaaggcagacgcatcatctaaaaagatgaaagaaaaacagcaggaggtcgaggccataaccctagaactagaggagctgaagagagaacatacctcttataagcaacagctggaggccgtcaacgaagcaataaagagctacgagtcgcagatcgaagtaatggcagctgaggttgccaaaaataaagaatccgtcaacaaagcacaggaggaggtgacaaaacagaaagaagtgattacagcacaagacaccgtgattaaggcaaaatacgccgaagtggctaaacacaaagagcagaataacgactcacagctcaagattaaagaactggatcataatattagcaagcataaacgcgaagccgaagatggtgccgccaaagtgtctaagatgctcaaggattatgactggattaacgccgagcgacacttgtttgggcaacccaattccgcatacgactttaagactaataacccaaaagaagccggccagcggttgcaaaagctgcaggaaatgaaagagaaactcggcagaaatgttaacatgagggccatgaatgttctcactgaagccgaggagcggtataacgacctgatgaagaaaaagagaattgtagagaatgacaaatccaaaattctcaccaccatcgaggatctagatcagaagaaaaaccaagccctaaatattgcctggcagaaggtcaacaaggattttggtagcatctttagcaccttactccctggagccaacgcaatgttggcccctccagaaggtcagactgtgcttgatggtttagagtttaaggtggcgctaggaaacacatggaaggagaacctcactgagctctcaggcggccagcggagcttggtggcactatcactgatactaagtatgctcctgttcaagccagctcccatttacattctggacgaagtggatgcagctctggacctgtcgcacacgcagaacatcggacaaatgctgaggactcattttactcatagtcaatttatcgtagtctctctgaaggaaggaatgtttaacaacgcgaacgtgctgtttaaaacgaagtttgtcgatggagtatcgaccgttgcccgatttacgcagtgtcaaaatggcaagatttcaaaggaagccaagtccaaagccaaaccccctaagggcgcccacgtcgaggtatag

SEQ ID NO: 309743 - DNA, 3594 bp, Artificial Sequence
  derived and/or modified sequence
atgcacatcaagagcatcatcctggagggcttcaagagctacgcccagaggacagaagtgaacggcttcgatcccctctttaatgccataacaggcctaaacggttccgggaagtcaaatatcctcgattcaatttgtttcttacttgggatctcaaacttgtctcaggtgcgggcctccaatttacaggatctggtgtacaaaaacggacaggcaggaataaccaaagctagcgttagtattactttcgacaacagtgataagaagcagtcccccttgggcttcgaggtacatgacgagattactgtgacccgccaagtagtgattggcggtcggaacaagtacctcatcaatggggtgaacgccaataatactagagtgcaggatttgttttgctccgtaggcctgaacgtcaataatccccactttctcatcatgcaagggaggatcactaaagttctgaatatgaagcctccggagattctcagtatgatagaagaagcagctgggacacgaatgtacgaatataagaagatcgctgcccagaagacaatcgaaaaaaaggaagccaagttaaaagagatcaagacaatcttagaggaagagattacaccgacaatccaaaaactgaaagaagaacgctcatcttatctggaataccagaaggttatgcgcgagattgaacatctgtcgaggctgtatatcgcataccaatttctgttggccgaagatacaaaagtacggagcgccgaggagcttaaagaaatgcaggataaggtcattaaactgcaggaggagttaagcgagaacgacaaaaagataaaagccctgaatcacgagatcgaggagctcgaaaaacggaaagataaagaaacaggcggcatcctgcgcagtttagaggatgccctcgcagaggcccagcgggttaacaccaaatctcagtcagctttcgaccttaagaagaagaatctggcatgtgaagaaagcaaaagaaaggagctggagaaaaatatggtggaggactcaaagactctcgctgccaaggaaaaggaggtcaagaaaattacggacggcttacacgcactgcaagaggccagcaataaggacgcagaggccctggctgcggcacaacagcacttcaatgctgtgagcgccgggctgtcctcaaatgaagatggtgccgaagccaccttggcaggccagatgatggcctgcaaaaacgatatctccaaagcacaaaccgaagcaaaacaggcccagatgaagttgaaacatgcccagcaagaactgaaaaacaagcaggcggaggtaaaaaagatggactctggctatagaaaggaccaggaagctctggaagcagtgaaacggctcaaagagaagctcgaggcagaaatgaagaaactcaactatgaggagaacaaagaagagtctttgcttgagaaacgcagacagctcagccgcgatataggtcgcttaaaggagacatacgaagctctgctggctcggttccctaaccttcgcttcgcgtacaaggatcccgaaaagaattggaacagaaattgtgtgaaggggctcgttgctagcctgattagcgtaaaggatacttccgccaccacagccctggaactggtagctggcgagaggctgtacaatgtcgtggtagataccgaggttactggcaagaagttgctggagcgtggtgaactgaagcgcaggtacactataattccacttaataaaatatctgcccggtgtattgcccccgagacacttagggtcgcgcaaaatctggtgggaccggacaacgttcacgttgctctctcactcgtggaatacaagcctgagttgcagaaagcaatggagtttgtgttcggcacaaccttcgtctgcgataacatggacaacgctaagaaggtcgcatttgataagagaattatgacccgaaccgttaccctcggcggggatgtgtttgatccccacggaacgctgtctgggggagccaggagccaggccgcctccattcttacaaaattccaggagctgaaggacgtccaggatgagttgagaattaaagaaaacgaactgcgggcactggaggaagagttggccggactaaagaacacggcagagaagtatcgacagttgaagcagcagtgggagatgaagaccgaggaagccgacctgctccaaaccaagctccaacagtctagttaccataaacagcaggaagaactagacgccttgaaaaagaccattgaagaatctgaggagacactaaaaaacaccaaagagatccagcgcaaagccgaggaaaagtatgaggttctggagaataagatgaagaatgccgaagctgagcgcgaacgagagctgaaagacgcccagaagaagctcgactgcgcaaagaccaaggccgacgcgagttccaagaagatgaaggagaaacaacaggaggtggaggctataactctggagttggaagaactcaaaagggagcacacctcctataagcagcaactcgaggccgttaatgaagccataaagtcttacgaatctcaaatcgaagttatggcagcagaagtcgctaaaaacaaggagtcagttaataaagcccaggaggaagtaaccaaacagaaggaggtgattaccgcgcaggatactgtcatcaaggcgaaatacgcagaggtggctaagcacaaggagcagaacaacgattcccagctaaagattaaggaactggatcataacattagcaaacacaagagggaggccgaggacggggctgccaaagtgtcaaagatgcttaaggactatgactggattaatgctgagcgacatctgttcgggcagccaaacagcgcctatgatttcaagaccaacaaccctaaggaagctggacagcggttgcagaagctacaggaaatgaaggagaagttgggcagaaacgtgaatatgcgagccatgaatgtgctcacggaagcagaggagagatacaacgatctcatgaaaaagaagcgcatcgttgagaatgataagagtaaaattctgaccaccatcgaagatcttgaccaaaaaaagaaccaggccctgaacattgcctggcaaaaggtcaacaaggacttcgggagcattttctccactttactgccaggcgcaaatgccatgctcgccccgccagagggacagacagtgttggacggactggaattcaaggtggcactgggtaacacatggaaggagaatttgacagaactctcagggggacaacgctcattggtcgccctcagcctcatcttgtcaatgctcctgttcaaaccagcccctatttatatcctggatgaggtagatgctgctctcgacctgtcacatacccagaatatcggccagatgcttcgaactcatttcactcacagccaatttatcgttgtctccttaaaggagggaatgtttaacaacgctaacgtcctgtttaaaactaaatttgtggatggtgtatctacagtggccagattcacgcaatgccagaatggcaaaatttcaaaggaagcaaagtcaaaagccaagcctcccaagggcgcccatgttgaggtctag

SEQ ID NO: 309744 - DNA, 3594 bp, Artificial Sequence
  derived and/or modified sequence
atgcatattaaaagtattatccttgagggattcaaatcatatgcacagagaactgaggtcaatggattcgaccccctcttcaatgccattacgggcctgaacggcagcggtaagtctaacattctggacagtatttgtttcttactgggaatctccaacctgtcacaggtgcgtgcgtcaaatctgcaggatctcgtgtataagaatgggcaggctggcatcaccaaggccagcgtcagcattaccttcgataattctgataaaaaacagtcaccactggggtttgaggtgcacgatgaaattacagttacgcgccaagtggttatcggtggaaggaataaatatctgatcaatggggtaaatgccaataatactcgcgtgcaggaccttttctgctcggtgggcctgaacgtcaacaatcctcactttctgattatgcaaggaagaatcactaaagtgctaaatatgaagcccccagagatcctgtcgatgatcgaggaagcagcaggcaccaggatgtacgaatataaaaagatcgcggcacaaaaaactattgagaagaaggaagccaagcttaaggagataaaaaccattctcgaagaagagatcacccctaccatccagaagctcaaggaagaacgctctagttacctggagtaccagaaagtgatgagagaaattgaacacctttctcggctgtacattgcctatcagtttctgctagccgaagacactaaggtacggtcagcagaggagttgaaggagatgcaagataaggtgatcaagctgcaggaggagctctctgagaacgataaaaagatcaaggctctcaaccatgagattgaagagcttgaaaaacgcaaagacaaagaaactggtggcatcctgcgctctctggaggacgccctagccgaggctcagcgcgtcaatacaaaatcccagtcggcattcgacctcaagaagaaaaatctggcatgcgaagagagcaagcggaaggagctggaaaagaacatggtggaagattcaaagacattggccgcaaaagaaaaagaagtgaagaagattactgacggcctgcacgccctacaggaagcttcgaacaaggacgccgaagctctggctgcggcacagcagcactttaacgccgtcagcgcaggcctgtcctcaaatgaagacggtgcggaggccacactagcaggccagatgatggcctgcaagaacgatatttccaaagcccagaccgaggccaagcaagctcagatgaaactgaagcatgcccaacaggagctcaaaaataagcaggcggaagtcaaaaagatggattcaggctacaggaaagaccaggaagcacttgaggccgtgaagcgattaaaagagaagctggaggccgaaatgaagaagctgaactatgaggaaaacaaggaggagtctctgctggaaaagcggagacaactatctcgcgacatcgggcgactgaaagagacgtacgaggccctcttagcccgatttccgaacctgaggtttgcatataaagaccctgagaaaaactggaacaggaattgtgtcaagggcttggtcgcatcactgatatcggtcaaggacaccagtgccacaaccgcgctggaactggtcgccggagaacgtctgtataacgtggtggtcgacacggaagtgacaggaaagaaattactggaacggggtgagctgaaaagaagatacactatcatcccgctaaacaaaatttccgccagatgcattgctccagagaccctgagagttgcccaaaacttggtcggcccagataatgttcatgtggccctctctctggttgagtacaaaccagagttgcaaaaagcaatggaatttgtctttggcaccacattcgtatgcgataacatggacaatgccaaaaaggtcgcttttgacaaaagaattatgacacgcaccgtgaccttggggggagacgtatttgatccccatgggacactctcggggggagccagaagtcaggcagcctccatcctgactaagtttcaggaattgaaggatgtgcaggatgagctgcggattaaggaaaacgaactgcgtgcgcttgaagaagagctcgcagggctcaagaatacggcagaaaagtatcgccaactgaagcagcaatgggagatgaagaccgaagaggcagatttgctccaaacgaaactgcagcagtccagttaccataagcagcaggaagaactcgatgccctcaaaaagacaatcgaggagagtgaggagaccttaaagaataccaaagagattcaaaggaaggcagaggagaagtatgaggttctggagaacaagatgaagaacgccgaggcagaacgggaacgcgaactaaaggatgcacagaaaaagctcgattgcgctaagacaaaggcagatgcctccagcaaaaagatgaaagagaagcagcaagaagttgaagcaataacgctcgagctggaggagcttaagagagaacacacgagctacaagcagcagctggaggccgttaatgaagctatcaaatcatacgaaagccagatcgaagtgatggccgctgaggtagccaagaacaaagagagtgtcaacaaagcacaggaagaagtgaccaagcaaaaagaggtgattacggcccaggataccgtgatcaaggccaaatacgcggaggtggcaaaacacaaggagcagaataatgacagccaactcaagatcaaggagcttgaccataacatttctaagcacaaacgtgaggcagaggatggtgccgctaaggtgagtaagatgcttaaagactacgattggatcaatgccgaaaggcacctatttggccagccaaatagtgcatacgacttcaagaccaataacccgaaagaggctggccagcgtctgcaaaagctgcaggagatgaaagaaaaactcggacggaacgtgaatatgcgggctatgaacgttctaaccgaagccgaggagaggtacaatgatcttatgaagaaaaagcggatcgtggagaacgacaaaagtaaaatccttaccaccattgaggatcttgaccagaaaaagaatcaagctttgaacattgcttggcagaaagtgaataaggattttgggagcattttcagcacccttcttcccggtgcaaacgctatgttggctcccccagaggggcagaccgtgttggatggactggagtttaaggtggccctgggaaatacttggaaagaaaatctcactgaactctccgggggacagagaagcctggttgctctctctctcatactgagtatgctgctcttcaaacctgcccctatttacattctagacgaggtggatgccgcactggatttatcgcacactcagaatattgggcagatgctccgcacacatttcactcactcacagttcatagtcgtcagtctgaaggagggaatgttcaacaatgccaacgtcctatttaagacgaagttcgtcgacggggtgtcaactgtggctcgcttcactcagtgtcaaaatggcaagatatccaaggaggcaaagagtaaggccaagccgcctaagggtgcacatgtcgaggtgtag

SEQ ID NO: 309745 - DNA, 3594 bp, Artificial Sequence
  derived and/or modified sequence
atgcacataaaaagcattatactggagggttttaaaagctatgctcagcgaacagaggtcaatggcttcgaccctttgtttaacgccatcactgggctgaacggcagtggaaagagtaatatactcgactctatctgttttctcttgggtatcagcaatctgtcccaggtgagggcatccaatctacaggatctggtctataaaaacggccaggccggaatcactaaagcaagcgtatcaatcaccttcgacaactcagataaaaaacagtcgcctcttgggtttgaggtgcatgatgagatcacagtgacccgtcaggtggtgattggcggtcggaacaagtacttaatcaacggcgtaaacgcaaacaatacacgggtacaggacctgttctgtagcgttggactcaacgtgaataaccctcacttcctgattatgcagggacggattactaaggtactcaatatgaaaccccctgaaattctttcaatgatcgaggaggctgccggaactaggatgtacgagtacaaaaaaattgcggcacagaaaactatagaaaagaaagaggccaagttaaaggagattaaaaccattctggaggaagagattacaccgaccatacaaaaattaaaagaggagcggagctcatatctcgaatatcaaaaagttatgcgggagattgaacatctgtcaagactctatatagcatatcagtttctcctggctgaagataccaaggtgcgatcagccgaagagttgaaagagatgcaagataaggttatcaagctgcaagaagagctgtcagagaacgataagaaaattaaagcactaaaccacgagatcgaggagctggagaaacgcaaagacaaggagaccggcggtatactgagatctctcgaagatgccctggctgaggcccaacgcgttaacaccaagagccagagcgctttcgacctgaagaagaaaaacttggcttgtgaagagtccaagaggaaggagttagaaaagaacatggtagaagacagcaagacactggcggctaaagagaaagaggtgaaaaagataacagacgggctccatgcactccaggaagcaagtaataaagatgccgaggcactggccgctgcacagcaacactttaacgctgtctcggccggacttagttcaaacgaggatggggcagaggctacactagcaggacagatgatggcctgcaagaatgacatctctaaagctcagaccgaggctaagcaggcccagatgaagctcaagcatgcccagcaggaactcaaaaacaagcaagcggaggtgaagaaaatggactctgggtatcgcaaggaccaggaagcacttgaggctgtcaagcggcttaaggaaaaactggaggccgagatgaaaaaactgaactatgaggaaaacaaggaagagtccctcttggagaagcgcagacagctcagccgcgacatagggaggttgaaagaaacctacgaggccctactcgccagatttcctaacctgagattcgcctataaggacccagaaaaaaattggaataggaactgtgtgaaaggccttgtcgcgagtctgatctcagtgaaagatacctcagccacaactgctctcgagcttgtggccggagaacggctttataacgtggtcgtcgacacagaggtcactggaaaaaagcttctagagcggggagagctgaagcgcagatatacgatcataccactaaacaaaatttctgccaggtgcattgccccagaaacacttcgcgtcgctcagaacctcgttggacccgataatgtccatgtggcactgagcttggtcgagtacaagcccgagctccagaaggccatggaattcgtttttggcaccacgttcgtgtgcgacaatatggacaatgcaaagaaggtggccttcgacaaaagaatcatgacccgtactgtgacgctgggcggagacgtatttgatccccatggaacgctgagcgggggagccaggtcacaggctgcaagtatcttgacgaaatttcaggagttaaaagacgtgcaagatgaactgcggatcaaagaaaacgaactgagggctcttgaagaggaactcgcaggattgaagaacaccgccgaaaaataccgacagttgaaacagcagtgggaaatgaaaacggaggaggccgacttactgcagaccaagctgcagcagtcatcctatcataaacagcaggaggagctcgatgcattgaagaaaacaattgaggagtctgaggagaccctgaagaacaccaaggagatccagagaaaggccgaagagaagtatgaagtactagaaaataaaatgaagaatgcagaggccgagcgggaacgcgagctgaaagacgcccagaaaaagctggactgtgctaaaaccaaggccgatgcgagctctaagaagatgaaggagaaacagcaggaagtggaagccattacacttgagctcgaagaactgaagagggaacatacgagctacaagcagcagctggaggccgtcaatgaggcaataaagagctatgaatctcagattgaggtcatggcagcagaagtggccaagaataaggagtctgtaaataaagctcaggaagaagtgacaaaacagaaagaagtcataacagcccaggatacagtcatcaaggccaagtatgcagaagtggccaagcataaagaacagaataacgattcacagttgaaaattaaggagctcgaccataacatcagcaagcataagcgtgaggcagaggacggcgctgccaaggtgtcaaaaatgctgaaggactacgactggattaacgctgaacgccacttatttggccagcctaactcagcttatgacttcaagacgaataatcccaaagaggcagggcagaggttacagaaacttcaagagatgaaagagaaacttggtcggaatgtcaatatgcgagccatgaacgtgcttactgaagctgaggagagatacaacgatctgatgaaaaaaaagcgaattgtggagaacgacaagtctaaaattctcaccacaatcgaggacctggatcagaagaagaaccaagctctgaatattgcgtggcagaaagtgaataaggactttggcagcatttttagcactctgcttccaggagcaaacgccatgctggcacccccagaggggcaaacggtgcttgatgggctggaatttaaagtggcccttggaaacacctggaaggagaatttaaccgagctcagcggcggacaacgctccttggtcgcgctgagtctgattctctctatgctcctctttaaacctgcccctatatatatcctggacgaggttgacgctgccttggatctatctcacacccagaatattggccagatgctgagaactcatttcacccatagccagtttatcgtggtaagtttgaaggagggcatgttcaataacgccaacgtgctttttaagacgaagtttgtggatggtgtctccactgtcgcaagattcacgcagtgccagaacgggaaaatctcgaaggaggccaaatccaaggccaaacctcctaaaggagcgcacgtcgaggtgtag

SEQ ID NO: 309746 - DNA, 3594 bp, Artificial Sequence
  derived and/or modified sequence
atgcatataaagtccattatactggagggttttaagagctacgctcagcgtactgaagttaacggctttgaccccttgtttaacgctatcacaggacttaatgggagcggtaaatctaatatactggattctatttgtttcttgttggggatctcaaatctgagccaggttagagcatctaatctgcaggacctggtttataagaatggccaagccggaatcactaaggcttcagtttcgattacattcgataactctgataagaaacagagccccctgggattcgaagtacacgacgagatcaccgttacaagacaagtcgtaataggcggtcggaataagtacctcattaacggggtgaatgcaaacaacaccagggttcaggatctgttctgttctgtgggcctcaacgtgaacaatccacactttctcataatgcaggggcgaatcaccaaggtgcttaatatgaaacctccagagatcctgtcaatgatcgaggaggcagcgggaacccggatgtatgaatataagaaaatcgcagcccagaaaactatcgagaagaaggaagctaagctgaaagagatcaagacaattctcgaggaggagatcactccaactatccagaagctcaaagaggagaggtcatcttacttggaatatcagaaggttatgcgcgagatcgaacaccttagcaggttgtacatcgcttatcaatttttgctggccgaggataccaaggttcgatcagctgaggaactgaaggagatgcaggacaaagtcattaagcttcaggaggagcttagtgagaacgacaaaaaaattaaggccctgaaccatgagattgaggaactggagaaacgtaaggacaaagagacaggcggtatcttgagatcgcttgaagatgctctggcagaagcccagcgggtgaacacaaagtcacaatccgctttcgatttgaaaaagaaaaatctcgcctgcgaagaatccaaaaggaaagagttagagaaaaacatggtcgaggattccaaaacgctcgccgctaaagagaaagaagtgaaaaagatcaccgatggcctccatgctctgcaggaggcgagcaacaaagatgccgaggccctggctgcagcccagcagcattttaacgctgtgtcggctggcttgagctcaaacgaagacggagcagaggccacactggccggacagatgatggcatgtaaaaatgatattagtaaggctcagacagaggctaaacaggcacaaatgaagttaaaacacgcgcagcaggagctgaaaaacaaacaggctgaggtcaaaaaaatggactcaggatacagaaaagatcaagaggcactggaagccgtcaagcgcctgaaagagaagcttgaagcagagatgaaaaaactcaattatgaagagaacaaggaagaatctctgctggaaaaaagaagacagttgtcgagagatatcgggcgtctcaaggaaacctacgaagccctcctggcccgatttcctaacctacgctttgcatataaagatcccgaaaagaattggaatcggaactgtgtcaaagggttagtggcctctctcatttccgtgaaggatacatcggccacaactgccctcgagctggttgccggagagcgtctgtataacgttgttgtcgacaccgaggttaccggcaaaaagttgcttgagcgaggtgaactgaaaagaagatacaccattataccattgaataagatttctgctaggtgtattgcacccgagaccctgcgggtcgcccagaatttggttggcccagataacgtacacgtggcgcttagcctagttgaatacaagcctgagctgcaaaaggcgatggagttcgtgttcggcactaccttcgtgtgtgataacatggacaacgcgaagaaggtcgcttttgataaaaggataatgaccagaacagtgacactgggcggtgacgtgtttgacccacacgggaccctgagtggaggagcaaggtcacaagctgcgagtattttaactaagtttcaggagttgaaggatgtccaggacgaactgagaattaaagaaaacgagctgagggccttggaggaggagctcgctggattaaaaaataccgccgaaaagtaccgccagctgaagcagcaatgggagatgaagacggaggaagcagatctgttgcagacaaagctgcagcagtcttcataccataagcagcaggaggagctcgacgctctgaagaaaacaattgaagaaagtgaggagacactgaagaatacaaaggagattcaaaggaaggctgaagagaagtacgaagtactggagaacaagatgaaaaatgccgaggccgaaagggaaagagagttaaaagatgcccagaagaaactcgactgcgcaaagaccaaagccgacgcatccagcaagaaaatgaaggagaaacagcaggaagttgaggcaattaccctcgagctggaagaattgaaaagagaacacacatcatacaagcagcagcttgaagccgtgaacgaagcaataaagtcgtacgaaagtcagatcgaggtcatggccgcagaagtcgcgaagaacaaggaaagcgtaaacaaagcccaggaggaggtgaccaaacagaaagaggtgatcacagcacaggatacagtcatcaaagctaaatacgcagaggtggccaagcacaaagaacagaacaacgatagtcagcttaaaatcaaggagttagaccataacattagtaagcacaagcgagaggctgaggatggcgcagcgaaggtgtccaagatgctcaaggattatgactggatcaatgcagagcgtcacctttttggccaaccaaatagcgcttatgacttcaagaccaacaaccctaaggaggcgggtcagaggctccagaaacttcaggaaatgaaggaaaaactcggcaggaacgtaaatatgagagctatgaatgtcctaacagaagctgaggagcgttacaatgatctgatgaagaagaagcgtattgtggaaaatgacaagtcaaagatcttaactacaattgaggatctcgaccagaaaaagaatcaggctctgaatatcgcctggcagaaggtgaataaggactttggctccatctttagcacactcctgcccggtgcaaatgccatgctcgccccacctgaggggcagaccgttctggacggcctggaattcaaggtagccttaggaaacacatggaaagagaatctgactgagttatccggcggacagcggagcctggttgccctctctctcattctgtccatgctcctgtttaaaccagcccctatttatatcctggacgaagtagatgcggcattagatttgtctcacacacagaacattgggcagatgctaaggactcacttcacccactcccagttcattgtcgtgagcctgaaggagggaatgtttaacaacgctaacgtcctatttaagactaagtttgttgacggcgtctctacagtagctagatttacacagtgtcagaacggcaaaatctctaaagaggcaaagagtaaggctaagcctcccaaaggagcccacgtcgaggtatag

SEQ ID NO: 309747 - DNA, 5976 bp, Artificial Sequence
  derived and/or modified sequence
cacaggaaataagcaatggaggtggggtcctttgctcgcgccgaaattcaaaggaataaatagttccggcgcgggtgttgagagcggtgtggcaggtgttgtagccgctatggtgaagttcgctttgtagcggccccggctagagagttgttctgttccctgcctttgtgacccggaggagcttttggggtgcgtcaagcccctggcctgaggcagcggtgaggcgtaactggtttgtggcctgtttgattcctgtcagaggtttgctgacccaagacagtatcgaaaatgcatattaagtcaattattctagagggattcaagtcctatgctcagaggaccgaagtcaatggttttgaccccctcttcaatgctatcactggcttaaatggtagtgggaaatccaacatattggactccatctgctttttgctgggcatctccaacctgtctcaggttcgggcttctaatttacaagatttagtttacaaaaatgggcaggctggtattaccaaagcctctgtgtcaatcacttttgataattctgacaaaaagcaaagtcctttaggatttgaggttcatgatgaaatcacagtaacaaggcaggtggttattggtggtagaaataaatatttaatcaatggagtcaatgccaacaacaccagagtacaggatctcttctgttctgttggccttaatgttaacaaccctcactttctcatcatgcagggccgaattacaaaagtattgaatatgaaacctccagagattttatccatgatagaagaagcagctggaaccaggatgtatgaatacaaaaaaatagctgcacagaaaactatagaaaaaaaggaggctaagctgaaagaaattaagacgatacttgaagaagagattactccaaccattcaaaaattaaaagaggaaagatcgtcctacttggagtaccaaaaagtaatgagagaaatagaacatttgagtcgtttatatattgcttatcagtttttgctggctgaagataccaaagtacgctcagctgaggaattaaaagaaatgcaagataaagttataaagcttcaggaagaattgtctgagaatgataaaaaaataaaagcacttaatcatgaaatagaagaattggaaaaaagaaaagataaggaaactggaggtatacttcgatctttagaagatgctcttgcagaggctcagcgagttaatactaaatctcaaagcgcatttgatctcaagaagaaaaatctggcatgtgaggaaagcaaacgcaaagagctggaaaaaaatatggttgaggactcaaaaactttagcagcaaaggaaaaagaggttaaaaagataacagatggactgcatgcccttcaagaagcaagtaataaagatgctgaagctctggcagctgcacagcagcacttcaatgctgtttccgctggcctgtccagtaatgaagatggagcagaagcaactcttgctggtcaaatgatggcctgtaaaaatgatataagtaaagctcagacagaagccaaacaggctcagatgaagttgaagcatgctcaacaggaattaaagaataaacaagctgaagttaagaagatggatagtggctacaggaaggatcaagaagctctagaagctgtaaaaagacttaaagaaaaacttgaagctgaaatgaaaaagctaaattatgaagaaaataaagaggaaagccttttggaaaagcgcaggcagctgtctcgtgatattggtagattgaaagaaacatatgaagctctattagccagatttcccaatcttcgatttgcatacaaggatccagagaagaactggaatagaaattgtgtgaaaggacttgtggcttctctgattagtgtgaaagacacttctgcaaccacagctttagaattagtggctggagaacgactctacaatgttgtagtagacacagaagttactggtaaaaagctactagaaaggggggaactgaaacgtcgatacactataattccactcaataaaatttcagccagatgtattgcaccagaaactctgagagttgctcagaatcttgttggccctgacaacgttcatgtggctctttccttggttgaatataaaccagaacttcagaaagcaatggagtttgtctttggaacaacatttgtttgtgacaatatggataatgccaaaaaagtggcctttgataagaggataatgactagaactgtaactctcggaggtgatgtgtttgatcctcatgggacattgagtggaggtgctcgatcccaggcagcttccattttaaccaagtttcaagaactcaaagatgttcaggatgaactgagaatcaaagagaatgagctgcgggctctagaagaggaattagcaggtcttaaaaacactgctgaaaagtatcgccaactaaaacagcagtgggagatgaaaactgaagaggcagatttattacaaaccaagctccagcaaagctcatatcacaagcaacaagaagaattagatgcccttaaaaaaaccattgaggaaagtgaggagactttgaaaaacactaaagaaatccaaagaaaagcagaagaaaaatatgaagtattggaaaataaaatgaaaaatgcagaagctgaaagagagcgagaactgaaagatgctcagaaaaaactggattgtgccaaaacaaaggcagatgcatctagcaagaagatgaaagaaaaacaacaggaagttgaagctatcactctggaactggaagagctcaagagagagcatacatcttacaaacaacagcttgaagctgtaaatgaagctatcaaatcctatgaaagtcagattgaagtaatggcagctgaggtggctaaaaataaggagtcagtaaataaagctcaagaagaggtgaccaagcaaaaagaggtgataacagcccaagacactgtaattaaagctaaatatgcagaagtggcaaaacacaaggagcaaaacaatgattctcagcttaaaattaaggaattagaccacaacatcagcaaacataaacgggaggctgaagatggtgctgcaaaggtatccaaaatgttgaaagattatgactggattaatgcagagagacacctctttggccaacccaatagtgcctatgatttcaaaactaacaaccctaaagaagctggtcagagacttcagaagttgcaagaaatgaaggagaaactaggaagaaatgtcaatatgagagctatgaatgtattgacagaagctgaagagcgatacaatgacttgatgaagaagaagagaattgtagaaaatgacaaatccaaaattcttacaactatagaagaccttgaccagaagaaaaaccaagccctaaatattgcatggcaaaaggtgaacaaggactttgggtctattttttctactcttttgcctggtgctaatgctatgcttgcaccaccagagggtcaaactgttttggatggtctggagttcaaggttgccttgggaaatacctggaaagaaaacctaactgaacttagtggtggtcagaggtctttagtggccttgtcattaatactgtccatgcttctcttcaaacctgctccaatttatatccttgatgaggtagatgcagccttggatctttctcatacccaaaacattggacagatgctgcgtactcatttcacacattctcagttcattgtggtgtcactaaaagaaggtatgttcaacaatgcaaacgttcttttcaaaaccaagtttgtggatggtgtttctacagtagccagatttactcaatgtcaaaatggaaagatttcaaaggaagcaaaatccaaggcaaaaccacccaaaggagcacatgtggaagtttaaactacaaagttatttcttcatcttgacctgtttttttaaatgtaaacttttaaggacttgagataactaatttgtttatatacaaaaattaatgttactgtgttacttaacccatgttttctctttatataatcacttatcgcttacaaatgagcatatattcctcatctcttaactagtctaattatggtccaattattgtggttgtgattttatgcatatcatcaaatgtttttttcttatgcgggtcttttatatattagggatcctgagatacccgattctatatgtaaaagctaatatacaaaaaagcagattaaattacatgataaatgtagctgatcatcagtgtttaattgatttaattcctaaggcaatattaatgtgttttctaaagtcattcaggtaaggaagaattataaatcaggtaactggaccaacaaagggaacacatataaagctattatgcatgcatggagccgtttgaggctagttttttaaggccacaactccagacccctgatttagactgagataggaaacagatcttgaaagaatccttattttaatgatacatgaatatcatgttcctatacgcttaataattggtctctacgttttaatgatacatgaatatcatgttcctatacgcttaataattggtctctacgactttaatgtttttgtttttttaagctgtgtaagtatttttaaatcaaagcttaggaggtgtgttgcgtggtactatctgctgcaaatttatctgaagtttgttaatattttccaagatttttgtcagccttttcataatccagtcattaacaacctattggtaaacaagaatgtaggtgccagtagactaaaccaaatttatttttccctgagtctgatatatatatgtataaatataaataactcaatccatctgttccaccaaaataactcaaaagttggatgattatttgtcttccgctttccagttcaaagggatgaaattcctttagaacttgaaagatgacactagcgaacaccatgagaatactgtctacagtttttggtacgtcatcactagaacagtgaccccaaactgaatcatgaaaggtctgacatgatgtaatctgatcttccatgtgttattttggccccacatctcttcttgattttttagtcttatttccttagtgttattatcatacttcccctgatatatggccgtacttcctggccctgggcttgacatttcccacccttcattctccatacatatgagatgtcagaaaacatgcagtaattgatattatgggacacattggaaaggattgaatctggaattagttctgtccactgtggaggggagaggaaataatgctgtaaatgttgagttacagaaagtccaatgtcaaatatagtttttttgtttcctttcaaatgtattacagactgtgccaaaacagttaccaattcacactgtcaatattaaagtataccatagtatacaaattagtcagtacttgctgttaattttaatatttctgatttaacagttagttattaagtggtacttcattgctgttttagccaacgttttaaaaataatttgggagtttgactattttggcttacgtactcatttccttttctctgctaaaaatgttttgcttgtgtgcgttcctgatttttgtcttgtataatcttgatctttgaaaaccctcaaacatgtattaaattgttgtaactttttttcattagagggaagacattaaggggattggggacatttgtttcacacatctgcagtaatatgagttaactaatatttaacaagctctttctttacattagctgctgttctcatttgtatgtattgtcatatttaatcctcagagtaacctagtgaggtaaatactgttgttgtcagcatggtgtaatcgaggaattgagtgagttgagcagaaaagttaggaaacttgctcagggtgataatacagttaggagtgtcagggcccatggacaaatcttgtcagtctccagaacctaagatatactacgtcactgacagcttgaacatttgtatttattgtacagaataaattt

SEQ ID NO: 309748 - DNA, 3594 bp, Artificial Sequence
  derived and/or modified sequence
atgcacatcaagagcatcatcctggagggcttcaagagctacgcccagagaaccgaggtgaacggcttcgaccccctgttcaacgccatcaccggcctgaacggcagcggcaagagcaacatcctggacagcatctgcttcctgctgggcatcagcaacctgagccaggtgagagccagcaacctgcaggacctggtgtacaagaacggccaggccggcatcaccaaggccagcgtgagcatcaccttcgacaacagcgacaagaagcagagccccctgggcttcgaggtgcacgacgagatcaccgtgaccagacaggtggtgatcggcggcagaaacaagtacctgatcaacggcgtgaacgccaacaacaccagagtgcaggacctgttctgcagcgtgggcctgaacgtgaacaacccccacttcctgatcatgcagggcagaatcaccaaggtgctgaacatgaagccccccgagatcctgagcatgatcgaggaggccgccggcaccagaatgtacgagtacaagaagatcgccgcccagaagaccatcgagaagaaggaggccaagctgaaggagatcaagaccatcctggaggaggagatcacccccaccatccagaagctgaaggaggagagaagcagctacctggagtaccagaaggtgatgagagagatcgagcacctgagcagactgtacatcgcctaccagttcctgctggccgaggacaccaaggtgagaagcgccgaggagctgaaggagatgcaggacaaggtgatcaagctgcaggaggagctgagcgagaacgacaagaagatcaaggccctgaaccacgagatcgaggagctggagaagagaaaggacaaggagaccggcggcatcctgagaagcctggaggacgccctggccgaggcccagagagtgaacaccaagagccagagcgccttcgacctgaagaagaagaacctggcctgcgaggagagcaagagaaaggagctggagaagaacatggtggaggacagcaagaccctggccgccaaggagaaggaggtgaagaagatcaccgacggcctgcacgccctgcaggaggccagcaacaaggacgccgaggccctggccgccgcccagcagcacttcaacgccgtgagcgccggcctgagcagcaacgaggacggcgccgaggccaccctggccggccagatgatggcctgcaagaacgacatcagcaaggcccagaccgaggccaagcaggcccagatgaagctgaagcacgcccagcaggagctgaagaacaagcaggccgaggtgaagaagatggacagcggctacagaaaggaccaggaggccctggaggccgtgaagagactgaaggagaagctggaggccgagatgaagaagctgaactacgaggagaacaaggaggagagcctgctggagaagagaagacagctgagcagagacatcggcagactgaaggagacctacgaggccctgctggccagattccccaacctgagattcgcctacaaggaccccgagaagaactggaacagaaactgcgtgaagggcctggtggccagcctgatcagcgtgaaggacaccagcgccaccaccgccctggagctggtggccggcgagagactgtacaacgtggtggtggacaccgaggtgaccggcaagaagctgctggagagaggcgagctgaagagaagatacaccatcatccccctgaacaagatcagcgccagatgcatcgcccccgagaccctgagagtggcccagaacctggtgggccccgacaacgtgcacgtggccctgagcctggtggagtacaagcccgagctgcagaaggccatggagttcgtgttcggcaccaccttcgtgtgcgacaacatggacaacgccaagaaggtggccttcgacaagagaatcatgaccagaaccgtgaccctgggcggcgacgtgttcgacccccacggcaccctgagcggcggcgccagaagccaggccgccagcatcctgaccaagttccaggagctgaaggacgtgcaggacgagctgagaatcaaggagaacgagctgagagccctggaggaggagctggccggcctgaagaacaccgccgagaagtacagacagctgaagcagcagtgggagatgaagaccgaggaggccgacctgctgcagaccaagctgcagcagagcagctaccacaagcagcaggaggagctggacgccctgaagaagaccatcgaggagagcgaggagaccctgaagaacaccaaggagatccagagaaaggccgaggagaagtacgaggtgctggagaacaagatgaagaacgccgaggccgagagagagagagagctgaaggacgcccagaagaagctggactgcgccaagaccaaggccgacgccagcagcaagaagatgaaggagaagcagcaggaggtggaggccatcaccctggagctggaggagctgaagagagagcacaccagctacaagcagcagctggaggccgtgaacgaggccatcaagagctacgagagccagatcgaggtgatggccgccgaggtggccaagaacaaggagagcgtgaacaaggcccaggaggaggtgaccaagcagaaggaggtgatcaccgcccaggacaccgtgatcaaggccaagtacgccgaggtggccaagcacaaggagcagaacaacgacagccagctgaagatcaaggagctggaccacaacatcagcaagcacaagagagaggccgaggacggcgccgccaaggtgagcaagatgctgaaggactacgactggatcaacgccgagagacacctgttcggccagcccaacagcgcctacgacttcaagaccaacaaccccaaggaggccggccagagactgcagaagctgcaggagatgaaggagaagctgggcagaaacgtgaacatgagagccatgaacgtgctgaccgaggccgaggagagatacaacgacctgatgaagaagaagagaatcgtggagaacgacaagagcaagatcctgaccaccatcgaggacctggaccagaagaagaaccaggccctgaacatcgcctggcagaaggtgaacaaggacttcggcagcatcttcagcaccctgctgcccggcgccaacgccatgctggccccccccgagggccagaccgtgctggacggcctggagttcaaggtggccctgggcaacacctggaaggagaacctgaccgagctgagcggcggccagagaagcctggtggccctgagcctgatcctgagcatgctgctgttcaagcccgcccccatctacatcctggacgaggtggacgccgccctggacctgagccacacccagaacatcggccagatgctgagaacccacttcacccacagccagttcatcgtggtgagcctgaaggagggcatgttcaacaacgccaacgtgctgttcaagaccaagttcgtggacggcgtgagcaccgtggccagattcacccagtgccagaacggcaagatcagcaaggaggccaagagcaaggccaagccccccaagggcgcccacgtggaggtgtag

SEQ ID NO: 309749 - DNA, 5677 bp, Artificial Sequence
  derived and/or modified sequence
ggggcgcggggcgcgggggctgtagggagggggaccagtggcagagggaccttaggtgatccttagaaataaaggctagcttctgttcgaccttggagtagggcgaagaggtgtagacaggcctggagaagcgaggtaaaagcctgagtaaaagcaagaagttggagaatatgagatacatctcatctctagtaaatacttaaatgacttcccctcctcccggagtcaagcacaattcggggatgcaatgacggacgtaggtgaagacactgcgggaacttacagacaaaactggtttgtggcctgtttgattcctgtcagaggtttgctgacccaagacagtatcgaaaatgcatattaagtcaattattctagagggattcaagtcctatgctcagaggaccgaagtcaatggttttgaccccctcttcaatgctatcactggcttaaatggtagtgggaaatccaacatattggactccatctgctttttgctgggcatctccaacctgtctcaggttcgggcttctaatttacaagatttagtttacaaaaatgggcaggctggtattaccaaagcctctgtgtcaatcacttttgataattctgacaaaaagcaaagtcctttaggatttgaggttcatgatgaaatcacagtaacaaggcaggtggttattggtggtagaaataaatatttaatcaatggagtcaatgccaacaacaccagagtacaggatctcttctgttctgttggccttaatgttaacaaccctcactttctcatcatgcagggccgaattacaaaagtattgaatatgaaacctccagagattttatccatgatagaagaagcagctggaaccaggatgtatgaatacaaaaaaatagctgcacagaaaactatagaaaaaaaggaggctaagctgaaagaaattaagacgatacttgaagaagagattactccaaccattcaaaaattaaaagaggaaagatcgtcctacttggagtaccaaaaagtaatgagagaaatagaacatttgagtcgtttatatattgcttatcagtttttgctggctgaagataccaaagtacgctcagctgaggaattaaaagaaatgcaagataaagttataaagcttcaggaagaattgtctgagaatgataaaaaaataaaagcacttaatcatgaaatagaagaattggaaaaaagaaaagataaggaaactggaggtatacttcgatctttagaagatgctcttgcagaggctcagcgagttaatactaaatctcaaagcgcatttgatctcaagaagaaaaatctggcatgtgaggaaagcaaacgcaaagagctggaaaaaaatatggttgaggactcaaaaactttagcagcaaaggaaaaagagaaaataaagaggaaagccttttggaaaagcgcaggcagctgtctcgtgatattggtagattgaaagaaacatatgaagctctattagccagatttcccaatcttcgatttgcatacaaggatccagagaagaactggaatagaaattgtgtgaaaggacttgtggcttctctgattagtgtgaaagacacttctgcaaccacagctttagaattagtggctggagaacgactctacaatgttgtagtagacacagaagttactggtaaaaagctactagaaaggggggaactgaaacgtcgatacactataattccactcaataaaatttcagccagatgtattgcaccagaaactctgagagttgctcagaatcttgttggccctgacaacgttcatgtggctctttccttggttgaatataaaccagaacttcagaaagcaatggagtttgtctttggaacaacatttgtttgtgacaatatggataatgccaaaaaagtggcctttgataagaggataatgactagaactgtaactctcggaggtgatgtgtttgatcctcatgggacattgagtggaggtgctcgatcccaggcagcttccattttaaccaagtttcaagaactcaaagatgttcaggatgaactgagaatcaaagagaatgagctgcgggctctagaagaggaattagcaggtcttaaaaacactgctgaaaagtatcgccaactaaaacagcagtgggagatgaaaactgaagaggcagatttattacaaaccaagctccagcaaagctcatatcacaagcaacaagaagaattagatgcccttaaaaaaaccattgaggaaagtgaggagactttgaaaaacactaaagaaatccaaagaaaagcagaagaaaaatatgaagtattggaaaataaaatgaaaaatgcagaagctgaaagagagcgagaactgaaagatgctcagaaaaaactggattgtgccaaaacaaaggcagatgcatctagcaagaagatgaaagaaaaacaacaggaagttgaagctatcactctggaactggaagagctcaagagagagcatacatcttacaaacaacagcttgaagctgtaaatgaagctatcaaatcctatgaaagtcagattgaagtaatggcagctgaggtggctaaaaataaggagtcagtaaataaagctcaagaagaggtgaccaagcaaaaagaggtgataacagcccaagacactgtaattaaagctaaatatgcagaagtggcaaaacacaaggagcaaaacaatgattctcagcttaaaattaaggaattagaccacaacatcagcaaacataaacgggaggctgaagatggtgctgcaaaggtatccaaaatgttgaaagattatgactggattaatgcagagagacacctctttggccaacccaatagtgcctatgatttcaaaactaacaaccctaaagaagctggtcagagacttcagaagttgcaagaaatgaaggagaaactaggaagaaatgtcaatatgagagctatgaatgtattgacagaagctgaagagcgatacaatgacttgatgaagaagaagagaattgtagaaaatgacaaatccaaaattcttacaactatagaagaccttgaccagaagaaaaaccaagccctaaatattgcatggcaaaaggtgaacaaggactttgggtctattttttctactcttttgcctggtgctaatgctatgcttgcaccaccagagggtcaaactgttttggatggtctggagttcaaggttgccttgggaaatacctggaaagaaaacctaactgaacttagtggtggtcagaggtctttagtggccttgtcattaatactgtccatgcttctcttcaaacctgctccaatttatatccttgatgaggtagatgcagccttggatctttctcatacccaaaacattggacagatgctgcgtactcatttcacacattctcagttcattgtggtgtcactaaaagaaggtatgttcaacaatgcaaacgttcttttcaaaaccaagtttgtggatggtgtttctacagtagccagatttactcaatgtcaaaatggaaagatttcaaaggaagcaaaatccaaggcaaaaccacccaaaggagcacatgtggaagtttaaactacaaagttatttcttcatcttgacctgtttttttaaatgtaaacttttaaggacttgagataactaatttgtttatatacaaaaattaatgttactgtgttacttaacccatgttttctctttatataatcacttatcgcttacaaatgagcatatattcctcatctcttaactagtctaattatggtccaattattgtggttgtgattttatgcatatcatcaaatgtttttttcttatgcgggtcttttatatattagggatcctgagatacccgattctatatgtaaaagctaatatacaaaaaagcagattaaattacatgataaatgtagctgatcatcagtgtttaattgatttaattcctaaggcaatattaatgtgttttctaaagtcattcaggtaaggaagaattataaatcaggtaactggaccaacaaagggaacacatataaagctattatgcatgcatggagccgtttgaggctagttttttaaggccacaactccagacccctgatttagactgagataggaaacagatcttgaaagaatccttattttaatgatacatgaatatcatgttcctatacgcttaataattggtctctacgttttaatgatacatgaatatcatgttcctatacgcttaataattggtctctacgactttaatgtttttgtttttttaagctgtgtaagtatttttaaatcaaagcttaggaggtgtgttgcgtggtactatctgctgcaaatttatctgaagtttgttaatattttccaagatttttgtcagccttttcataatccagtcattaacaacctattggtaaacaagaatgtaggtgccagtagactaaaccaaatttatttttccctgagtctgatatatatatgtataaatataaataactcaatccatctgttccaccaaaataactcaaaagttggatgattatttgtcttccgctttccagttcaaagggatgaaattcctttagaacttgaaagatgacactagcgaacaccatgagaatactgtctacagtttttggtacgtcatcactagaacagtgaccccaaactgaatcatgaaaggtctgacatgatgtaatctgatcttccatgtgttattttggccccacatctcttcttgattttttagtcttatttccttagtgttattatcatacttcccctgatatatggccgtacttcctggccctgggcttgacatttcccacccttcattctccatacatatgagatgtcagaaaacatgcagtaattgatattatgggacacattggaaaggattgaatctggaattagttctgtccactgtggaggggagaggaaataatgctgtaaatgttgagttacagaaagtccaatgtcaaatatagtttttttgtttcctttcaaatgtattacagactgtgccaaaacagttaccaattcacactgtcaatattaaagtataccatagtatacaaattagtcagtacttgctgttaattttaatatttctgatttaacagttagttattaagtggtacttcattgctgttttagccaacgttttaaaaataatttgggagtttgactattttggcttacgtactcatttccttttctctgctaaaaatgttttgcttgtgtgcgttcctgatttttgtcttgtataatcttgatctttgaaaaccctcaaacatgtattaaattgttgtaactttttttcattagagggaagacattaaggggattggggacatttgtttcacacatctgcagtaatatgagttaactaatatttaacaagctctttctttacattagctgctgttctcatttgtatgtattgtcatatttaatcctcagagtaacctagtgaggtaaatactgttgttgtcagcatggtgtaatcgaggaattgagtgagttgagcagaaaagttaggaaacttgctcagggtgataatacagttaggagtgtcagggcccatggacaaatcttgtcagtctccagaacctaagatatactacgtcactgacagcttgaacatttgtatttattgtacagaataaattt

SEQ ID NO: 309750 - protein, 1099 aa, Artificial Sequence
  derived and/or modified sequence
MHIKSIILEGFKSYAQRTEVNGFDPLFNAITGLNGSGKSNILDSICFLLGISNLSQVRASNLQDLVYKNGQAGITKASVSITFDNSDKKQSPLGFEVHDEITVTRQVVIGGRNKYLINGVNANNTRVQDLFCSVGLNVNNPHFLIMQGRITKVLNMKPPEILSMIEEAAGTRMYEYKKIAAQKTIEKKEAKLKEIKTILEEEITPTIQKLKEERSSYLEYQKVMREIEHLSRLYIAYQFLLAEDTKVRSAEELKEMQDKVIKLQEELSENDKKIKALNHEIEELEKRKDKETGGILRSLEDALAEAQRVNTKSQSAFDLKKKNLACEESKRKELEKNMVEDSKTLAAKEKEVKKITDGLHALQEASNKDAEALAAAQQHFNAVSAGLSSNEDGAEATLAGQMMACKNDISKAQTEAKQAQMKLKHAQQELKNKQAEVKKMDSGYRKDQEALEAVKRLKEKLEAEMKKLNYEENKEESLLEKRRQLSRDIGRLKETYEALLARFPNLRFAYKDPEKNWNRNCVKGLVASLISVKDTSATTALELVAGERLYNVVVDTEVTGKKLLERGELKRRYTIIPLNKISARCIAPETLRVAQNLVGPDNVHVALSLVEYKPELQKAMEFVFGTTFVCDNMDNAKKVAFDKRIMTRTVTLGGDVFDPHGTLSGGARSQAASILTKFQELKDVQDELRIKENELRALEEELAGLKNTAEKYRQLKQQWEMKTEEADLLQTKLQQSSYHKQQEELDALKKTIEESEETLKNTKEIQRKAEEKYEVLENKMKNAEAERERELKDAQKKLDCAKTKADASSKKMKEKQQEVEAITLELEELKREHTSYKQQLEAVNEAIKSYESQIEVMAAEVAKNKESVNKAQEEVTKQKEVITAQDTVIKAKYAEVAKHKEQNNDSQLKIKELDHNISKHKREAEDGAAKVSKMLKDYDWINAERHLFGQPNSAYDFKTNNPKEAGQRLQKLQEMKEKLGRNVNMRAMNVLTEAEERYNDLMKKKRIVENDKSKILTTIEDLDQKKNQALNIAWQKVNKDFGSIFSTLLPGANAMLAPPEGQTVLDGLEFKVALGNTWKENLTELSGGQRQKQQNHTTG

SEQ ID NO: 309751 - protein, 371 aa, Artificial Sequence
  derived and/or modified sequence
MHIKSIILEGFKSYAQRTEVNGFDPLFNAITGLNGSGKSNILDSICFLLGISNLSQVRASNLQDLVYKNGQAGITKASVSITFDNSDKKQSPLGFEVHDEITVTRQVVIGGRNKYLINGVNANNTRVQDLFCSVGLNVNNPHFLIMQGRITKVLNMKPPEILSMIEEAAGTRMYEYKKIAAQKTIEKKEAKLKEIKTILEEEITPTIQKLKEERSSYLEYQKVMREIEHLSRLYIAYQFLLAEDTKVRSAEELKEMQDKVIKLQEELSENDKKIKALNHEIEELEKRKDKETGGILRSLEDALAEAQRVNTKSQSAFDLKKKNLACEESKRKELEKNMVEDSKTLAAKEKEKIKRKAFWKSAGSCLVILVD

SEQ ID NO: 309752 - DNA, 3300 bp, Artificial Sequence
  derived and/or modified sequence
atgcacataaaatccatcatcctagaaggtttcaagtcttatgctcagcgcaccgaagtgaatggattcgaccctctgttcaacgcaatcaccggcctcaatgggtcgggcaagagtaacatcctggattctatttgtttcctgctggggattagtaatctgtctcaggtcagggcttcgaacctccaggacttagtttacaagaacggtcaggctggcatcactaaggccagcgtgtcaatcaccttcgacaactcagataaaaagcagtccccacttggctttgaagtccatgatgagattaccgtcaccagacaggtggttattggcggacgcaacaaataccttattaacggagtgaacgccaataacacgagggtccaggatctcttctgctctgtcggcttgaatgtaaacaacccccacttcctcataatgcagggtaggatcaccaaggttcttaatatgaaaccaccagagattctctccatgatcgaagaggctgctggcacacgtatgtatgagtacaagaaaatcgctgcgcaaaaaacaatagagaagaaagaggccaagctgaaggagatcaaaactattctggaggaggagattacacctaccatccagaaattgaaagaggagaggtctagctacttggaataccaaaaggtgatgagagaaatcgagcatttgtcgagactctacattgcctatcaattcctactagctgaggacacgaaggttcgaagtgctgaagagctgaaggaaatgcaggataaggtcattaagcttcaggaggagctgtctgagaatgacaaaaaaatcaaagccctgaatcacgaaatcgaggaattggaaaagcgaaaggacaaggaaacaggcggcatccttcggtccttggaagatgccttggcagaagcccagagggtaaacacaaaaagccagtccgcttttgacctcaaaaaaaagaaccttgcatgtgaagaatcaaaacggaaagagctcgaaaaaaatatggtagaggacagcaaaacactcgccgctaaggagaaagaggttaaaaaaatcaccgacggtctgcacgcactgcaggaggctagtaacaaagacgccgaagcgttagccgcagcgcagcaacactttaacgccgtgagtgccggtctgtccagcaacgaggatggagctgaggccacactagccggacagatgatggcctgtaaaaatgatatctctaaggcccagactgaagccaagcaagcacagatgaagctgaagcatgcacagcaggaactgaaaaacaagcaagctgaagttaaaaaaatggactctggatacagaaaggaccaggaggccttggaggccgtgaaacgcctgaaggagaagctggaggccgaaatgaaaaagttgaattatgaggaaaataaagaagaaagcttgttagaaaagcgtcgccagctgagccgcgatattgggcggctgaaagaaacttacgaggcgcttctcgctcgcttcccgaaccttagatttgcttacaaagacccagagaaaaattggaatagaaattgtgtcaaaggcctggtggcttctcttattagtgtgaaagatacctcggcgaccaccgccttggaactggtcgctggcgaacgtctgtacaatgtggttgtggatacagaagtcacagggaagaagctgctcgaaagaggtgagctgaaacgccgttacaccatcattccacttaataaaatttccgcccgctgtatagctccggaaactctaagggttgcgcagaacctggtgggacccgacaacgtccacgtcgcgctgtctctcgtagaatataaacctgaattacagaaagccatggaattcgtattcggaacaacgttcgtgtgcgacaatatggacaacgccaagaaggtagcgtttgataagcgcatcatgacaagaaccgtcaccttgggcggggacgtatttgacccgcacggtacattaagcgggggtgcccgctcccaggccgcgtccattctgacaaaattccaggagctcaaagacgtacaggacgagttgaggatcaaggaaaatgaattacgcgccctggaagaggagcttgccgggctgaagaacactgctgagaaataccggcagctaaagcagcagtgggagatgaaaaccgaggaggcagacctcctccaaaccaaactgcagcagtccagttatcacaagcaacaggaagaactggatgcactcaaaaagaccatagaagagagcgaggagaccctaaaaaacacaaaagagattcagagaaaggccgaggagaagtacgaggtgctggaaaataaaatgaaaaacgccgaggcagaaagggagcgggaattgaaggatgcccagaagaaattagactgtgccaaaaccaaggcagacgccagctcaaagaagatgaaagagaagcagcaggaggtcgaggctataacccttgagctggaggagctgaagcgcgaacatacctcctataaacaacagctggaggcagttaacgaggctatcaagtcctatgaaagccagattgaggtgatggccgctgaagtggctaaaaataaggagtccgtaaataaggcccaggaagaagtgactaaacaaaaggaggttattacagctcaagataccgtaattaaagccaaatatgccgaggtggcaaagcataaggagcagaataatgacagccagttgaagattaaggagctagaccacaacattagcaagcataagcgcgaggccgaggatggcgccgccaaggtgagcaagatgctaaaggattacgattggattaacgctgagcgccatctgttcggccagccaaatagcgcctatgattttaagaccaataatcccaaggaagctggacagaggctgcagaaattgcaagagatgaaggaaaaactgggacgcaatgttaatatgcgcgccatgaacgtgctgacagaggccgaagagcgttacaacgatctcatgaaaaagaagcggatcgttgaaaatgataagagcaagattctgacaaccatcgaggatttagatcagaaaaagaaccaggctctgaacatcgcgtggcagaaagtgaataaggattttggcagcattttttcaacactgctccccggggctaatgccatgctggctccgcctgaggggcagacagtgcttgatggcctggaattcaaagtggccttgggaaacacgtggaaggagaatcttacagagctaagcgggggacagcgccagaagcagcagaaccatacgacgggctag

SEQ ID NO: 309753 - DNA, 3300 bp, Artificial Sequence
  derived and/or modified sequence
atgcacatcaagagcatcatcctggagggcttcaagagctatgcccagaggacagaggtgaatggatttgaccccctcttcaatgccatcaccggcctgaatggcagcggcaagagcaacatcctggacagcatctgcttcctgctgggcatcagcaacctgagccaggtgcgggccagcaacctgcaggacctggtgtacaagaatggccaggccggcatcaccaaggcctctgtgtccatcacctttgacaacagcgacaagaagcagagccccctgggctttgaggtgcatgatgagatcaccgtgacccggcaggtggtgattggaggcaggaacaagtacctgatcaacggggtgaatgccaacaacaccagggtgcaggacctcttctgcagcgtgggcctgaatgtgaacaacccccacttcctgatcatgcagggccgcatcaccaaggtgctgaacatgaagcccccagagatcctgtccatgattgaggaggccgccggcaccaggatgtatgagtacaagaagattgctgcccagaagaccatcgagaagaaggaggccaagctgaaggagatcaagaccatcctggaggaggagatcacccccaccatccagaagctgaaggaggagaggagcagctacctggagtaccagaaggtgatgagagaaattgagcacctgagccggctgtacatcgcctaccagttcctgctggccgaggacaccaaggtgcgctctgctgaggagctgaaggagatgcaggacaaggtgatcaagctgcaggaggagctgtctgaaaatgacaagaagatcaaggccctgaaccatgaaattgaggagctggagaagaggaaggacaaggagaccggcggcatcctgcggagcctggaggatgccctggccgaggcccagagggtgaacaccaagagccagagcgcctttgacctgaagaagaagaacctggcctgtgaggagagcaagaggaaggagctggagaagaacatggtggaggacagcaagaccctggccgccaaggagaaggaggtgaagaagatcacagatggcctgcacgccctgcaggaggccagcaacaaggatgctgaggccctggccgccgcccagcagcacttcaatgctgtgtctgctggcctgagcagcaatgaagatggagctgaggccaccctggccggccagatgatggcctgcaagaatgacatcagcaaggcccagacagaggccaagcaggcccagatgaagctgaagcacgcccagcaggagctgaagaacaagcaggccgaggtgaagaagatggacagcggctacaggaaggaccaggaggccctggaggccgtgaagaggctgaaggagaagctggaggccgagatgaagaagctgaactatgaggagaacaaggaggagagcctgctggagaagaggcggcagctgagccgggacatcggccgcctgaaggagacctatgaggccctgctggcccgcttccccaacctgcgctttgcctacaaggaccctgagaagaactggaacagaaactgtgtgaagggcctggtggccagcctcatctctgtgaaggacaccagcgccaccacagccctggagctggtggccggggagcggctgtacaacgtggtggtggacacagaggtgacaggcaagaagctgctggagcggggggagctgaagaggcgctacaccatcatccccctgaacaagatcagcgcccgctgcatcgcccctgagaccctgcgggtggcccagaacctggtgggccctgacaacgtgcacgtggccctgagcctggtggagtacaagccagagctgcagaaggccatggagtttgtgtttggcaccacctttgtgtgtgacaacatggacaatgccaagaaggtggcctttgacaagaggatcatgaccaggacagtgaccctgggcggagatgtgtttgacccccacggcaccctgagcggcggggcccggagccaggccgccagcatcctgaccaagttccaggagctgaaggatgtgcaggatgagctgcgcatcaaggaaaatgagctgcgggccctggaggaggagctggccggcctgaagaacacagctgagaagtaccggcagctgaagcagcagtgggagatgaagacagaggaggccgacctgctgcagaccaagctgcagcagagcagctaccacaagcagcaggaggagctggatgccctgaagaagaccatcgaggagagcgaggagaccctgaagaacaccaaggagatccagaggaaggccgaggagaagtatgaggtgctggagaacaagatgaagaatgctgaggccgagcgggagcgggagctgaaggatgcccagaagaagctggactgtgccaagaccaaggcagatgccagcagcaagaagatgaaggagaagcagcaggaggtggaggccatcaccctggagctggaggagctgaagcgggagcacaccagctacaagcagcagctggaggccgtgaatgaggccatcaagagctatgagagccagatcgaggtgatggctgctgaggtggccaagaacaaggagagcgtgaacaaggcccaggaggaggtgaccaagcagaaggaggtgatcacagcccaggacaccgtcatcaaggccaagtatgcagaggtggccaagcacaaggagcagaacaatgacagccagctgaagatcaaggagctggaccacaacatcagcaagcacaagcgggaggctgaagatggagctgccaaggtgtccaagatgctgaaggactatgactggatcaatgctgagcggcacctgtttggccagcccaacagcgcctatgacttcaagaccaacaaccccaaggaggccggccagaggctgcagaagctgcaggagatgaaggagaagctgggcagaaatgtgaacatgagggccatgaatgtgctgacagaggccgaggagcgctacaatgacctgatgaagaagaagagaattgtggagaatgacaagagcaagatcctgaccaccatcgaggacctggaccagaagaagaaccaggccctgaacatcgcctggcagaaggtgaacaaggactttggcagcatcttcagcaccctgctgcccggggccaatgccatgctggcccctcctgagggccagacagtgctggatggcctggagttcaaggtggccctgggcaacacctggaaggagaacctgacagagctgagcggcggccagaggcagaagcagcagaaccacaccaccggctag

SEQ ID NO: 309754 - DNA, 3300 bp, Artificial Sequence
  derived and/or modified sequence
atgcacatcaagagcatcatcctggagggcttcaagagctacgcccagcggactgaggtgaacggttttgaccctctttttaatgccataacgggactgaatgggtctggtaagtcaaatatcctggacagtatttgctttctcctggggatcagcaatctttctcaggtccgggcctcaaatctgcaggacttggtgtataagaacggtcaagcgggaatcacaaaggcgtccgtgtcaatcaccttcgataactccgataaaaagcagtctcctcttgggttcgaagtgcatgatgaaatcactgttaccagacaggtggtcattggtggccgaaataaatacctcataaatggcgtcaacgccaacaacacccgggtccaggacttgttttgcagtgtgggcctgaacgtgaacaacccccattttctcattatgcagggaaggattacaaaggtcctcaatatgaaaccacccgagatcttgtccatgatcgaggaagccgccggcactagaatgtacgagtacaagaaaattgcagcccagaaaaccatcgaaaaaaaagaagccaagctgaaagaaatcaaaactattttagaggaagaaattactccaacgattcaaaaactgaaggaagaaaggtcctcctatcttgagtaccagaaagtgatgcgcgagattgaacatcttagtagattgtacatcgcctatcagtttctactggccgaagacactaaggtgcgatcagcggaagaactcaaagaaatgcaggacaaagttatcaaactacaggaggaactgtctgaaaacgacaagaaaataaaagcactgaaccacgaaattgaggagcttgagaagaggaaagataaggagaccggtggcatcctcaggtctctggaagacgctttggccgaggcccagagagtgaatacgaagagtcaaagcgcctttgatctgaaaaagaaaaatctagcatgcgaagaatcaaagagaaaggaactcgaaaaaaacatggttgaagactcaaagacccttgcagctaaggagaaggaggtgaaaaagattacggacggcctgcacgccctccaagaagcttcaaataaggatgcagaagctctcgccgccgcacaacagcatttcaacgcggtttcggccgggctctcctctaatgaagacggtgccgaagcgacgttagcagggcagatgatggcctgtaaaaatgatatcagtaaggcccaaactgaggctaaacaggctcagatgaaactgaagcacgcccagcaggagcttaagaacaagcaggcagaggtgaaaaagatggattccgggtaccgaaaggatcaggaggctctggaggctgtgaagagactcaaagaaaagctcgaggctgagatgaagaagctaaactacgaggagaacaaagaagaaagtcttctcgaaaagcgcaggcagctgtctcgagacattggaagattgaaggagacatacgaagctttgctcgcacggttccctaaccttcgctttgcgtacaaagaccctgagaaaaactggaatcgcaactgcgttaaaggcctggtggccagccttatcagcgtaaaggacacatcagccaccactgccctggaactcgtggcaggggagcggctgtacaatgttgtggtcgataccgaagtaaccggcaagaaactactggaaaggggtgagctcaagcgaaggtacacaataatacccttaaataagatcagtgcccggtgtatcgcacctgaaacccttagagtcgcccagaatctcgtagggcccgataatgtgcacgtggctctgtccctcgttgaatacaagcctgagctgcagaaagcaatggagtttgttttcgggacgacatttgtgtgcgacaacatggataatgccaaaaaggtggcgttcgataagcggatcatgacacgcactgtgaccttgggtggcgatgtctttgacccccatggcactctttcagggggggcccgctcccaagctgcgagcattctaacaaaattccaggaactcaaggacgtgcaagacgagctgaggatcaaggaaaacgagctgagagctcttgaggaagagctggcaggacttaaaaacaccgccgagaagtaccggcagctgaaacagcagtgggagatgaagacagaggaagcagacctcctacaaacaaagcttcagcagtcttcataccataagcagcaggaagaactggatgccctgaagaagactattgaggagtccgaggagaccctaaagaacaccaaggaaatccagaggaaggccgaggagaagtacgaggtgttagaaaataaaatgaagaacgctgaggcagagcgagaacgagagcttaaggatgcacagaagaagctggattgtgccaaaacaaaggccgacgcctcgtctaaaaaaatgaaggagaaacagcaagaggttgaagctattaccctggagctggaagaattgaagcgggaacataccagttacaaacagcagctcgaggctgttaacgaagctattaaaagctacgagtcccaaattgaggtgatggccgccgaggtggctaagaataaggaaagcgtgaacaaggctcaggaagaggtgactaaacaaaaagaggtgattaccgcccaagacacggttattaaggccaaatatgccgaggtggccaaacacaaggagcaaaataacgattcccagctgaaaatcaaagaactcgaccataatatttcaaagcacaagagagaagccgaagatggggccgcaaaggtgtctaagatgctaaaggactacgactggatcaatgcagaacgtcacttgttcgggcagcccaattctgcttacgactttaagactaacaacccgaaggaggcaggccagaggttacaaaaactgcaggagatgaaggaaaaactaggccggaatgtgaatatgcgagcaatgaatgtgcttactgaggcggaggagaggtacaatgacctgatgaaaaagaaacggatagtcgagaatgacaaatctaaaatcctgaccaccatcgaagaccttgatcagaagaaaaaccaggctcttaacatcgcttggcagaaggtgaacaaagactttgggtctattttctctaccttgctgcctggggcaaatgcaatgcttgccccccctgaagggcaaaccgttctcgacgggcttgagtttaaggtagcactcggcaacacttggaaagaaaatctcaccgaactctcaggcgggcaaagacagaagcagcaaaatcacaccaccggttag

SEQ ID NO: 309755 - DNA, 3300 bp, Artificial Sequence
  derived and/or modified sequence
atgcacataaagtcgatcatcctggagggcttcaaatcctatgcgcagaggactgaagttaatgggttcgacccactcttcaacgctataacaggcctaaatggctccgggaaatccaatatactggactccatctgtttcttgctgggcatttcaaatttatcacaagttcgggctagcaacctgcaggatctggtgtacaagaatggacaggcaggcataaccaaagcttctgtgtcaattacattcgacaacagtgataagaagcagtcaccactgggcttcgaggtccatgacgagattacagttacaaggcaggtggtgatcggaggaaggaacaaatacctgattaatggcgtgaatgcgaacaacacgcgggtgcaggacttattctgcagcgtgggtcttaatgtcaacaacccccactttttgatcatgcagggcaggatcaccaaagtactgaatatgaaacctccagagatcctgtcaatgattgaggaagcagctggaacccgtatgtatgagtacaagaaaatcgctgcgcagaaaaccattgaaaagaaggaggccaagctcaaggagattaagacaattctggaagaggagataactccaacaatccagaaactgaaagaagagcgctccagttatctagagtaccaaaaggtaatgcgggagatcgagcatctatctaggttatatatcgcctatcagtttctactagcagaggacacaaaggtacggtccgcggaagagctcaaggagatgcaggacaaagtcattaagctacaggaggagctgtccgaaaacgataaaaagatcaaagctttaaaccatgaaatagaggagctagagaaacgcaaagataaagagactggaggaatcctgaggagtctggaggatgcgctcgccgaagcccagcgagtaaataccaagtcccagtcagcatttgaccttaaaaaaaagaatctggcttgcgaggaatcgaagcggaaagaactggagaagaacatggttgaggattctaagaccttggccgcaaaggagaaagaggttaagaagataactgatggtttacacgccctccaggaggcctcaaataaggatgcggaagccctggctgcggctcagcagcattttaatgccgtgagcgctgggctgtccagtaatgaagacggcgcagaggcaactcttgccggtcagatgatggcctgtaagaatgatatctcaaaggcgcagacagaggctaaacaggcacagatgaaactcaaacacgcccagcaggagttgaagaacaagcaggccgaggttaagaagatggatagcggctacagaaaggatcaggaagcattagaggcagttaagcgattgaaggaaaaactggaggctgagatgaaaaaactgaattatgaagaaaataaggaagagtctttactggagaaaagaagacaactttcgcgcgacataggtaggctgaaggaaacgtacgaagctctcttagcacgattccccaaccttcgatttgcgtacaaggaccccgaaaaaaactggaataggaactgcgtgaagggcttagtggcgtcattaatcagtgttaaagacacatctgctaccaccgcgcttgagttggtggccggagaacgcctgtacaacgtagtggtggatacagaagtgactggtaaaaagctgctcgagcgaggcgagctcaagcgcagatataccatcattcccctgaataaaatctctgccaggtgcattgccccagagaccttacgcgttgctcagaatctggtgggtcccgataacgtccatgtagccctatccctggttgaatacaaacccgagttacagaaggccatggaattcgtgtttggcacaaccttcgtttgtgacaacatggacaacgcaaagaaggtggccttcgacaaaaggataatgacaagaacagtaacattaggcggagacgtgtttgatccccatggcaccctgtctgggggagctaggagccaggcggcatcaattctgacaaagtttcaggaattaaaagacgtccaagacgaactacggattaaggagaacgaattaagggcattagaggaagagctcgcaggcttgaagaataccgctgaaaagtatagacagctcaaacagcagtgggaaatgaaaactgaggaagccgacctccttcagacgaaattacagcagtcttcctaccacaagcagcaagaggaactcgacgccctgaagaagaccattgaggagagcgaggaaacattgaaaaataccaaggagatccagagaaaggcagaagaaaagtatgaagtgctggagaacaaaatgaaaaacgccgaagcggagagagaacgcgaactgaaggatgcccaaaaaaagctcgattgtgctaagactaaggccgacgcaagttctaaaaagatgaaagagaagcagcaggaggtggaagctatcacccttgagcttgaagagctgaagcgagagcacaccagttacaagcagcagcttgaagccgttaatgaagccattaagtcctacgagtcccagatcgaagttatggccgcagaagtagccaagaacaaagagtcagtgaacaaggcacaggaggaggtgaccaagcagaaagaggtgattactgcgcaggacactgtgattaaggccaagtacgcagaggtggccaaacataaagagcaaaacaatgactcccaattgaagatcaaggagcttgaccataacatttcaaagcataaaagagaggcagaagatggggctgccaaagtttctaaaatgcttaaggactatgactggattaatgctgaaaggcacctgtttggacagcctaacagcgcatacgattttaagacaaataacccaaaagaggcgggacaacgcctccagaaactgcaggagatgaaagaaaagctgggtcgaaatgtgaatatgcgagcgatgaacgttctgacggaggctgaggagcgctataacgacctgatgaaaaagaagcggattgtcgaaaacgacaagtccaagatcctaactaccatcgaggacctggaccaaaagaagaaccaggccctgaacattgcttggcagaaggtcaataaagatttcggctcgattttctccacactgctacctggcgctaatgcgatgctagcccctcctgaaggccaaacagttcttgacggattagagtttaaggtggccctcggtaacacttggaaagagaatctgaccgagctgagcggaggccagagacagaagcagcagaaccatacaacaggctag

SEQ ID NO: 309756 - DNA, 3650 bp, Artificial Sequence
  derived and/or modified sequence
ggggcgcggggcgcgggggctgtagggagggggaccagtggcagagggaccttaggtgatccttagaaataaaggctagcttctgttcgaccttggagtagggcgaagaggtgtagacaggcctggagaagcgaggtaaaagcctgagtaaaagcaagaagttggagaatatgagatacatctcatctctagtaaatacttaaatgacttcccctcctcccggagtcaagcacaattcggggatgcaatgacggacgtaggtgaagacactgcgggaacttacagacaaaactggtttgtggcctgtttgattcctgtcagaggtttgctgacccaagacagtatcgaaaatgcatattaagtcaattattctagagggattcaagtcctatgctcagaggaccgaagtcaatggttttgaccccctcttcaatgctatcactggcttaaatggtagtgggaaatccaacatattggactccatctgctttttgctgggcatctccaacctgtctcaggttcgggcttctaatttacaagatttagtttacaaaaatgggcaggctggtattaccaaagcctctgtgtcaatcacttttgataattctgacaaaaagcaaagtcctttaggatttgaggttcatgatgaaatcacagtaacaaggcaggtggttattggtggtagaaataaatatttaatcaatggagtcaatgccaacaacaccagagtacaggatctcttctgttctgttggccttaatgttaacaaccctcactttctcatcatgcagggccgaattacaaaagtattgaatatgaaacctccagagattttatccatgatagaagaagcagctggaaccaggatgtatgaatacaaaaaaatagctgcacagaaaactatagaaaaaaaggaggctaagctgaaagaaattaagacgatacttgaagaagagattactccaaccattcaaaaattaaaagaggaaagatcgtcctacttggagtaccaaaaagtaatgagagaaatagaacatttgagtcgtttatatattgcttatcagtttttgctggctgaagataccaaagtacgctcagctgaggaattaaaagaaatgcaagataaagttataaagcttcaggaagaattgtctgagaatgataaaaaaataaaagcacttaatcatgaaatagaagaattggaaaaaagaaaagataaggaaactggaggtatacttcgatctttagaagatgctcttgcagaggctcagcgagttaatactaaatctcaaagcgcatttgatctcaagaagaaaaatctggcatgtgaggaaagcaaacgcaaagagctggaaaaaaatatggttgaggactcaaaaactttagcagcaaaggaaaaagaggttaaaaagataacagatggactgcatgcccttcaagaagcaagtaataaagatgctgaagctctggcagctgcacagcagcacttcaatgctgtttccgctggcctgtccagtaatgaagatggagcagaagcaactcttgctggtcaaatgatggcctgtaaaaatgatataagtaaagctcagacagaagccaaacaggctcagatgaagttgaagcatgctcaacaggaattaaagaataaacaagctgaagttaagaagatggatagtggctacaggaaggatcaagaagctctagaagctgtaaaaagacttaaagaaaaacttgaagctgaaatgaaaaagctaaattatgaagaaaataaagaggaaagccttttggaaaagcgcaggcagctgtctcgtgatattggtagattgaaagaaacatatgaagctctattagccagatttcccaatcttcgatttgcatacaaggatccagagaagaactggaatagaaattgtgtgaaaggacttgtggcttctctgattagtgtgaaagacacttctgcaaccacagctttagaattagtggctggagaacgactctacaatgttgtagtagacacagaagttactggtaaaaagctactagaaaggggggaactgaaacgtcgatacactataattccactcaataaaatttcagccagatgtattgcaccagaaactctgagagttgctcagaatcttgttggccctgacaacgttcatgtggctctttccttggttgaatataaaccagaacttcagaaagcaatggagtttgtctttggaacaacatttgtttgtgacaatatggataatgccaaaaaagtggcctttgataagaggataatgactagaactgtaactctcggaggtgatgtgtttgatcctcatgggacattgagtggaggtgctcgatcccaggcagcttccattttaaccaagtttcaagaactcaaagatgttcaggatgaactgagaatcaaagagaatgagctgcgggctctagaagaggaattagcaggtcttaaaaacactgctgaaaagtatcgccaactaaaacagcagtgggagatgaaaactgaagaggcagatttattacaaaccaagctccagcaaagctcatatcacaagcaacaagaagaattagatgcccttaaaaaaaccattgaggaaagtgaggagactttgaaaaacactaaagaaatccaaagaaaagcagaagaaaaatatgaagtattggaaaataaaatgaaaaatgcagaagctgaaagagagcgagaactgaaagatgctcagaaaaaactggattgtgccaaaacaaaggcagatgcatctagcaagaagatgaaagaaaaacaacaggaagttgaagctatcactctggaactggaagagctcaagagagagcatacatcttacaaacaacagcttgaagctgtaaatgaagctatcaaatcctatgaaagtcagattgaagtaatggcagctgaggtggctaaaaataaggagtcagtaaataaagctcaagaagaggtgaccaagcaaaaagaggtgataacagcccaagacactgtaattaaagctaaatatgcagaagtggcaaaacacaaggagcaaaacaatgattctcagcttaaaattaaggaattagaccacaacatcagcaaacataaacgggaggctgaagatggtgctgcaaaggtatccaaaatgttgaaagattatgactggattaatgcagagagacacctctttggccaacccaatagtgcctatgatttcaaaactaacaaccctaaagaagctggtcagagacttcagaagttgcaagaaatgaaggagaaactaggaagaaatgtcaatatgagagctatgaatgtattgacagaagctgaagagcgatacaatgacttgatgaagaagaagagaattgtagaaaatgacaaatccaaaattcttacaactatagaagaccttgaccagaagaaaaaccaagccctaaatattgcatggcaaaaggtgaacaaggactttgggtctattttttctactcttttgcctggtgctaatgctatgcttgcaccaccagagggtcaaactgttttggatggtctggagttcaaggttgccttgggaaatacctggaaagaaaacctaactgaacttagtggtggtcagagacaaaaacagcagaaccatactacaggttaa

SEQ ID NO: 309757 - DNA, 3300 bp, Artificial Sequence
  derived and/or modified sequence
atgcacatcaagagcatcatcctggagggcttcaagagctacgcccagagaaccgaggtgaacggcttcgaccccctgttcaacgccatcaccggcctgaacggcagcggcaagagcaacatcctggacagcatctgcttcctgctgggcatcagcaacctgagccaggtgagagccagcaacctgcaggacctggtgtacaagaacggccaggccggcatcaccaaggccagcgtgagcatcaccttcgacaacagcgacaagaagcagagccccctgggcttcgaggtgcacgacgagatcaccgtgaccagacaggtggtgatcggcggcagaaacaagtacctgatcaacggcgtgaacgccaacaacaccagagtgcaggacctgttctgcagcgtgggcctgaacgtgaacaacccccacttcctgatcatgcagggcagaatcaccaaggtgctgaacatgaagccccccgagatcctgagcatgatcgaggaggccgccggcaccagaatgtacgagtacaagaagatcgccgcccagaagaccatcgagaagaaggaggccaagctgaaggagatcaagaccatcctggaggaggagatcacccccaccatccagaagctgaaggaggagagaagcagctacctggagtaccagaaggtgatgagagagatcgagcacctgagcagactgtacatcgcctaccagttcctgctggccgaggacaccaaggtgagaagcgccgaggagctgaaggagatgcaggacaaggtgatcaagctgcaggaggagctgagcgagaacgacaagaagatcaaggccctgaaccacgagatcgaggagctggagaagagaaaggacaaggagaccggcggcatcctgagaagcctggaggacgccctggccgaggcccagagagtgaacaccaagagccagagcgccttcgacctgaagaagaagaacctggcctgcgaggagagcaagagaaaggagctggagaagaacatggtggaggacagcaagaccctggccgccaaggagaaggaggtgaagaagatcaccgacggcctgcacgccctgcaggaggccagcaacaaggacgccgaggccctggccgccgcccagcagcacttcaacgccgtgagcgccggcctgagcagcaacgaggacggcgccgaggccaccctggccggccagatgatggcctgcaagaacgacatcagcaaggcccagaccgaggccaagcaggcccagatgaagctgaagcacgcccagcaggagctgaagaacaagcaggccgaggtgaagaagatggacagcggctacagaaaggaccaggaggccctggaggccgtgaagagactgaaggagaagctggaggccgagatgaagaagctgaactacgaggagaacaaggaggagagcctgctggagaagagaagacagctgagcagagacatcggcagactgaaggagacctacgaggccctgctggccagattccccaacctgagattcgcctacaaggaccccgagaagaactggaacagaaactgcgtgaagggcctggtggccagcctgatcagcgtgaaggacaccagcgccaccaccgccctggagctggtggccggcgagagactgtacaacgtggtggtggacaccgaggtgaccggcaagaagctgctggagagaggcgagctgaagagaagatacaccatcatccccctgaacaagatcagcgccagatgcatcgcccccgagaccctgagagtggcccagaacctggtgggccccgacaacgtgcacgtggccctgagcctggtggagtacaagcccgagctgcagaaggccatggagttcgtgttcggcaccaccttcgtgtgcgacaacatggacaacgccaagaaggtggccttcgacaagagaatcatgaccagaaccgtgaccctgggcggcgacgtgttcgacccccacggcaccctgagcggcggcgccagaagccaggccgccagcatcctgaccaagttccaggagctgaaggacgtgcaggacgagctgagaatcaaggagaacgagctgagagccctggaggaggagctggccggcctgaagaacaccgccgagaagtacagacagctgaagcagcagtgggagatgaagaccgaggaggccgacctgctgcagaccaagctgcagcagagcagctaccacaagcagcaggaggagctggacgccctgaagaagaccatcgaggagagcgaggagaccctgaagaacaccaaggagatccagagaaaggccgaggagaagtacgaggtgctggagaacaagatgaagaacgccgaggccgagagagagagagagctgaaggacgcccagaagaagctggactgcgccaagaccaaggccgacgccagcagcaagaagatgaaggagaagcagcaggaggtggaggccatcaccctggagctggaggagctgaagagagagcacaccagctacaagcagcagctggaggccgtgaacgaggccatcaagagctacgagagccagatcgaggtgatggccgccgaggtggccaagaacaaggagagcgtgaacaaggcccaggaggaggtgaccaagcagaaggaggtgatcaccgcccaggacaccgtgatcaaggccaagtacgccgaggtggccaagcacaaggagcagaacaacgacagccagctgaagatcaaggagctggaccacaacatcagcaagcacaagagagaggccgaggacggcgccgccaaggtgagcaagatgctgaaggactacgactggatcaacgccgagagacacctgttcggccagcccaacagcgcctacgacttcaagaccaacaaccccaaggaggccggccagagactgcagaagctgcaggagatgaaggagaagctgggcagaaacgtgaacatgagagccatgaacgtgctgaccgaggccgaggagagatacaacgacctgatgaagaagaagagaatcgtggagaacgacaagagcaagatcctgaccaccatcgaggacctggaccagaagaagaaccaggccctgaacatcgcctggcagaaggtgaacaaggacttcggcagcatcttcagcaccctgctgcccggcgccaacgccatgctggccccccccgagggccagaccgtgctggacggcctggagttcaaggtggccctgggcaacacctggaaggagaacctgaccgagctgagcggcggccagagacagaagcagcagaaccacaccaccggctag

SEQ ID NO: 309758 - DNA, 438 bp, Artificial Sequence
  derived and/or modified sequence
atgcagggcagaatcaccaaggtgctgaacatgaagccccccgagatcctgagcatgatcgaggaggccgccggcaccagaatgtacgagtacaagaagatcgccgcccagaagaccatcgagaagaaggaggccaagctgaaggagatcaagaccatcctggaggaggagatcacccccaccatccagaagctgaaggaggagagaagcagctacctggagtaccagaaggtgatgagagagatcgagcacctgagcagactgtacatcgcctaccagttcctgctggccgaggacaccaaggtgagaagcgccgaggagctgaaggagatgcaggacaaggtgatcaagctgcaggaggagctgagcgagaacgacaagaagatcaaggccctgaaccacgagatcgaggagctggagaagagaaaggacaagtag

SEQ ID NO: 309759 - DNA, 1116 bp, Artificial Sequence
  derived and/or modified sequence
atgcacatcaagagcatcatcctggagggcttcaagagctacgcccagagaaccgaggtgaacggcttcgaccccctgttcaacgccatcaccggcctgaacggcagcggcaagagcaacatcctggacagcatctgcttcctgctgggcatcagcaacctgagccaggtgagagccagcaacctgcaggacctggtgtacaagaacggccaggccggcatcaccaaggccagcgtgagcatcaccttcgacaacagcgacaagaagcagagccccctgggcttcgaggtgcacgacgagatcaccgtgaccagacaggtggtgatcggcggcagaaacaagtacctgatcaacggcgtgaacgccaacaacaccagagtgcaggacctgttctgcagcgtgggcctgaacgtgaacaacccccacttcctgatcatgcagggcagaatcaccaaggtgctgaacatgaagccccccgagatcctgagcatgatcgaggaggccgccggcaccagaatgtacgagtacaagaagatcgccgcccagaagaccatcgagaagaaggaggccaagctgaaggagatcaagaccatcctggaggaggagatcacccccaccatccagaagctgaaggaggagagaagcagctacctggagtaccagaaggtgatgagagagatcgagcacctgagcagactgtacatcgcctaccagttcctgctggccgaggacaccaaggtgagaagcgccgaggagctgaaggagatgcaggacaaggtgatcaagctgcaggaggagctgagcgagaacgacaagaagatcaaggccctgaaccacgagatcgaggagctggagaagagaaaggacaaggagaccggcggcatcctgagaagcctggaggacgccctggccgaggcccagagagtgaacaccaagagccagagcgccttcgacctgaagaagaagaacctggcctgcgaggagagcaagagaaaggagctggagaagaacatggtggaggacagcaagaccctggccgccaaggagaaggagaagatcaagagaaaggccttctggaagagcgccggcagctgcctggtgatcctggtggactag

SEQ ID NO: 309760 - DNA, 438 bp, Artificial Sequence
  derived and/or modified sequence
atgcagggccgcatcactaaagtgctcaacatgaaacctccggaaatcctgtccatgattgaagaagccgccggcacaaggatgtatgagtacaaaaagatcgctgcccagaaaactatcgagaagaaggaagccaaattgaaggaaatcaaaacaatcctcgaggaagagattacaccgacaattcaaaagttgaaggaggagagaagcagttacttagagtaccagaaggtaatgcgtgagatagaacatctcagcaggctctatatcgcttaccaattcctcctggccgaagatactaaggtgagaagtgcagaggagctgaaggagatgcaggataaggtcatcaaacttcaggaggaactgtctgaaaatgataagaaaattaaggccttgaatcatgagatcgaggagctcgagaagaggaaggataaatag

SEQ ID NO: 309761 - DNA, 1116 bp, Artificial Sequence
  derived and/or modified sequence
atgcacattaaatcaatcatccttgagggctttaagtcctatgctcaaaggacagaggtgaatggtttcgatcccctctttaatgccatcaccggactgaacgggagtgggaagtccaatatcctggatagtatttgcttcctgctaggtatcagcaacctatctcaggttagggctagcaatttacaggacctggtctacaagaacggccaggcagggataacaaaagccagcgtttcaatcacctttgataactccgacaaaaaacaatcccccctggggtttgaagtgcatgatgagatcactgtgactagacaggtggtgatcggcgggcgcaataaatatctcatcaacggggttaacgctaacaacacccgtgtgcaggacctcttttgttcagtggggctgaatgtgaacaacccgcactttctgatcatgcagggtcgaatcacaaaggtattgaacatgaaaccccccgagattctcagcatgattgaagaagccgccggcactcgaatgtatgagtataagaagattgctgctcaaaagaccatcgagaaaaaggaagccaagctgaaggaaatcaaaacaattctggaggaggaaatcaccccgaccatccagaaactgaaagaagaaagatctagctatttggagtaccagaaagtgatgcgggaaatcgaacatctgagcagactgtacattgcctaccaattcctgctggcagaggatactaaggtaagatctgccgaagagcttaaggagatgcaagacaaagttataaaactgcaggaggagttgagcgagaatgataaaaagatcaaagctctaaatcacgagatcgaagagcttgagaagagaaaggataaagagacaggaggaatcctccgcagtcttgaagacgcgctggctgaagcacaacgcgtgaataccaagagccagtctgccttcgatctgaaaaagaaaaatctggcctgtgaagagagcaagcgtaaagagttggagaagaatatggtcgaggacagtaagactcttgctgctaaagaaaaagagaagattaagagaaaggccttttggaagtccgccggaagctgtctagttattctagttgattag

SEQ ID NO: 309762 - DNA, 438 bp, Artificial Sequence
  derived and/or modified sequence
atgcagggccgcatcaccaaggtgctgaacatgaagcccccagagatcctgtccatgattgaggaggccgccggcaccaggatgtatgagtacaagaagattgctgcccagaagaccatcgagaagaaggaggccaagctgaaggagatcaagaccatcctggaggaggagatcacccccaccatccagaagctgaaggaggagaggagcagctacctggagtaccagaaggtgatgagagaaattgagcacctgagccggctgtacatcgcctaccagttcctgctggccgaggacaccaaggtgcgctctgctgaggagctgaaggagatgcaggacaaggtgatcaagctgcaggaggagctgtctgaaaatgacaagaagatcaaggccctgaaccacgagattgaggagctggagaagaggaaggacaagtag

SEQ ID NO: 309763 - DNA, 1116 bp, Artificial Sequence
  derived and/or modified sequence
atgcacatcaagagcatcatcctggagggcttcaagagctatgcccagaggacagaggtgaatggatttgaccccctcttcaatgccatcaccggcctgaatggcagcggcaagagcaacatcctggacagcatctgcttcctgctgggcatcagcaacctgagccaggtgcgggccagcaacctgcaggacctggtgtacaagaatggccaggccggcatcaccaaggcctctgtgtccatcacctttgacaacagcgacaagaagcagagccccctgggctttgaggtgcatgatgagatcaccgtgacccggcaggtggtgattggaggcaggaacaagtacctgatcaacggggtgaatgccaacaacaccagggtgcaggacctcttctgcagcgtgggcctgaatgtgaacaacccccacttcctgatcatgcagggccgcatcaccaaggtgctgaacatgaagcccccagagatcctgtccatgattgaggaggccgccggcaccaggatgtatgagtacaagaagattgctgcccagaagaccatcgagaagaaggaggccaagctgaaggagatcaagaccatcctggaggaggagatcacccccaccatccagaagctgaaggaggagaggagcagctacctggagtaccagaaggtgatgagagaaattgagcacctgagccggctgtacatcgcctaccagttcctgctggccgaggacaccaaggtgcgctctgctgaggagctgaaggagatgcaggacaaggtgatcaagctgcaggaggagctgtctgaaaatgacaagaagatcaaggccctgaaccatgaaattgaggagctggagaagaggaaggacaaggagaccggcggcatcctgcggagcctggaggatgccctggccgaggcccagagggtgaacaccaagagccagagcgcctttgacctgaagaagaagaacctggcctgtgaggagagcaagaggaaggagctggagaagaacatggtggaggacagcaagaccctggccgccaaggagaaggagaagatcaagaggaaggccttctggaagtctgctggcagctgcctggtgatcctggtggactag

SEQ ID NO: 309764 - DNA, 438 bp, Artificial Sequence
  derived and/or modified sequence
atgcagggccggatcaccaaggtgctgaacatgaagccccccgagattctgtccatgattgaggaggccgctggcactcggatgtacgaatacaaaaaaatcgctgcacagaagactattgaaaagaaggaggccaagctgaaggagatcaagactattctcgaagaggagataactcccacaatccagaagctgaaagaagagcgctcgagctatctggagtaccagaaagtgatgcgggagatagagcatctgtctcgtctgtacatcgcataccagtttctgctggccgaggataccaaggtgaggagcgctgaagaactcaaggaaatgcaggataaagtgataaagttacaggaagaactgagcgagaacgataaaaagatcaaagctctgaaccacgaaattgaagaactcgaaaaaagaaaagataagtag

SEQ ID NO: 309765 - DNA, 1116 bp, Artificial Sequence
  derived and/or modified sequence
atgcacatcaagagcatcatcctggagggcttcaagagctacgcccagcgcactgaagttaatgggttcgacccgttatttaacgcaatcaccggactgaatgggagtggcaaatctaacatcctggactcaatctgttttctcctcggaatctctaaccttagccaggttcgtgctagtaacctccaggacttagtgtataagaatggccaagccggtataacaaaggcctccgtttcaattacttttgataactcggacaagaaacagagtccgctggggttcgaagtgcacgacgaaatcacagtgaccagacaggtagtgattggggggcgaaacaaatatttgatcaacggcgtgaacgcgaataacacaagggtgcaggatctattctgcagcgtgggcctcaatgtgaataacccccatttcctgatcatgcaaggacgaatcacaaaggtgctgaatatgaagccacccgaaattctgagcatgattgaagaagccgccggaacacgaatgtacgaatacaagaagattgcagcacagaaaacaattgaaaaaaaggaagctaaacttaaggaaataaagacaatcctcgaggaggagatcaccccaactatacaaaagttaaaagaggaaaggtcttcttacctcgaataccagaaggtcatgcgtgagatcgagcacttaagtcggttgtatattgcttatcagttcctgcttgcagaggacaccaaagtccgcagtgcagaggaattaaaggaaatgcaggacaaggtaatcaagctccaagaggaactatcagaaaatgacaaaaaaattaaagctttgaatcatgaaatcgaagaactggagaaacgtaaggacaaagaaaccgggggcatcctgcgaagcctggaggacgctcttgccgaagcccaacgtgttaacaccaaaagccagagtgcctttgacttgaaaaagaagaacctagcttgcgaagaaagcaaacggaaggaactggagaagaatatggtggaggattctaagaccctggccgcaaaagaaaaggagaagataaagagaaaagctttctggaagagtgccggcagctgcttggtgatattagtggactag

SEQ ID NO: 309766 - DNA, 438 bp, Artificial Sequence
  derived and/or modified sequence
atgcagggacgtattaccaaagtgctgaatatgaaacctcctgagatcctgtcaatgatagaagaagccgcaggcacaagaatgtatgagtataagaaaatagctgcacagaaaaccattgagaagaaggaagccaagctgaaagagatcaaaacgattctcgaggaggaaataactcccactatccaaaagcttaaggaggaaaggtctagctacctggagtatcaaaaggtgatgagggagattgagcacctttcacgtctgtacatcgcctatcagttcttgttggccgaagatacaaaagtacgtagcgctgaagaactgaaagagatgcaggacaaagtgatcaagttacaagaggaattgtctgagaacgataagaagatcaaagctctgaatcacgagatcgaagagctggaaaagagaaaagataagtag

SEQ ID NO: 309767 - DNA, 1116 bp, Artificial Sequence
  derived and/or modified sequence
atgcatatcaaatctataatcctcgaaggatttaaatcatatgcccagaggaccgaggtgaatggcttcgaccctttgttcaatgctatcactgggttgaacggaagtggcaagtctaatatactggatagcatttgtttcttactggggatctccaatctctcacaagtacgagcttctaacctgcaggacctcgtttacaagaatgggcaagccggaatcaccaaggcgagcgtttctattacctttgacaattcggacaaaaagcagtctcctctaggcttcgaggtacacgacgaaattacggtgacgcgtcaggttgtgatcgggggacggaataagtacctgattaatggagtcaacgctaataacactcgggttcaggacctgttctgcagtgtcggcctgaatgtgaacaacccgcacttcctcattatgcagggccgtattacaaaggtgttgaatatgaagccgcctgagatattatccatgatcgaggaggccgctggtacaaggatgtatgaatataaaaagatagccgcacagaagactatcgagaaaaaggaggccaagctcaaggagattaaaactatactcgaggaggaaataactccaacgatccagaaactgaaagaggagcggtccagctacctcgagtaccagaaagtgatgcgggagatagagcatctgagtcgcttgtatattgcctaccagttcctcctggctgaggatacaaaagtaagaagtgcagaggagctaaaggaaatgcaggacaaggtaattaagctccaggaagagttgtccgagaatgacaagaaaatcaaagcattaaatcacgagatcgaagagctcgaaaagagaaaagataaagagacgggcggaattttgaggagcctcgaagatgccctggccgaggctcagcgggtgaacactaaatcccagagcgcgtttgatttaaagaagaagaacctggcgtgtgaggagtcaaaacgtaaagagctcgaaaagaatatggtcgaggatagtaagacattggctgctaaggaaaaagaaaagattaagagaaaagccttctggaagtctgctggctcgtgccttgtgatcctggttgattag

SEQ ID NO: 309768 - DNA, 705 bp, Artificial Sequence
  derived and/or modified sequence
cgcgccgaaattcaaaggaataaatagttccggcgcgggtgttgagagcggtgtggcaggtgttgtagccgctatggtgaagttcgctttgtagcggccccggctagagagttgttctgttccctgcctttgtgacccggaggagcttttggggtggttattggtggtagaaataaatatttaatcaatggagtcaatgccaacaacaccagagtacaggatctcttctgttctgttggccttaatgttaacaaccctcactttctcatcatgcagggccgaattacaaaagtattgaatatgaaacctccagagattttatccatgatagaagaagcagctggaaccaggatgtatgaatacaaaaaaatagctgcacagaaaactatagaaaaaaaggaggctaagctgaaagaaattaagacgatacttgaagaagagattactccaaccattcaaaaattaaaagaggaaagatcgtcctacttggagtaccaaaaagtaatgagagaaatagaacatttgagtcgtttatatattgcttatcagtttttgctggctgaagataccaaagtacgctcagctgaggaattaaaagaaatgcaagataaagttataaagcttcaggaagaattgtctgagaatgataaaaaaataaaagcacttaatcatgaaatagaagaattggaaaaaagaaaagataag

SEQ ID NO: 309769 - protein, 171 aa, Artificial Sequence
  derived and/or modified sequence
MAGQPGHMPHGGSSNNLCHTLGPVHPPDPQRHPNTLSFRCSLADFQIEKKIGRGQFSEVYKATCLLDRKTVALKKVQIFEMMDAKARQDCVKEIGLLKQLNHPNIIKYLDSFIEDNELNIVLELADAGDLSQMIKYFKKQKRLIPERTVWKYFVQLCSAVEHMHSRRVMHR

SEQ ID NO: 309770 - protein, 201 aa, Artificial Sequence [sequence omitted]

SEQ ID NO: 309771 - DNA, 624 bp, Artificial Sequence
  derived and/or modified sequence
atggccggacaaccgggtcacatgccacacggggggtcttcaaacaacctgtgccatactcttgggcccgtacatcctcctgatccccagcgccatccaaacaccctgtcctttcgatgtagtctcgccgatttccaaattgaaaagaagattgggcgtggccagttttccgaggtgtacaaggccacatgcctgctggacagaaagacggtcgccttgaaaaaagtgcagatatttgagatgatggacgccaaagcccggcaggattgcgtcaaggagatcggacttctcaagcaattaaatcatcctaacataattaaataccttgactccttcatagaagacaatgagctaaatatagtgctggagcttgcagacgccggggatctatctcagatgattaagtatttcaagaagcagaagcggcttattcccgagaggactgtatggaaatatttcgttcaactctgttcagcagtagagcatatgcatagtagacgcgtgatgcacagggacattaaaccagctaatgtatttattacagcaactggggtggtgaaactaggggacctaggtttggggaggttcttcagctctgagacaaccgctgcccatagtctgtag

SEQ ID NO: 309772 - DNA, 663 bp, Artificial Sequence
  derived and/or modified sequence
atggcaggccagcctggtcacatgccccatggagggagtagcaataacttgtgccacacactcggacccgtgcacccccccgatccccagaggcacccgaacactctatccttcaggtgtagcttggctgatttccagatcgaaaagaagattggcagggggcagtttagcgaagtctacaaggccacctgccttctggatcggaagactgtagcgctgaagaaggtgcaaatttttgaaatgatggatgcaaaagcaagacaggattgcgtcaaggaaatcggacttttgaaacagctcaaccaccccaacatcattaagtatcttgactcttttattgaagataatgaactgaatatagtgctggagctggcagatgcaggagaccttagtcagatgattaaatacttcaaaaagcagaagcgcctcatccctgaacgtaccgtctggaaatactttgtccaactgtgtagtgccgtggagcacatgcacagccggagggtgatgcacagagacatcaaacccgcaaacgtgttcatcaccgccactggtgtggttaaactgggcgacctcggtctcgggagatttttttcatcagagacaacagccgctcatagcctggtaggaacaccctactacatgagccctgaacgtatacactag

SEQ ID NO: 309773 - DNA, 669 bp, Artificial Sequence
  derived and/or modified sequence
atggccgggcagccaggccacatgccccacgggggcagtagcaacaacctgtgccatacgcttggcccagtgcatcctcccgacccccagcgccatccaaatactctctccttccgctgttccctggccgatttccagattgaaaagaaaatcgggcgaggccaattttccgaagtctataaagcaacatgcctgctggatcggaaaacagtggcactcaagaaggtgcagatcttcgagatgatggacgcaaaagcacgacaagattgcgtgaaagagatcgggctcttgaagcagctcaaccatcctaacatcattaagtatcttgactcctttattgaagataacgagctgaatatcgttctggaactggctgacgccggcgatctgtcccagatgatcaaatacttcaagaaacagaaacgattgataccagaaagaacagtctggaaatacttcgtacaactgtgttcagctgtcgaacatatgcatagccggcgagttatgcacagggacatcaaacctgctaacgtgttcatcacagccacaggcgtggtaaaattgggcgacctgggccttggcaggttcttctcatctgagactaccgcagctcatagcctggtggggactccctattacatgtcccctgagaggattcatgagaactag

SEQ ID NO: 309774 - DNA, 660 bp, Artificial Sequence
  derived and/or modified sequence
atggctggccaaccaggccacatgccccacggaggatccagcaataatctctgccatacactggggcctgtgcacccaccagatccccagcgacaccccaacaccctctcctttcgctgctccctagcggacttccagatcgagaaaaagattgggcgcgggcagttttcagaagtgtataaagcgacctgtcttctggaccgcaaaactgtcgcccttaaaaaggtccagatttttgagatgatggacgcaaaagcgcggcaggactgtgtgaaagaaattgggctgcttaaacaacttaatcatcccaacatcattaagtacctggactccttcatcgaggacaacgagttgaacatcgtgctagagctggctgatgctggtgatctctcacaaatgattaaatacttcaagaagcaaaagaggctgattcccgagcgaaccgtgtggaaatattttgtacagctctgttctgccgtggagcacatgcacagcaggagagtgatgcacagagatataaagcctgctaacgtgttcatcacagccactggggtcgtcaaactcggggatctcgggctgggtcggtttttctccagtgagacaaccgccgcccattcactagttggaacaccttactacatgtcccctgaacggatttag

SEQ ID NO: 309775 - DNA, 516 bp, Artificial Sequence
  derived and/or modified sequence
atggccggacaacccgggcacatgcctcatggaggctcaagcaacaatttatgccataccctaggcccggttcacccccctgatccccagagacatccaaacaccctgtcattccgatgctcccttgccgacttccaaattgagaagaaaattggcaggggtcagttctccgaggtgtacaaggccacgtgtctcctggacagaaagacagtcgctcttaagaaggtacagatctttgagatgatggatgccaaagcccggcaggattgtgtgaaagaaattggtctgctaaaacagttgaatcaccccaatatcatcaaatatttggactccttcatagaagataatgaactcaatatagtactggagctggccgacgcaggggatctgtcacaaatgattaaatactttaagaagcagaaaagattgatccccgagcgcaccgtttggaaatacttcgtgcagctgtgctccgcagtcgagcacatgcactctcgccgagtgatgcataggtag

SEQ ID NO: 309776 - DNA, 606 bp, Artificial Sequence
  derived and/or modified sequence
atggctgggcagcccggccatatgccccatggaggaagctccaacaacttgtgccacactctcggacctgtgcatcctccggatccgcagcagctcaatcatcctaacataatcaagtatcttgactcttttatcgaggataacgaactgaatatcgtgttggagctcgcagacgccggcgatctgtctcagatgattaaatacttcaagaaacagaaaaggttgatccctgagagaaccgtgtggaaatacttcgtccaattgtgctccgcagtcgagcacatgcactcgcgtagagtgatgcatagagacatcaaacctgctaacgtttttattacagctaccggcgtggtgaaactgggcgatttgggactgggccgattcttttccagcgagaccactgccgctcacagtttggtggggacgccctactatatgtcaccagagagaatccatgaaaacggatataacttcaaatctgatatttggtccctcggatgcctgttgtacgagatggccgccctgcagagcccattctacggcgacaagatgaacttattcagcctgtgccagaagattgagcagtgcgactaccctccattatag

SEQ ID NO: 309777 - DNA, 624 bp, Artificial Sequence
  derived and/or modified sequence
atggccggccagcccggccacatgccccacggcggcagcagcaacaacctgtgccacaccctgggccctgtgcaccccccagacccccagaggcaccccaacaccctgtccttccgctgcagcctggccgacttccagatcgagaagaagattggccggggccagttcagcgaggtgtacaaggccacctgcctgctggacaggaagacagtggccctgaagaaggtgcagatctttgagatgatggatgccaaggcccggcaggactgtgtgaaggagatcggcctgctgaagcagctgaaccaccccaacatcatcaagtacctggacagcttcatcgaggacaatgagctgaacatcgtgctggagctggctgatgctggggacctgagccagatgatcaagtacttcaagaagcagaagaggctcatccctgagaggacagtgtggaagtactttgtgcagctgtgcagcgctgtggagcacatgcacagccggcgggtgatgcaccgggacatcaagccagccaacgtgttcatcacagccactggagtggtgaagctgggggacctgggcctgggccgcttcttcagcagcgagaccacagctgcccacagcctgtag

SEQ ID NO: 309778 - DNA, 663 bp, Artificial Sequence
  derived and/or modified sequence
atggccggccagcccggccacatgccccacggcggcagcagcaacaacctgtgccacaccctgggccctgtgcaccccccagacccccagaggcaccccaacaccctgtccttccgctgcagcctggccgacttccagatcgagaagaagattggccggggccagttcagcgaggtgtacaaggccacctgcctgctggacaggaagacagtggccctgaagaaggtgcagatctttgagatgatggatgccaaggcccggcaggactgtgtgaaggagatcggcctgctgaagcagctgaaccaccccaacatcatcaagtacctggacagcttcatcgaggacaatgagctgaacatcgtgctggagctggctgatgctggggacctgagccagatgatcaagtacttcaagaagcagaagaggctcatccctgagaggacagtgtggaagtactttgtgcagctgtgcagcgctgtggagcacatgcacagccggcgggtgatgcaccgggacatcaagccagccaacgtgttcatcacagccactggagtggtgaagctgggggacctgggcctgggccgcttcttcagcagcgagaccacagctgcccacagcctggtgggcaccccctactacatgagccctgagcgcatccactag

SEQ ID NO: 309779 - DNA, 669 bp, Artificial Sequence
  derived and/or modified sequence
atggccggccagcccggccacatgccccacggcggcagcagcaacaacctgtgccacaccctgggccctgtgcaccccccagacccccagaggcaccccaacaccctgtccttccgctgcagcctggccgacttccagatcgagaagaagattggccggggccagttcagcgaggtgtacaaggccacctgcctgctggacaggaagacagtggccctgaagaaggtgcagatctttgagatgatggatgccaaggcccggcaggactgtgtgaaggagatcggcctgctgaagcagctgaaccaccccaacatcatcaagtacctggacagcttcatcgaggacaatgagctgaacatcgtgctggagctggctgatgctggggacctgagccagatgatcaagtacttcaagaagcagaagaggctcatccctgagaggacagtgtggaagtactttgtgcagctgtgcagcgctgtggagcacatgcacagccggcgggtgatgcaccgggacatcaagccagccaacgtgttcatcacagccactggagtggtgaagctgggggacctgggcctgggccgcttcttcagcagcgagaccacagctgcccacagcctggtgggcaccccctactacatgagccctgagcgcatccatgaaaattag

SEQ ID NO: 309780 - DNA, 660 bp, Artificial Sequence
  derived and/or modified sequence
atggccggccagcccggccacatgccccacggcggcagcagcaacaacctgtgccacaccctgggccctgtgcaccccccagacccccagaggcaccccaacaccctgtccttccgctgcagcctggccgacttccagatcgagaagaagattggccggggccagttcagcgaggtgtacaaggccacctgcctgctggacaggaagacagtggccctgaagaaggtgcagatctttgagatgatggatgccaaggcccggcaggactgtgtgaaggagatcggcctgctgaagcagctgaaccaccccaacatcatcaagtacctggacagcttcatcgaggacaatgagctgaacatcgtgctggagctggctgatgctggggacctgagccagatgatcaagtacttcaagaagcagaagaggctcatccctgagaggacagtgtggaagtactttgtgcagctgtgcagcgctgtggagcacatgcacagccggcgggtgatgcaccgggacatcaagccagccaacgtgttcatcacagccactggagtggtgaagctgggggacctgggcctgggccgcttcttcagcagcgagaccacagctgcccacagcctggtgggcaccccctactacatgagccctgagcgcatctag

SEQ ID NO: 309781 - DNA, 516 bp, Artificial Sequence
  derived and/or modified sequence
atggccggccagcccggccacatgccccacggcggcagcagcaacaacctgtgccacaccctgggccctgtgcaccccccagacccccagaggcaccccaacaccctgtccttccgctgcagcctggccgacttccagatcgagaagaagattggccggggccagttcagcgaggtgtacaaggccacctgcctgctggacaggaagacagtggccctgaagaaggtgcagatctttgagatgatggatgccaaggcccggcaggactgtgtgaaggagatcggcctgctgaagcagctgaaccaccccaacatcatcaagtacctggacagcttcatcgaggacaatgagctgaacatcgtgctggagctggctgatgctggggacctgagccagatgatcaagtacttcaagaagcagaagaggctcatccctgagaggacagtgtggaagtactttgtgcagctgtgcagcgctgtggagcacatgcacagccggcgggtgatgcacaggtag

SEQ ID NO: 309782 - DNA, 606 bp, Artificial Sequence
  derived and/or modified sequence
atggccggccagcccggccacatgccccacggcggcagcagcaacaacctgtgccacaccctgggccctgtgcaccccccagacccccagcagctgaaccaccccaacatcatcaagtacctggacagcttcatcgaggacaatgagctgaacatcgtgctggagctggctgatgctggggacctgagccagatgatcaagtacttcaagaagcagaagaggctcatccctgagaggacagtgtggaagtactttgtgcagctgtgcagcgctgtggagcacatgcacagccggcgggtgatgcaccgggacatcaagccagccaacgtgttcatcacagccactggagtggtgaagctgggggacctgggcctgggccgcttcttcagcagcgagaccacagctgcccacagcctggtgggcaccccctactacatgagccctgagcgcatccatgaaaatggctacaacttcaagagtgacatctggagcctgggctgcctgctgtatgagatggccgccctgcagagccccttctacggggacaagatgaacctcttcagcctgtgccagaagattgagcagtgtgactacccacccctgtag

SEQ ID NO: 309783 - DNA, 624 bp, Artificial Sequence
  derived and/or modified sequence
atggccggccagcccggccacatgccccacggcggcagcagcaacaatctgtgtcataccctggggccggttcaccctcctgaccctcagcgccaccccaacacccttagcttccggtgctcacttgcagattttcagattgaaaaaaaaataggaaggggacaattctccgaggtgtacaaagccacttgcctgcttgacagaaaaaccgtggccttaaagaaagtgcagatcttcgagatgatggatgccaaggctcggcaagactgcgtgaaggagatcggcctgcttaaacagctaaaccaccctaatatcattaagtatcttgacagttttatcgaggataatgagctgaacatagtcctggaactcgcggacgctggggatctgtcacaaatgatcaagtacttcaaaaagcagaagcggctcatcccggaacgaaccgtctggaaatactttgttcagttatgttcagccgtggagcatatgcatagtaggcgcgtgatgcatcgcgatataaagcctgcgaacgttttcatcacggccacaggcgttgttaagttaggcgacctggggctgggaagattcttcagtagtgaaaccacagccgctcattcactgtag

SEQ ID NO: 309784 - DNA, 663 bp, Artificial Sequence
  derived and/or modified sequence
atggccggccagcccggccacatgccccacggcggcagcagcaacaatctgtgtcatacgctgggccctgtgcaccccccagatccacagcgtcaccccaatactcttagctttcggtgtagtctcgccgactttcagatcgagaaaaagattggaagaggccagttctctgaagtttataaggcaacctgtttgctcgatcgcaagacagtcgcactgaaaaaagtgcagatctttgagatgatggacgcaaaagcgaggcaagattgcgtgaaagagataggcctgctaaagcagttgaatcacccaaatatcataaaatatcttgatagtttcatagaggataatgagctgaacatcgtgttagaattggcagacgcgggagatttatcacagatgattaagtatttcaagaagcagaaaaggctgattcccgagagaaccgtatggaagtattttgtgcagctgtgctctgctgtggaacacatgcatagtcggcgggtgatgcaccgagacattaagccggccaacgtgtttataactgctaccggggtggtgaagttgggcgatctgggcttgggccggtttttttctagtgaaactacggccgcccactctctggtggggacaccttattacatgagcccagagcggatacactag

SEQ ID NO: 309785 - DNA, 669 bp, Artificial Sequence
  derived and/or modified sequence
atggccggccagcccggccacatgccccacggcggcagcagcaacaacttgtgccacactttgggtccagtgcatccacccgatcctcagcggcatccaaataccctctcattccggtgcagcctggcggactttcagatcgagaaaaagatcggcaggggacagttctctgaggtatacaaggcaacctgcctgcttgaccgcaagacagtcgccctcaagaaggtccagattttcgaaatgatggacgctaaggcccgccaggattgcgtgaaggaaatcgggctactcaaacagctgaaccatcctaatattatcaaatatctcgattcattcatcgaagataacgagctgaatattgtgctagagttggctgacgcaggcgacttgtctcaaatgattaaatattttaagaagcagaaaaggctgatacccgaaagaaccgtgtggaagtacttcgtccaactgtgctcagctgtggaacacatgcattcccgacgggtcatgcaccgcgatattaaaccagcgaacgtctttataacggctactggagttgttaagttgggagatctgggtctgggcaggttttttagctccgagaccaccgccgcccatagtcttgtgggaaccccttactacatgtcccccgagcggattcacgagaattag

SEQ ID NO: 309786 - DNA, 660 bp, Artificial Sequence
  derived and/or modified sequence
atggccggccagcccggccacatgccccacggcggcagcagcaacaacctgtgccataccctcggcccggtgcaccccccagaccctcaaagacaccctaataccttgtcattcagatgctctctcgcagatttccagatagaaaaaaaaattggccgcgggcaattcagcgaagtttataaggctacatgtctcctggataggaagaccgtggcacttaaaaaggtgcagatattcgagatgatggacgccaaagcccgtcaggactgcgtgaaagaaatcggtcttctgaagcaactgaaccatcccaatattatcaagtatctagattcgtttatagaagacaatgagcttaacatcgtcttggagctggccgatgcaggcgacttgagtcagatgattaaatactttaagaagcagaaacgcctgattcccgagcggacggtgtggaagtatttcgtgcagctgtgctcagctgtggagcatatgcactctcgtcgggtgatgcacagagatattaaaccagccaacgttttcatcacagccacaggcgtggtgaagctgggcgacctggggcttggtaggttcttttcctccgagaccactgcagctcattctttggttgggaccccttactacatgtcccccgagaggatttag

SEQ ID NO: 309787 - DNA, 516 bp, Artificial Sequence
  derived and/or modified sequence
atggccggccagcccggccacatgccccacggcggcagcagcaacaatctgtgccacacactcggtcctgtccaccctccagacccccagcgacacccgaacaccctgtccttcaggtgttcgctagcagacttccagattgagaaaaagatcggccggggacaatttagtgaagtctataaagccacttgtttgttagatagaaagaccgtcgcactgaaaaaagttcaaatttttgagatgatggatgctaaagccagacaggattgtgtcaaggaaataggactgctcaagcagctaaaccacccaaatattataaaatacctggatagcttcattgaggacaacgaattgaatattgtccttgaactggctgatgctggcgacttgagtcagatgattaaatactttaaaaagcaaaaaaggctgatccccgagcggacggtctggaaatatttcgttcaactttgctctgcggtggagcatatgcatagcagacgggttatgcaccggtag

SEQ ID NO: 309788 - DNA, 606 bp, Artificial Sequence
  derived and/or modified sequence
atggccggccagcccggccacatgccccacggcggcagcagcaacaatctgtgtcacacattgggacccgtgcaccccccagacccacagcagcttaaccatccaaatatcatcaagtacttggactcatttattgaggacaacgaactcaacatcgtgctggagcttgctgatgccggagacctatcacagatgataaagtactttaaaaagcagaaacgtcttattccggagcgcacagtgtggaaatacttcgtgcagttgtgttcagccgtggagcatatgcactcacggcgggtgatgcatagggatataaaaccagctaacgttttcatcacagccaccggagtggttaagctgggggatcttggtctcgggagattttttagctctgaaaccactgctgcacattctctggttgggacaccatattatatgtcccctgagagaatacatgagaatgggtacaattttaaatcagatatttggtctcttgggtgcttgttatatgagatggctgctcttcagtcccctttttatggagacaaaatgaacctgttctctttgtgccagaagatcgaacagtgtgactaccccccactgtag

SEQ ID NO: 309789 - DNA, 732 bp, Artificial Sequence
  derived and/or modified sequence
gcggccgggcgggcgggggcggcgtgtccgcgtgtcccggggtgtgcgcgtccccggcgggtgtgcgtgtgcaccccggagcgtctggtggcgttgttgggttcgtgccctcgtgaggctggcatgcaggatggcaggacagcccggccacatgccccatggagggagttccaacaacctctgccacaccctggggcctgtgcatcctcctgacccacagcaactgaaccacccaaatatcatcaagtatttggactcgtttatcgaagacaacgagctgaacattgtgctggagttggctgacgcaggggacctctcgcagatgatcaagtactttaagaagcagaagcggctcatcccggagaggacagtatggaagtactttgtgcagctgtgcagcgccgtggagcacatgcattcacgccgggtgatgcaccgagacatcaagcctgccaacgtgttcatcacagccacgggcgtcgtgaagctcggtgaccttggtctgggccgcttcttcagctctgagaccaccgcagcccactccctagtggggacgccctactacatgtcaccggagaggatccatgagaacggctacaacttcaagtccgacatctggtccctgggctgtctgctgtacgagatggcagccctccagagccccttctatggagataagatgaatctcttctccctgtgccagaagatcgagcagtgtgactaccccccact

SEQ ID NO: 309790 - DNA, 624 bp, Artificial Sequence
  derived and/or modified sequence
atggctggtcagccaggacatatgccccacggaggatcctctaacaatctttgccatactctcggcccagtacacccacccgatccacaaagacaccctaataccttgagcttccgttgctctttagccgatttccaaatagagaagaagatcgggcgaggtcagttctccgaagtgtataaagcaacctgtctgctcgatcggaaaactgtcgctttgaagaaggttcagatctttgaaatgatggatgccaaagcacgacaagactgtgttaaggaaattggactactgaaacagcttaaccatccaaacatcatcaagtatctcgattcatttatcgaggataacgagctcaacatagtcctcgagttggccgacgctggtgacctgagtcagatgatcaaatacttcaagaagcagaagcgtcttattcccgaacgaaccgtgtggaaatacttcgtccagctttgctcagctgtggaacacatgcactcccggcgagtaatgcaccgcgatatcaaacccgcaaacgtcttcataactgctactggtgttgtgaaactgggggacctgggtctcggtaggttctttagcagtgaaactaccgccgcacatagcctgtag

SEQ ID NO: 309791 - DNA, 663 bp, Artificial Sequence
  derived and/or modified sequence
atggccggtcagcccggacatatgccacacgggggatcatcgaataacctgtgtcatacactggggccagtccatccccctgacccacagagacatcccaacaccctgtcattccgctgctccctcgccgactttcagatcgagaaaaagatcggccgaggacagttcagcgaggtgtacaaagcgacctgtcttctggaccgcaagactgttgcactgaagaaagtccagattttcgaaatgatggacgctaaggccaggcaggactgcgttaaggaaatagggctgctcaagcagctgaaccacccaaacatcatcaagtacctagactctttcatagaggataacgaacttaatattgtcttggagctggcggatgcgggagacctgagtcagatgatcaagtatttcaagaaacagaaaagattgataccagagaggaccgtgtggaaatattttgtccagctatgttcagccgttgagcacatgcatagccgtagagtaatgcatcgcgatattaagccggctaatgtgttcatcactgccactggtgttgtgaagctaggagaccttggtctgggtcggtttttttccagtgagaccaccgctgcacactccctcgtagggaccccctattacatgtctcccgagagaatacactag

SEQ ID NO: 309792 - DNA, 669 bp, Artificial Sequence
  derived and/or modified sequence
atggcaggacagccaggtcatatgccacacggcggttcatccaataatctgtgccacaccctggggccagtgcatcccccagatccacaacgccatcccaatacattgagtttccggtgctctttggccgacttccagattgagaaaaaaatcggaagaggccagttctcagaagtgtataaggctacttgcctcctcgacagaaagacagtagccctgaagaaagtgcaaatcttcgagatgatggacgccaaggccagacaggattgtgtgaaggagatcggactactgaagcagttgaaccatcccaatatcattaagtacctggattctttcatcgaggacaatgagctgaacattgtacttgagctggcggatgccggagatcttagccagatgataaagtactttaaaaagcagaagcgactgatcccagagcggaccgtgtggaaatattttgtgcaactttgttctgccgtcgagcatatgcacagccgacgagttatgcacagagatattaaaccagccaatgtattcatcactgccacgggagtggtgaaactaggcgatttagggctggggaggtttttttctagtgagacaacagccgcacacagccttgtaggcaccccctactatatgagccctgaacggatccatgagaactag

SEQ ID NO: 309793 - DNA, 660 bp, Artificial Sequence
  derived and/or modified sequence
atggcaggccagcctgggcatatgccccatgggggtagttccaataatttatgtcatacgctggggcctgtccaccccccagacccccagcggcaccctaataccctgagttttagatgtagtctggctgacttccagatcgaaaaaaaaattggtcgcggacagttttccgaagtttataaagcgacatgccttctggaccggaagacggtggcgctgaaaaaggttcaaatctttgagatgatggacgcaaaagcccgacaggactgcgtgaaggagatcggactgttgaaacagttaaaccacccaaacatcatcaagtatttggatagttttatagaagacaacgagctgaacattgtgctggaactcgctgatgcaggcgacctgagccagatgatcaaatatttcaagaaacagaagcgactgatacctgaaaggactgtttggaaatacttcgtccagctttgtagcgctgtggagcacatgcacagccgtagggtgatgcatagggatatcaagcccgctaatgtattcattacggccactggtgtcgtgaagcttggcgacctcggacttggaaggtttttctcaagcgagacgacggcagcccattccttggtcggcaccccgtactacatgagcccagagaggatttag

SEQ ID NO: 309794 - DNA, 516 bp, Artificial Sequence
  derived and/or modified sequence
atggccggacagcctggtcacatgcctcacggcggatccagtaataatttatgccacaccttagggccagttcaccccccagatcctcagcggcatccgaacaccctctcatttcggtgctctttagctgacttccagatcgaaaaaaagatcggccgagggcaattcagtgaggtatacaaagcaacctgtttgctggaccgcaaaaccgtagctttgaagaaagtgcagatttttgagatgatggatgccaaggcaagacaagattgcgtgaaggaaatcgggctcctcaagcagctcaaccaccctaacattatcaagtacctcgattctttcatcgaagataatgagctgaatattgtgctcgagctggcagatgcaggtgatctttctcagatgatcaaatatttcaagaagcaaaaacgtctgattcctgagcgcaccgtatggaagtactttgtgcagttgtgtagcgctgtcgaacatatgcacagccgtagggtgatgcaccgctag

SEQ ID NO: 309795 - DNA, 606 bp, Artificial Sequence
  derived and/or modified sequence
atggccggtcaacccggacacatgccccacggcggatcttccaacaatctttgccataccctcggacccgtacatccacctgatccacagcagctgaatcatccaaatattatcaagtatctggattcatttatcgaagataatgagctgaacatcgtgctggagctcgcagacgctggggatctatctcagatgattaagtactttaagaagcaaaagcgcctcataccagagaggacggtgtggaaatactttgtgcagctctgttcggctgtggagcatatgcatagccgtcgggtgatgcatcgggacatcaagccagcgaatgtgtttattacagccactggggtggttaagcttggagatctgggactgggcaggttcttttcctcagagacgacagccgcacattcactggtgggaaccccctattacatgtcccctgaacggatccacgagaatggttataatttcaaatccgacatttggtctttggggtgcttattgtacgaaatggccgcacttcagtctccgttttatggcgacaaaatgaacctattcagcctctgtcagaagatagagcaatgcgattaccctccactgtag

SEQ ID NO: 309796 - DNA, 624 bp, Artificial Sequence
  derived and/or modified sequence
atggccggccagcccggccacatgccccacggcggcagcagcaacaacctgtgccacaccctgggccccgtgcacccccccgacccccagagacaccccaacaccctgagcttcagatgcagcctggccgacttccagatcgagaagaagatcggcagaggccagttcagcgaggtgtacaaggccacctgcctgctggacagaaagaccgtggccctgaagaaggtgcagatcttcgagatgatggacgccaaggccagacaggactgcgtgaaggagatcggcctgctgaagcagctgaaccaccccaacatcatcaagtacctggacagcttcatcgaggacaacgagctgaacatcgtgctggagctggccgacgccggcgacctgagccagatgatcaagtacttcaagaagcagaagagactgatccccgagagaaccgtgtggaagtacttcgtgcagctgtgcagcgccgtggagcacatgcacagcagaagagtgatgcacagagacatcaagcccgccaacgtgttcatcaccgccaccggcgtggtgaagctgggcgacctgggcctgggcagattcttcagcagcgagaccaccgccgcccacagcctgtag

SEQ ID NO: 309797 - DNA, 663 bp, Artificial Sequence
  derived and/or modified sequence
atggccggccagcccggccacatgccccacggcggcagcagcaacaacctgtgccacaccctgggccccgtgcacccccccgacccccagagacaccccaacaccctgagcttcagatgcagcctggccgacttccagatcgagaagaagatcggcagaggccagttcagcgaggtgtacaaggccacctgcctgctggacagaaagaccgtggccctgaagaaggtgcagatcttcgagatgatggacgccaaggccagacaggactgcgtgaaggagatcggcctgctgaagcagctgaaccaccccaacatcatcaagtacctggacagcttcatcgaggacaacgagctgaacatcgtgctggagctggccgacgccggcgacctgagccagatgatcaagtacttcaagaagcagaagagactgatccccgagagaaccgtgtggaagtacttcgtgcagctgtgcagcgccgtggagcacatgcacagcagaagagtgatgcacagagacatcaagcccgccaacgtgttcatcaccgccaccggcgtggtgaagctgggcgacctgggcctgggcagattcttcagcagcgagaccaccgccgcccacagcctggtgggcaccccctactacatgagccccgagagaatccactag

SEQ ID NO: 309798 - DNA, 669 bp, Artificial Sequence
  derived and/or modified sequence
atggccggccagcccggccacatgccccacggcggcagcagcaacaacctgtgccacaccctgggccccgtgcacccccccgacccccagagacaccccaacaccctgagcttcagatgcagcctggccgacttccagatcgagaagaagatcggcagaggccagttcagcgaggtgtacaaggccacctgcctgctggacagaaagaccgtggccctgaagaaggtgcagatcttcgagatgatggacgccaaggccagacaggactgcgtgaaggagatcggcctgctgaagcagctgaaccaccccaacatcatcaagtacctggacagcttcatcgaggacaacgagctgaacatcgtgctggagctggccgacgccggcgacctgagccagatgatcaagtacttcaagaagcagaagagactgatccccgagagaaccgtgtggaagtacttcgtgcagctgtgcagcgccgtggagcacatgcacagcagaagagtgatgcacagagacatcaagcccgccaacgtgttcatcaccgccaccggcgtggtgaagctgggcgacctgggcctgggcagattcttcagcagcgagaccaccgccgcccacagcctggtgggcaccccctactacatgagccccgagagaatccacgagaactag

SEQ ID NO: 309799 - DNA, 660 bp, Artificial Sequence
  derived and/or modified sequence
atggccggccagcccggccacatgccccacggcggcagcagcaacaacctgtgccacaccctgggccccgtgcacccccccgacccccagagacaccccaacaccctgagcttcagatgcagcctggccgacttccagatcgagaagaagatcggcagaggccagttcagcgaggtgtacaaggccacctgcctgctggacagaaagaccgtggccctgaagaaggtgcagatcttcgagatgatggacgccaaggccagacaggactgcgtgaaggagatcggcctgctgaagcagctgaaccaccccaacatcatcaagtacctggacagcttcatcgaggacaacgagctgaacatcgtgctggagctggccgacgccggcgacctgagccagatgatcaagtacttcaagaagcagaagagactgatccccgagagaaccgtgtggaagtacttcgtgcagctgtgcagcgccgtggagcacatgcacagcagaagagtgatgcacagagacatcaagcccgccaacgtgttcatcaccgccaccggcgtggtgaagctgggcgacctgggcctgggcagattcttcagcagcgagaccaccgccgcccacagcctggtgggcaccccctactacatgagccccgagagaatctag

SEQ ID NO: 309800 - DNA, 516 bp, Artificial Sequence
  derived and/or modified sequence
atggccggccagcccggccacatgccccacggcggcagcagcaacaacctgtgccacaccctgggccccgtgcacccccccgacccccagagacaccccaacaccctgagcttcagatgcagcctggccgacttccagatcgagaagaagatcggcagaggccagttcagcgaggtgtacaaggccacctgcctgctggacagaaagaccgtggccctgaagaaggtgcagatcttcgagatgatggacgccaaggccagacaggactgcgtgaaggagatcggcctgctgaagcagctgaaccaccccaacatcatcaagtacctggacagcttcatcgaggacaacgagctgaacatcgtgctggagctggccgacgccggcgacctgagccagatgatcaagtacttcaagaagcagaagagactgatccccgagagaaccgtgtggaagtacttcgtgcagctgtgcagcgccgtggagcacatgcacagcagaagagtgatgcacagatag

SEQ ID NO: 309801 - DNA, 606 bp, Artificial Sequence
  derived and/or modified sequence
atggccggccagcccggccacatgccccacggcggcagcagcaacaacctgtgccacaccctgggccccgtgcacccccccgacccccagcagctgaaccaccccaacatcatcaagtacctggacagcttcatcgaggacaacgagctgaacatcgtgctggagctggccgacgccggcgacctgagccagatgatcaagtacttcaagaagcagaagagactgatccccgagagaaccgtgtggaagtacttcgtgcagctgtgcagcgccgtggagcacatgcacagcagaagagtgatgcacagagacatcaagcccgccaacgtgttcatcaccgccaccggcgtggtgaagctgggcgacctgggcctgggcagattcttcagcagcgagaccaccgccgcccacagcctggtgggcaccccctactacatgagccccgagagaatccacgagaacggctacaacttcaagagcgacatctggagcctgggctgcctgctgtacgagatggccgccctgcagagccccttctacggcgacaagatgaacctgttcagcctgtgccagaagatcgagcagtgcgactacccccccctgtag

SEQ ID NO: 309802 - DNA, 1894 bp, Artificial Sequence
  derived and/or modified sequence
gggaaacgcctccgcgtcccttccaacagtaccggagagggagaggggcgtggctgagactagccccgaccacgcgcgcgcggcccctcggcaaccggcacaacacaacaaaatggctgccgcgccgctgggcccctgaggaaagagcccgaacttctcccgctctacctcagcctgcgggactgctcggctcggcttctaggcggttttgatgaacacctggctttattcttgcaatgaagaaaggttctcaacaaaaaatattctccaaagcaaagataccatcatcatctcactctcctatcccatcatctatgtccaatatgagatctaggtcactttcacctttgattggatcagagactctaccttttcattctggaggacagtggtgtgagcaagttgagattgcagatgaaaacaatatgcttttggactatcaagaccataaaggagctgattcacatgcaggagttagatatattacagaggccctcattaaaaaacttactaaacaggataatttggctttgataaaatctctgaacctttcactttctaaagacggtggcaagaaatttaagtatattgagaatttggaaaaatgtgttaaacttgaagtactgaatctcagctataatctaatagggaagattgaaaagttggacaagctgttaaaattacgtgaactcaacttatcatataacaaaatcagcaaaattgaaggcatagaaaatatgtgtaatctgcaaaagcttaaccttgcaggaaatgaaattgagcatattccagtatggttagggaagaagttaaaatctttgcgagtcctcaatttgaaaggcaacaagatatcatcgctccaagatataagcaagttgaaaccgcttcaagatttgatttctctgatcctagttgaaaatccagttgtgacccttcctcattacctccagtttaccattttccacctccgttcattggaaagtttggaaggtcagccagtaaccactcaggatagacaggaggcttttgagagattcagtttagaagaggtagaaagactggaaagagacctagaaaaaaagatgatagaaactgaagagcttaagagcaaacaaacaaggttccttgaggaaattaaaaatcaagataaattgaataaatcattaaaagaggaggccatgttacagaaacagagctgtgaggaactcaagagtgacttaaacacaaaaaatgaattgctaaaacagaagaccatagaattaacacgagcatgtcagaagcaatatgagctggaacaggaattggccttttataaaattgatgctaaatttgagccactaaattattatccatcagagtatgctgaaattgataaagccccagatgaaagcccttacattggcaaatccagatacaagagaaatatgtttgccacagagagttatattattgacagtgctcaggcagtacagatcaagaagatggagccagatgaacaacttagaaatgatcacatgaacttgagaggccacacaccactggacacgcaactggaagaccacaaactcgactatcagaactgcatgatgaaatagaaaaggcagaacaacaaattttgagagctactgaagaatttaaacaactggaagaagctatacaactaaaaaagatttcagaagcagggaaagaccttctttacaagcagttgagtggtagactacaacttgtaaataaattacgccaggaagctctggatctagaactgcagatggaaaagcaaaagcaggaaattgccggaaagcagaaggagattaaggacctgcaaatagccatagatagcctggattccaaagacccaaaacatgtgagtaaattaagaaattttgacttgttc

SEQ ID NO: 309803 - protein, 875 aa, Artificial Sequence
  derived and/or modified sequence
MMYTVLPDGSPVPQGMALYAPPPPLPNNSRPLTPGTVVYGPPPAGAPMVYGPPPPNFSIPFIPMGVLHCNVPEHHNLENEVSRLEDIMQHLKSKKREERWMRASKRQSEKEMEELHHNIDDLLQEKKSLECEVEELHRTVQKRQQQKDFIDGNVESLMTELEIEKSLKHHEDIVDEIECIEKTLLKRRSELREADRLLAEAESELSCTKEKTKNAVEKFTDAKRSLLQTESDAEELERRAQETAVNLVKADQQLRSLQADAKDLEQHKIKQEEILKEINKIVAAKDSDFQCLSKKKEKLTEELQKLQKDIEMAERNEDHHLQVLKESEVLLQAKRAELEKLKSQVTSQQQEMAVLDRQLGHKKEELHLLQGSMVQAKADLQEALRLGETEVTEKCNHIREVKSLLEELSFQKGELNVQISERKTQLTLIKQEIEKEEENLQVVLRQMSKHKTELKNILDMLQLENHELQGLKLQHDQRVSELEKTQVAVLEEKLELENLQQISQQQKGEIEWQKQLLERDKREIERMTAESRALQSCVECLSKEKEDLQEKCDIWEKKLAQTKRVLAAAEENSKMEQSNLEKLELNVRKLQQELDQLNRDKLSLHNDISAMQQQLQEKREAVNSLQEELANVQDHLNLAKQDLLHTTKHQDVLLSEQTRLQKDISEWANRFEDCQKEEETKQQQLQVLQNEIEENKLKLVQQEMMFQRLQKERESEESKLETSKVTLKEQQHQLEKELTDQKSKLDQVLSKVLAAEERVRTLQEEERWCESLEKTLSQTKRQLSEREQQLVEKSGELLALQKEADSMRADFSLLRNQFLTERKKAEKQVASLKEALKIQRSQLEKNLLTAREAEAQKLKKQVCAQKAQLASLGRE

SEQ ID NO: 309804 - protein, 828 aa, Artificial Sequence
  derived and/or modified sequence
MEKQKQEIAGKQKEIKDLQIAIDSLDSKDPKHSHMKAQKSGKEQQLDIMNKQYQQLESRLDEILSRIAKETEEIKDLEEQLTEGQIAANEALKKDLEGVISGLQEYLGTIKGQATQAQNECRKLRDEKETLLQRLTEVEQERDQLEIVAMDAENMRKELAELESALQEQHEVNASLQQTQGDLSAYEAELEARLNLRDAEANQLKEELEKVTRLTQLEQSALQAELEKERQALKNALGKAQFSEEKEQENSELHAKLKHLQDDNNLLKQQLKDFQNHLNHVVDGLVRPEEVAARVDELRRKLKLGTGEMNIHSPSDVLGKSLADLQKQFSEILARSKWERDEAQVRERKLQEEMALQQEKLATGQEEFRQACERALEARMNFDKRQHEARIQQMENEIHYLQENLKSMEEIQGLTDLQLQEADEEKERILAQLRELEKKKKLEDAKSQEQVFGLDKELKKLKKAVATSDKLATAELTIAKDQLKSLHGTVMKINQERAEELQEAERFSRKAAQAARDLTRAEAEIELLQNLLRQKGEQFRLEMEKTGVGTGANSQVLEIEKLNETMERQRTEIARLQNVLDLTGSDNKGGFENVLEEIAELRREVSYQNDYISSMADPFKRRGYWYFMPPPPSSKVSSHSSQATKDSGVGLKYSASTPVRKPRPGQQDGKEGSQPPPASGYWVYSPIRSGLHKLFPSRDADSGGDSQEESELDDQEEPPFVPPPGYMMYTVLPDGSPVPQGMALYAPPPPLPNNSRPLTPGTVVYGPPPAGAPMVYGPPPPNFSIPFIPMGVLHCNVPEHHNLVSGKTYNSLSTLLPWVTDKVIYLMS

SEQ ID NO: 309805 - protein, 145 aa, Artificial Sequence
  derived and/or modified sequence
MAERNEDHHLQVLKESEVLLQAKRAELEKLKSQVTSQQQEMAVLDRQLGHKKEELHLLQGSMVQAKADLQEALRLGETEVTEKCNHIREVKSLLEELSFQKGELNVQISERKTQLTLIKQEIEKEEENLQVVLRQMSKHKTAFLQ

SEQ ID NO: 309806 - protein, 346 aa, Artificial Sequence
  derived and/or modified sequence
MQHLKSKKREERWMRASKRQSEKEMEELHHNIDDLLQEKKSLECEVEELHRTVQKRQQQKDFIDGNVESLMTELEIEKSLKHHEDIVDEIECIEKTLLKRRSELREADRLLAEAESELSCTKEKTKNAVEKFTDAKRSLLQTESDAEELERRAQETAVNLVKADQQLRSLQADAKDLEQHKIKQEEILKEINKIVAAKDSDFQCLSKKKEKLTEELQKLQKDIEMAERNEDHHLQVLKESEVLLQAKRAELEKLKSQVTSQQQEMAVLDRQLGHKKEELHLLQGSMVQAKADLQEALRLGETEVTEKCNHIREVKSLLEELSFQKGELNVQISERKTQLTLIKQEI

SEQ ID NO: 309807 - DNA, 438 bp, Artificial Sequence
  derived and/or modified sequence
atggccgagagaaacgaggaccaccacctgcaggtgctgaaggagagcgaggtgctgctgcaggccaagagagccgagctggagaagctgaagagccaggtgaccagccagcagcaggagatggccgtgctggacagacagctgggccacaagaaggaggagctgcacctgctgcagggcagcatggtgcaggccaaggccgacctgcaggaggccctgagactgggcgagaccgaggtgaccgagaagtgcaaccacatcagagaggtgaagagcctgctggaggagctgagcttccagaagggcgagctgaacgtgcagatcagcgagagaaagacccagctgaccctgatcaagcaggagatcgagaaggaggaggagaacctgcaggtggtgctgagacagatgagcaagcacaagaccgccttcctgcagtag

SEQ ID NO: 309808 - DNA, 2985 bp, Artificial Sequence
  derived and/or modified sequence
atgaaggcccagaagagcggcaaggagcagcagctggacatcatgaacaagcagtaccagcagctggagagcagactggacgagatcctgagcagaatcgccaaggagaccgaggagatcaaggacctggaggagcagctgaccgagggccagatcgccgccaacgaggccctgaagaaggacctggagggcgtgatcagcggcctgcaggagtacctgggcaccatcaagggccaggccacccaggcccagaacgagtgcagaaagctgagagacgagaaggagaccctgctgcagagactgaccgaggtggagcaggagagagaccagctggagatcgtggccatggacgccgagaacatgagaaaggagctggccgagctggagagcgccctgcaggagcagcacgaggtgaacgccagcctgcagcagacccagggcgacctgagcgcctacgaggccgagctggaggccagactgaacctgagagacgccgaggccaaccagctgaaggaggagctggagaaggtgaccagactgacccagctggagcagagcgccctgcaggccgagctggagaaggagagacaggccctgaagaacgccctgggcaaggcccagttcagcgaggagaaggagcaggagaacagcgagctgcacgccaagctgaagcacctgcaggacgacaacaacctgctgaagcagcagctgaaggacttccagaaccacctgaaccacgtggtggacggcctggtgagacccgaggaggtggccgccagagtggacgagctgagaagaaagctgaagctgggcaccggcgagatgaacatccacagccccagcgacgtgctgggcaagagcctggccgacctgcagaagcagttcagcgagatcctggccagaagcaagtgggagagagacgaggcccaggtgagagagagaaagctgcaggaggagatggccctgcagcaggagaagctggccaccggccaggaggagttcagacaggcctgcgagagagccctggaggccagaatgaacttcgacaagagacagcacgaggccagaatccagcagatggagaacgagatccactacctgcaggagaacctgaagagcatggaggagatccagggcctgaccgacctgcagctgcaggaggccgacgaggagaaggagagaatcctggcccagctgagagagctggagaagaagaagaagctggaggacgccaagagccaggagcaggtgttcggcctggacaaggagctgaagaagctgaagaaggccgtggccaccagcgacaagctggccaccgccgagctgaccatcgccaaggaccagctgaagagcctgcacggcaccgtgatgaagatcaaccaggagagagccgaggagctgcaggaggccgagagattcagcagaaaggccgcccaggccgccagagacctgaccagagccgaggccgagatcgagctgctgcagaacctgctgagacagaagggcgagcagttcagactggagatggagaagaccggcgtgggcaccggcgccaacagccaggtgctggagatcgagaagctgaacgagaccatggagagacagagaaccgagatcgccagactgcagaacgtgctggacctgaccggcagcgacaacaagggcggcttcgagaacgtgctggaggagatcgccgagctgagaagagaggtgagctaccagaacgactacatcagcagcatggccgaccccttcaagagaagaggctactggtacttcatgccccccccccccagcagcaaggtgagcagccacagcagccaggccaccaaggacagcggcgtgggcctgaagtacagcgccagcacccccgtgagaaagcccagacccggccagcaggacggcaaggagggcagccagcccccccccgccagcggctactgggtgtacagccccatcagaagcggcctgcacaagctgttccccagcagagacgccgacagcggcggcgacagccaggaggagagcgagctggacgaccaggaggagccccccttcgtgcccccccccggctacatgatgtacaccgtgctgcccgacggcagccccgtgccccagggcatggccctgtacgccccccccccccccctgcccaacaacagcagacccctgacccccggcaccgtggtgtacggccccccccccgccggcgcccccatggtgtacggcccccccccccccaacttcagcatccccttcatccccatgggcgtgctgcactgcaacgtgcccgagcaccacaacctggagaacgaggtgagcagactggaggacatcatgcagcacctgaagagcaagaagagagaggagagatggatgagagccagcaagagacagagcgagaaggagatggaggagctgcaccacaacatcgacgacctgctgcaggagaagaagagcctggagtgcgaggtggaggagctgcacagaaccgtgcagaagagacagcagcagaaggacttcatcgacggcaacgtggagagcctgatgaccgagctggagatcgagaagagcctgaagcaccacgaggacatcgtggacgagatcgagtgcatcgagaagaccctgctgaagagaagaagcgagctgagagaggccgacagactgctggccgaggccgagagcgagctgagctgcaccaaggagaagaccaagaacgccgtggagaagttcaccgacgccaagagaagcctgctgcagaccgagagcgacgccgaggagctggagagaagagcccaggagaccgccgtgaacctggtgaaggccgaccagcagctgagaagcctgcaggccgacgccaaggacctggagcagcacaagatcaagcaggaggagatcctgaaggagatcaacaagatcgtggccgccaaggacagcgacttccagtgcctgagcaagaagaaggagaagctgaccgaggagtag

SEQ ID NO: 309809 - DNA, 438 bp, Artificial Sequence
  derived and/or modified sequence
atggccgaaaggaacgaagaccaccacctgcaagtactgaaggaaagtgaagtcctgctgcaagccaaacgtgccgagctggagaagctgaaatcacaggtgactagtcaacaacaggagatggccgtcctggacagacagctgggacacaagaaggaggaactgcatctcctacagggcagcatggtccaagcaaaagccgacctccaagaggcgctccggctcggggaaacggaggtgactgaaaaatgcaaccacattcgggaggtgaagtcccttctcgaggagttatcttttcagaaaggtgagctgaacgtgcagatcagcgagcgaaagactcagttgacattgatcaaacaggaaatagagaaggaggaggagaacctacaggtggtgctgcgtcagatgtcgaaacacaaaactgcgtttctccaatag

SEQ ID NO: 309810 - DNA, 2985 bp, Artificial Sequence
  derived and/or modified sequence
atgaaagcacaaaagtctgggaaagaacaacagctcgacatcatgaataaacagtaccagcagctggaaagccgcttggatgagattctctcccgtattgctaaggagacagaggaaattaaggatctggaggagcagctgacagagggacagattgctgccaatgaggcccttaagaaagatctggaaggcgtgatttcaggcctacaagagtacctgggcaccatcaaaggtcaggcaacacaggcccagaacgagtgccgaaagctgagagacgagaaggagaccttgctgcaacgtttgacagaagtggagcaagaacgcgatcagttggagatcgtcgctatggatgcagaaaatatgagaaaagaactagccgagttggaaagcgcactccaggaacagcacgaggttaatgcctcccttcaacaaacccagggtgatctaagcgcttacgaggccgaacttgaggccaggctgaatctgcgcgacgcggaggctaatcaattgaaggaagagttagagaaagtgacgcgtctcacacagctggagcagtcagcattacaggccgaactggaaaaggagaggcaggctcttaagaatgccctaggcaaggcccaattttctgaagagaaagagcaggagaacagtgagttgcatgcaaagcttaagcacttgcaggacgataacaaccttctgaaacagcagctcaaagatttccagaatcatctgaaccatgtcgtggacgggcttgtccgtccagaggaagtggcggcacgcgtcgatgagctgcgcaggaaacttaaattgggtaccggagagatgaacatacattctcccagtgacgtcctgggaaaaagcctcgcagatctccagaaacagttctccgagatactggctcggtctaagtgggagcgcgacgaggcccaggtgagagagcgaaaattgcaagaagagatggcactacagcaagagaagctcgctactggccaggaagagttcagacaagcttgcgagcgcgccctggaggcacgcatgaactttgataagcgtcagcatgaggcccggatccaacaaatggaaaatgagatacactacctgcaagagaatctaaaatccatggaggaaatccagggactcactgatctgcaactgcaagaagctgatgaggaaaaggagaggatcctggcccaactccgagagcttgaaaagaagaagaagcttgaagacgccaaaagccaggagcaagttttcggactcgacaaggagctgaagaaactcaagaaagcagtggccacttccgataagctcgctaccgccgaactcactattgcaaaagatcaactcaagagcctgcacggaaccgtgatgaagatcaatcaggagcgggccgaggagctacaggaggcggagcggttttcgcgaaaggccgctcaggctgcccgggatctcacgcgagccgaggctgaaattgagctgctccagaatctgctgcgccagaagggtgagcaatttagattggagatggagaagactggcgtaggcaccggggccaactctcaagtgttggagattgaaaagctcaatgaaaccatggaacgccagaggactgagattgccagattgcagaatgtgctagacctaacgggaagcgataacaagggcggattcgagaacgtgctcgaagagatcgcagaactacgcagagaagtctcttatcagaacgattacattagcagtatggcagacccctttaagcgtaggggctattggtattttatgccaccgccaccctcctcgaaggtttcatcacactctagccaggccactaaggactctggcgtcggcctgaaatactctgcatcaactccggtcagaaaacccaggccaggtcagcaggatgggaaggaaggcagccagccacccccagcctcaggctattgggtatacagtcctatccgatccgggctgcacaagctgtttccgtctcgggatgccgattcgggaggagactctcaggaggaatccgagttagatgatcaggaggaacctccatttgtccctcccccaggctacatgatgtacactgttctacctgacggaagcccagtgcctcaagggatggccttgtacgcccctccccctcctcttcccaacaactcacgtcctctaacccccggcaccgtggtgtatggcccgccacctgcaggagcacccatggtttatggccctcccccacccaacttcagtattccattcatccccatgggtgtcctccactgtaatgtccccgagcatcacaatttggaaaatgaggtcagtcgtctggaagacatcatgcagcacctgaaatcaaaaaaacgagaggagaggtggatgagagcaagcaagcgccaatccgagaaagaaatggaagagttgcatcacaatattgacgatcttctacaggagaaaaagagcttagagtgcgaggtcgaggaattacacaggaccgtgcagaagagacagcagcagaaggatttcattgacggcaacgtggaatcactcatgaccgaactggaaatagaaaagagcctgaagcatcacgaggacattgtcgacgaaattgagtgcattgagaagaccctgttgaagcgccgctccgagctgagggaggctgaccggctgctggccgaggccgagagtgagctgtcatgcactaaggagaagaccaagaacgccgtggagaaatttaccgatgcaaagcgctctttgttgcagacagagagtgacgccgaggagctagagagaagagcccaggagactgcagtgaatctggtgaaggcagaccagcagttgagaagcctccaagctgacgcgaaggacctggagcagcacaagatcaaacaagaagagatcctcaaggagattaataagattgtggccgcgaaggacagcgacttccagtgcctgtctaaaaaaaaagagaagctcaccgaagagtag

SEQ ID NO: 309811 - DNA, 713 bp, Artificial Sequence
  derived and/or modified sequence
caatgtttaagcaagaagaaggaaaaactgacagaagagcttcagaaactacagaaagacatagagatggcagaacgcaatgaggatcaccacctgcaggtccttaaagaatctgaggtgcttcttcaggccaaaagagccgagctggaaaagctgaaaagccaggtgacaagtcagcagcaggagatggctgtcttggacaggcagttagggcataaaaaggaggagctgcatctactccaaggaagcatggtccaggcaaaagctgacctccaggaagctctgagactgggagagactgaagtaactgagaagtgcaatcacattagggaagtaaaatctcttctggaagaactgagttttcagaaaggagaactaaatgttcagattagtgaaagaaaaactcaacttacacttataaagcaggaaattgaaaaagaggaagaaaatcttcaggttgttttaaggcagatgtctaaacataaaaccgcttttctacagtaagcaagtatctctatgatcagaaaaaaagttaatatttaaatatctgtatttcaaaggccaaaaaattgttatataaatctcagtctgtatttcaaagtatttttaatttattttgatcaattttatataaaatgcttttagttgattcttttatgtagaagcaaatgctttggaaccagatctttgttaattaaatgtttttgttaaaa

SEQ ID NO: 309812 - DNA, 3372 bp, Artificial Sequence
  derived and/or modified sequence
gcgaagttacagaggctcggaggcgcttgcaaaaatgtggctgtcagagagggaagtgcacatgaatttgaagacagcattagaaagcgttccgcccacagtttctctgttctcaacggctcagttttaacaggataaattttaagttaagtcccatatgaaggctcaaaagagcggtaaagaacaacagcttgacattatgaacaagcagtaccaacaacttgaaagtcgtttggatgagatactttctagaattgctaaggaaacggaagagattaaggaccttgaagaacagcttactgaaggccagatagcagcaaatgaagccctgaagaaggatttagaaggtgttatcagtgggttgcaagaatacctggggaccattaaaggccaggcaactcaggcccagaatgagtgcaggaagctgcgggatgagaaagagacattgttgcagagattgacagaagtcgagcaggagagagaccagctggaaatagttgccatggatgcagaaaatatgaggaaggagcttgcagagctagaaagtgccctccaagagcagcatgaggtgaatgcatctttgcagcagacccagggagatctcagtgcctatgaagctgagctagaggctcggctaaacctaagggatgctgaagccaaccagctcaaggaagagttggaaaaagtaacaagacttacccagttagaacaatcagcccttcaagcagaacttgagaaggaaaggcaagccctcaagaatgcccttggaaaagcccagttctcagaagaaaaggagcaagagaacagtgagctccatgcaaaacttaaacacttgcaggatgacaataatctgttaaaacagcaacttaaagatttccagaatcaccttaaccatgtggttgatggtttggttcgtccagaagaagtggcagctcgtgtggatgagctaagaagaaaactgaaattaggaactggggaaatgaacatccatagtccttcagatgtcttagggaaaagtcttgctgatttacagaaacaattcagtgaaattcttgcacgctccaagtgggaaagagatgaagcacaagttagagagagaaaactccaagaagaaatggctctgcagcaagagaaactggcaactggacaagaagagttcaggcaggcctgtgagagagccctggaagcaagaatgaattttgataagaggcaacatgaagcaagaatccagcaaatggagaatgaaattcactatttgcaagaaaatctaaaaagtatggaggaaatccaaggccttacagatctccaacttcaggaagctgatgaagagaaggagagaattctggcccaactccgagagttagagaaaaagaagaaacttgaagatgccaaatctcaggagcaagtttttggtttagataaagaactgaagaaactaaagaaagccgtggccacctctgataagctagccacagctgagctcaccattgccaaagaccagctgaagtcccttcatggaactgttatgaaaattaaccaggagcgagcagaggagttgcaggaagcagagaggttcagcagaaaggcagcacaagcagccagagatctcacccgagcagaagctgagatcgaactcctgcagaatctcctcaggcagaagggggagcagtttcgacttgagatggagaaaacaggtgtaggtactggagcaaactcacaggtcctagaaattgagaaactgaatgagacaatggaacgacaaaggacagagattgcaaggctgcagaatgtactagacctcactggaagtgacaacaaaggaggctttgaaaatgttttagaagaaattgctgaacttcgacgtgaagtttcttatcagaatgattacataagcagcatggcagatcctttcaaaagacgaggctattggtactttatgccaccaccaccatcatcaaaagtttccagccatagttcccaggccaccaaggactctggtgttggccttaagtactcagcctcaactcctgttagaaaaccacgccctgggcagcaggatgggaaggaaggcagtcaacctccccctgcctcaggatactgggtttattctcccatcaggagtgggttacataaactgtttccaagtagagatgcagacagtggaggagatagtcaggaagagagtgagctggatgaccaagaagaacccccatttgtgcctcctcctggatacatgatgtatactgtgcttcctgatggttctcctgtaccccagggcatggccctgtatgcaccacctcctcccttgccaaacaatagccgacctctcacccctggcactgttgtttatggcccacctcctgctggggcccccatggtgtatgggcctccaccccccaacttctccatccccttcatccctatgggtgtgctgcattgcaacgtccctgaacaccataacttagagaatgaagtttctagattagaagacataatgcagcatttaaaatcaaagaagcgggaagaaaggtggatgagagcatccaagcggcagtcggagaaagaaatggaagaactgcatcataatattgatgatcttttgcaagagaagaaaagcttagagtgtgaagtagaagaattacatagaactgtccagaaacgtcaacagcaaaaggacttcattgatggaaatgttgagagtcttatgactgaactagaaatagaaaaatcactcaaacatcatgaagatattgtagatgaaattgagtgcattgagaagactcttctgaaacgtcgctcagagctcagggaagctgaccgactcctggcagaggctgagagtgaactttcatgcactaaagaaaagacaaaaaatgctgttgaaaagttcactgatgccaagagaagtttattgcaaactgagtcagatgctgaggaattagaaaggagagctcaggaaactgctgttaacctcgtcaaagctgatcagcagctaagatcgctccaggctgatgcaaaggatttggagcagcacaaaatcaagcaagaagaaatcttgaaagaaataaacaaaattgtagcagcaaaagactcagacttccaatgtttaagcaagaagaaggaaaaactgacagaagagtaagtaaggcctctgtagggctacaaggggtttgtgctggaagacagctctggggttccgagtcccttaggatctgctctagtgttgctggtgctttgtaggcttcagaaactacagaaagacatagagatggcagaacgcaatgaggatcaccacctgcaggtccttaaagaatctgaggtgcttcttcaggccaaaagagccgagctggaaaagctgaaaagccaggtatg

SEQ ID NO: 309813 - DNA, 438 bp, Artificial Sequence
  derived and/or modified sequence
atggccgagagaaatgaagaccaccacctgcaggtgctgaaggagagcgaggtgctgctgcaggccaagagagctgagctggagaagctgaagagccaggtgaccagccagcagcaggagatggctgtgctggaccggcagctgggccacaagaaggaggagctgcacctgctgcagggctccatggtgcaggccaaggctgacctgcaggaggccctgcggctgggggagacagaggtgacagagaagtgcaaccacatccgggaggtgaagagcctgctggaggagctgtccttccagaagggggagctgaatgtgcagatcagcgagaggaagacccagctgaccctcatcaagcaggagattgagaaggaggaggagaacctgcaggtggtgctgcggcagatgagcaagcacaagacagccttcctgcagtag

SEQ ID NO: 309814 - DNA, 2985 bp, Artificial Sequence
  derived and/or modified sequence
atgaaggcccagaagagcggcaaggagcagcagctggacatcatgaacaagcagtaccagcagctggagagccggctggatgagatcctgagcagaattgccaaggagacagaggagatcaaggacctggaggagcagctgacagagggccagattgctgccaatgaggccctgaagaaggacctggagggcgtcatcagcggcctgcaggagtacctgggcaccatcaagggccaggccacccaggcccagaatgaatgtaggaagctgagagatgagaaggagaccctgctgcagaggctgacagaggtggagcaggagcgggaccagctggagatcgtggccatggatgctgagaacatgaggaaggagctggccgagctggagagcgccctgcaggagcagcacgaggtgaatgccagcctgcagcagacccagggcgacctgagcgcctatgaggccgagctggaggcccggctgaacctgagagatgctgaggccaaccagctgaaggaggagctggagaaggtgacccggctgacccagctggagcagagcgccctgcaggccgagctggagaaggagcggcaggccctgaagaatgccctgggcaaggcccagttcagcgaggagaaggagcaggagaacagcgagctgcacgccaagctgaagcacctgcaggatgacaacaacctgctgaagcagcagctgaaggacttccagaaccacctgaaccacgtggtggatggcctggtgcggcctgaggaggtggccgcccgggtggatgagctgcggaggaagctgaagctgggcaccggggagatgaacatccacagccccagtgatgtgctgggcaagagcctggccgacctgcagaagcagttcagcgagatcctggcccggagcaagtgggagagagatgaggcccaggtgcgggagaggaagctgcaggaggagatggccctgcagcaggagaagctggccaccggccaggaggagttccggcaggcctgtgagcgggccctggaggccaggatgaactttgacaagaggcagcacgaggcccgcatccagcagatggagaatgagatccactacctgcaggagaacctgaagtccatggaggagatccagggcctgacagacctgcagctgcaggaggctgatgaggagaaggagcgcatcctggcccagctgcgggagctggagaagaagaagaagctggaggatgccaagagccaggagcaggtgtttggcctggacaaggagctgaagaagctgaagaaggctgtggccaccagtgacaagctggccacagctgagctgaccatcgccaaggaccagctgaagagcctgcatggaacagtgatgaagatcaaccaggagcgggcagaggagctgcaggaggccgagcgcttcagcaggaaggccgcccaggccgcccgggacctgaccagggctgaggccgagattgagctgctgcagaacctgctgcggcagaagggggagcagttccggctggagatggagaagacaggagtgggcaccggggccaacagccaggtgctggagattgagaagctgaatgagaccatggagcggcagaggacagaaattgcccggctgcagaatgtgctggacctgactggaagtgacaacaagggcggctttgaaaatgtgctggaggagattgctgagctgcggcgggaggtgtcctaccagaatgactacatcagctccatggctgaccccttcaagagaagaggctactggtacttcatgcctcctccacccagcagcaaggtgagcagccacagcagccaggccaccaaggacagcggcgtgggcctgaagtacagcgccagcacccctgtgaggaagccccggcccggccagcaggacggcaaggagggcagccagcccccaccagccagcggctactgggtgtacagccccatccgcagcggcctgcacaagctgttccccagcagagatgctgacagcggcggggacagccaggaggagagcgagctggatgaccaggaggagcccccatttgtgcccccacctggctacatgatgtacacagtgctgcctgatggcagccctgtgccccagggcatggccctgtatgcccctcctccacccctgcccaacaacagccggcccctgaccccaggcaccgtggtgtatggccccccacctgctggggcccccatggtgtatggccccccaccacccaacttcagcatccccttcatccccatgggcgtgctgcactgcaatgtgcctgagcaccacaacctggagaatgaggtgtcccggctggaggacatcatgcagcacctgaagagcaagaagcgggaggagcgctggatgagggccagcaagaggcagagcgagaaggagatggaggagctgcaccacaacattgatgacctgctgcaggagaagaagagcctggagtgtgaggtggaggagctgcacaggacagtgcagaagaggcagcagcagaaggacttcattgatggaaatgtggagagcctgatgacagagctggagattgagaagagcctgaagcaccatgaagatattgtggatgaaattgagtgcatcgagaagaccctgctgaagagaagaagtgagctgcgggaggccgaccggctgctggccgaggccgagagcgagctgagctgcaccaaggagaagaccaagaatgctgtggagaagttcacagatgccaagaggagcctgctgcagacagaaagtgatgctgaggagctggagcggcgggcccaggagacagctgtgaacctggtgaaggctgaccagcagctgcggagcctgcaggctgatgccaaggacctggagcagcacaagatcaagcaggaggagatcctgaaggagatcaacaagatcgtggccgccaaggacagcgacttccagtgcctgagcaagaagaaggagaagctgacagaggagtag

SEQ ID NO: 309815 - DNA, 438 bp, Artificial Sequence
  derived and/or modified sequence
atggccgagcggaacgaggaccaccacctgcaggtgctgaaggagagcgaggttctgttgcaggcaaaaagagccgagttggagaagcttaagtcccaggttaccagccagcagcaggagatggccgtgctcgacaggcagcttggtcacaaaaaggaggaacttcatctgctgcaagggagcatggtgcaggctaaagctgacctccaggaggctctgagactcggagagacagaggtgacagagaaatgtaaccacatccgcgaggtcaagagtcttctggaagagctgagtttccagaagggtgagcttaacgtccagatttctgagcggaaaacccagttaactctgatcaagcaagaaatcgagaaagaggaggaaaacctccaggtcgttttacgccaaatgtccaaacataaaacggccttcctgcaatag

SEQ ID NO: 309816 - DNA, 2985 bp, Artificial Sequence
  derived and/or modified sequence
atgaaggcccagaagagcggcaaggagcagcagctggacatcatgaacaagcaatatcagcagcttgaatctcggctggatgaaatcctgtcccgcattgccaaagaaacagaagagatcaaagatttggaagagcagcttaccgaaggccagatcgcggctaacgaagccctgaagaaggacctcgaaggagtaattagcggactccaagagtacctaggcactattaagggccaggccacccaagcacagaatgagtgtcgaaagctgcgcgacgagaaagagacccttctgcagaggctaacagaggtggagcaggaacgcgatcaactggaaatcgtggcaatggatgcagaaaacatgcggaaggaacttgcagagttggagagcgccctacaggagcaacatgaggtcaatgcaagtctccagcagactcaaggggacctcagcgcctacgaggcagagctggaggcgagactgaacctgcgagacgccgaggccaatcagctcaaagaggagctggaaaaggtgacacgactcacacaactggaacagagcgcactacaggccgaactcgaaaaggagcgccaggctcttaaaaacgccttgggaaaggcccagttctctgaggaaaaggaacaagagaactctgagctacatgctaaacttaagcatttgcaggacgacaacaaccttcttaaacagcaacttaaagatttccaaaatcatctgaaccacgtggtggacggactggtacgcccagaggaagtcgccgctagggtggacgagctgcgaagaaagcttaagcttggtaccggagagatgaatattcacagccccagtgatgtgctcgggaagagccttgcggacttgcaaaaacagttctcagagattttggcgagatctaagtgggagcgcgacgaggcccaagtcagggagaggaaattgcaagaagaaatggcacttcagcaggagaagctggctacaggccaggaggaatttaggcaggcatgcgagcgcgccctggaggcccggatgaacttcgacaaaagacagcatgaggctagaatccagcagatggagaatgagatacactaccttcaggaaaatctgaaatccatggaggagatccagggcctgaccgacttacagcttcaggaagctgacgaggagaaagaaagaattctagcgcagttacgcgaactcgagaaaaaaaagaaactggaagacgccaagtcccaggagcaagtgttcggtctggataaggagctcaaaaagctgaaaaaggctgtggcaacttccgacaaactcgcaaccgccgaacttacaatcgcgaaagatcagttaaaatcactgcacggaacagtcatgaaaattaaccaggaaagagccgaggaattgcaggaggccgagaggttctcgaggaaagctgcccaggcggctcgagatctgacccgggccgaggccgagatagaactgctacagaatctccttcgccagaagggagagcaattccgcctggaaatggaaaaaacaggcgtgggaaccggagcaaatagccaggtgttggagattgaaaagctgaacgagaccatggagcgccagcgcactgagatcgcacgtttacagaacgttctcgacctgacaggatctgacaacaagggcggcttcgagaatgtcctggaggaaatcgctgagctgcgacgagaggtgtcatatcagaacgattacataagttccatggccgatccctttaaacgacgtggatattggtactttatgcctccccccccctccagcaaggtgtcctcgcacagctctcaagctacaaaagatagcggggtcgggctgaaatattccgcatccacccccgtccgcaagccgcgcccgggacagcaggacggaaaggaaggaagccagccaccgcctgccagcggttattgggtctacagtcccattagatctggactgcacaagctttttcccagccgcgacgcggactccggtggggacagccaggaagaatccgaacttgatgaccaggaagaaccaccgttcgtgcctccgcccgggtatatgatgtacacagttctccctgacggttcgcctgttccgcagggaatggccctgtacgctcctcccccccccttacccaataattcccggcctctgaccccgggcaccgtagtttatgggccaccgccagctggagcacctatggtgtatggcccccccccccctaatttctcaattcccttcattcctatgggcgtgctgcattgcaatgtgcccgaacaccacaacttagagaacgaagtaagcagactggaagatatcatgcagcatctgaagtccaaaaaaagggaggaacggtggatgcgtgcctcgaagaggcagagcgaaaaagaaatggaagaactgcatcataacatcgatgacctgctccaagaaaaaaaaagcctcgaatgcgaagttgaagaacttcataggacagtgcagaagcgtcagcagcaaaaagatttcatcgacggaaacgtcgagagcctgatgaccgagctcgagatagagaagtccctgaagcatcatgaggatatcgtcgatgaaattgagtgcattgaaaagacattacttaaacggcggtctgagcttcgggaagcggatcgactgctggccgaagctgagagtgaactctcttgcaccaaggagaaaacgaaaaatgccgtagaaaaattcaccgatgccaagcgctctctgctccaaacagagtcagacgcggaagagcttgagaggcgggcacaagagactgcagtgaatctcgtgaaagctgaccagcagctgaggagtcttcaggcggacgcgaaagacctggagcaacacaagatcaagcaagaggaaatcttgaaagagatcaacaaaattgttgcagccaaagactcagatttccaatgtctctctaagaaaaaggagaaactgaccgaagaatag

SEQ ID NO: 309817 - DNA, 438 bp, Artificial Sequence
  derived and/or modified sequence
atggccgagagaaacgaagatcaccatctgcaggtactgaaggaaagcgaagtgttgctccaagcgaagcgcgcagagttggagaaattgaagtcacaggtgacaagtcagcagcaagaaatggcagtgctggacagacagcttggtcacaaaaaggaagagttgcacctgctgcaggggtcaatggtgcaggccaaagccgatctgcaggaggctctccggctgggcgaaaccgaggtgacagaaaagtgcaaccatatccgcgaggtgaagagcctcctagaggagctctctttccagaagggagagttgaatgtccagatctcggaaaggaaaacccagcttacactgataaagcaggaaattgagaaagaggaggaaaatctgcaggtggttctgcggcagatgagtaagcataagaccgccttcctgcaatag

SEQ ID NO: 309818 - DNA, 2985 bp, Artificial Sequence
  derived and/or modified sequence
atgaaggcccagaaatccgggaaggagcaacagctcgacatcatgaacaaacagtatcagcagctcgagagtcgcctggatgagattttatctcgtattgctaaggagaccgaagagatcaaggatctcgaggagcagttgaccgagggacaaatcgccgcaaacgaggcactcaaaaaagatctggagggcgtgattagtggtctgcaggaatatctcgggactattaaaggacaggctacccaggcccaaaatgagtgtcgtaagctccgcgacgagaaagagacactcttgcagcgcttaacagaggtagagcaggagagagaccagctggagatcgtcgcaatggacgctgagaacatgagaaaagagttggccgagctcgagtccgctcttcaggaacagcacgaggtgaacgcatcattgcagcagacccagggtgacctgtctgcatacgaggccgagctcgaggcccgtctgaatctgagggacgccgaggctaatcagctgaaggaggagttggagaaagtgactcgattaacccagttggagcagagcgcgttgcaggcagaactggaaaaggaacgccaggcactgaagaacgccctgggtaaggcacagttctcagaggaaaaggagcaagaaaactccgaattgcacgccaagttgaagcacctgcaggacgataacaatctgttaaagcagcagcttaaggattttcagaatcacctaaaccacgtggtagatggtctggtccgcccagaggaggtcgctgctcgagtggatgaactgcggagaaaactgaagttaggaacaggagagatgaacatccacagcccctccgatgtcttggggaaatcgctggccgaccttcaaaagcagtttagtgagatactggcacgtagtaaatgggaacgagacgaggcacaggtgcgagagcgtaagctccaggaggagatggcgctgcaacaggaaaagttagccaccgggcaggaagaatttcgtcaggcctgtgaaagagctctggaagcacggatgaatttcgataaaaggcagcacgaggcgagaatccagcaaatggagaacgagatccactatctccaagagaacttgaagagcatggaagaaatccagggcctcacagaccttcagctccaggaggccgacgaggaaaaggaaaggatcctggcacaattacgcgaactcgaaaaaaaaaagaagctggaggacgctaagtcccaggagcaggtgtttggacttgacaaggagctgaagaaattgaaaaaggctgttgccacatccgataaactggccaccgcagagcttacgatcgctaaagatcagctgaaatcgctccacggaaccgttatgaagataaaccaggaacgggcagaagaattgcaagaggcagaacgctttagcaggaaggctgcgcaggctgcacgggacctaacacgcgctgaggcggagatcgaactgctccagaatctgctgagacagaaaggggagcagttccggcttgagatggagaagaccggagtgggaaccggggcaaacagtcaagttcttgagattgaaaaactaaacgaaaccatggagagacagcggaccgagattgctcgtctgcagaatgtcttagaccttacaggcagcgataacaagggaggctttgagaatgtgcttgaagaaatcgcggagctgcgcagggaagtctcttatcagaacgactacattagctcaatggccgacccttttaaacggaggggttactggtattttatgccaccgccacctagctctaaggtaagttcgcactcctcacaggccacaaaagactctggggtggggctgaaatattcagcatcaacccctgtgcgaaaacccaggccaggtcaacaggacggaaaggagggttcccagcctcccccagccagcggatattgggtatactcacccatccgaagcgggttacacaaactgttcccctcaagagacgccgatagcggaggggattcacaggaggagtctgagctcgacgatcaagaagagccccctttcgtgcctccccctggctacatgatgtacacggtcctccccgatgggtcgccagtgcctcagggcatggcactgtatgcgcctcccccacccctgcccaacaattctcgtcccctcacaccaggtactgttgtatacggacctcccccagccggagccccaatggtgtacggcccaccacccccaaactttagcatcccatttataccaatgggagtcttgcactgtaacgtgccagaacatcacaacctggagaacgaggtttcccgacttgaggacattatgcagcatctcaagtccaagaagagggaggaaaggtggatgcgggcttccaaacggcagagtgagaaggagatggaggagctccaccataatatcgacgatcttctccaggagaagaaaagtttggaatgcgaagttgaggagctccatcgcacagtccagaagcgacagcagcagaaggattttatcgacggcaatgttgagagtcttatgaccgagctggagatcgagaaaagtctaaaacatcacgaggatatcgttgacgaaatcgagtgcattgaaaagacactcctgaaaagacgctctgagctgagggaggccgataggctgctagctgaggctgaatctgaactgagttgcaccaaagaaaaaacaaaaaacgctgtcgagaaattcacagatgcaaagcgatccttgctacagacggagtccgacgccgaagagctggagagaagggctcaagaaaccgccgtaaacctcgtgaaagcggaccagcagctgcggtcgctgcaggccgacgcaaaagacttggaacagcataagatcaagcaggaagaaattctcaaagaaatcaacaagattgtggcagccaaagatagtgactttcagtgtctcagcaagaagaaggaaaagctcactgaggagtag

SEQ ID NO: 309819 - DNA, 1449 bp, Artificial Sequence
  derived and/or modified sequence
atggagcagagcaacctggagaagctggagctgaacgtgagaaagctgcagcaggagctggaccagctgaacagagacaagctgagcctgcacaacgacatcagcgccatgcagcagcagctgcaggagaagagagaggccgtgaacagcctgcaggaggagctggccaacgtgcaggaccacctgaacctggccaagcaggacctgctgcacaccaccaagcaccaggacgtgctgctgagcgagcagaccagactgcagaaggacatcagcgagtgggccaacagattcgaggactgccagaaggaggaggagaccaagcagcagcagctgcaggtgctgcagaacgagatcgaggagaacaagctgaagctggtgcagcaggagatgatgttccagagactgcagaaggagagagagagcgagaagagcaagctggaccaggtgctgagcaaggtgctggccgccgaggagagagtgagaaccctgcaggaggaggagagatggtgcgagagcctggagaagaccctgagccagaccaagagacagctgagcgagagagagcagcagctggtggagaagagcggcgagctgctggccctgcagaaggaggccgacagcatgagagccgacttcagcctgctgagaaaccagttcctgaccgagagaaagaaggccgagaagcaggtggccagcctgaaggaggccctgaagatccagagaagccagctggagaagaacctgctggagcagaagcaggagaacagctgcatccagaaggagatggccaccatcgagctggtggcccaggacaaccacgagagagccagaagactgatgaaggagctgaaccagatgcagtacgagtacaccgagctgaagaagcagatggccaaccagaaggacctggagagaagacagatggagatcagcgacgccatgagaaccctgaagagcgaggtgaaggacgagatcagaaccagcctgaagaacctgaaccagttcctgcccgagctgcccgccgacctggaggccatcctggagagaaacgagaacctggagggcgagctggagagcctgaaggagaacctgcccttcaccatgaacgagggccccttcgaggagaagctgaacttcagccaggtgcacatcatggacgagcactggagaggcgaggccctgagagagaagctgagacacagagaggacagactgaaggcccagctgagacactgcatgagcaagcaggccgaggtgctgatcaagggcaagagacagaccgagggcaccctgcacagcctgagaagacaggtggacgccctgggcgagctggtgaccagcaccagcgccgacagcgccagcagccccagcctgagccagctggagagcagcctgaccgaggacagccagctgggccagaaccaggagaagaacgccagcgccagatag

SEQ ID NO: 309820 - DNA, 1041 bp, Artificial Sequence
  derived and/or modified sequence
atgcagcacctgaagagcaagaagagagaggagagatggatgagagccagcaagagacagagcgagaaggagatggaggagctgcaccacaacatcgacgacctgctgcaggagaagaagagcctggagtgcgaggtggaggagctgcacagaaccgtgcagaagagacagcagcagaaggacttcatcgacggcaacgtggagagcctgatgaccgagctggagatcgagaagagcctgaagcaccacgaggacatcgtggacgagatcgagtgcatcgagaagaccctgctgaagagaagaagcgagctgagagaggccgacagactgctggccgaggccgagagcgagctgagctgcaccaaggagaagaccaagaacgccgtggagaagttcaccgacgccaagagaagcctgctgcagaccgagagcgacgccgaggagctggagagaagagcccaggagaccgccgtgaacctggtgaaggccgaccagcagctgagaagcctgcaggccgacgccaaggacctggagcagcacaagatcaagcaggaggagatcctgaaggagatcaacaagatcgtggccgccaaggacagcgacttccagtgcctgagcaagaagaaggagaagctgaccgaggagctgcagaagctgcagaaggacatcgagatggccgagagaaacgaggaccaccacctgcaggtgctgaaggagagcgaggtgctgctgcaggccaagagagccgagctggagaagctgaagagccaggtgaccagccagcagcaggagatggccgtgctggacagacagctgggccacaagaaggaggagctgcacctgctgcagggcagcatggtgcaggccaaggccgacctgcaggaggccctgagactgggcgagaccgaggtgaccgagaagtgcaaccacatcagagaggtgaagagcctgctggaggagctgagcttccagaagggcgagctgaacgtgcagatcagcgagagaaagacccagctgaccctgatcaagcaggagatctag

SEQ ID NO: 309821 - DNA, 1449 bp, Artificial Sequence
  derived and/or modified sequence
atggagcagagcaacttagagaagctcgagctaaacgttaggaaactgcagcaggagctcgaccaactgaatagagataaactgtctttgcataatgatatctcggcaatgcagcagcagctgcaggagaagagagaggccgtcaactcacttcaggaagagctggccaatgttcaggaccacctgaatctggccaagcaggacctactacataccactaagcaccaagacgtgctgctctcagagcagacccggctgcaaaaggacatcagcgagtgggctaacagattcgaagattgccaaaaggaagaggagaccaagcaacagcagctacaggtgctgcagaatgaaatcgaggaaaacaagctgaagctggttcagcaggagatgatgtttcagcggttgcaaaaagagcgcgagagtgaaaagtctaaactggatcaagtactgagtaaagttctcgctgccgaggagagggtacggacattgcaggaagaggagcggtggtgtgaatcccttgagaagaccctctcccaaacgaagcgccagttgagcgaacgcgagcagcagcttgttgaaaagagtggcgagctcttagcacttcaaaaggaagctgattctatgagggccgatttctctttattaagaaatcaatttctgactgagcgaaagaaagcagagaagcaagtggcatctctcaaagaagcccttaagatccagcgcagtcagttagaaaagaatttacttgagcagaagcaggagaactcttgcattcagaaagagatggccacaattgaacttgtcgcacaggataaccacgagcgagctagaaggctcatgaaggaacttaaccagatgcaatatgagtataccgagttaaagaagcagatggctaaccagaaggacctcgaacgcaggcagatggaaatttcggatgccatgcgcacactcaagagcgaggttaaggacgagatcagaacctcacttaagaatctgaaccagttcttgcctgagctccctgctgacctggaggcaatcctggaaaggaatgaaaatctggagggagaactcgaatctcttaaggagaatctacctttcactatgaatgaaggaccttttgaggagaagctgaatttttcccaggttcatataatggacgaacattggagaggagaagccctacgtgagaaactgaggcatagagaggatcggctgaaagctcagctgaggcactgtatgagcaagcaggctgaagtgctgattaaaggcaaacgtcagacagagggtactcttcacagcctgaggagacaggtcgacgctttaggagagctagtgacgagcaccagcgcggactcagcttcctccccatcactgtcccaattggaatcatccctgactgaagactcacagctgggccaaaatcaggaaaaaaatgccagcgcgcgctag

SEQ ID NO: 309822 - DNA, 1041 bp, Artificial Sequence
  derived and/or modified sequence
atgcagcatctgaagtccaagaagcgtgaagagaggtggatgcgcgcctctaagcgtcaaagcgaaaaggagatggaagagctgcaccataatattgacgacctactgcaggagaaaaagagcctcgagtgcgaagtagaagagttgcaccgcacagtccaaaagagacagcaacagaaagacttcattgacggtaatgtggaatccctcatgaccgagttggagatcgagaagtcattaaagcaccatgaggacattgtggatgaaattgagtgtattgagaaaaccctactgaagcggcgaagcgaattgcgcgaagcggatagactgctggcagaagcagagtctgagttgtcttgcaccaaggagaaaacaaaaaatgccgtcgaaaaatttacagacgccaagaggtctctattgcaaactgaatctgacgccgaggaacttgagcgtcgggcccaggagacagccgtgaacctcgtgaaggccgaccagcaactgaggagtcttcaggccgacgccaaggacctagaacagcacaagattaagcaggaagagatcctcaaggagattaataaaatcgtggccgcaaaagatagcgatttccagtgcctcagcaagaagaaagagaagcttaccgaagagctgcagaaactgcagaaggatattgaaatggctgagagaaacgaagaccatcatctccaggtactcaaggaatctgaagtgttgttgcaggccaaacgggccgaactggagaaattgaagagtcaggtgacttcgcagcagcaggaaatggcggtattagatcgccagctcgggcacaagaaagaagaacttcatctgctacaggggtcaatggttcaggctaaagccgatcttcaggaggcactgcggttgggcgaaactgaagtcaccgaaaaatgtaaccatattagggaagttaagtctcttctggaggagctgtcatttcagaagggggaattgaacgtgcagattagtgagcgcaagacacagctgacccttataaagcaggagatatag

SEQ ID NO: 309823 - DNA, 1449 bp, Artificial Sequence
  derived and/or modified sequence
atggagcagagcaacctggagaagctggagctgaatgtgaggaagctgcagcaggagctggaccagctgaacagagacaagctgagcctgcacaatgacatcagcgccatgcagcagcagctgcaggagaagcgggaggccgtgaacagcctgcaggaggagctggccaacgtgcaggaccacctgaacctggccaagcaggacctgctgcacaccaccaagcaccaggatgtgctgctgtctgagcagacccggctgcagaaggacatcagcgagtgggccaacagatttgaggactgccagaaggaggaggagaccaagcagcagcagctgcaggtgctgcagaatgaaattgaggagaacaagctgaagctggtgcagcaggagatgatgttccagaggctgcagaaggagcgggagagcgagaagagcaagctggaccaggtgctgagcaaggtgctggccgctgaggagcgggtgaggaccctgcaggaggaggagcgctggtgtgagagcctggagaagaccctgagccagaccaagaggcagctgtctgagcgggagcagcagctggtggagaagtctggagagctgctggccctgcagaaggaggccgacagcatgagagctgacttcagcctgctgaggaaccagttcctgacagagaggaagaaggccgagaagcaggtggccagcctgaaggaggccctgaagatccagaggagccagctggagaagaacctgctggagcagaagcaggagaacagctgcatccagaaggagatggccaccatcgagctggtggcccaggacaaccacgagcgggcccggcggctgatgaaggagctgaaccagatgcagtatgagtacacagagctgaagaagcagatggccaaccagaaggacctggagcggcggcagatggagatcagtgatgccatgaggaccctgaagtctgaggtgaaggatgagatccgcaccagcctgaagaacctgaaccagttcctgcctgagctgcctgctgacctggaggccatcctggagagaaatgaaaacctggagggggagctggagagcctgaaggagaacctgcccttcaccatgaatgaaggcccctttgaggagaagctgaacttcagccaggtgcacatcatggatgagcactggagaggagaggccctgcgggagaagctgcggcaccgggaggaccggctgaaggcccagctgcggcactgcatgagcaagcaggccgaggtgctgatcaagggcaagaggcagacagagggcaccctgcacagcctgcggcggcaggtggatgccctgggggagctggtgaccagcaccagcgctgacagcgccagcagccccagcctgagccagctggagagcagcctgacagaggacagccagctgggccagaaccaggagaagaatgccagcgccaggtag

SEQ ID NO: 309824 - DNA, 1041 bp, Artificial Sequence
  derived and/or modified sequence
atgcagcacctgaagagcaagaagcgggaggagcgctggatgagggccagcaagaggcagagcgagaaggagatggaggagctgcaccacaacattgatgacctgctgcaggagaagaagagcctggagtgtgaggtggaggagctgcacaggacagtgcagaagaggcagcagcagaaggacttcattgatggaaatgtggagagcctgatgacagagctggagattgagaagagcctgaagcaccacgaggacatcgtggatgaaattgaatgtattgagaagaccctgctgaagagaagaagtgagctgcgggaggccgaccggctgctggccgaggccgagagcgagctgagctgcaccaaggagaagaccaagaatgctgtggagaagttcacagatgccaagaggagcctgctgcagacagaaagtgatgctgaggagctggagcggcgggcccaggagacagctgtgaacctggtgaaggctgaccagcagctgcggagcctgcaggctgatgccaaggacctggagcagcacaagatcaagcaggaggagatcctgaaggagatcaacaagatcgtggccgccaaggacagcgacttccagtgcctgagcaagaagaaggagaagctgacagaggagctgcagaagctgcagaaggacatcgagatggccgagagaaatgaagaccaccacctgcaggtgctgaaggagagcgaggtgctgctgcaggccaagagagctgagctggagaagctgaagagccaggtgaccagccagcagcaggagatggctgtgctggaccggcagctgggccacaagaaggaggagctgcacctgctgcagggctccatggtgcaggccaaggctgacctgcaggaggccctgcggctgggggagacagaggtgacagagaagtgcaaccacatccgggaggtgaagagcctgctggaggagctgtccttccagaagggggagctgaatgtgcagatcagcgagaggaagacccagctgaccctcatcaagcaggagatctag

SEQ ID NO: 309825 - DNA, 1449 bp, Artificial Sequence
  derived and/or modified sequence
atggagcagagcaacctggagaagctggagctgaacgtgcggaagcttcaacaggagctggaccagctaaacagggataaactttcactgcacaatgatatatctgccatgcaacaacagctacaggagaagcgtgaagctgttaattccctccaggaagagttagccaatgtgcaggaccatctgaacctggccaaacaggacctgctgcataccaccaagcatcaggacgtgttgctgtccgaacagacccggctgcagaaggatattagtgaatgggccaatagattcgaagactgccagaaggaggaggagaccaaacaacagcagctacaggttttacagaatgaaattgaagagaacaagttgaaattagtgcagcaggaaatgatgttccagcgattacaaaaggagagagaaagtgagaagagcaagctcgatcaggtcctcagcaaagtcctcgcagccgaggagagagtgcgtaccctccaggaggaggagagatggtgcgaaagcctcgaaaagactttgagtcagacaaagcgccaactctcggagcgggagcagcagctggttgaaaaaagcggggagctgttggccctccaaaaggaggcagactctatgcgtgccgatttcagtcttttgcgcaaccaattcctgacagagcgcaagaaggctgaaaaacaggtggcctctctgaaggaagccctgaaaatccagaggtcccagcttgagaaaaatcttctggaacagaagcaggagaattcttgcatacagaaagagatggcaaccatcgaacttgtcgcccaagacaaccatgagcgggctcgccggttgatgaaagagctgaatcaaatgcagtatgaatatacagaactgaagaaacagatggccaaccaaaaggatctggaaaggaggcagatggagattagcgatgccatgagaacactgaagagcgaggtgaaggacgaaatccgcaccagcctgaaaaatcttaaccaattcctaccagaactgccggccgacctggaggccatactggaacggaacgagaacctagaaggcgagctcgagtctctcaaagagaatcttccgttcaccatgaacgagggtcccttcgaggaaaagctgaacttttcccaagtacacattatggacgagcactggagaggtgaggccttgcgagagaaactgcggcatagggaagaccgtctgaaagcccaactccggcattgcatgtctaagcaagcagaggttctgataaaaggaaagcggcagacggagggaacccttcactcactgcgccgacaggtggacgcactcggggaactagtgacctctaccagtgctgacagcgctagttcaccatcccttagccagctggaatcttcgctcaccgaggatagtcagctaggacagaaccaggaaaaaaatgcatccgcaaggtag

SEQ ID NO: 309826 - DNA, 1041 bp, Artificial Sequence
  derived and/or modified sequence
atgcagcacctgaagagcaagaagcgggaggagcggtggatgcgggcctctaaacgacagagtgagaaggagatggaagagctgcaccacaacatcgacgatctgcttcaggagaaaaagtccttggaatgcgaggtcgaggaactgcatcggaccgtgcagaaacgtcaacagcagaaagactttatagatggcaacgtggagagcctaatgacagaacttgagattgagaagtctcttaaacatcacgaggatatcgttgatgaaattgagtgcattgagaagacactgctgaaacgacgtagtgaactccgggaagctgaccgactcttggcagaggcagaatccgaactgtcctgcactaaggaaaaaacaaaaaacgccgtggaaaagttcaccgacgccaagaggagcctgctgcagaccgaaagcgacgccgaagagttggagcggagagctcaggaaactgcagtcaatctggtgaaggccgatcagcagttgcgatccctgcaagccgatgctaaggatctagagcagcacaaaattaagcaagaagaaatcctcaaagagattaacaaaatagtggcagccaaggatagtgatttccagtgcctcagtaagaaaaaagagaagctgacagaagagctgcagaagctccaaaaagacattgagatggcagagaggaatgaggatcaccacctgcaggtgctaaaggagagtgaggtactactgcaggccaaacgggccgaactggagaagctcaaaagccaggtcacatcgcaacagcaggagatggctgtgctggatagacagctcggccacaaaaaggaggaactgcacctcctgcaagggagcatggttcaggccaaagccgacctgcaggaggcactgcgtctgggtgaaaccgaggtaaccgaaaaatgcaaccatatccgcgaagttaagagcctccttgaggagctgtcattccagaagggggagttgaatgtgcagataagcgagcgtaagacccaactcacgctaatcaagcaggaaatctag

SEQ ID NO: 309827 - DNA, 1449 bp, Artificial Sequence
  derived and/or modified sequence
atggagcagtctaaccttgagaagctggagttgaatgttaggaaactgcaacaggagttggatcagcttaatagagacaagctgtccttgcacaacgacatctctgccatgcagcaacagctccaggagaaaagagaagccgtgaactccttacaagaagagcttgccaatgtgcaagaccacctgaacctcgctaagcaggacctcttgcacaccaccaagcaccaagacgtcctgctgtccgagcaaacacgcctgcagaaggacatcagcgaatgggctaatagatttgaggattgccaaaaggaagaggagaccaaacagcaacagctgcaagtactccagaacgagatcgaggaaaacaagcttaagctggtccagcaggagatgatgttccagaggctgcagaaggaaagagagtccgagaagtccaaactggaccaggtgctgagcaaggtcctggccgcagaggaacgcgtgagaaccctgcaagaggaagaaagatggtgtgagagtctggagaagactctgtctcagaccaagaggcaactctctgaaagggaacagcagctagtggaaaagtccggagaactgcttgcgcttcagaaagaggcggactctatgagggccgacttctcgctgctgaggaaccagttcttgaccgaacggaaaaaggctgaaaaacaagttgcctcactgaaggaggccctaaaaatccaacggtctcaattggaaaagaatctgcttgagcagaaacaggagaatagttgtatacaaaaggagatggcgacaattgagcttgttgcacaggataatcatgagagggcccgacggctgatgaaagagctgaaccaaatgcaatacgaatacaccgagttgaaaaagcagatggcaaaccagaaggatctcgagaggcgacagatggagatttccgacgcgatgcggactctgaagagtgaggtgaaggatgagattcgtacaagtcttaaaaatctgaatcagtttctgccagaactccccgcagatttggaagctatcctcgaaagaaacgaaaacctggaaggcgaactggagtccctcaaggagaatcttccatttactatgaatgaaggcccattcgaagagaaactcaacttttctcaggtccacattatggacgagcactggcgcggagaggccctgagggagaagttgcggcaccgggaggacaggctgaaggcacaactgcgacattgcatgagcaagcaagctgaggtgctgattaaggggaagcgacaaactgaagggacactgcactccctgcggaggcaggtggacgcattgggggagcttgttaccagcacaagcgctgactcagcatcttcgccaagcctcagccagcttgagtcatccctcactgaagacagccagctcggccaaaatcaggagaaaaatgcctcagcaaggtag

SEQ ID NO: 309828 - DNA, 1041 bp, Artificial Sequence
  derived and/or modified sequence
atgcagcacctgaaaagtaagaagcgcgaggaacgctggatgcgggcatcgaagagacaaagcgagaaggaaatggaggagctgcaccacaatatcgatgacttgctccaggaaaagaagagcctggaatgtgaggtggaggagctccaccgcaccgtccagaagcggcagcagcaaaaagatttcattgatgggaatgtggaatccctgatgacagagctcgaaattgagaagagccttaagcaccacgaagatattgtggacgagatagagtgtatcgaaaagaccctcttaaagaggcgaagcgagctccgggaagctgacagactgctggctgaggccgaaagcgagctgtcctgcaccaaagagaagacaaaaaatgctgtcgagaagttcaccgacgccaaaaggtcactgctccagaccgaatcagacgccgaggaacttgaacggagagcacaggagacggcagtaaaccttgtgaaagccgatcagcagttgagatcattacaggcggacgccaaggatctggagcagcacaagattaaacaggaggagattctcaaagagataaataagattgtggccgctaaggatagcgatttccagtgtctgagcaagaagaaggaaaaattaacggaggaattgcagaagttgcaaaaggatatcgagatggcagagagaaacgaagaccaccatctacaagtgcttaaagagtctgaagtgctattgcaagccaagagagctgaattggagaaactgaagagtcaagtgacttcacagcaacaggaaatggcggttcttgatagacagttgggacataagaaagaagaacttcacctgttgcagggaagtatggtacaggccaaggcagatctgcaggaggccttgaggttaggcgagactgaggtcactgaaaagtgtaatcatatacgggaggtgaagagtcttctggaggagctgtcttttcaaaagggcgaacttaacgtgcaaatcagcgagagaaaaacccaactcaccctgattaagcaagagatatag

SEQ ID NO: 309829 - DNA, 1833 bp, Artificial Sequence
  derived and/or modified sequence
gttatgaaaattaaccaggagcgagcagaggagttgcaggaagcagagaggttcagcagaaaggcagcacaagcagccagagatctcacccgagcagaagctgagatcgaactcctgcagaatctcctcaggcagaagggggagcagtttcgacttgagatggagaaaacaggtgtaggtactggagcaaactcacaggtcctagaaattgagaaactgaatgagacaatggaacgacaaaggacagagattgcaaggctgcagaatgtactagacctcactggaagtgacaacaaaggaggctttgaaaatgttttagaagaaattgctgaacttcgacgtgaagtttcttatcagaatgattacataagcagcatggcagatcctttcaaaagacgaggctattggtactttatgccaccaccaccatcatcaaaagtttccagccatagttcccaggccaccaaggactctggtgttggccttaagtactcagcctcaactcctgttagaaaaccacgccctgggcagcaggatgggaaggaaggcagtcaacctccccctgcctcaggatactgggtttattctcccatcaggagtgggttacataaactgtttccaagtagagatgcagacagtggaggagatagtcaggaagagagtgagctggatgaccaagaagaacccccatttgtgcctcctcctggatacatgatgtatactgtgcttcctgatggttctcctgtaccccagggcatggccctgagaatgaagtttctagattagaagacataatgcagcatttaaaatcaaagaagcgggaagaaaggtggatgagagcatccaagcggcagtcggagaaagaaatggaagaactgcatcataatattgatgatcttttgcaagagaagaaaagcttagagtgtgaagtagaagaattacatagaactgtccagaaacgtcaacagcaaaaggacttcattgatggaaatgttgagagtcttatgactgaactagaaatagaaaaatcactcaaacatcatgaagatattgtagatgaaattgagtgcattgagaagactcttctgaaacgtcgctcagagctcagggaagctgaccgactcctggcagaggctgagagtgaactttcatgcactaaagaaaagacaaaaaatgctgttgaaaagttcactgatgccaagagaagtttattgcaaactgagtcagatgctgaggaattagaaaggagagctcaggaaactgctgttaacctcgtcaaagctgatcagcagctaagatcgctccaggctgatgcaaaggatttggagcagcacaaaatcaagcaagaagaaatcttgaaagaaataaacaaaattgtagcagcaaaagactcagacttccaatgtttaagcaagaagaaggaaaaactgacagaagagcttcagaaactacagaaagacatagagatggcagaacgcaatgaggatcaccacctgcaggtccttaaagaatctgaggtgcttcttcaggccaaaagagccgagctggaaaagctgaaaagccaggtgacaagtcagcagcaggagatggctgtcttggacaggcagttagggcataaaaaggaggagctgcatctactccaaggaagcatggtccaggcaaaagctgacctccaggaagctctgagactgggagagactgaagtaactgagaagtgcaatcacattagggaagtaaaatctcttctggaagaactgagttttcagaaaggagaactaaatgttcagattagtgaaagaaaaactcaacttacacttataaagcaggaaattg

SEQ ID NO: 309830 - DNA, 1032 bp, Artificial Sequence
  derived and/or modified sequence
atgcaccagcgccacccccgcgcccgctgcccccccctgtgcgtggccggcatcctggcctgcggcttcctgctgggctgctggggccccagccacttccagcagagctgcctgcaggccctggagccccaggccgtgagcagctacctgagccccggcgcccccctgaagggccgcccccccagccccggcttccagcgccagcgccagcgccagcgccgcgccgccggcggcatcctgcacctggagctgctggtggccgtgggccccgacgtgttccaggcccaccaggaggacaccgagcgctacgtgctgaccaacctgaacatcggcgccgagctgctgcgcgaccccagcctgggcgcccagttccgcgtgcacctggtgaagatggtgatcctgaccgagcccgagggcgcccccaacatcaccgccaacctgaccagcagcctgctgagcgtgtgcggctggagccagaccatcaaccccgaggacgacaccgaccccggccacgccgacctggtgctgtacatcacccgcttcgacctggagctgcccgacggcaaccgccaggtgcgcggcgtgacccagctgggcggcgcctgcagccccacctggagctgcctgatcaccgaggacaccggcttcgacctgggcgtgaccatcgcccacgagatcggccacagcttcggcctggagcacgacggcgcccccggcagcggctgcggccccagcggccacgtgatggccagcgacggcgccgccccccgcgccggcctggcctggagcccctgcagccgccgccagctgctgagcctgctgcgccccgtgccccccagccccctgcccctgctggccacccacctgtgcgccggccgcagcctgagcctgggccccagccaggagcccgcccccggcggcggccgcggcccccgcacccccgtgcccacccacaagcgcccccgcttccagaccctgcccagcagctgccccctgctgcgccccgccagcagccgctgcaccccccgcgac

SEQ ID NO: 309831 - DNA, 1035 bp, Artificial Sequence
  derived and/or modified sequence
atgcaccagagacaccccagagccagatgcccccccctgtgcgtggccggcatcctggcctgcggcttcctgctgggctgctggggccccagccacttccagcagagctgcctgcaggccctggagccccaggccgtgagcagctacctgagccccggcgcccccctgaagggcagaccccccagccccggcttccagagacagagacagagacagagaagagccgccggcggcatcctgcacctggagctgctggtggccgtgggccccgacgtgttccaggcccaccaggaggacaccgagagatacgtgctgaccaacctgaacatcggcgccgagctgctgagagaccccagcctgggcgcccagttcagagtgcacctggtgaagatggtgatcctgaccgagcccgagggcgcccccaacatcaccgccaacctgaccagcagcctgctgagcgtgtgcggctggagccagaccatcaaccccgaggacgacaccgaccccggccacgccgacctggtgctgtacatcaccagattcgacctggagctgcccgacggcaacagacaggtgagaggcgtgacccagctgggcggcgcctgcagccccacctggagctgcctgatcaccgaggacaccggcttcgacctgggcgtgaccatcgcccacgagatcggccacagcttcggcctggagcacgacggcgcccccggcagcggctgcggccccagcggccacgtgatggccagcgacggcgccgcccccagagccggcctggcctggagcccctgcagcagaagacagctgctgagcctgctgagacccgtgccccccagccccctgcccctgctggccacccacctgtgcgccggcagaagcctgagcctgggccccagccaggagcccgcccccggcggcggcagaggccccagaacccccgtgcccacccacaagagacccagattccagaccctgcccagcagctgccccctgctgagacccgccagcagcagatgcacccccagagactag

SEQ ID NO: 309832 - DNA, 1155 bp, Artificial Sequence
  derived and/or modified sequence
acactgcctaatcgtcccgcccagtagtgagcaggcctgtcccattccatactgaccagattcccagtcaccaaggccccctctcactccgctccactcctcgggctggctctcctgaggatgcaccagcgtcacccccgggcaagatgccctcccctctgtgtggccggaatccttgcctgtggctttctcctgggctgctggggaccctcccatttccagcagagttgtcttcaggctttggagccacaggccgtgtcttcttacttgagccctggtgctcccttaaaaggccgccctccttcccctggcttccagaggcagaggcagaggcagaggcgggctgcaggcggcatcctacacctggagctgctggtggccgtgggccccgatgtcttccaggctcaccaggaggacacagagcgctatgtgctcaccaacctcaacatcggggcagaactgcttcgggacccgtccctgggggctcagtttcgggtgcacctggtgaagatggtcattctgacagagcctgagggtgccccaaatatcacagccaacctcacctcgtccctgctgagcgtctgtgggtggagccagaccatcaaccctgaggacgacacggatcctggccatgctgacctggtcctctatatcactaggtttgacctggagttgcctgatggtaaccggcaggtgcggggcgtcacccagctgggcggtgcctgctccccaacctggagctgcctcattaccgaggacactggcttcgacctgggagtcaccattgcccatgagattgggcacagcttcggcctggagcacgacggcgcgcccggcagcggctgcggccccagcggacacgtgatggcttcggacggcgccgcgccccgcgccggcctcgcctggtccccctgcagccgccggcagctgctgagcctgctcagacccgtccctccgtcgccgctccctctgctggccacccacctctgcgccggcaggagccttagtcttggtcccagccaagagccggctcctggtggggggcgcgggccgagaactcctgttcccactcacaaaaggccacgcttccaaacgcttccatcctcgtgcccactcctccgtcccgcctcctcccggtgtacaccccgggactga

SEQ ID NO: 309833 - DNA, 1035 bp, Artificial Sequence
  derived and/or modified sequence
atgcaccagcggcacccgagagccagatgcccacccttatgtgtcgcaggtatccttgcttgcggatttctgttagggtgttgggggccttcccactttcaacagagctgcctgcaggcattggagccccaagcagttagttcatacctctcaccaggtgcccccctcaagggcagaccccctagcccgggtttccagagacagcgacaacgacagagacgagccgccgggggtatcttgcacctcgagctactggtagcggtgggacccgacgtgtttcaggcacatcaggaggatacagagcgctatgtcctgaccaaccttaatataggcgcagaattgttgcgggacccttccctcggagctcagtttcgggtacatttggtgaagatggtgatcctcactgaaccagagggagcccccaatataaccgcaaacctgacctcttcactgctgagcgtctgcggctggagccagacaatcaatccggaagacgacaccgacccagggcacgccgacctggtgctgtatatcacaagatttgacctcgaacttcccgatggaaacaggcaagtaaggggagtgacgcagctgggcggcgcttgctctcctacctggagttgtctcattactgaggatactgggtttgacctgggcgtcacgattgctcatgagatcggccattcgtttgggctggaacacgatggtgcccctggaagcggatgtgggccaagcggccacgttatggcatctgatggcgctgcccctagggctggcctggcatggtccccctgttctcggcggcagctgctctctttgctaagacccgtaccaccatcccctttacccctactcgctacccacctctgtgcgggccgcagcctttcgctgggcccaagccaggaacccgcacctggcggcgggaggggtccccgaacccccgttcctacgcacaaaaggccaagattccagaccctgccttcgagctgccccctgctccggccagcaagctcccggtgcactccccgagattag

SEQ ID NO: 309834 - DNA, 1035 bp, Artificial Sequence
  derived and/or modified sequence
atgcaccagaggcacccccgggcccgctgcccccccctgtgtgtggccggcatcctggcctgtggcttcctgctgggctgctggggccccagccacttccagcagagctgcctgcaggccctggagccccaggccgtgagcagctacctgagccctggggcccccctgaagggccggccccccagccctggcttccagaggcagaggcagaggcagaggagagctgctgggggcatcctgcacctggagctgctggtggccgtgggcccagatgtgttccaggcccaccaggaggacacagaaagatatgtgctgaccaacctgaacatcggggctgagctgctgcgggaccccagcctgggcgcccagttccgggtgcacctggtgaagatggtgatcctgacagagcctgagggcgcccccaacatcacagccaacctgaccagcagcctgctgtctgtgtgtggctggagccagaccatcaacccagaagatgacacagatcctggccacgccgacctggtgctgtacatcaccaggtttgacctggagctgcctgatggcaaccggcaggtgcggggcgtgacccagctgggcggggcctgcagccccacctggagctgcctgatcacagaggacaccggctttgacctgggcgtgaccatcgcccacgagatcggccacagctttggcctggagcatgatggagcccctggcagcggctgcggccccagcggccacgtgatggccagtgatggagctgccccccgggccggcctggcctggagcccctgcagccggcggcagctgctgagcctgctgcggcctgtgccccccagccccctgcccctgctggccacccacctgtgtgccggccgcagcctgagcctgggccccagccaggagcccgcccctgggggcggccggggccccaggacccctgtgcccacccacaagaggccccgcttccagaccctgcccagcagctgccccctgctgcggcctgccagcagccgctgcaccccccgggactag

SEQ ID NO: 309835 - DNA, 1035 bp, Artificial Sequence
  derived and/or modified sequence
atgcaccagcggcacccccgggcccggtgcccccccctgtgcgtggccggtattttagcctgcggctttctcttaggatgttggggacctagccactttcaacagtcatgcctgcaagccctggaaccacaagctgtttcttcttatctgtctcccggagcaccactgaaagggaggccaccctccccaggattccaacgccagaggcagaggcaacgccgcgctgccggtggcatcctccaccttgagctgctcgttgctgtggggccagatgtattccaagcgcaccaggaagatacagaacgttatgtactgacaaacctgaatataggagccgagctgttaagggatccttcgctgggcgcgcagtttcgagtccacctggtgaagatggtcattctgaccgagcccgagggggcccctaacatcactgcaaatcttacttcaagtctcctgtcagtgtgcgggtggtcccagaccattaatccagaagacgacaccgatccagggcacgccgacttggttctatacataacaaggttcgatctggagctcccggatggcaaccgccaggttcgcggagtgacacagctcgggggtgcctgctcaccaacctggtcctgtctcattactgaggacacaggcttcgacctcggcgttacgattgcgcatgaaattgggcatagttttgggctggagcacgacggtgcccccggttcagggtgcggaccttccggccacgtcatggctagcgatggcgccgcaccccgtgcagggttggcatggtcaccttgcagccggcgtcagctactgtcactactccgtcctgtgcccccatccccccttccactcctggccacccatttatgtgccggcagatccctcagcctgggcccctcacaagaacctgcacctggcggggggcgcggacctagaactccagtcccaacccataagcgtcctaggtttcaaaccctgccgtcatcctgcccgctgcttcggcctgcctcttccagatgtacccctcgcgactag

SEQ ID NO: 309836 - DNA, 1035 bp, Artificial Sequence
  derived and/or modified sequence
atgcaccagcgccacccacgggcacggtgtccccctctgtgtgttgccggaattctagcatgcggattcttgctgggctgttgggggccttctcacttccaacagtcatgtctgcaggccttggagccccaggcggtaagtagttacctttcaccaggggctcctctgaaaggccgacccccttctccaggctttcagcgacagagacagagacagcggcgagcagcaggcggtatactccacctcgaactgttggtcgccgtgggtcctgacgtgttccaggcacaccaggaggacacggaacggtacgtactgacaaacctgaatattggagctgagttgctcagagatccctcccttggcgctcagttccgtgtccacctggtgaaaatggttattctgaccgagcccgaaggcgctcctaacataactgccaacctgacatcttccctcctctctgtttgtggatggtctcagaccatcaacccagaggatgacaccgaccctggccatgccgacctggtcctgtacattaccagattcgacctggagctccccgacgggaatcgtcaggttcgaggagtgacccaactgggcggagcctgctctcccacctggtcctgcctcattaccgaggacacaggattcgatctgggcgttaccatcgcacacgagattggccacagtttcggactggagcacgatggagccccaggcagcggatgtggccctagcgggcatgtgatggcatctgacggcgctgcacctagggctggtctggcatggtccccgtgttcgagaagacagctcctgagtctgttacgaccagttcctcccagtcccctgcccctactggcgacacatttgtgtgccggacgatccctttcccttgggccatcccaagagcccgctcctggagggggaaggggccctcgcactcccgtccctacgcataagcgcccaagattccagacactccccagtagttgtcctctgttgagacctgcgtcatcccgctgcacccctagggactag

SEQ ID NO: 309837 - DNA, 1035 bp, Artificial Sequence
  derived and/or modified sequence
atgcaccagcgacacccccgcgctaggtgcccaccactgtgcgtggccggaatcctcgcttgtggcttcttgcttggctgttggggcccctcccacttccagcagtcatgtttgcaggctctcgagccccaggcagtatcatcttatctttcgcccggggcacccctgaaaggaaggcctccttcgcccggtttccagaggcagcgacagaggcagcggcgcgctgccgggggcatcctgcatctcgaattactggtggctgtgggaccagacgtgtttcaggcacatcaagaagacacggaacgatatgtgttaactaatttgaacattggagccgaactcctccgtgaccctagcttgggggcccagttcagggttcacctggtcaagatggtgatcctgaccgaacctgagggcgcacctaacatcaccgccaacctgaccagttccttactgagcgtttgcggatggtcccaaaccatcaacccagaagatgacactgatcctggccatgcagacctcgttctttacataacacggtttgacttggaactacccgacggaaatcggcaagtgcgcggcgtgacccagctggggggagcatgttcccccacatggtcgtgcctgatcaccgaggacacgggcttcgatctaggagtaactattgcacacgagattgggcattcctttgggttggaacacgacggagcacctggctccggatgcggaccttccggacacgttatggcctcagatggcgccgctcctagggcaggcctggcatggtcaccctgtagccgtcgccagttgctgtccctgctcagacctgttcctcctagccctctccctctcctcgccacacatttgtgtgccgggcggagtctgtcactagggccatctcaggaaccagcgcccggaggtggaagaggaccccgtactccagtgccaacccataagcgaccccgatttcagactctgccttcctcatgtccactgcttagacctgctagctcccgttgtacccccagagactag

SEQ ID NO: 309838 - DNA, 1035 bp, Artificial Sequence
  derived and/or modified sequence
atgcatcagagacaccctagagcgagatgtcctcctttgtgtgtggcaggaattctcgcatgcgggtttttgttgggatgctggggaccgtctcattttcagcaatcttgcttgcaagctctggaacctcaagccgttagcagctacctctctccaggggcgccattaaagggcaggccaccatctcccggcttccaaagacagagacagaggcagcggagagcagcaggcggaattttgcacctagaattgctggtcgctgttggccccgacgtcttccaggcccatcaggaggacaccgagcggtatgtgctcaccaacctaaacatcggtgctgaacttctgcgagatccaagtctgggtgctcaatttagggtccacctggtaaaaatggtgattctaacagagcctgaaggcgcccctaacattaccgccaatttaacaagctcgttactcagcgtgtgtgggtggtcacagacaataaaccccgaagatgatacagatccaggacacgctgacttagttctgtacattacaagatttgatttggaactgcctgacggaaatagacaagtgcgaggcgtgacccagctgggcggtgcatgtagcccaacctggagctgcctgatcaccgaagatacgggctttgatctaggggtcaccatcgcccacgaaatcggccactccttcggcctggaacacgatggtgcaccgggttcaggctgcggaccttcaggtcatgttatggcaagcgacggcgctgctccacgtgccggtctcgcctggtctccatgctccagacgtcaactgctttctctgctccgcccggttccgccctctccattgccattactcgcaactcatttgtgcgctggaagatcactgtcgctcgggccttcacaggaaccagcgcccggaggtggaagaggaccccgtactccagtgccaacccataagcgaccccgatttcagactctgccttcctcatgtccactgcttagacctgctagctcccgttgtacccccagagactag

SEQ ID NO: 309839 - RNA, 1035 nt, Artificial Sequence
  derived and/or modified sequence
augcaccagcgacacccccgcgcuaggugcccaccacugugcguggccggaauccucgcuuguggcuucuugcuuggcuguuggggccccucccacuuccagcagucauguuugcaggcucucgagccccaggcaguaucaucuuaucuuucgcccggggcaccccugaaaggaaggccuccuucgcccgguuuccagaggcagcgacagaggcagcggcgcgcugccgggggcauccugcaucucgaauuacugguggcugugggaccagacguguuucaggcacaucaagaagacacggaacgauauguguuaacuaauuugaacauuggagccgaacuccuccgugacccuagcuugggggcccaguucaggguucaccuggucaagauggugauccugaccgaaccugagggcgcaccuaacaucaccgccaaccugaccaguuccuuacugagcguuugcggauggucccaaaccaucaacccagaagaugacacugauccuggccaugcagaccucguucuuuacauaacacgguuugacuuggaacuacccgacggaaaucggcaagugcgcggcgugacccagcuggggggagcauguucccccacauggucgugccugaucaccgaggacacgggcuucgaucuaggaguaacuauugcacacgagauugggcauuccuuuggguuggaacacgacggagcaccuggcuccggaugcggaccuuccggacacguuauggccucagauggcgccgcuccuagggcaggccuggcauggucacccuguagccgucgccaguugcugucccugcucagaccuguuccuccuagcccucucccucuccucgccacacauuugugugccgggcggagucugucacuagggccaucucaggaaccagcgcccggagguggaagaggaccccguacuccagugccaacccauaagcgaccccgauuucagacucugccuuccucauguccacugcuuagaccugcuagcucccguuguacccccagagacuag

SEQ ID NO: 309840 - RNA, 1035 nt, Artificial Sequence
  derived and/or modified sequence
augcaucagagacacccuagagcgagauguccuccuuuguguguggcaggaauucucgcaugcggguuuuuguugggaugcuggggaccgucucauuuucagcaaucuugcuugcaagcucuggaaccucaagccguuagcagcuaccucucuccaggggcgccauuaaagggcaggccaccaucucccggcuuccaaagacagagacagaggcagcggagagcagcaggcggaauuuugcaccuagaauugcuggucgcuguuggccccgacgucuuccaggcccaucaggaggacaccgagcgguaugugcucaccaaccuaaacaucggugcugaacuucugcgagauccaagucugggugcucaauuuaggguccaccugguaaaaauggugauucuaacagagccugaaggcgccccuaacauuaccgccaauuuaacaagcucguuacucagcguguguggguggucacagacaauaaaccccgaagaugauacagauccaggacacgcugacuuaguucuguacauuacaagauuugauuuggaacugccugacggaaauagacaagugcgaggcgugacccagcugggcggugcauguagcccaaccuggagcugccugaucaccgaagauacgggcuuugaucuaggggucaccaucgcccacgaaaucggccacuccuucggccuggaacacgauggugcaccggguucaggcugcggaccuucaggucauguuauggcaagcgacggcgcugcuccacgugccggucucgccuggucuccaugcuccagacgucaacugcuuucucugcuccgcccgguuccgcccucuccauugccauuacucgcaacucauuugugcgcuggaagaucacugucgcucgggccuucacaggaaccagcgcccggagguggaagaggaccccguacuccagugccaacccauaagcgaccccgauuucagacucugccuuccucauguccacugcuuagaccugcuagcucccguuguacccccagagacuag

SEQ ID NO: 309841 - protein, 364 aa, Artificial Sequence
  derived and/or modified sequence
MDMCQALSCHTDPLDQSSCSRLLVPLLDGTECGVEKWCSKGRCRSLVELTPIAAVHGRWSSWGPRSPCSRSCGGGVVTRRRQCNNPRPAFGGRACVGADLQAEMCNTQACEKTQLEFMSQQCARTDGQPLRSSPGGASFYHWGAAVPHSQGDALCRHMCRAIGESFIMKRGDSFLDGTRCMPSGPREDGTLSLCVSGSCRTFGCDGRMDSQQVWDRCQVCGGDNSTCSPRKGSFTAGRAREYVTFLTVTPNLTSVYIANHRPLFTHLAVRIGGRYVVAGKMSISPNTTYPSLLEDGRVEYRVALTEDRLPRLEEIRIWGPLQEDADIQVGGVRAQLMHISWWSRPGLGERDLCARGRWPGGSSD

SEQ ID NO: 309842 - DNA, 1092 bp, Artificial Sequence
  derived and/or modified sequence
atggacatgtgccaggccctgagctgccacaccgaccccctggaccagagcagctgcagccgcctgctggtgcccctgctggacggcaccgagtgcggcgtggagaagtggtgcagcaagggccgctgccgcagcctggtggagctgacccccatcgccgccgtgcacggccgctggagcagctggggcccccgcagcccctgcagccgcagctgcggcggcggcgtggtgacccgccgccgccagtgcaacaacccccgccccgccttcggcggccgcgcctgcgtgggcgccgacctgcaggccgagatgtgcaacacccaggcctgcgagaagacccagctggagttcatgagccagcagtgcgcccgcaccgacggccagcccctgcgcagcagccccggcggcgccagcttctaccactggggcgccgccgtgccccacagccagggcgacgccctgtgccgccacatgtgccgcgccatcggcgagagcttcatcatgaagcgcggcgacagcttcctggacggcacccgctgcatgcccagcggcccccgcgaggacggcaccctgagcctgtgcgtgagcggcagctgccgcaccttcggctgcgacggccgcatggacagccagcaggtgtgggaccgctgccaggtgtgcggcggcgacaacagcacctgcagcccccgcaagggcagcttcaccgccggccgcgcccgcgagtacgtgaccttcctgaccgtgacccccaacctgaccagcgtgtacatcgccaaccaccgccccctgttcacccacctggccgtgcgcatcggcggccgctacgtggtggccggcaagatgagcatcagccccaacaccacctaccccagcctgctggaggacggccgcgtggagtaccgcgtggccctgaccgaggaccgcctgccccgcctggaggagatccgcatctggggccccctgcaggaggacgccgacatccaggtgggcggcgtgcgcgcccagctgatgcacatcagctggtggagccgccccggcctgggcgagcgcgacctgtgcgcccgcggccgctggcccggcggcagcagcgac

SEQ ID NO: 309843 - DNA, 1095 bp, Artificial Sequence
  derived and/or modified sequence
atggacatgtgccaggccctgagctgccacaccgaccccctggaccagagcagctgcagcagactgctggtgcccctgctggacggcaccgagtgcggcgtggagaagtggtgcagcaagggcagatgcagaagcctggtggagctgacccccatcgccgccgtgcacggcagatggagcagctggggccccagaagcccctgcagcagaagctgcggcggcggcgtggtgaccagaagaagacagtgcaacaaccccagacccgccttcggcggcagagcctgcgtgggcgccgacctgcaggccgagatgtgcaacacccaggcctgcgagaagacccagctggagttcatgagccagcagtgcgccagaaccgacggccagcccctgagaagcagccccggcggcgccagcttctaccactggggcgccgccgtgccccacagccagggcgacgccctgtgcagacacatgtgcagagccatcggcgagagcttcatcatgaagagaggcgacagcttcctggacggcaccagatgcatgcccagcggccccagagaggacggcaccctgagcctgtgcgtgagcggcagctgcagaaccttcggctgcgacggcagaatggacagccagcaggtgtgggacagatgccaggtgtgcggcggcgacaacagcacctgcagccccagaaagggcagcttcaccgccggcagagccagagagtacgtgaccttcctgaccgtgacccccaacctgaccagcgtgtacatcgccaaccacagacccctgttcacccacctggccgtgagaatcggcggcagatacgtggtggccggcaagatgagcatcagccccaacaccacctaccccagcctgctggaggacggcagagtggagtacagagtggccctgaccgaggacagactgcccagactggaggagatcagaatctggggccccctgcaggaggacgccgacatccaggtgggcggcgtgagagcccagctgatgcacatcagctggtggagcagacccggcctgggcgagagagacctgtgcgccagaggcagatggcccggcggcagcagcgactag

SEQ ID NO: 309844 - DNA, 2219 bp, Artificial Sequence
  derived and/or modified sequence
cagcttcggcctggagcacgacggcgcgcccggcagcggctgcggccccagcggacacgtgatggcttcggacggcgccgcgccccgcgccggcctcgcctggtccccctgcagccgccggcagctgctgagcctgctcagacccgtccctccgtcgccgctccctctgctggccacccacctctgcgccggcaggagccttagtcttggtcccagccaagagccggctcctggtggggggcgcgggccgagaactcctgttcccactcacaaaaggccacgcttccaaacgcttccatcctcgtgcccactcctccgtcccgcctcctcccggtgtacaccccgggactgagccgggcctgagccgggccttgtcgcagcgcaggacgggcgcgctgcgtgtgggacccgccgcggcctcaacccgggtccgcggggcacccgccggatgcgcagcctggcctctactacagcgccaacgagcagtgccgcgtggccttcggccccaaggctgtcgcctgcaccttcgccagggagcacctggtgagtctgccggcggtggcctgggattggctgtgaggtccctccgcatcacccagctcacgtcccccaaaacgtgcatggatatgtgccaggccctctcctgccacacagacccgctggaccaaagcagctgcagccgcctcctcgttcctctcctggatgggacagaatgtggcgtggagaagtggtgctccaagggtcgctgccgctccctggtggagctgacccccatagcagcagtgcatgggcgctggtctagctggggtccccgaagtccttgctcccgctcctgcggaggaggtgtggtcaccaggaggcggcagtgcaacaaccccagacctgcctttggggggcgtgcatgtgttggtgctgacctccaggccgagatgtgcaacactcaggcctgcgagaagacccagctggagttcatgtcgcaacagtgcgccaggaccgacggccagccgctgcgctcctcccctggcggcgcctccttctaccactggggtgctgctgtaccacacagccaaggggatgctctgtgcagacacatgtgccgggccattggcgagagcttcatcatgaagcgtggagacagcttcctcgatgggacccggtgtatgccaagtggcccccgggaggacgggaccctgagcctgtgtgtgtcgggcagctgcaggacatttggctgtgatggtaggatggactcccagcaggtatgggacaggtgccaggtgtgtggtggggacaacagcacgtgcagcccacggaagggctctttcacagctggcagagcgagagaatatgtcacatttctgacagttacccccaacctgaccagtgtctacattgccaaccacaggcctctcttcacacacttggcggtgaggatcggagggcgctatgtcgtggctgggaagatgagcatctcccctaacaccacctacccctccctcctggaggatggtcgtgtcgagtacagagtggccctcaccgaggaccggctgccccgcctggaggagatccgcatctggggacccctccaggaagatgctgacatccaggtgggaggtgtcagagcccagctcatgcacatcagctggtggagcaggcctggccttggagaacgagacctgtgtgccaggggcagatggcctggaggctccagtgactgaggggcctggctccgtagatgagaagctgcctgcccctgagccctgtgtcgggatgtcatgtcctccaggctggggccatctggatgccacctctgcaggggagaaggctccctccccatggggcagcatcaggacgggggctcaagctgcacacgtgtggacccctgcggcagggtcgtgctccgtctcctgcgggcgaggtctgatggagctgcgtttcctgtgcatggactctgccctcagggtgcctgtccaggaagagctgtgtggcctggcaagcaagcctgggagccggcgggaggtctgccaggctgtcccgtgccctgctcggtggcagtacaagctggcggcctgcagcgtgagctgtgggagaggggtcgtgcggaggatcctgtattgtgcccgggcccatggggaggacgatggtgaggagatcctgttggacacccagtgccaggggctgcctcgcccggaaccccaggaggcctgcagcctggagccctg

SEQ ID NO: 309845 - DNA, 1095 bp, Artificial Sequence
  derived and/or modified sequence
atggacatgtgtcaggctctgagctgccacaccgatccactggaccagtcatcatgctcccgtctcctggtgccactactggacggcaccgagtgcggtgttgaaaagtggtgctccaaaggtagatgcagaagtttggtggagctgactccaatagctgccgttcacggacgctggtcgagttgggggccacgttctccttgttccaggtcgtgcggagggggagttgtcacaagaagacgccagtgtaataacccgaggcctgcgttcggagggcgggcctgtgtgggagctgacctccaggccgaaatgtgtaatacccaggcctgcgagaagactcaactagaatttatgtcccaacagtgtgcccggaccgatggccagccacttcgcagctccccgggaggagcgtcattttaccactggggggccgctgtcccacattcacagggagacgccctctgtcgtcacatgtgcagggccattggggagtccttcattatgaaacgtggagacagcttcctagacggcactaggtgcatgccatctggccctcgagaggacggcaccctttccctctgtgtgagtggctcctgtaggacattcggatgtgacggccggatggattcacagcaggtgtgggataggtgccaggtgtgcggcggcgataattccacgtgctcacctcgaaagggtagtttcaccgccggtagagcgagggaatacgtaacttttttgaccgtgacccccaatctcacttctgtgtacattgctaaccatagaccactgttcacccaccttgccgtaagaattggtggcaggtacgtggttgcgggcaagatgagcatttctcctaataccacttacccctctctactggaagatggccgggtggagtatcgagttgcactcacagaggataggctgcctcgcttagaagaaatacgcatatggggtcccctgcaggaggacgcagatattcaggtaggaggggtgcgcgctcagcttatgcatatttcatggtggtcccgacccggactgggtgagcgggatctctgtgcccgtgggcggtggccaggtgggtcatctgactag

SEQ ID NO: 309846 - DNA, 1095 bp, Artificial Sequence
  derived and/or modified sequence
atggacatgtgccaggccctgagctgccacacagaccccctggaccagagcagctgcagccggctgctggtgcccctgctggatggaacagaatgtggggtggagaagtggtgcagcaagggccgctgccgcagcctggtggagctgacccccatcgctgctgtgcacggccgctggagctcctggggccccaggagcccctgcagccgcagctgtggcggcggcgtggtgacccggcggcggcagtgcaacaaccccaggcctgccttcggcggccgggcctgtgtgggcgctgacctgcaggccgagatgtgcaacacccaggcctgtgagaagacccagctggagttcatgagccagcagtgtgccaggacagatggccagcccctgcggagcagccctgggggcgccagcttctaccactggggcgctgctgtgccccacagccagggagatgccctgtgccgccacatgtgccgggccatcggggagagcttcatcatgaagagaggagacagcttcctggatggcacccgctgcatgcccagcggccccagagaagatggcaccctgagcctgtgtgtgtctggcagctgcaggaccttcggctgtgatggccgcatggacagccagcaggtgtgggaccgctgccaggtgtgtggcggggacaacagcacctgcagccccaggaagggcagcttcaccgctggccgggcccgggagtatgtgaccttcctgactgtgacccccaacctgacctctgtgtacatcgccaaccaccggcccctcttcacccacctggccgtgagaattggaggccgctacgtggtggccggcaagatgagcatcagccccaacaccacctaccccagcctgctggaggatggccgggtggagtacagagtggccctgacagaggaccggctgccccggctggaggagatccgcatctggggccccctgcaggaggatgctgacatccaggtgggcggcgtgcgggcccagctgatgcacatctcctggtggagcaggcctggcctgggggagcgggacctgtgtgcccggggccgctggccaggcggcagcagtgactag

SEQ ID NO: 309847 - DNA, 1095 bp, Artificial Sequence
  derived and/or modified sequence
atggacatgtgccaggccctgagctgccacaccgaccccctggaccagtcctcttgtagtcggttgctggtgccattgctggacgggactgaatgcggagtggagaagtggtgtagcaagggacggtgccgaagtttggtggagctgacacccattgccgcagtgcatgggcgatggtcttcctggggccctcggtctccctgctcgagaagctgtggtgggggggtcgtgacccgtagaagacagtgcaataaccccagacccgccttcggcgggagagcatgtgtcggggcggatctgcaggccgaaatgtgtaacacccaggcttgtgagaagacacagctcgagtttatgagccagcagtgcgccaggacggacgggcagcctctgaggagcagccccggcggagcaagcttctaccactggggtgccgccgtgccccacagccaaggcgacgccctctgccggcacatgtgcagagcaattggcgaaagctttattatgaaacgcggggattcttttctggatgggactcggtgcatgccatccggccctcgggaagatggtacattgtccctgtgcgtctctgggtcttgccgtacatttggatgcgatgggagaatggatagtcagcaggtctgggatcgctgccaggtgtgcggtggcgacaattctacgtgtagcccccgcaaggggagttttaccgccgggcgggctcgcgagtatgttaccttcctgacagttacccccaacctgacttctgtgtacatcgcaaaccacagacccctcttcactcatttggctgtcaggatcggcgggcggtacgtggtagcagggaaaatgagcatttcacctaacacaacgtatcccagcttactcgaggatggccgtgtggaatatagggtcgcccttactgaggacaggctgccacggctagaagagatccggatctggggccctctccaggaggatgcagacattcaagtggggggggtcagggctcaacttatgcacatcagttggtggagtcggcccggacttggtgagcgtgacctctgcgcccgcgggcgatggcccggagggtcgagtgactag

SEQ ID NO: 309848 - DNA, 1095 bp, Artificial Sequence
  derived and/or modified sequence
atggatatgtgtcaggctctctcctgccacaccgatcccctggaccaaagttcctgctccagactgctcgtcccattgctcgacggaacagagtgcggcgtggagaaatggtgctctaaaggacgctgtaggtcactcgtcgaactgactccaatcgccgcagtacacggcaggtggtcctcgtgggggcctagatccccctgttcacgtagctgtggcggtggcgtggtgacccgccgtcggcaatgcaataatcctcgaccagcgtttggcggtcgtgcttgcgtcggtgcagatcttcaggctgaaatgtgtaatactcaagcctgcgaaaagactcagttagagttcatgtcccagcagtgcgcccgtaccgacggccagcccctgaggagctctcccggaggcgcttctttctaccactggggtgcagcagtgcctcactcccagggggacgcactttgcaggcacatgtgcagggccatcggcgaatcttttatcatgaagaggggagattcgttccttgacggaacgcgttgcatgccgagcggaccgcgagaggacggcacgctgtcactgtgtgtcagcggtagctgccgcaccttcggctgcgatggacgaatggatagccagcaagtctgggacaggtgccaagtttgtggaggtgacaatagcacttgttcacctcggaaaggcagcttcacagcgggaagggcgcgtgagtacgtcactttcctgaccgtgacacccaatctcacttccgtctacatcgccaatcatcggcctctctttactcacttggccgtccgcattggcggacggtacgtggtcgctggtaagatgtctatctctccaaacaccacctacccttcactcctagaagacggtcgcgtggagtatagggtagcgttaactgaggatagattaccaaggctggaggagattaggatttggggcccactgcaggaggacgctgacattcaggttggaggcgtgagggctcagctcatgcacattagctggtggtcccgacccggactgggagagagggatctgtgtgctaggggtcgatggcctggaggttctagcgattag

SEQ ID NO: 309849 - DNA, 1095 bp, Artificial Sequence
  derived and/or modified sequence
atggatatgtgccaggcattatcttgtcatacagatccccttgaccaaagttcttgtagtaggttgctcgtgcctctgctggacgggactgagtgcggtgtagagaagtggtgtagtaaaggacggtgccgttccttagtagaattgaccccgattgccgctgtacacggtagatggagttcttggggaccacggtctccctgttctagatcttgcggtggaggcgtagtcacccgaagacgacagtgtaataaccctcggcccgcatttgggggcagagcatgtgtgggggccgacttacaggccgagatgtgcaacacccaggcttgtgagaaaactcagctggaatttatgagccaacagtgcgcaaggacagacggtcagcctctccgttcctcccccggcggcgcatctttctaccactggggcgcggcagtgccgcatagccaaggcgacgccctctgtagacacatgtgtcgggcaataggcgaaagctttatcatgaagcggggtgacagttttcttgacggcactagatgcatgccaagcggaccccgcgaagatgggacactgtccttgtgtgtctctgggtcttgccgcacatttggatgtgacgggcggatggactcccagcaagtatgggatcgctgccaggtctgcggaggtgacaactccacctgttcaccacggaagggctccttcacagctggtagagcgcgagaatacgttactttcttgacagttaccccaaacctaacttccgtgtacattgcaaatcaccgcccactgttcacccacttagctgtgcgcatcggaggcaggtacgtcgtggctggcaagatgtcaataagccccaacacgacttatccatccctcctggaggacggtcgagtggaatacagagtggccttaactgaggaccggctaccgcggttggaagagattcgaatttggggtcccctgcaagaagatgcggacattcaagtcgggggcgttagagcccagcttatgcatatcagttggtggtctaggcctggtcttggagaacgcgatctgtgcgcccgagggcgatggcctgggggctcttctgactag

SEQ ID NO: 309850 - DNA, 1095 bp, Artificial Sequence
  derived and/or modified sequence
atggatatgtgccaggcattatcttgtcatacagatccccttgaccaaagttcttgtagtaggttgctcgtgcctctgctggacgggactgagtgcggtgtagagaagtggtgtagtaaaggacggtgccgttccttagtagaattgaccccgattgccgctgtacacggtagatggagttcttggggaccacggtctccctgttctagatcttgcggtggaggcgtagtcacccgaagacgacagtgtaataaccctcggcccgcatttgggggcagagcatgtgtgggggccgacttacaagccgaaatgtgtaatactcaggcctgcgaaaagacccagctggagttcatgtctcagcagtgcgcaagaacagatggccagcctctgcggtcaagcccaggcggagcctcattctatcactggggcgcagctgtcccacattcgcagggggacgcgctttgtagacacatgtgtagggctatcggcgagtcattcatcatgaaacgaggagatagctttctggacgggactcgatgcatgccaagtggaccaagagaggacggaacactctccctttgcgtatctggttcatgtaggacctttggatgtgatggcagaatggattcccagcaggtgtgggaccgatgccaggtttgcggaggggacaactctacgtgctcacctcgaaaaggcagtttcacagcagggagggcaagggagtatgtgacatttctgacagtaacacctaatctgaccagtgtctacatcgccaaccatcggccactgtttacgcacttggctgtccgtatcggtggaagatatgtggttgccggcaaaatgagtatctctcctaatactacttacccaagtctgcttgaggacggacgagtggagtatagggttgccctaaccgaagatagactcccaagactcgaggagattaggatatggggacctctgcaagaagacgccgatatacaagtggggggagttcgtgcccagttgatgcacatctcttggtggtcaagaccaggcctcggtgaaagggatttgtgcgcacgtgggcgttggcccggcggatcctcagattag

SEQ ID NO: 309851 - RNA, 1095 nt, Artificial Sequence
  derived and/or modified sequence
auggauaugugccaggcauuaucuugucauacagauccccuugaccaaaguucuuguaguagguugcucgugccucugcuggacgggacugagugcgguguagagaagugguguaguaaaggacggugccguuccuuaguagaauugaccccgauugccgcuguacacgguagauggaguucuuggggaccacggucucccuguucuagaucuugcgguggaggcguagucacccgaagacgacaguguaauaacccucggcccgcauuugggggcagagcaugugugggggccgacuuacaggccgagaugugcaacacccaggcuugugagaaaacucagcuggaauuuaugagccaacagugcgcaaggacagacggucagccucuccguuccucccccggcggcgcaucuuucuaccacuggggcgcggcagugccgcauagccaaggcgacgcccucuguagacacaugugucgggcaauaggcgaaagcuuuaucaugaagcggggugacaguuuucuugacggcacuagaugcaugccaagcggaccccgcgaagaugggacacuguccuugugugucucugggucuugccgcacauuuggaugugacgggcggauggacucccagcaaguaugggaucgcugccaggucugcggaggugacaacuccaccuguucaccacggaagggcuccuucacagcugguagagcgcgagaauacguuacuuucuugacaguuaccccaaaccuaacuuccguguacauugcaaaucaccgcccacuguucacccacuuagcugugcgcaucggaggcagguacgucguggcuggcaagaugucaauaagccccaacacgacuuauccaucccuccuggaggacggucgaguggaauacagaguggccuuaacugaggaccggcuaccgcgguuggaagagauucgaauuugggguccccugcaagaagaugcggacauucaagucgggggcguuagagcccagcuuaugcauaucaguugguggucuaggccuggucuuggagaacgcgaucugugcgcccgagggcgauggccugggggcucuucugacuag

SEQ ID NO: 309852 - RNA, 1095 nt, Artificial Sequence
  derived and/or modified sequence
auggauaugugccaggcauuaucuugucauacagauccccuugaccaaaguucuuguaguagguugcucgugccucugcuggacgggacugagugcgguguagagaagugguguaguaaaggacggugccguuccuuaguagaauugaccccgauugccgcuguacacgguagauggaguucuuggggaccacggucucccuguucuagaucuugcgguggaggcguagucacccgaagacgacaguguaauaacccucggcccgcauuugggggcagagcaugugugggggccgacuuacaagccgaaauguguaauacucaggccugcgaaaagacccagcuggaguucaugucucagcagugcgcaagaacagauggccagccucugcggucaagcccaggcggagccucauucuaucacuggggcgcagcugucccacauucgcagggggacgcgcuuuguagacacauguguagggcuaucggcgagucauucaucaugaaacgaggagauagcuuucuggacgggacucgaugcaugccaaguggaccaagagaggacggaacacucucccuuugcguaucugguucauguaggaccuuuggaugugauggcagaauggauucccagcaggugugggaccgaugccagguuugcggaggggacaacucuacgugcucaccucgaaaaggcaguuucacagcagggagggcaagggaguaugugacauuucugacaguaacaccuaaucugaccagugucuacaucgccaaccaucggccacuguuuacgcacuuggcuguccguaucgguggaagauaugugguugccggcaaaaugaguaucucuccuaauacuacuuacccaagucugcuugaggacggacgaguggaguauaggguugcccuaaccgaagauagacucccaagacucgaggagauuaggauauggggaccucugcaagaagacgccgauauacaaguggggggaguucgugcccaguugaugcacaucucuugguggucaagaccaggccucggugaaagggauuugugcgcacgugggcguuggcccggcggauccucagauuag

SEQ ID NO: 309853 - DNA, 2221 bp, Artificial Sequence
  derived and/or modified sequence
cactgcctaatcgtcccgcccagtagtgagcaggcctgtcccattccatactgaccagattcccagtcaccaaggccccctctcactccgctccactcctcgggctggctctcctgaggatgcaccagcgtcacccccgggcaagatgccctcccctctgtgtggccggaatccttgcctgtggctttctcctgggctgctggggaccctcccatttccagcagagttgtcttcaggctttggagccacaggccgtgtcttcttacttgagccctggtgctcccttaaaaggccgccctccttcccctggcttccagaggcagaggcagaggcagaggcgggctgcaggcggcatcctacacctggagctgctggtggccgtgggccccgatgtcttccaggctcaccaggaggacacagagcgctatgtgctcaccaacctcaacatcggggcagaactgcttcgggacccgtccctgggggctcagtttcgggtgcacctggtgaagatggtcattctgacagagcctgagggtgccccaaatatcacagccaacctcacctcgtccctgctgagcgtctgtgggtggagccagaccatcaaccctgaggacgacacggatcctggccatgctgacctggtcctctatatcactaggtttgacctggagttgcctgatggtaaccggcaggtgcggggcgtcacccagctgggcggtgcctgctccccaacctggagctgcctcattaccgaggacactggcttcgacctgggagtcaccattgcccatgagattgggcacaggatatgtgccaggccctctcctgccacacagacccgctggaccaaagcagctgcagccgcctcctcgttcctctcctggatgggacagaatgtggcgtggagaagtggtgctccaagggtcgctgccgctccctggtggagctgacccccatagcagcagtgcatgggcgctggtctagctggggtccccgaagtccttgctcccgctcctgcggaggaggtgtggtcaccaggaggcggcagtgcaacaaccccaggcctgcgagaagacccagctggagttcatgtcgcaacagtgcgccaggaccgacggccagccgctgcgctcctcccctggcggcgcctccttctaccactggggtgctgctgtaccacacagccaaggggatgctctgtgcagacacatgtgccgggccattggcgagagcttcatcatgaagcgtggagacagcttcctcgatgggacccggtgtatgccaagtggcccccgggaggacgggaccctgagcctgtgtgtgtcgggcagctgcaggacatttggctgtgatggtaggatggactcccagcaggtatgggacaggtgccaggtgtgtggtggggacaacagcacgtgcagcccacggaagggctctttcacagctggcagagcgagagaatatgtcacatttctgacagttacccccaacctgaccagtgtctacattgccaaccacaggcctctcttcacacacttggcggtgaggatcggagggcgctatgtcgtggctgggaagatgagcatctcccctaacaccacctacccctccctcctggaggatggtcgtgtcgagtacagagtggccctcaccgaggaccggctgccccgcctggaggagatccgcatctggggacccctccaggaagatgctgacatccagctgggcggtgggagacttcggcccatgcagcgcctcctgtgggggcggcctgcgggagcggccagtgcgctgcgtggaggcccagggcagcctcctgaagacattgcccccagcccggtgcagagcaggggcccagcagccagctgtggcgctggaaacctgcaacccccagccctgccctgccaggtgggaggtgtcagagcccagctcatgcacatcagctggtggagcaggcctggccttggagaacgagacctgtgtgccaggggcagatggcctggaggctccagtgactgaggggcctggctccgtagatgagaagctgcctgcccctgagccctgtgtcgggatgtcatgtcctccaggctggggccatctggatgccacctctgcaggggagaaggctccctccccatggggcagcatcaggacgggggctcaagctgcacacgtgtggacccctgcggcagggtcgtgctccgtctcctgcgggcgaggt

SEQ ID NO: 309854 - protein, 146 aa, Artificial Sequence
  derived and/or modified sequence
MVILTEPEGAPNITANLTSSLLSVCGWSQTINPEDDTDPGHADLVLYITRFDLELPDGNRQVRGVTQLGGACSPTWSCLITEDTGFDLGVTIAHEIGHRICARPSPATQTRWTKAAAAASSFLSWMGQNVAWRSGAPRVAAAPWWS

SEQ ID NO: 309855 - protein, 223 aa, Artificial Sequence
  derived and/or modified sequence
MRGPGQADCAVAIGRPLGEVVTLRVLESSLNCSAGDMLLLWGRLTWRKMCRKLLDMTFSSKTNTLVVRQRCGRPGGGVLLRYGSQLAPETFYRECDMQLFGPWGEIVSPSLSPATSNAGGCRLFINVAPHARIAIHALATNMGAGTEGANASYILIRDTHSLRTTAFHGQQVLYWESESSQAEMEFSEGFLKAQASLRGQYWTLQSWVPEMQDPQSWKGKEGT

SEQ ID NO: 309856 - protein, 276 aa, Artificial Sequence
  derived and/or modified sequence
MHQRHPRARCPPLCVAGILACGFLLGCWGPSHFQQSCLQALEPQAVSSYLSPGAPLKGRPPSPGFQRQRQRQRRAAGGILHLELLVAVGPDVFQAHQEDTERYVLTNLNIGAELLRDPSLGAQFRVHLVKMVILTEPEGAPNITANLTSSLLSVCGWSQTINPEDDTDPGHADLVLYITRFDLELPDGNRQVRGVTQLGGACSPTWSCLITEDTGFDLGVTIAHEIGHRICARPSPATQTRWTKAAAAASSFLSWMGQNVAWRSGAPRVAAAPWWS

SEQ ID NO: 309857 - DNA, 522 bp, Artificial Sequence
  derived and/or modified sequence
atgatggcccagctgttcctgctgcaggccaacgccgtgctgcccctgagccacgagatcaaggtgaagagacagatcagactgcccgcccccctgtacccccccgagagaaacgacagcagaagcttccagatcccccaggacctgagagagaagggctgggaggagggccagcagcacttcgccggcaaggccgccgacgccttccccgcccccgtgcagctggagggcctggaggccggccagaccaccctggccagccccgaggtgggcccctggagacccaagagactgagcggcgtgtgcctgctgagcgccctgctgcccgacccctgcaagaccaacggcaccttcctgctgcagaagcaccacctgcccagcctgctggccgtgatcctgttccccgtgatcatcctgaccggcgccagcttcgcccacctgttcgtggccctgttcgtgagccacctgctgctgaagctgcccctgggcgccggcatgagaatgcagagagacgccagatag

SEQ ID NO: 309858 - DNA, 669 bp, Artificial Sequence
  derived and/or modified sequence
atgcgcggccccggccaggccgactgcgccgtggccatcggccgccccctgggcgaggtggtgaccctgcgcgtgctggagagcagcctgaactgcagcgccggcgacatgctgctgctgtggggccgcctgacctggcgcaagatgtgccgcaagctgctggacatgaccttcagcagcaagaccaacaccctggtggtgcgccagcgctgcggccgccccggcggcggcgtgctgctgcgctacggcagccagctggcccccgagaccttctaccgcgagtgcgacatgcagctgttcggcccctggggcgagatcgtgagccccagcctgagccccgccaccagcaacgccggcggctgccgcctgttcatcaacgtggccccccacgcccgcatcgccatccacgccctggccaccaacatgggcgccggcaccgagggcgccaacgccagctacatcctgatccgcgacacccacagcctgcgcaccaccgccttccacggccagcaggtgctgtactgggagagcgagagcagccaggccgagatggagttcagcgagggcttcctgaaggcccaggccagcctgcgcggccagtactggaccctgcagagctgggtgcccgagatgcaggacccccagagctggaagggcaaggagggcacc

SEQ ID NO: 309859 - DNA, 828 bp, Artificial Sequence
  derived and/or modified sequence
atgcaccagcgccacccccgcgcccgctgcccccccctgtgcgtggccggcatcctggcctgcggcttcctgctgggctgctggggccccagccacttccagcagagctgcctgcaggccctggagccccaggccgtgagcagctacctgagccccggcgcccccctgaagggccgcccccccagccccggcttccagcgccagcgccagcgccagcgccgcgccgccggcggcatcctgcacctggagctgctggtggccgtgggccccgacgtgttccaggcccaccaggaggacaccgagcgctacgtgctgaccaacctgaacatcggcgccgagctgctgcgcgaccccagcctgggcgcccagttccgcgtgcacctggtgaagatggtgatcctgaccgagcccgagggcgcccccaacatcaccgccaacctgaccagcagcctgctgagcgtgtgcggctggagccagaccatcaaccccgaggacgacaccgaccccggccacgccgacctggtgctgtacatcacccgcttcgacctggagctgcccgacggcaaccgccaggtgcgcggcgtgacccagctgggcggcgcctgcagccccacctggagctgcctgatcaccgaggacaccggcttcgacctgggcgtgaccatcgcccacgagatcggccaccgcatctgcgcccgccccagccccgccacccagacccgctggaccaaggccgccgccgccgccagcagcttcctgagctggatgggccagaacgtggcctggcgcagcggcgccccccgcgtggccgccgccccctggtggagc

SEQ ID NO: 309860 - DNA, 441 bp, Artificial Sequence
  derived and/or modified sequence
atggtgatcctgaccgagcccgagggcgcccccaacatcaccgccaacctgaccagcagcctgctgagcgtgtgcggctggagccagaccatcaaccccgaggacgacaccgaccccggccacgccgacctggtgctgtacatcaccagattcgacctggagctgcccgacggcaacagacaggtgagaggcgtgacccagctgggcggcgcctgcagccccacctggagctgcctgatcaccgaggacaccggcttcgacctgggcgtgaccatcgcccacgagatcggccacagaatctgcgccagacccagccccgccacccagaccagatggaccaaggccgccgccgccgccagcagcttcctgagctggatgggccagaacgtggcctggagaagcggcgcccccagagtggccgccgccccctggtggagctag

SEQ ID NO: 309861 - DNA, 672 bp, Artificial Sequence
  derived and/or modified sequence
atgagaggccccggccaggccgactgcgccgtggccatcggcagacccctgggcgaggtggtgaccctgagagtgctggagagcagcctgaactgcagcgccggcgacatgctgctgctgtggggcagactgacctggagaaagatgtgcagaaagctgctggacatgaccttcagcagcaagaccaacaccctggtggtgagacagagatgcggcagacccggcggcggcgtgctgctgagatacggcagccagctggcccccgagaccttctacagagagtgcgacatgcagctgttcggcccctggggcgagatcgtgagccccagcctgagccccgccaccagcaacgccggcggctgcagactgttcatcaacgtggccccccacgccagaatcgccatccacgccctggccaccaacatgggcgccggcaccgagggcgccaacgccagctacatcctgatcagagacacccacagcctgagaaccaccgccttccacggccagcaggtgctgtactgggagagcgagagcagccaggccgagatggagttcagcgagggcttcctgaaggcccaggccagcctgagaggccagtactggaccctgcagagctgggtgcccgagatgcaggacccccagagctggaagggcaaggagggcacctag

SEQ ID NO: 309862 - DNA, 831 bp, Artificial Sequence
  derived and/or modified sequence
atgcaccagagacaccccagagccagatgcccccccctgtgcgtggccggcatcctggcctgcggcttcctgctgggctgctggggccccagccacttccagcagagctgcctgcaggccctggagccccaggccgtgagcagctacctgagccccggcgcccccctgaagggcagaccccccagccccggcttccagagacagagacagagacagagaagagccgccggcggcatcctgcacctggagctgctggtggccgtgggccccgacgtgttccaggcccaccaggaggacaccgagagatacgtgctgaccaacctgaacatcggcgccgagctgctgagagaccccagcctgggcgcccagttcagagtgcacctggtgaagatggtgatcctgaccgagcccgagggcgcccccaacatcaccgccaacctgaccagcagcctgctgagcgtgtgcggctggagccagaccatcaaccccgaggacgacaccgaccccggccacgccgacctggtgctgtacatcaccagattcgacctggagctgcccgacggcaacagacaggtgagaggcgtgacccagctgggcggcgcctgcagccccacctggagctgcctgatcaccgaggacaccggcttcgacctgggcgtgaccatcgcccacgagatcggccacagaatctgcgccagacccagccccgccacccagaccagatggaccaaggccgccgccgccgccagcagcttcctgagctggatgggccagaacgtggcctggagaagcggcgcccccagagtggccgccgccccctggtggagctag

SEQ ID NO: 309863 - DNA, 1074 bp, Artificial Sequence
  derived and/or modified sequence
ggtgggcaaaggcatcttcctctgggaaggactggcacaagcacttggtccctgggttgtgtgcctgggaggccgggatcagggctggccctctttctccctggcaaagcaaaacctcccttttactactatcaaggggaagtaacttgaaggtgcctgtggcaggcagcaccttgagccaacaggaaccattgacatgcgaggcccagggcaggcagactgtgcagtggccattgggcggcccctcggggaggtggtgaccctccgcgtccttgagagttctctcaactgcagtgcgggggacatgttgctgctttggggccggctcacctggaggaagatgtgcaggaagctgttggacatgactttcagctccaagaccaacacgctggtggtgaggcagcgctgcgggcggccaggaggtggggtgctgctgcggtatgggagccagcttgctcctgaaaccttctacagagaatgtgacatgcagctctttgggccctggggtgaaatcgtgagcccctcgctgagtccagccacgagtaatgcagggggctgccggctcttcattaatgtggctccgcacgcacggattgccatccatgccctggccaccaacatgggcgctgggaccgagggagccaatgccagctacatcttgatccgggacacccacagcttgaggaccacagcgttccatgggcagcaggtgctctactgggagtcagagagcagccaggctgagatggagttcagcgagggcttcctgaaggctcaggccagcctgcggggccagtactggaccctccaatcatgggtaccggagatgcaggaccctcagtcctggaagggaaaggaaggaacctgagggtcattgaacatttgttccgtgtctggccagccctggagggttgacccctggtctcagtgctttccaattcgaactttttccaatcttaggtatctactttagagtcttctccaatgtccaaaaggctagggggttggaggtggggactctggaaaagcagcccccatttcctcgggtaccaataaataaaacatgcaggctga

SEQ ID NO: 309864 - DNA, 441 bp, Artificial Sequence
  derived and/or modified sequence
atggtgatcctgacagagccagagggtgcacccaacatcactgctaacctcacatcatctctgttgtcggtttgtggttggtcccagacaatcaaccctgaagacgatacagaccccggacacgccgatcttgtcctctacataactaggttcgacctcgaactgccagacggaaatcggcaagtcagaggcgtcactcaactcggtggcgcctgcagtccaacctggtcctgcctgatcaccgaagacactggctttgacctgggcgtcacaatagcccatgaaatcgggcaccgcatttgcgcccgcccttctcctgctacccagacacgatggacgaaggctgcagccgccgcaagctcgttcctgtcctggatgggccagaatgtagcctggagatctggtgcgcctcgtgtcgccgccgctccctggtggtcatag

SEQ ID NO: 309865 - DNA, 672 bp, Artificial Sequence
  derived and/or modified sequence
atgcgagggccaggtcaggcggactgcgccgtcgccatcggtcgtcctttgggggaggttgtaaccctgcgggttctggaatccagcctgaattgttccgccggcgacatgctacttctgtggggcagattaacctggcggaagatgtgccggaagctgctcgacatgaccttctcgtctaaaactaacacgcttgttgttaggcaacggtgcggaagaccaggaggcggcgtgttgctgaggtatggaagccaactggcacctgagactttttatagggagtgcgacatgcaactattcggcccttggggcgagatcgtcagtccctccttaagtcccgcgacatccaatgcaggggggtgccggctgtttatcaatgtggcccctcacgccaggattgccatacacgctctggcaaccaatatgggtgctggaaccgagggcgccaatgcaagttacattctcattagggacacccactcactgcgcacgactgcatttcatggtcagcaggtactttactgggaatctgaaagcagtcaggcagagatggagtttagcgaaggctttctgaaggctcaggctagtctgagaggtcagtactggacccttcagagttgggtgccagaaatgcaggaccctcagtcatggaagggaaaggagggaacttag

SEQ ID NO: 309866 - DNA, 831 bp, Artificial Sequence
  derived and/or modified sequence
atgcaccagaggcacccacgcgcccgatgtccgccactgtgcgttgcaggaatcttagcctgcggattcctactaggttgttgggggccttctcattttcaacagtcctgcctgcaggccttggaaccgcaggctgttagctcctatctttcaccaggagctcctctcaaaggtcggccccctagccccgggtttcagagacagcgccagcgccagcggagagccgccggcggaatcttgcatctggagcttctcgtcgctgtagggcccgatgtgtttcaggcgcatcaggaggacacagaacgctatgtgctgacaaatttgaacataggcgctgaattgctgcgcgacccttcattgggggcacagttcagggtccatcttgtcaagatggtaatcctgactgaacccgaaggcgcccctaatatcacagcaaatctgactagttctcttctgtctgtatgcgggtggtctcaaacaattaaccccgaagatgacacagacccagggcacgccgaccttgtactatacatcacccggtttgacctggagctgccggacgggaatcgccaggttaggggcgtaacacaactcggcggagcctgctcccccacctggtcctgcctgattactgaggacacaggctttgacttaggtgttaccattgcacatgagatcgggcatcggatttgtgccaggccatctcctgccacgcagactcgctggactaaggcagctgccgctgcgtcatcttttctgtcatggatgggacagaacgtcgcttggcggtctggagctccaagagtcgccgcagccccgtggtggtcttag

SEQ ID NO: 309867 - DNA, 441 bp, Artificial Sequence
  derived and/or modified sequence
atggtgatcctgacagagcctgagggcgcccccaacatcacagccaacctgaccagcagcctgctgtctgtgtgtggctggagccagaccatcaacccagaagatgacacagatcctggccacgccgacctggtgctgtacatcaccaggtttgacctggagctgcctgatggcaaccggcaggtgcggggcgtgacccagctgggcggggcctgcagccccacctggagctgcctgatcacagaggacaccggctttgacctgggcgtgaccatcgcccacgagatcggccaccgcatctgtgcccggcccagccctgccacccagacccgctggaccaaggctgctgctgctgccagcagcttcctgtcctggatgggccagaatgtggcctggaggtctggggccccccgggtggccgccgccccctggtggagctag

SEQ ID NO: 309868 - DNA, 672 bp, Artificial Sequence
  derived and/or modified sequence
atgaggggccctggccaggccgactgtgctgtggccatcggccggcccctgggggaggtggtgaccctgcgggtgctggagagcagcctgaactgcagcgctggggacatgctgctgctgtggggccgcctgacctggaggaagatgtgcaggaagctgctggacatgaccttcagcagcaagaccaacaccctggtggtgcggcagagatgtggccggcctgggggcggcgtgctgctgcgctatggcagccagctggcccctgagaccttctaccgggagtgtgacatgcagctgtttggcccctggggcgagatcgtgagccccagcctgagccctgccaccagcaatgctgggggctgccgcctcttcatcaacgtggccccccacgccagaattgccatccacgccctggccaccaacatgggcgccggcacagagggcgccaatgccagctacatcctgatccgggacacccacagcctgcggaccacagccttccacggccagcaggtgctgtactgggagagcgagagcagccaggccgagatggagttcagcgagggcttcctgaaggcccaggccagcctgcggggccagtactggaccctgcagagctgggtgcctgagatgcaggacccccagagctggaagggcaaggagggcacctag

SEQ ID NO: 309869 - DNA, 831 bp, Artificial Sequence
  derived and/or modified sequence
atgcaccagaggcacccccgggcccgctgcccccccctgtgtgtggccggcatcctggcctgtggcttcctgctgggctgctggggccccagccacttccagcagagctgcctgcaggccctggagccccaggccgtgagcagctacctgagccctggggcccccctgaagggccggccccccagccctggcttccagaggcagaggcagaggcagaggagagctgctgggggcatcctgcacctggagctgctggtggccgtgggcccagatgtgttccaggcccaccaggaggacacagaaagatatgtgctgaccaacctgaacatcggggctgagctgctgcgggaccccagcctgggcgcccagttccgggtgcacctggtgaagatggtgatcctgacagagcctgagggcgcccccaacatcacagccaacctgaccagcagcctgctgtctgtgtgtggctggagccagaccatcaacccagaagatgacacagatcctggccacgccgacctggtgctgtacatcaccaggtttgacctggagctgcctgatggcaaccggcaggtgcggggcgtgacccagctgggcggggcctgcagccccacctggagctgcctgatcacagaggacaccggctttgacctgggcgtgaccatcgcccacgagatcggccaccgcatctgtgcccggcccagccctgccacccagacccgctggaccaaggctgctgctgctgccagcagcttcctgtcctggatgggccagaatgtggcctggaggtctggggccccccgggtggccgccgccccctggtggagctag

SEQ ID NO: 309870 - DNA, 441 bp, Artificial Sequence
  derived and/or modified sequence
atggtgatcctgaccgagcccgagggcgcccccaacatcaccgccaatttgacctcaagtctcctgagcgtgtgtggatggtcacagacaatcaatcctgaagatgatacggaccccggccacgccgacctggtattgtacatcacgcggttcgacctcgaactccctgacggaaaccgtcaagtgcggggcgtaactcaactgggtggagcttgctcccccacgtggtcttgtctgatcaccgaagacaccggctttgacctcggtgtcacaatagctcatgagattgggcataggatttgtgcacggccatctcccgcaactcagacaagatggaccaaggcagctgccgcagcaagcagcttccttagctggatggggcagaacgtcgcctggcgatccggggcgccccgagtggccgctgccccctggtggtcatag

SEQ ID NO: 309871 - DNA, 672 bp, Artificial Sequence
  derived and/or modified sequence
atgcggggccccggccaggccgactgcgccgtggccatcggccggccactaggggaagttgtaactctccgcgtcctagagagctctcttaactgcagcgccggagacatgttactgctgtgggggcgcctcacctggagaaagatgtgtaggaaattgctcgatatgacctttagtagtaagaccaataccctggtggtgcggcagcggtgcggaaggcctggagggggagtcctgctcagatatggtagccaacttgcccctgaaaccttctacagggagtgtgatatgcaattatttggtccatggggtgaaatcgtatccccatccctctccccggccacatcaaatgccggcggctgccgactgttcatcaatgtcgcaccccacgctcgcatcgcgatccacgccctggccaccaacatgggggccggtactgagggagccaatgcttcttacatcctgattagggatacacactcactcagaactactgcttttcatggccagcaggtgttgtactgggaaagtgaatccagccaggctgaaatggaattctccgaggggttcctgaaggctcaggctagtctcagaggccagtactggactctgcaaagctgggtgcctgagatgcaggacccacagagttggaagggaaaggaggggacatag

SEQ ID NO: 309872 - DNA, 831 bp, Artificial Sequence
  derived and/or modified sequence
atgcaccagcggcacccccgggcccggtgcccccccctgtgcgtggctggaatcctcgcctgcggcttcttacttggctgctggggaccttctcacttccagcagtcatgtctgcaggcacttgaacctcaggccgtgagttcctacttgagtccaggtgcgcccctgaaaggacgaccaccctctcctgggttccaaagacagcgccagagacagagacgagccgcaggcggtatcctgcatcttgagcttctggtggctgtcggacccgatgtgttccaggcccaccaggaggacacagaacggtacgttctaacgaatctcaacatcggcgccgaattgctacgtgatccctcactcggggcccaatttagggttcatcttgtgaaaatggtaattctaaccgaaccagagggagcccccaatataacagccaatctgacctctagcctgctctccgtgtgtgggtggtctcaaactattaacccagaagacgatacagatcctggccatgccgaccttgtgctgtacataacacgattcgacctggagctccctgatggaaatcgtcaggtcagaggtgttacacaactgggcggggcttgctccccgacatggtcatgtctgatcacagaggataccgggttcgatctgggagtgactatagctcacgagatcggacaccgcatctgtgcgcggccatcacccgctacccagacacgctggaccaaggcagccgctgcggctagctcctttctaagttggatggggcaaaatgtcgcttggcgctccggagctccccgggtggctgcggccccatggtggagttag

SEQ ID NO: 309873 - DNA, 441 bp, Artificial Sequence
  derived and/or modified sequence
atggtgatattgacagaaccagaaggggcacccaacatcacggcaaacctgacatcttccctactgagtgtttgcggttggtcgcagacgattaatcctgaggacgacactgaccctggacacgcagatctcgttctctacattacaaggtttgatctcgaactgcccgacgggaatagacaggtgcgaggcgtcactcagcttggaggtgcctgttccccaacgtggagttgcctcattaccgaggatacaggcttcgacctcggcgttactatcgcccacgaaatcggacacagaatatgtgcgcgaccatctcctgccacccaaactcgctggacaaaggccgctgctgcagcttcctcgttcctgagctggatgggccagaacgtcgcttggagaagtggcgctcctagagtcgccgctgccccatggtggtcctag

SEQ ID NO: 309874 - DNA, 672 bp, Artificial Sequence
  derived and/or modified sequence
atgcggggtccagggcaggcagactgcgcggttgcaatcggacgccctctcggcgaggtcgtcacccttcgggtgctcgaatcttccctgaactgctccgctggggatatgctgctactctggggccgactgacctggcggaaaatgtgccgaaagcttctggacatgactttttcttcaaaaacaaataccttggtcgtccgtcagcgttgcggcaggccaggcggtggggtgctcctgagatatggatcacagctcgcgcctgagacattctacagagagtgcgatatgcagttatttgggccatggggggagattgtgtctccatcgctctcccccgctaccagcaacgctggcggttgtaggctcttcataaatgtggccccacatgcacggatagcgattcacgcgctggccacaaatatgggcgcaggcacagagggtgctaacgcatcgtacattctaatcagagatactcatagtcttcggacaaccgcgtttcacggtcagcaggtgctgtactgggaaagtgagtcgagccaggctgagatggaattctctgagggcttccttaaagcacaagccagccttcggggtcagtattggactctgcaaagctgggtccctgagatgcaggaccctcagtcttggaaaggaaaggagggcacatag

SEQ ID NO: 309875 - DNA, 831 bp, Artificial Sequence
  derived and/or modified sequence
atgcaccagcgacatcctcgcgctcgttgtccacctctgtgtgtggccggtatcctggcatgcggattcctcttggggtgctggggcccatctcatttccagcagtcatgccttcaggctttagaaccgcaggctgtttccagctatttatcccctggcgctcccctcaaaggacggcctccttctcctggctttcaacggcagaggcaacgccaaagaagggccgcaggtggaattctccacctagaactcctggtggccgtcggaccagacgtttttcaagctcaccaggaggacaccgagaggtacgtgttgactaatctcaacattggagccgagcttctacgggaccctagtctcggcgcacagttccgcgtgcacctcgtgaaaatggttattcttaccgaacccgaaggagctccgaacataacggctaaccttaccagctcccttctgagtgtgtgtggctggtcccagaccataaatccagaggacgatacagaccccggacacgcagacctggtgctgtatataacgaggttcgacctagagcttcctgacggcaatcgacaagtgagaggtgtgactcagctcggtggggcttgctcaccaacctggtcctgtctgatcacggaggataccggcttcgacttgggagtcaccatcgcacacgagatcggacacaggatctgtgccagaccctcaccagcgactcaaacgcgctggacaaaggctgccgcagcagcatcctcctttctgtcctggatgggacagaatgtggcttggaggtctggggctcctagagtggctgctgccccatggtggtcctag

SEQ ID NO: 309876 - DNA, 441 bp, Artificial Sequence
  derived and/or modified sequence
atggtaatcctgaccgaacctgaaggcgcccctaacataacagccaacctcacctcatctctcctgtctgtatgtggctggtcgcaaacaattaaccccgaggacgacacagatccaggacacgccgatctcgtgctgtatatcactcggttcgatttagagctacccgacggaaatcgacaagtgcgcggggtgactcagctcggaggcgcatgttcacctacatggtcctgtttaatcaccgaagataccgggtttgacctgggagtgaccattgcacatgaaattggtcatcggatctgtgcccgccctagccctgctactcaaactaggtggactaaagcggccgcggctgcaagctcgtttttgagctggatgggtcagaatgtggcttggagatccggagctccacgcgtggccgctgccccttggtggagctag

SEQ ID NO: 309877 - DNA, 672 bp, Artificial Sequence
  derived and/or modified sequence
atgcggggacccgggcaggctgactgcgctgttgccatcggacggccccttggagaggtggttacactacgagtactggagtcctcactcaactgctctgcaggcgacatgttacttctgtgggggcggctcacctggcggaagatgtgccgtaaacttctggacatgactttctcttcaaaaacaaacactttagtagtgaggcagagatgtggaagacccggcggaggagtgcttctccgctatggatcgcagttggcccccgaaaccttttatcgcgagtgtgatatgcagctatttgggccatggggtgagatagtgagccctagtctcagcccagccacatcaaacgcagggggatgtcggctcttcatcaacgttgctccacacgcacgtatcgcaattcacgcgctagcaactaatatgggcgcggggacggaaggcgctaatgcatcgtatatcctaatcagggacacacacagtctgcgaacaaccgccttccacgggcagcaagttctctattgggaatctgaatcttctcaggcggagatggaatttagcgaggggtttcttaaggcacaagcctccttaaggggacagtactggacgttacagtcatgggtgccggagatgcaggatccccagtcctggaaaggtaaagagggcacttag

SEQ ID NO: 309878 - DNA, 831 bp, Artificial Sequence
  derived and/or modified sequence
atgcatcagagacaccctcgtgcccggtgcccacccctatgtgtggcaggcattctcgcatgtggcttcctgttaggctgctggggcccatctcattttcagcagtcctgtctccaagccctggaaccccaagcagtttccagttacctcagccctggggcacccctcaaggggcgtccaccttccccaggtttccaacgacagagacagcggcagaggagagccgccggtggcattctccatcttgagctactcgtcgcagtaggacccgatgtgtttcaggcccatcaggaagacaccgaacgatacgtgctcactaacctgaacatcggcgcagaactgctgcgagatcccagcttaggcgctcaatttagggtccatcttgtgaaaatggtgatcttaacggaaccggaaggcgctcccaacataactgcgaacctaactagttcattgctttctgtttgtggctggtcccagacgattaaccccgaggacgacaccgacccggggcacgccgatttggtcctgtacataaccaggtttgatctagagctccccgacggaaatcgacaagtcagaggcgtgacgcagctggggggcgcatgcagccctacgtggtcttgcctgatcacagaggacacagggtttgatctgggggtcacaattgcccacgaaattggacatcgaatttgtgctcgcccatccccggctacccagacccgttggacaaaagcagctgctgcagccagtagcttcctgtcttggatgggccaaaatgtcgcctggaggagcggagcaccccgcgtagccgctgccccctggtggagctag

SEQ ID NO: 309879 - DNA, 441 bp, Artificial Sequence
  derived and/or modified sequence
atggtaatcctgaccgaacctgaaggcgcccctaacataacagccaacctcacctcatctctcctgtctgtatgtggctggtcgcaaacaattaaccccgaggacgacacagatccaggacacgccgatctcgtgctgtatatcactcggttcgatttagagctacccgacggaaatcgacaagtgcgcggggtgactcagctcggaggcgcatgttcacctacatggtcctgtttaatcaccgaagataccgggtttgacctgggagtgaccattgcacatgaaattggtcatcggatctgtgcaagaccgtcgcctgcaactcagacacggtggaccaaagccgctgccgctgcctcaagcttcttatcttggatgggccagaatgtggcatggaggtctggcgctcccagagtcgcagcagccccttggtggagctag

SEQ ID NO: 309880 - DNA, 672 bp, Artificial Sequence
  derived and/or modified sequence
atgcgcggacccggacaagccgactgcgcagtagccattgggcggcctctgggggaggttgttactttgcgtgtgttggaatctagcctgaattgctctgcaggcgatatgttactcctgtgggggagactaacttggcgaaaaatgtgtaggaagttgctggacatgacattctcctccaagaccaataccttggtggtaaggcagagatgtggtagacccggagggggggtactcttaaggtacggtagtcagcttgcacccgaaaccttttacagagagtgtgacatgcagctttttggaccatggggcgaaatcgtctcaccaagtctgagccctgctacatcaaatgctggtggatgtcggttattcattaatgtggccccgcatgcacgcattgcaatacacgctctagccacaaatatgggcgccggcactgagggtgccaatgcgtcatacattctgatcagggacactcactcgctgaggacaacagcttttcacggacagcaggtgctctactgggagtctgaatcttctcaagctgaaatggaattttccgaagggttcctgaaagcccaagcatctctccgagggcagtactggacattgcagagctgggtcccagaaatgcaggatccccaatcatggaagggaaaagaaggaacttag

SEQ ID NO: 309881 - DNA, 831 bp, Artificial Sequence
  derived and/or modified sequence
atgcaccagcgccatcctcgggctagatgccctccgttatgcgtagccggaattctcgcatgcggattcctgcttggatgctggggacctagccactttcagcaatcgtgtttacaggcattggaaccccaggccgtttcctcatatcttagccctggtgcacctttaaaaggccgaccaccaagtccaggattccagagacagaggcagagacagagaagagccgccggtggtatcttgcatctcgaactcctagtagccgttggaccggatgtcttccaggcccaccaggaggacaccgaacggtacgtactgactaatctgaatatcggcgctgaactcttgagagacccgagcctgggggcacaatttagagtccatttggtgaagatggtcatcctcactgaacctgagggcgcaccgaatattactgcaaacctcacatccagcctgctctcagtctgcggctggtcacagactatcaacccagaggatgacaccgatcccggccacgccgatcttgtgctgtacattacaaggtttgacttagaattaccggacggcaatagacaggtccgcggggtcacacaactgggaggcgcctgttcccctacatggtcctgtctgataacagaagacacgggcttcgacttgggggttactattgcccacgagataggacatcgtatatgcgctcgcccctcacctgctacgcagaccagatggacaaaggcagctgccgcagcttcatcctttttgtcctggatgggtcaaaacgttgcctggcgatctggcgccccacgagttgccgccgcaccttggtggtcatag

SEQ ID NO: 309882 - RNA, 441 nt, Artificial Sequence
  derived and/or modified sequence
augguaauccugaccgaaccugaaggcgccccuaacauaacagccaaccucaccucaucucuccugucuguauguggcuggucgcaaacaauuaaccccgaggacgacacagauccaggacacgccgaucucgugcuguauaucacucgguucgauuuagagcuacccgacggaaaucgacaagugcgcggggugacucagcucggaggcgcauguucaccuacaugguccuguuuaaucaccgaagauaccggguuugaccugggagugaccauugcacaugaaauuggucaucggaucugugcccgcccuagcccugcuacucaaacuagguggacuaaagcggccgcggcugcaagcucguuuuugagcuggaugggucagaauguggcuuggagauccggagcuccacgcguggccgcugccccuugguggagcuag

SEQ ID NO: 309883 - RNA, 672 nt, Artificial Sequence
  derived and/or modified sequence
augcggggacccgggcaggcugacugcgcuguugccaucggacggccccuuggagaggugguuacacuacgaguacuggaguccucacucaacugcucugcaggcgacauguuacuucugugggggcggcucaccuggcggaagaugugccguaaacuucuggacaugacuuucucuucaaaaacaaacacuuuaguagugaggcagagauguggaagacccggcggaggagugcuucuccgcuauggaucgcaguuggcccccgaaaccuuuuaucgcgagugugauaugcagcuauuugggccauggggugagauagugagcccuagucucagcccagccacaucaaacgcagggggaugucggcucuucaucaacguugcuccacacgcacguaucgcaauucacgcgcuagcaacuaauaugggcgcggggacggaaggcgcuaaugcaucguauauccuaaucagggacacacacagucugcgaacaaccgccuuccacgggcagcaaguucucuauugggaaucugaaucuucucaggcggagauggaauuuagcgagggguuucuuaaggcacaagccuccuuaaggggacaguacuggacguuacagucaugggugccggagaugcaggauccccaguccuggaaagguaaagagggcacuuag

SEQ ID NO: 309884 - RNA, 831 nt, Artificial Sequence
  derived and/or modified sequence
augcaucagagacacccucgugcccggugcccaccccuauguguggcaggcauucucgcauguggcuuccuguuaggcugcuggggcccaucucauuuucagcaguccugucuccaagcccuggaaccccaagcaguuuccaguuaccucagcccuggggcaccccucaaggggcguccaccuuccccagguuuccaacgacagagacagcggcagaggagagccgccgguggcauucuccaucuugagcuacucgucgcaguaggacccgauguguuucaggcccaucaggaagacaccgaacgauacgugcucacuaaccugaacaucggcgcagaacugcugcgagaucccagcuuaggcgcucaauuuaggguccaucuugugaaaauggugaucuuaacggaaccggaaggcgcucccaacauaacugcgaaccuaacuaguucauugcuuucuguuuguggcuggucccagacgauuaaccccgaggacgacaccgacccggggcacgccgauuugguccuguacauaaccagguuugaucuagagcuccccgacggaaaucgacaagucagaggcgugacgcagcuggggggcgcaugcagcccuacguggucuugccugaucacagaggacacaggguuugaucugggggucacaauugcccacgaaauuggacaucgaauuugugcucgcccauccccggcuacccagacccguuggacaaaagcagcugcugcagccaguagcuuccugucuuggaugggccaaaaugucgccuggaggagcggagcaccccgcguagccgcugcccccugguggagcuag

SEQ ID NO: 309885 - RNA, 441 nt, Artificial Sequence
  derived and/or modified sequence
augguaauccugaccgaaccugaaggcgccccuaacauaacagccaaccucaccucaucucuccugucuguauguggcuggucgcaaacaauuaaccccgaggacgacacagauccaggacacgccgaucucgugcuguauaucacucgguucgauuuagagcuacccgacggaaaucgacaagugcgcggggugacucagcucggaggcgcauguucaccuacaugguccuguuuaaucaccgaagauaccggguuugaccugggagugaccauugcacaugaaauuggucaucggaucugugcaagaccgucgccugcaacucagacacgguggaccaaagccgcugccgcugccucaagcuucuuaucuuggaugggccagaauguggcauggaggucuggcgcucccagagucgcagcagccccuugguggagcuag

SEQ ID NO: 309886 - RNA, 672 nt, Artificial Sequence
  derived and/or modified sequence
augcgcggacccggacaagccgacugcgcaguagccauugggcggccucugggggagguuguuacuuugcguguguuggaaucuagccugaauugcucugcaggcgauauguuacuccugugggggagacuaacuuggcgaaaaauguguaggaaguugcuggacaugacauucuccuccaagaccaauaccuuggugguaaggcagagaugugguagacccggaggggggguacucuuaagguacgguagucagcuugcacccgaaaccuuuuacagagagugugacaugcagcuuuuuggaccauggggcgaaaucgucucaccaagucugagcccugcuacaucaaaugcugguggaugucgguuauucauuaauguggccccgcaugcacgcauugcaauacacgcucuagccacaaauaugggcgccggcacugagggugccaaugcgucauacauucugaucagggacacucacucgcugaggacaacagcuuuucacggacagcaggugcucuacugggagucugaaucuucucaagcugaaauggaauuuuccgaaggguuccugaaagcccaagcaucucuccgagggcaguacuggacauugcagagcugggucccagaaaugcaggauccccaaucauggaagggaaaagaaggaacuuag

SEQ ID NO: 309887 - RNA, 831 nt, Artificial Sequence
  derived and/or modified sequence
augcaccagcgccauccucgggcuagaugcccuccguuaugcguagccggaauucucgcaugcggauuccugcuuggaugcuggggaccuagccacuuucagcaaucguguuuacaggcauuggaaccccaggccguuuccucauaucuuagcccuggugcaccuuuaaaaggccgaccaccaaguccaggauuccagagacagaggcagagacagagaagagccgccggugguaucuugcaucucgaacuccuaguagccguuggaccggaugucuuccaggcccaccaggaggacaccgaacgguacguacugacuaaucugaauaucggcgcugaacucuugagagacccgagccugggggcacaauuuagaguccauuuggugaagauggucauccucacugaaccugagggcgcaccgaauauuacugcaaaccucacauccagccugcucucagucugcggcuggucacagacuaucaacccagaggaugacaccgaucccggccacgccgaucuugugcuguacauuacaagguuugacuuagaauuaccggacggcaauagacagguccgcggggucacacaacugggaggcgccuguuccccuacaugguccugucugauaacagaagacacgggcuucgacuuggggguuacuauugcccacgagauaggacaucguauaugcgcucgccccucaccugcuacgcagaccagauggacaaaggcagcugccgcagcuucauccuuuuuguccuggaugggucaaaacguugccuggcgaucuggcgccccacgaguugccgccgcaccuugguggucauag

SEQ ID NO: 309888 - DNA, 441 bp, Artificial Sequence
  derived and/or modified sequence
atgatcttgaacgacctgctcggtaggaaactctctatcatgttctccgcagttccatctgcggctgggtacgctcttatggcgggagctcacggactttggatgctacttctcggcagaaccctcaccggctttgcaggcggtttgactgccgcttgcatacctggtctgaccctcccatcccgaccagggcttggaacttccattttttccaagacctggtgcggagggtgcgtactgcaggtgtatgtctcagaaattgctccgcctggtgtgcggggggcgctgggcgcaacgccccagctcatggccgtgtttggaagtttgtccctgtacgctttagggaaggatgaggaggcattgcgggccctcgcctggttgcgtggaaccgatgttgatgtgcattgggaattcgagcaaatccaggacaacgtcagatag

SEQ ID NO: 309889 - DNA, 441 bp, Artificial Sequence
  derived and/or modified sequence
atgatcctgaatgacctgctgggcaggaagctgagcatcatgttttctgctgtgcccagcgctgctggctacgccctgatggccggggcccacggcctgtggatgctgctgctgggccgcaccctgactggatttgctgggggcctgacagctgcctgcatccctggcctgaccctgcccagcaggcctggcctgggcaccagcatcttcagcaagacctggtgtggcggctgtgtgctgcaggtgtatgtgtctgaaattgcccctcctggggtgcggggggccctgggcgccaccccccagctgatggctgtgtttggcagcctgagcctgtatgccctgggcaaggatgaggaggccctgcgggccctggcctggctgcggggcacagatgtggatgtgcactgggagtttgagcagatccaggacaacgtgaggtag

SEQ ID NO: 309890 - DNA, 441 bp, Artificial Sequence
  derived and/or modified sequence
atgatcctgaacgacctgctgggccggaagctgagcatcatgttctccgctgtgcctagcgctgcgggctatgcccttatggcaggggctcacggcttatggatgctgctcctcgggaggacactaacaggttttgccggcggactaacagcagcttgtattcctgggctgactctgccttcccggcctggcctcggtacctccatcttttctaaaacgtggtgcggggggtgcgtacttcaggtttacgtatccgagatagcaccaccgggcgtgcggggggctctcggagcgactccccaattgatggcggtgtttggcagcctctccctttatgcactagggaaggacgaggaggccttgcgggccctcgcgtggttacgcggaactgacgttgacgtgcactgggagttcgaacagatccaggacaacgtcagatag

SEQ ID NO: 309891 - DNA, 441 bp, Artificial Sequence
  derived and/or modified sequence
atgatactgaacgacctcctcggtagaaagttgtctatcatgttctcagctgtgccctccgccgcaggatatgctctcatggccggagcgcatgggctgtggatgttgctgctggggagaaccctgaccgggttcgccggagggctgactgctgcctgcatccccggtttgactctcccaagtcgccctggactgggaacgtctatcttcagcaagacttggtgtggcggatgcgtcctccaggtatacgtaagtgagatagcacccccaggggtacgaggcgctctcggggctacccctcaattgatggcagtgttcggctccctgagcttgtatgcattggggaaggacgaggaggccttaagggcacttgcctggctacggggtaccgacgtggacgtacactgggaattcgaacagatccaagacaatgtccgttag

SEQ ID NO: 309892 - DNA, 588 bp, Artificial Sequence
  derived and/or modified sequence
cgagagagacccggccatgcaggagccgctgctgggagccgagggcccggactacgacaccttccccgagaagccgcccccgtcgccaggggacagggcgcgggtcggtccgtgttcaccctgggagcagcggccggaggcctgagtgccatgatcctcaacgacctcctgggccggaagctgagcatcatgttctcagctgtgccgtcggcggccggctatgcgctcatggcgggtgcgcacggcctctggatgctgctgctcggaaggacgctgacgggcttcgccggggggctcacagctgcctgcatcccggggctgactctcccatctcggccgggcctaggaaccagtattttcagcaaaacctggtgcggcggctgtgtcttgcaggtgtacgtgtctgagattgctcccccaggcgttcgtggggctctgggggccacaccccagctcatggcagtgttcggatccctgtccctctacgcccttggcaaggacgaagaggccctgcgggcgctggcctggctgcgtgggacggacgtcgatgtccactgggagttcgagcagatccaggacaacgtccgg

SEQ ID NO: 309893 - DNA, 441 bp, Artificial Sequence
  derived and/or modified sequence
atgatcctgaacgacctgctgggcagaaagctgagcatcatgttcagcgccgtgcccagcgccgccggctacgccctgatggccggcgcccacggcctgtggatgctgctgctgggcagaaccctgaccggcttcgccggcggcctgaccgccgcctgcatccccggcctgaccctgcccagcagacccggcctgggcaccagcatcttcagcaagacctggtgcggcggctgcgtgctgcaggtgtacgtgagcgagatcgccccccccggcgtgagaggcgccctgggcgccaccccccagctgatggccgtgttcggcagcctgagcctgtacgccctgggcaaggacgaggaggccctgagagccctggcctggctgagaggcaccgacgtggacgtgcactgggagttcgagcagatccaggacaacgtgagatag

SEQ ID NO: 309894 - protein, 219 aa, Artificial Sequence
  derived and/or modified sequence
MQEPLLGAEGPDYDTFPEKPPPSPGDRARVGTLQNKRVFLATFAAVLGNFSFGYALVYTSPVIPALERSLDPDLHLTKSQASWFGSVFTLGAAAGGLSAMILNDLLGRKLSIMFSAVPSAAGYALMAGAHGLWMLLLGRTLTGFAGGLTAACIPVYVSEIAPPGVRGALGATPQLMAVFGSLSLYALGTKRPCGRWPGCVGRTSMSTGSSSRSRTTSGD

SEQ ID NO: 309895 - DNA, 660 bp, Artificial Sequence
  derived and/or modified sequence
atgcaggagcctctcctgggggcggagggccccgattacgacaccttcccagaaaaacctcccccctccccaggggacagagctagagtgggaaccttgcagaacaaaagggtgttccttgccacatttgctgcagttttgggtaattttagtttcggttacgcgctggtttatacatcaccggttatccctgctttagaaaggagcctcgatccagacttgcatttgactaaatctcaggcaagctggttcggctccgtatttacactgggtgctgcagcgggaggattgagcgcgatgatcctgaatgatctgctgggaagaaagttatcaattatgttcagcgccgtaccttctgccgctggctatgccttgatggctggagcacacggcctgtggatgttgctcctgggcaggacattgacgggcttcgccggggggcttacggccgcctgcatccctgtgtatgttagcgagattgcacctcccggggttcgcggggccttgggcgcaacacctcaactcatggccgtgtttggcagcctgagtttgtatgccctaggcactaaacgaccctgcggccgatggcctggttgtgtgggccggaccagcatgagcacagggtcgtcttctagatcacgcaccactagcggagattag

SEQ ID NO: 309896 - DNA, 660 bp, Artificial Sequence
  derived and/or modified sequence
atgcaggagcccctgctgggcgctgagggccctgactatgacaccttccctgagaagcccccacccagccctggggaccgggcccgggtgggcaccctgcagaacaagagggtcttcctggccacctttgctgctgtgctgggcaacttctcctttggctacgccctggtgtacaccagccctgtgatcccagccctggagaggagcctggaccctgacctgcacctgaccaagagccaggcctcctggtttggcagcgtcttcaccctgggcgctgctgctgggggcctgagcgccatgatcctgaatgacctgctgggcaggaagctgagcatcatgttttctgctgtgcccagcgctgctggctacgccctgatggccggggcccacggcctgtggatgctgctgctgggccgcaccctgaccggctttgctgggggcctgacagctgcctgcatccctgtgtatgtgtctgagatcgcccctcctggggtgcggggggccctgggcgccaccccccagctgatggctgtgtttggcagcctgagcctgtatgccctgggcaccaagaggccctgtggccgctggccaggctgtgtgggccgcacctccatgagcacaggcagcagcagccgcagcaggaccaccagcggggactag

SEQ ID NO: 309897 - DNA, 660 bp, Artificial Sequence
  derived and/or modified sequence
atgcaggagcccctgctgggcgccgagggccccgactacgacacctttcccgagaagcctccgccatcccccggcgaccgagctcgagtgggaacactgcagaacaagcgtgtgttcctggcaaccttcgccgccgttctgggcaatttcagcttcggatacgccctggtttatacttcgcctgtgattcccgccctggaacggagcttggaccccgacctccacctgaccaagtcacaggcgagttggtttggaagtgtgtttactctaggtgctgcagccggcggcctgagtgctatgattctcaacgacctgctgggtcgaaaactgtctatcatgttttctgctgtgccttccgccgccggatacgcactaatggctggcgcccatgggctgtggatgctcctgctgggaagaacgttgactggattcgccggaggcctgacagccgcttgcatccccgtatatgtaagtgaaatcgctccgccaggcgtgcgaggagcattgggcgccacaccccagctgatggccgtattcggctctctgtctctgtatgccctgggcacgaagaggccatgtggccgttggcctggttgcgtgggacgtacttccatgagcacggggtcaagctcacgttctcgtacaacaagcggagactag

SEQ ID NO: 309898 - DNA, 660 bp, Artificial Sequence
  derived and/or modified sequence
atgcaggaaccccttctaggggctgaagggcctgactatgatactttcccagaaaagccaccaccaagtccgggtgacagagccagagtagggactctgcagaataagcgtgtctttctggccacatttgccgctgtgttggggaacttttctttcggctatgcactcgtttatacctctcctgtgattccagcactggagcggtctttggaccccgatctgcacctgactaagagccaggctagttggttcggctctgtttttacactcggcgctgctgccggtggcctgtccgccatgattctgaacgacctactcggcagaaagttgtccatcatgttctcggctgtgccgtctgccgctggctatgcactgatggccggagcccacggcctatggatgcttctgctcgggcgaacattgacaggatttgcagggggactgaccgccgcttgtatccctgtctatgtaagtgaaatcgcgcctccaggggtgcgtggtgcgttgggtgcaaccccgcagttaatggctgtcttcggtagtctttcactctatgctctcgggacaaagaggccatgcggccgttggcctggctgcgtgggacgtaccagtatgtcgaccggctcctcatcccgtagtcgtacgaccagcggcgattag

SEQ ID NO: 309899 - DNA, 727 bp, Artificial Sequence
  derived and/or modified sequence
ggagctgctggccccgggcggctgctccagtctgagcgccctccgctcgccccgagagagacccggccatgcaggagccgctgctgggagccgagggcccggactacgacaccttccccgagaagccgcccccgtcgccaggggacagggcgcgggtcgggaccctgcagaacaaaagggtgttcctggccaccttcgccgcagtgctcggcaatttcagctttgggtatgccctggtctacacatcccctgtcatcccagccctggagcgctccttggatcctgacctgcatctgaccaaatcccaggcatcctggtttgggtccgtgttcaccctgggagcagcggccggaggcctgagtgccatgatcctcaacgacctcctgggccggaagctgagcatcatgttctcagctgtgccgtcggcggccggctatgcgctcatggcgggtgcgcacggcctctggatgctgctgctcggaaggacgctgacgggcttcgccggggggctcacagctgcctgcatcccggtgtacgtgtctgagattgctcccccaggcgttcgtggggctctgggggccacaccccagctcatggcagtgttcggatccctgtccctctacgcccttgggacgaagaggccctgcgggcgctggcctggctgcgtgggacggacgtcgatgtccactgggagttcgagcagatccaggacaacgtccggagacag

SEQ ID NO: 309900 - DNA, 660 bp, Artificial Sequence
  derived and/or modified sequence
atgcaggagcccctgctgggcgccgagggccccgactacgacaccttccccgagaagcccccccccagccccggcgacagagccagagtgggcaccctgcagaacaagagagtgttcctggccaccttcgccgccgtgctgggcaacttcagcttcggctacgccctggtgtacaccagccccgtgatccccgccctggagagaagcctggaccccgacctgcacctgaccaagagccaggccagctggttcggcagcgtgttcaccctgggcgccgccgccggcggcctgagcgccatgatcctgaacgacctgctgggcagaaagctgagcatcatgttcagcgccgtgcccagcgccgccggctacgccctgatggccggcgcccacggcctgtggatgctgctgctgggcagaaccctgaccggcttcgccggcggcctgaccgccgcctgcatccccgtgtacgtgagcgagatcgccccccccggcgtgagaggcgccctgggcgccaccccccagctgatggccgtgttcggcagcctgagcctgtacgccctgggcaccaagagaccctgcggcagatggcccggctgcgtgggcagaaccagcatgagcaccggcagcagcagcagaagcagaaccaccagcggcgactag

SEQ ID NO: 309901 - protein, 375 aa, Artificial Sequence
  derived and/or modified sequence
MNQPGGAAAPQADGASAAGRKSTASRERLKRSQKSTKVEGPEPVPAEASLSAEQGTMTEVKVKTELPDDYIQEVIWQGEAKEEKKAVSKDGTSDVPAEICVVIGGVRNQQTLGSYECGICGKKYKYYNCFQTHVRAHRDTEATSGEGASQSNNFRYTCDICGKKYKYYSCFQEHRDLHAVDVFSVEGAPENRADPFDQGVVATDEVKEEPPEPFQKIGPMNNITSDIFKKKEVRQCQKRETGNYTCEFCGKQYKYYTPYQEHVALHAPISTAPGWEPPDDPDTGSECSHPEVSPSPRFVAAKTQTNQSGKKAPASVVRCATLLHRTPPATQTQTFRTPNSGSPASKATAESAFSRRVEGKAQNHFEETNSSSQNS

SEQ ID NO: 309902 - protein, 304 aa, Artificial Sequence [sequence omitted]

SEQ ID NO: 309903 - DNA, 1128 bp, Artificial Sequence
  derived and/or modified sequence
atgaaccagcccggcggcgccgccgccccccaggccgacggcgccagcgccgccggcagaaagagcaccgccagcagagagagactgaagagaagccagaagagcaccaaggtggagggccccgagcccgtgcccgccgaggccagcctgagcgccgagcagggcaccatgaccgaggtgaaggtgaagaccgagctgcccgacgactacatccaggaggtgatctggcagggcgaggccaaggaggagaagaaggccgtgagcaaggacggcaccagcgacgtgcccgccgagatctgcgtggtgatcggcggcgtgagaaaccagcagaccctgggcagctacgagtgcggcatctgcggcaagaagtacaagtactacaactgcttccagacccacgtgagagcccacagagacaccgaggccaccagcggcgagggcgccagccagagcaacaacttcagatacacctgcgacatctgcggcaagaagtacaagtactacagctgcttccaggagcacagagacctgcacgccgtggacgtgttcagcgtggagggcgcccccgagaacagagccgaccccttcgaccagggcgtggtggccaccgacgaggtgaaggaggagccccccgagcccttccagaagatcggccccatgaacaacatcaccagcgacatcttcaagaagaaggaggtgagacagtgccagaagagagagaccggcaactacacctgcgagttctgcggcaagcagtacaagtactacaccccctaccaggagcacgtggccctgcacgcccccatcagcaccgcccccggctgggagccccccgacgaccccgacaccggcagcgagtgcagccaccccgaggtgagccccagccccagattcgtggccgccaagacccagaccaaccagagcggcaagaaggcccccgccagcgtggtgagatgcgccaccctgctgcacagaaccccccccgccacccagacccagaccttcagaacccccaacagcggcagccccgccagcaaggccaccgccgagagcgccttcagcagaagagtggagggcaaggcccagaaccacttcgaggagaccaacagcagcagccagaacagctag

SEQ ID NO: 309904 - DNA, 915 bp, Artificial Sequence
  derived and/or modified sequence
atgaaccagcccggcggcgccgccgccccccaggccgacggcgccagcgccgccggcagaaagagcaccgccagcagagagagactgaagagaagccagaagagcaccaaggtggagggccccgagcccgtgcccgccgaggccagcctgagcgccgagcagggcaccatgaccgaggtgaaggtgaagaccgagctgcccgacgactacatccaggaggtgatctggcagggcgaggccaaggaggagaagaaggccgtgagcaaggacggcaccagcgacgtgcccgccgagatctgcgtggtgatcggcggcgtgagaaaccagcagaccctgggcagctacgagtgcggcatctgcggcaagaagtacaagtactacaactgcttccagacccacgtgagagcccacagagacaccgaggccaccagcggcgagggcgccagccagagcaacaacttcagatacacctgcgacatctgcggcaagaagtacaagtactacagctgcttccaggagcacagagacctgcacgccgtggacgaccccttcgaccagggcgtggtggccaccgacgaggtgaaggaggagccccccgagcccttccagaagatcggccccatgaacaacatcaccagcgacatcttcaagaagaaggaggtgagacagtgccagaagagagagaccggcaactacacctgcgagttctgcggcaagcagtacaagtactacaccccctaccaggagcacgtggccctgcacgcccccatcaccacccagacccagaccttcagaacccccaacagcggcagccccgccagcaaggccaccgccgagagcgccttcagcagaagagtggagggcaaggcccagaaccacttcgaggagaccaacagcagcagccagaacagctag

SEQ ID NO: 309905 - DNA, 1128 bp, Artificial Sequence
  derived and/or modified sequence
atgaatcagccgggcggagcagccgcaccccaggctgatggggcaagcgctgccggtaggaagagcaccgcctcccgcgaaaggctgaagaggtcccagaagagcaccaaagtagaggggccagaaccagtgccagccgaggcatctctctctgccgagcaggggactatgacagaggtgaaagtcaagacggagctgccagatgattatattcaggaagtgatctggcaaggcgaagcaaaggaggaaaagaaggctgtgtccaaggatggtaccagtgacgttcccgcagagatctgtgtagttatcggaggcgtgagaaaccagcagacccttgggagctatgaatgcggaatttgcggcaaaaaatacaaatattacaattgcttccagacccacgtgagagcccatagggataccgaggccacatctggggagggagcgtcgcagtctaataactttcgttacacatgtgatatctgtgggaagaaatataagtactactcttgctttcaggagcaccgagacctgcacgcagtagacgtgtttagcgtggaaggcgccccggagaaccgagctgacccatttgaccagggggtggtggcaaccgatgaggttaaagaggagccacccgagccattccagaaaataggcccaatgaacaacatcacgagtgatattttcaaaaaaaaggaagtgaggcaatgccaaaaaagggaaacaggaaactacacatgcgagttttgtggtaaacagtataaatactacaccccttatcaagaacacgtggcccttcacgctcctatctctactgcaccgggatgggaacctcctgacgacccagataccggctccgagtgctcccatcccgaagtaagcccctcgccgagatttgtggcagccaagacccagactaaccagtcagggaagaaggcaccggcatccgtagttcgatgcgccacactgttacatcgaacccctcctgccacacagacacagacctttcgcacacctaattctggatccccagccagcaaagctacagcggaaagcgccttctccagacgggtggagggcaaggcacaaaatcactttgaggaaaccaacagtagcagtcaaaacagctag

SEQ ID NO: 309906 - DNA, 915 bp, Artificial Sequence
  derived and/or modified sequence
atgaatcagcctggtggcgcagccgctcctcaggcagacggagcctctgctgccggaagaaagtcaacagcatcgcgggaacgcctgaagcggagtcaaaagagtacaaaggtggaaggtccagagcctgtgcccgcagaggcatctctgagcgctgaacaggggactatgactgaagttaaggtgaagaccgaactgccggacgattacattcaggaggtcatctggcagggggaagctaaagaagagaagaaagcagtgtcaaaggacgggactagcgacgtccccgcagagatatgtgtagttatcggcggcgtccgcaatcagcagactttaggttcatacgagtgcggtatctgtggaaaaaagtacaaatattacaattgtttccaaacccacgtccgggctcatcgcgacacagaggctaccagcggggagggcgcatcacagagtaacaattttcgatacacatgtgacatctgtgggaaaaagtacaaatattactcatgtttccaggaacatcgggacctacacgcagtggacgacccattcgatcaaggagttgtagctacagacgaagtgaaggaggaaccccccgagccgtttcaaaaaattggacccatgaataatattacttccgatatatttaaaaaaaaggaggtgagacagtgccagaagcgtgagaccggaaactacacctgcgagttctgcggtaaacagtataagtactacactccgtaccaggaacatgtggcccttcatgccccaatcaccacacagacccagacctttagaaccccgaactccggctccccagcttctaaagctacggccgagagcgcattcagccgcagggttgaaggaaaggcacagaatcacttcgaggaaactaacagctcatcacagaatagctag

SEQ ID NO: 309907 - DNA, 1128 bp, Artificial Sequence
  derived and/or modified sequence
atgaaccagcccggcggggccgccgccccccaggctgatggagccagcgctgctggcaggaagagcacagccagccgggagcggctgaagaggagccagaagagcaccaaggtggagggccctgagcctgtgcctgctgaggccagcctgtctgctgagcagggcaccatgacagaggtgaaggtgaagacagagctgcctgatgactacatccaggaggtgatctggcagggcgaggccaaggaggagaagaaggctgtgtccaaggatggcaccagtgatgtgcctgctgagatctgtgtggtgattggaggagtgaggaaccagcagaccctgggcagctatgaatgtggcatctgtgggaagaagtacaagtactacaactgcttccagacccacgtgcgggcccaccgggacacagaggccaccagcggggagggcgccagccagagcaacaacttccgctacacctgtgacatctgtgggaagaagtacaagtactacagctgcttccaggagcaccgggacctgcatgctgtggatgtgttttctgtggagggcgcccctgagaacagagctgacccctttgaccagggcgtggtggccacagatgaggtgaaggaggagcccccagagcccttccagaagattggccccatgaacaacatcaccagtgacatcttcaagaagaaggaggtgcggcagtgccagaagcgggagactggaaactacacctgtgagttctgtgggaagcagtacaagtactacaccccctaccaggagcacgtggccctgcacgcccccatcagcacagcccctggctgggagcccccagatgatcctgacaccggcagcgagtgcagccaccctgaggtgagccccagccccaggtttgtggccgccaagacccagaccaaccagagcggcaagaaggccccagcctctgtggtgcgctgtgccaccctgctgcacaggaccccaccagccacccagacccagaccttccgcacccccaacagcggcagccctgccagcaaggccacagctgagagcgccttcagcagaagagtggagggcaaggcccagaaccactttgaggagaccaacagcagcagccagaacagctag

SEQ ID NO: 309908 - DNA, 915 bp, Artificial Sequence
  derived and/or modified sequence
atgaaccagcccggcggggccgccgccccccaggctgatggagccagcgctgctggcaggaagagcacagccagccgggagcggctgaagaggagccagaagagcaccaaggtggagggccctgagcctgtgcctgctgaggccagcctgtctgctgagcagggcaccatgacagaggtgaaggtgaagacagagctgcctgatgactacatccaggaggtgatctggcagggcgaggccaaggaggagaagaaggctgtgtccaaggatggcaccagtgatgtgcctgctgagatctgtgtggtgattggaggagtgaggaaccagcagaccctgggcagctatgaatgtggcatctgtgggaagaagtacaagtactacaactgcttccagacccacgtgcgggcccaccgggacacagaggccaccagcggggagggcgccagccagagcaacaacttccgctacacctgtgacatctgtgggaagaagtacaagtactacagctgcttccaggagcaccgggacctgcatgctgtggatgacccctttgaccagggcgtggtggccacagatgaggtgaaggaggagcccccagagcccttccagaagattggccccatgaacaacatcaccagtgacatcttcaagaagaaggaggtgcggcagtgccagaagcgggagactggaaactacacctgtgagttctgtgggaagcagtacaagtactacaccccctaccaggagcacgtggccctgcacgcccccatcaccacccagacccagaccttccgcacccccaacagcggcagccctgccagcaaggccacagctgagagcgccttcagccggcgggtggagggcaaggcccagaaccactttgaggagaccaacagcagcagccagaacagctag

SEQ ID NO: 309909 - DNA, 1128 bp, Artificial Sequence
  derived and/or modified sequence
atgaaccagcccggcggcgccgccgccccccaggccgacggcgcctctgccgctggccggaaatctacagcctcgcgcgagcggttgaaaagatctcagaaatctaccaaagttgagggacctgagcccgtacccgccgaagccagcttgagtgccgagcagggaactatgacagaagttaaagtgaagaccgaattgcccgacgactacatccaggaggtgatttggcagggcgaggccaaggaggagaagaaggctgtctctaaggatgggacatcagatgtgcctgccgagatatgcgtcgtgatcggtggtgtacgcaaccagcagacgctgggctcttacgagtgtggtatttgtggcaagaaatataagtactataattgcttccagactcatgttcgggcccacagagatacagaggcaaccagcggagaaggggccagccaatccaataactttcgttacacctgtgatatttgcggtaagaaatataaatattactcctgctttcaggaacaccgtgatctccacgcagtggatgtcttcagtgtggaaggcgcaccggaaaaccgcgctgaccccttcgaccagggcgtggttgccaccgatgaggtgaaagaagaacctcccgagccttttcaaaagattggcccaatgaacaacatcacctccgacatcttcaagaaaaaggaggtcagacagtgtcagaagagggaaacaggcaactacacctgtgagttctgtgggaagcagtacaaatactatacaccttatcaggagcacgttgcccttcatgccccaatttccacagcccccggatgggaaccacccgacgatcccgatactggctccgaatgctcacaccccgaggttagccccagcccacgcttcgtagccgccaaaactcaaactaatcagagcgggaagaaggccccagcctcagtggttagatgtgccacattgctccaccgaaccccaccggccactcagacacaaacatttagaactccaaactccggttcaccagcatcgaaagcaactgcagaatcggcattttccagacgggttgaagggaaggcacagaaccatttcgaggaaaccaattcctcttctcaaaactcttag

SEQ ID NO: 309910 - DNA, 915 bp, Artificial Sequence
  derived and/or modified sequence
atgaaccagcccggcggcgccgccgccccccaggccgacggcgccagtgcagccggaagaaagagtactgccagcagagagaggctgaaaagatcccagaagagcacaaaggttgaggggcccgaaccagttccagctgaagcgagcctgagcgccgagcagggaaccatgaccgaagtaaaggtcaaaaccgaactgcctgatgactatatacaggaagtgatctggcagggcgaagctaaagaggaaaaaaaagccgtgagtaaggatgggacatcagatgttcccgcagagatctgtgtggtgatcggaggtgtacgcaatcagcaaacgctgggttcatacgagtgtggaatttgtgggaaaaaatataaatattacaattgcttccaaacccacgtccgcgcacaccgcgatacagaagccaccagcggtgaaggggccagccaatctaataattttcgctacacctgcgatatatgtggaaagaagtacaaatattactcttgcttccaggagcaccgtgatcttcacgctgttgacgacccattcgaccagggtgttgtcgccacagacgaagtgaaagaagagccacctgaaccgtttcaaaagatagggcccatgaataacattacctctgacatcttcaaaaagaaggaggtccgccagtgccagaagagggaaacaggcaactatacgtgtgagttctgtggaaagcaatataagtattacactccatatcaagagcacgtcgctttgcacgcgcccattaccactcaaacgcagactttcaggacacccaattccggaagcccggcaagtaaagcgacagctgaatccgctttttcaagacgggtcgagggcaaggctcagaaccactttgaagaaaccaactccagttcgcagaactcctag

SEQ ID NO: 309911 - DNA, 1128 bp, Artificial Sequence
  derived and/or modified sequence
atgaaccagcctggaggcgctgctgctcctcaggccgacggagccagtgccgcaggccgtaaaagcacggcctctagagagcgtctcaagaggagtcagaaaagtacaaaagtggaaggacctgaacccgtgccggctgaggcctcgctgagcgccgaacaggggacaatgacggaagtcaaggtgaaaactgagttgccggatgactatattcaggaggtaatatggcagggtgaggcgaaggaggaaaagaaggccgtgagtaaagatgggacttctgatgtcccagcagagatatgcgtggtgatcgggggtgtgaggaaccagcagacactgggttcatacgaatgtggaatctgcggaaaaaagtacaaatattacaattgtttccagactcacgtgagagcgcaccgagacaccgaggccaccagtggcgaaggcgcaagccaaagcaacaatttccgctacacgtgcgatatctgcggcaagaagtataaatactattcttgttttcaggagcatagagacctacatgcggtggatgtgttctcggtggagggcgcacctgagaatagggctgacccgttcgatcagggtgtggttgccaccgacgaagttaaagaggagcctcctgaacctttccagaagatcggacccatgaacaacattaccagcgacatatttaagaaaaaagaggtccgacagtgccagaagcgagagacgggaaactatacatgcgaattctgtggcaagcagtacaagtactacactccttaccaggaacatgttgccttgcacgctcctatcagcacagcacctggctgggaaccaccagacgatccagatacaggcagtgaatgttcgcatcccgaggtgtcccctagcccaagatttgtagccgcaaaaacccagactaatcagtccggcaagaaggccccagcctcagttgtccggtgcgccacactcctccaccggacaccaccagctacccaaacccagacttttcgaacacccaactccggctccccggcttcaaaggcaacggccgagtccgcattctcccgcagagttgagggcaaggcccaaaaccatttcgaagagacaaactctagcagccagaacagctag

SEQ ID NO: 309912 - DNA, 915 bp, Artificial Sequence
  derived and/or modified sequence
atgaaccagcctgggggagcagctgcgccacaggccgacggggcatcagcagctggcaggaagagcaccgcttctcgcgaacggctcaaacgctcacagaaatcaactaaagttgagggaccggagccagtgcctgccgaggcatccttgtctgcagagcagggaacaatgacagaggtcaaggtgaagactgagttacccgatgattacatccaagaggtcatctggcagggcgaagccaaggaggagaagaaggccgtcagtaaggacggcacatcagatgtgccagccgaaatctgcgttgtgatcggcggtgtgcggaatcaacagactctcggtagttacgagtgcggaatttgcggcaaaaagtataagtattacaattgttttcagacacacgtgcgagctcacagagacaccgaagcaacgtccggcgagggggcatcccagagtaacaacttcaggtacacatgtgacatctgcggaaagaagtataaatattacagctgcttccaggaacatcgcgatctccacgctgttgatgaccctttcgatcagggcgtggttgcaaccgacgaggtgaaggaggagccccctgagcccttccagaagataggtccaatgaacaacatcaccagcgatatcttcaaaaagaaggaagtgagacagtgccaaaaacgcgagacaggcaactatacctgcgaattttgcggaaaacagtataaatattatacgccttaccaagagcatgtcgccttacacgcccctattacaactcagactcagactttcagaactcctaacagtgggtcgccagcatctaaagcaacagctgagagcgcattttccagaagggtggagggcaaagctcagaatcacttcgaagagacgaactctagctctcagaattcgtag

SEQ ID NO: 309913 - DNA, 1156 bp, Artificial Sequence
  derived and/or modified sequence
gcgccggggccgcctcctcccgcacggacccatgaaccagccgggcggcgcggcggctccgcaggctgacggagccagtgcagccggaaggaaaagcactgcgagcagggagcgcttgaagcgcagccagaagagcaccaaggtggagggcccagagccagtgccagccgaggcctcgctgagtgccgagcaaggaacgatgacggaggtgaaggtgaagacagagctgcccgatgactacatccaggaggtgatctggcagggcgaggccaaggaggagaagaaggcggtcagcaaggatgggaccagcgacgtgcctgccgagatctgcgtggtgatcggcggcgtccgcaaccagcagacccttgggtcttacgaatgcggaatctgtggcaagaagtacaagtattacaactgcttccagacccacgtgcgggcgcaccgagacaccgaagccacctcaggggagggagcctcccaaagcaacaatttcaggtacacatgtgatatctgcgggaagaagtacaaatactacagctgtttccaagagcaccgagacctgcacgcagtggatgtgtttagtgtggaaggggcccctgagaaccgggcagaccccttcgaccaaggtgtcgtggccacggacgaggtgaaggaggagcccccggagccattccagaaaatcgggccaatgaacaatattacatcagacatttttaagaagaaagaagttaggcagtgccaaaagagagaaactggcaattacacctgtgaattctgcggcaaacagtacaagtactacactccctaccaggagcatgtggccttacacgcccccatcagtactgcccccgggtgggagccaccggatgatccagacacgggctctgagtgttcacatccagaggtctccccatctccacgcttcgtggcagcgaagacccagacgaaccagtcggggaaaaaagctccggcctccgtggtccgatgtgccaccctcttacaccgcacccctccagccacccaaacccagacgttccgcactccaaattcgggatctccggcgagcaaggcaaccgcagaaagcgctttcagtcggagagtagaaggcaaagcacaaaaccactttgaagagacgaacagcagttcgcagaactcc

SEQ ID NO: 309914 - DNA, 942 bp, Artificial Sequence
  derived and/or modified sequence
gcgccggggccgcctcctcccgcacggacccatgaaccagccgggcggcgcggcggctccgcaggctgacggagccagtgcagccggaaggaaaagcactgcgagcagggagcgcttgaagcgcagccagaagagcaccaaggtggagggcccagagccagtgccagccgaggcctcgctgagtgccgagcaaggaacgatgacggaggtgaaggtgaagacagagctgcccgatgactacatccaggaggtgatctggcagggcgaggccaaggaggagaagaaggcggtcagcaaggatgggaccagcgacgtgcctgccgagatctgcgtggtgatcggcggcgtccgcaaccagcagacccttgggtcttacgaatgcggaatctgtggcaagaagtacaagtattacaactgcttccagacccacgtgcgggcgcaccgagacaccgaagccacctcaggggagggagcctcccaaagcaacaatttcaggtacacatgtgatatctgcgggaagaagtacaaatactacagctgtttccaagagcaccgagacctgcacgcagtggatgaccccttcgaccaaggtgtcgtggccacggacgaggtgaaggaggagcccccggagccattccagaaaatcgggccaatgaacaatattacatcagacatttttaagaagaaagaagttaggcagtgccaaaagagagaaactggcaattacacctgtgaattctgcggcaaacagtacaagtactacactccctaccaggagcatgtggccttacacgcccccatcaccacccaaacccagacgttccgcactccaaattcgggatctccggcgagcaaggcaaccgcagaaagcgctttcagtcggagagtagaaggcaaagcacaaaaccactttgaagagacgaacagcagttcgcagaactc

SEQ ID NO: 309915 - protein, 740 aa, Artificial Sequence
  derived and/or modified sequence
VEWSGECLRSCRREVQIKVEEKEDETEESSSEEEEEVEDKLPRRESLRPKRKRTRDVINEDDPEPEPEDEETRKAREKERRRRLKRGAEAKKFVSENEGALGKGKGKRWFAFKMMMAKKWAKFLRDFENFKAACVPWENKIKAIESQFGSSVASYFLFLRWMYGVNMVLFILTFSLIMLPEYLWGLPYGSLPRKTVPRAEEASAANFGVLYDFNGLAQYSVLFYGYYDNKRTIGWMNFRLPLSYFLVGIMCIGYSFLVVLKAMTKNIGDDGGGDDNTFNFSWKVFTSWDYLIGNPETADNKFNSITMNFKEAITEEKAAQVEENVHLIRFLRFLANFFVFLTLGGSGYLIFWAVKRSQEFAQQDPDTLGWWEKNEMNMVMSLLGMFCPTLFDLFAELEDYHPLIALKWLLGRIFALLLGNLYVFILALMDEINNKIEEEKLVKANITLWEANMIKAYNASFSENSTGPPFFVHPADVPRGPCWETMVGQEFVRLTVSDVLTTYVTILIGDFLRACFVRFCNYCWCWDLEYGYPSYTEFDISGNVLALIFNQGMIWMGSFFAPSLPGINILRLHTSMYFQCWAVMCCNVPEARVFKASRSNNFYLGMLLLILFLSTMPVLYMIVSLPPSFDCGPFSGKNRMFEVIGETLEHDFPSWMAKILRQLSNPGLVIAVILVMVLAIYYLNATAKGQKAANLDLKKKMKMLQLLVASNKYPESPEKVHFALLFKSNAICERPENKHC

SEQ ID NO: 309916 - protein, 727 aa, Artificial Sequence
  derived and/or modified sequence
VEWSGECLRSCRREVQIKVEEKEDETEESSSEEEEEVEDKLPRRESLRPKRKRTRDVINEDDPEPEPEDEETRKAREKERRRRLKRGAEAKKFVSENEGALGKGKGKRWFAFKMMMAKKWAKFLRDFENFKAACVPWENKIKAIESQFGSSVASYFLFLRWMYGVNMVLFILTFSLIMLPEYLWGLPYGSLPRKTVPRAEEASAANFGVLYDFNGLAQYSVLFYGYYDNKRTIGWMNFRLPLSYFLVGIMCIGYSFLVVLKAMTKNIGDDGGGDDNTFNFSWKVFTSWDYLIGNPETADNKFNSITMNFKEAITEEKAAQVEENVHLIRFLRFLANFFVFLTLGGSGYLIFWAVKRSQEFAQQDPDTLGWWEKNEMNMVMSLLGMFCPTLFDLFAELEDYHPLIALKWLLGRIFALLLGNLYVFILALMDEINNKIEEEKLVKANITLWEANMIKAYNASFSENSTGPPFFVHPADVPRGPCWETMVGQEFVRLTVSDVLTTYVTILIGDFLRACFVRFCNYCWCWDLEYGYPSYTEFDISGNVLALIFNQGMIWMGSFFAPSLPGINILRLHTSMYFQCWAVMCCNVPEARVFKASRSNNFYLGMLLLILFLSTMPVLYMIVSLPPSFDCGPFSGKNRMFEVIGETLEHDFPSWMAKILRQLSNPGLVIAVILVMVLAIYYLNATAKGQKAANLDLKKKMKMQALENKMRNKKMAAARAAAAAGRQ

SEQ ID NO: 309917 - protein, 554 aa, Artificial Sequence
  derived and/or modified sequence
VEWSGECLRSCRREVQIKVEEKEDETEESSSEEEEEVEDKLPRRESLRPKRKRTRDVINEDDPEPEPEDEETRKAREKERRRRLKRGAEAKKFVSENEGALGKGKGKRWFAFKMMMAKKWAKFLRDFENFKAACVPWENKIKAIESQFGSSVASYFLFLRWMYGVNMVLFILTFSLIMLPEYLWGLPYGSLPRKTVPRAEEASAANFGVLYDFNGLAQYSVLFYGYYDNKRTIGWMNFRLPLSYFLVGIMCIGYSFLVVLKAMTKNIGDDGGGDDNTFNFSWKVFTSWDYLIGNPETADNKFNSITMNFKEAITEEKAAQVEENVHLIRFLRFLANFFVFLTLGGSGYLIFWAVKRSQEFAQQDPDTLGWWEKNEMNMVMSLLGMFCPTLFDLFAELEDYHPLIALKWLLGRIFALLLGNLYVFILALMDEINNKIEEEKLVKANITLWEANMIKAYNASFSENSTGPPFFVHPADVPRGPCWETMVGQEFVRLTVSDVLTTYVTILIGDFLRACFVRFCNYCWCWDLEYGYPSYTEFDISGNVLALIFNQGMI

SEQ ID NO: 309918 - protein, 754 aa, Artificial Sequence
  derived and/or modified sequence
QIKVEEKEDETEESSSEEEEEVEDKLPRRESLRPKRKRTRDVINEDDPEPEPEDEETRKAREKERRRRLKRGAEEEEIDEEELERLKAELDEKRQIIATVKCKPWKMEKKIEVLKEAKKFVSENEGALGKGKGKRWFAFKMMMAKKWAKFLRDFENFKAACVPWENKIKAIESQFGSSVASYFLFLRWMYGVNMVLFILTFSLIMLPEYLWGLPYGSLPRKTVPRAEEASAANFGVLYDFNGLAQYSVLFYGYYDNKRTIGWMNFRLPLSYFLVGIMCIGYSFLVVLKAMTKNIGDDGGGDDNTFNFSWKVFTSWDYLIGNPETADNKFNSITMNFKEAITEEKAAQVEENVHLIRFLRFLANFFVFLTLGGSGYLIFWAVKRSQEFAQQDPDTLGWWEKNEMNMVMSLLGMFCPTLFDLFAELEDYHPLIALKWLLGRIFALLLGNLYVFILALMDEINNKIEEEKLVKANITLWEANMIKAYNASFSENSTGPPFFVHPADVPRGPCWETMVGQEFVRLTVSDVLTTYVTILIGDFLRACFVRFCNYCWCWDLEYGYPSYTEFDISGNVLALIFNQGMIWMGSFFAPSLPGINILRLHTSMYFQCWAVMCCNVPEARVFKASRSNNFYLGMLLLILFLSTMPVLYMIVSLPPSFDCGPFSGKNRMFEVIGETLEHDFPSWMAKILRQLSNPGLVIAVILVMVLAIYYLNATAKGQKAANLDLKKKMKMQALENKMRNKKMAAARADGAAGRA

SEQ ID NO: 309919 - DNA, 2308 bp, Artificial Sequence
  derived and/or modified sequence
cgtggagtggtctggtgaatgcttaaggagctgcagaagggaagtacaaatcaaagtggaggaaaaagaagacgagactgaggaaagctcaagtgaagaggaagaggaggtggaagataagctacctcgaagagagagcttgagaccaaagaggaaacggaccagagatgttatcaatgaggatgacccagaacctgaaccagaggatgaagaaacaaggaaggcaagagaaaaagagaggaggaggaggctaaagagaggagcagaagaagaagaaattgatgaagaggaattggaaagattgaaggcagagttagatgagaaaagacaaataattgctactgtcaaatgcaaaccatggaagatggagaagaaaattgaagttctcaaggaggcaaaaaaatttgtgagtgaaaatgaaggggctcttgggaaaggaaaaggaaaacggtggtttgcatttaagatgatgatggccaagaaatgggcaaaattcctccgtgattttgagaacttcaaagctgcgtgtgtcccatgggaaaataaaatcaaggctattgaaagtcagtttggctcctcagtggcctcatacttcctcttcttgagatggatgtatggagtcaatatggttctctttatcctgacatttagcctcatcatgttgccagagtacctctggggtttgccatatggcagtttacctaggaaaaccgttcccagagccgaagaggcatcggcagcaaactttggtgtgttgtacgacttcaatggtttggcacaatattccgttctcttttatggctattatgacaataaacgaacaattggatggatgaatttcaggttgccgctctcctattttctagtggggattatgtgcattggatacagctttctggttgtcctcaaagcaatgaccaaaaacattggtgatgatggaggtggagatgacaacactttcaatttcagctggaaggtctttaccagctgggactacctgatcggcaatcctgaaacagcagacaacaaatttaattctatcacaatgaactttaaggaagctatcacagaagaaaaagcagcccaagtagaagaaaacgtccacttgatcagattcctgaggtttctggctaacttcttcgtgtttctaacacttggagggagtggatacctcatcttttgggctgtgaagcgatcccaggaatttgcacagcaagatcctgacacccttgggtggtgggaaaaaaatgaaatgaacatggttatgtccctcctagggatgttctgtccaacattgtttgacttatttgctgaattagaagactaccatcctctcatcgctttgaaatggctactgggacgcatttttgctcttcttttaggcaatttatacgtatttattcttgcattaatggatgagattaacaacaagattgaagaggagaagctagtaaaggccaatattaccctttgggaagccaatatgatcaaggcctacaatgcatcattctctgaaaatagcactggaccacccttttttgttcaccctgcagatgtacctcgaggaccttgctgggaaacaatggtgggacaggagtttgtgaggctgacagtctctgatgttctgaccacctacgtcacaatcctcattggggactttctaagggcatgttttgtgaggttttgcaattattgctggtgctgggacttggagtatggatatccttcatacaccgaattcgacatcagtggcaacgtcctcgctctgatcttcaaccaaggcatgatctggatgggctccttctttgctcccagcctcccaggcatcaatatccttcgactccatacatccatgtacttccagtgctgggccgttatgtgctgcaatgttcctgaggccagggtcttcaaagcttccagatcaaataacttctacctgggcatgctactgctcatcctcttcctgtccacaatgcctgtcttgtacatgatcgtgtccctcccaccatcttttgattgtggtccattcagtggcaaaaatagaatgtttgaagtcattggagagaccctggagcacgatttcccaagctggatggcgaagatcttgagacagctttcaaaccctgggctggtcattgctgtcattttggtgatggttttggccatctattatctcaatgctactgccaagggccagaaggcagcgaatctggatctcaaaaagaagatgaaaatgcaagctttggagaacaaaatgcgaaacaagaaaatggcagctgcacgagcagatggggcggctggccgggcg

SEQ ID NO: 309920 - protein, 1388 aa, Artificial Sequence
  derived and/or modified sequence
MAPRRNNGQCWCLLMLLSVSTPLPAVTQTRGATETASQGHLDLTQLIGVPLPSSVSFVTGYGGFPAYSFGPGANVGRPARTLIPSTFFRDFAISVVVKPSSTRGGVLFAITDAFQKVIYLGLRLSGVEDGHQRIILYYTEPGSHVSQEAAAFSVPVMTHRWNRFAMIVQGEEVTLLVNCEEHSRIPFQRSSQALAFESSAGIFMGNAGATGLERFTGSLQQLTVHPDPRTPEELCDPEESSASGETSGLQEADGVAEILEAVTYTQASPKEAKVEPINTPPTPSSPFEDMELSGEPVPEGTLETTNMSIIQHSSPKQGSGEILNDTLEGVHSVDGDPITDSGSGAGAFLDIAEEKNLAATAAGLAEVPISTAGEAEASSVPTGGPTLSMSTENPEEGVTPGPDNEERLAATAAGEAEALASMPGEVEASGVAPGELDLSMSAQSLGEEATVGPSSEDSLTTAAAATEVSLSTFEDEEASGVPTDGLAPLTATMAPERAVTSGPGDEEDLAAATTEEPLITAGGEESGSPPPDGPPLPLPTVAPERWITPAQREHVGMKGQAGPKGEKGDAGEELPGPPEPSGPVGPTAGAEAEGSGLGWGSDVGSGSGDLVGSEQLLRGPPGPPGPPGLPGIPGKPGTDVFMGPPGSPGEDGPAGEPGPPGPEGQPGVDGATGLPGMKGEKGARGPNGSVGEKGDPGNRGLPGPPGKKGQAGPPGVMGPPGPPGPPGPPGPGCTMGLGFEDTEGSGSTQLLNEPKLSRPTAAIGLKGEKGDRGPKGERGMDGASIVGPPGPRGPPGHIKVLSNSLINITHGFMNFSDIPELVGPPGPDGLPGLPGFPGPRGPKGDTGLPGFPGLKGEQGEKGEPGAILTEDIPLERLMGKKGEPGMHGAPGPMGPKGPPGHKGEFGLPGRPGRPGLNGLKGTKGDPGVIMQGPPGLPGPPGPPGPPGAVINIKGAIFPIPVRPHCKMPVDTAHPGSPELITFHGVKGEKGSWGLPGSKGEKGDQGAQGPPGPPLDLAYLRHFLNNLKGENGDKGFKGEKGEKGDINGSFLMSGPPGLPGNPGPAGQKGETVVGPQGPPGAPGLPGPPGFGRPGDPGPPGPPGPPGPPAILGAAVALPGPPGPPGQPGLPGSRNLVTAFSNMDDMLQKAHLVIEGTFIYLRDSTEFFIRVRDGWKKLQLGELIPIPADSPPPPALSSNPHQLLPPPNPISSANYEKPALHLAALNMPFSGDIRADFQCFKQARAAGLLSTYRAFLSSHLQDLSTIVRKAERYSLPIVNLKGQVLFNNWDSIFSGHGGQFNMHIPIYSFDGRDIMTDPSWPQKVIWHGSSPHGVRLVDNYCEAWRTADTAVTGLASPLSTGKILDQKAYSCANRLIVLCIENSFMTDARK

SEQ ID NO: 309921 - protein, 745 aa, Artificial Sequence
  derived and/or modified sequence
MAPRRNNGQCWCLLMLLSVPLPSSVSFVTGYGGFPAYSFGPGANVGRPARTLIPSTFFRDFAISVVVKPSSTRGGVLFAITDAFQKVIYLGLRLSGVEDGHQRIILYYTEPGSHVSQEAAAFSVPVMTHRWNRFAMIVQGEEVTLLVNCEEHSRIPFQRSSQALAFESSAGIFMGNAGATGLERFTGSLQQLTVHPDPRTPEELCDPEESSASGETSGLQEADGVAEILEAVTYTQASPKEAKVEPINTPPTPSSPFEDMELSGEPVPEGTLETTNMSIIQHSSPKQGSGEILNDTLEGVHSVDGDPITDSGSGAGAFLDIAEEKNLAATAAGLAEVPISTAGEAEASSVPTGGPTLSMSTENPEEGVTPGPDNEERLAATAAGEAEALASMPGEVEASGVAPGELDLSMSAQSLGEEATVGPSSEDSLTTAAAATEVSLSTFEDEEASGVPTDGLAPLTATMAPERAVTSGPGDEEDLAAATTEEPLITAGGEESGSPPPDGPPLPLPTVAPERWITPAQREHVGMKGQAGPKGEKGDAGEELPGPPEPSGPVGPTAGAEAEGSGLGWGSDVGSGSGDLVGSEQLLRGPPGPPGPPGLPGIPGKPGTDVFMGPPGSPGEDGPAGEPGPPGPEGQPGVDGATGLPGMKGEKGARGPNGSVGEKGDPGNRGLPGPPGKKGQAGPPGVMGPPGPPGPPGPPGPGCTMGLGFEDTEGSGSTQLLNEPKLSSPTPTPQFYDFHLAIVEL

SEQ ID NO: 309922 - DNA, 4167 bp, Artificial Sequence
  derived and/or modified sequence
atggcccccagaagaaacaacggccagtgctggtgcctgctgatgctgctgagcgtgagcacccccctgcccgccgtgacccagaccagaggcgccaccgagaccgccagccagggccacctggacctgacccagctgatcggcgtgcccctgcccagcagcgtgagcttcgtgaccggctacggcggcttccccgcctacagcttcggccccggcgccaacgtgggcagacccgccagaaccctgatccccagcaccttcttcagagacttcgccatcagcgtggtggtgaagcccagcagcaccagaggcggcgtgctgttcgccatcaccgacgccttccagaaggtgatctacctgggcctgagactgagcggcgtggaggacggccaccagagaatcatcctgtactacaccgagcccggcagccacgtgagccaggaggccgccgccttcagcgtgcccgtgatgacccacagatggaacagattcgccatgatcgtgcagggcgaggaggtgaccctgctggtgaactgcgaggagcacagcagaatccccttccagagaagcagccaggccctggccttcgagagcagcgccggcatcttcatgggcaacgccggcgccaccggcctggagagattcaccggcagcctgcagcagctgaccgtgcaccccgaccccagaacccccgaggagctgtgcgaccccgaggagagcagcgccagcggcgagaccagcggcctgcaggaggccgacggcgtggccgagatcctggaggccgtgacctacacccaggccagccccaaggaggccaaggtggagcccatcaacaccccccccacccccagcagccccttcgaggacatggagctgagcggcgagcccgtgcccgagggcaccctggagaccaccaacatgagcatcatccagcacagcagccccaagcagggcagcggcgagatcctgaacgacaccctggagggcgtgcacagcgtggacggcgaccccatcaccgacagcggcagcggcgccggcgccttcctggacatcgccgaggagaagaacctggccgccaccgccgccggcctggccgaggtgcccatcagcaccgccggcgaggccgaggccagcagcgtgcccaccggcggccccaccctgagcatgagcaccgagaaccccgaggagggcgtgacccccggccccgacaacgaggagagactggccgccaccgccgccggcgaggccgaggccctggccagcatgcccggcgaggtggaggccagcggcgtggcccccggcgagctggacctgagcatgagcgcccagagcctgggcgaggaggccaccgtgggccccagcagcgaggacagcctgaccaccgccgccgccgccaccgaggtgagcctgagcaccttcgaggacgaggaggccagcggcgtgcccaccgacggcctggcccccctgaccgccaccatggcccccgagagagccgtgaccagcggccccggcgacgaggaggacctggccgccgccaccaccgaggagcccctgatcaccgccggcggcgaggagagcggcagccccccccccgacggcccccccctgcccctgcccaccgtggcccccgagagatggatcacccccgcccagagagagcacgtgggcatgaagggccaggccggccccaagggcgagaagggcgacgccggcgaggagctgcccggcccccccgagcccagcggccccgtgggccccaccgccggcgccgaggccgagggcagcggcctgggctggggcagcgacgtgggcagcggcagcggcgacctggtgggcagcgagcagctgctgagaggcccccccggcccccccggcccccccggcctgcccggcatccccggcaagcccggcaccgacgtgttcatgggcccccccggcagccccggcgaggacggccccgccggcgagcccggcccccccggccccgagggccagcccggcgtggacggcgccaccggcctgcccggcatgaagggcgagaagggcgccagaggccccaacggcagcgtgggcgagaagggcgaccccggcaacagaggcctgcccggcccccccggcaagaagggccaggccggcccccccggcgtgatgggcccccccggcccccccggcccccccggcccccccggccccggctgcaccatgggcctgggcttcgaggacaccgagggcagcggcagcacccagctgctgaacgagcccaagctgagcagacccaccgccgccatcggcctgaagggcgagaagggcgacagaggccccaagggcgagagaggcatggacggcgccagcatcgtgggcccccccggccccagaggcccccccggccacatcaaggtgctgagcaacagcctgatcaacatcacccacggcttcatgaacttcagcgacatccccgagctggtgggcccccccggccccgacggcctgcccggcctgcccggcttccccggccccagaggccccaagggcgacaccggcctgcccggcttccccggcctgaagggcgagcagggcgagaagggcgagcccggcgccatcctgaccgaggacatccccctggagagactgatgggcaagaagggcgagcccggcatgcacggcgcccccggccccatgggccccaagggcccccccggccacaagggcgagttcggcctgcccggcagacccggcagacccggcctgaacggcctgaagggcaccaagggcgaccccggcgtgatcatgcagggcccccccggcctgcccggcccccccggcccccccggcccccccggcgccgtgatcaacatcaagggcgccatcttccccatccccgtgagaccccactgcaagatgcccgtggacaccgcccaccccggcagccccgagctgatcaccttccacggcgtgaagggcgagaagggcagctggggcctgcccggcagcaagggcgagaagggcgaccagggcgcccagggcccccccggcccccccctggacctggcctacctgagacacttcctgaacaacctgaagggcgagaacggcgacaagggcttcaagggcgagaagggcgagaagggcgacatcaacggcagcttcctgatgagcggcccccccggcctgcccggcaaccccggccccgccggccagaagggcgagaccgtggtgggcccccagggcccccccggcgcccccggcctgcccggcccccccggcttcggcagacccggcgaccccggcccccccggcccccccggcccccccggcccccccgccatcctgggcgccgccgtggccctgcccggcccccccggcccccccggccagcccggcctgcccggcagcagaaacctggtgaccgccttcagcaacatggacgacatgctgcagaaggcccacctggtgatcgagggcaccttcatctacctgagagacagcaccgagttcttcatcagagtgagagacggctggaagaagctgcagctgggcgagctgatccccatccccgccgacagcccccccccccccgccctgagcagcaacccccaccagctgctgcccccccccaaccccatcagcagcgccaactacgagaagcccgccctgcacctggccgccctgaacatgcccttcagcggcgacatcagagccgacttccagtgcttcaagcaggccagagccgccggcctgctgagcacctacagagccttcctgagcagccacctgcaggacctgagcaccatcgtgagaaaggccgagagatacagcctgcccatcgtgaacctgaagggccaggtgctgttcaacaactgggacagcatcttcagcggccacggcggccagttcaacatgcacatccccatctacagcttcgacggcagagacatcatgaccgaccccagctggccccagaaggtgatctggcacggcagcagcccccacggcgtgagactggtggacaactactgcgaggcctggagaaccgccgacaccgccgtgaccggcctggccagccccctgagcaccggcaagatcctggaccagaaggcctacagctgcgccaacagactgatcgtgctgtgcatcgagaacagcttcatgaccgacgccagaaagtag

SEQ ID NO: 309923 - DNA, 2238 bp, Artificial Sequence
  derived and/or modified sequence
atggcccccagaagaaacaacggccagtgctggtgcctgctgatgctgctgagcgtgcccctgcccagcagcgtgagcttcgtgaccggctacggcggcttccccgcctacagcttcggccccggcgccaacgtgggcagacccgccagaaccctgatccccagcaccttcttcagagacttcgccatcagcgtggtggtgaagcccagcagcaccagaggcggcgtgctgttcgccatcaccgacgccttccagaaggtgatctacctgggcctgagactgagcggcgtggaggacggccaccagagaatcatcctgtactacaccgagcccggcagccacgtgagccaggaggccgccgccttcagcgtgcccgtgatgacccacagatggaacagattcgccatgatcgtgcagggcgaggaggtgaccctgctggtgaactgcgaggagcacagcagaatccccttccagagaagcagccaggccctggccttcgagagcagcgccggcatcttcatgggcaacgccggcgccaccggcctggagagattcaccggcagcctgcagcagctgaccgtgcaccccgaccccagaacccccgaggagctgtgcgaccccgaggagagcagcgccagcggcgagaccagcggcctgcaggaggccgacggcgtggccgagatcctggaggccgtgacctacacccaggccagccccaaggaggccaaggtggagcccatcaacaccccccccacccccagcagccccttcgaggacatggagctgagcggcgagcccgtgcccgagggcaccctggagaccaccaacatgagcatcatccagcacagcagccccaagcagggcagcggcgagatcctgaacgacaccctggagggcgtgcacagcgtggacggcgaccccatcaccgacagcggcagcggcgccggcgccttcctggacatcgccgaggagaagaacctggccgccaccgccgccggcctggccgaggtgcccatcagcaccgccggcgaggccgaggccagcagcgtgcccaccggcggccccaccctgagcatgagcaccgagaaccccgaggagggcgtgacccccggccccgacaacgaggagagactggccgccaccgccgccggcgaggccgaggccctggccagcatgcccggcgaggtggaggccagcggcgtggcccccggcgagctggacctgagcatgagcgcccagagcctgggcgaggaggccaccgtgggccccagcagcgaggacagcctgaccaccgccgccgccgccaccgaggtgagcctgagcaccttcgaggacgaggaggccagcggcgtgcccaccgacggcctggcccccctgaccgccaccatggcccccgagagagccgtgaccagcggccccggcgacgaggaggacctggccgccgccaccaccgaggagcccctgatcaccgccggcggcgaggagagcggcagccccccccccgacggcccccccctgcccctgcccaccgtggcccccgagagatggatcacccccgcccagagagagcacgtgggcatgaagggccaggccggccccaagggcgagaagggcgacgccggcgaggagctgcccggcccccccgagcccagcggccccgtgggccccaccgccggcgccgaggccgagggcagcggcctgggctggggcagcgacgtgggcagcggcagcggcgacctggtgggcagcgagcagctgctgagaggcccccccggcccccccggcccccccggcctgcccggcatccccggcaagcccggcaccgacgtgttcatgggcccccccggcagccccggcgaggacggccccgccggcgagcccggcccccccggccccgagggccagcccggcgtggacggcgccaccggcctgcccggcatgaagggcgagaagggcgccagaggccccaacggcagcgtgggcgagaagggcgaccccggcaacagaggcctgcccggcccccccggcaagaagggccaggccggcccccccggcgtgatgggcccccccggcccccccggcccccccggcccccccggccccggctgcaccatgggcctgggcttcgaggacaccgagggcagcggcagcacccagctgctgaacgagcccaagctgagcagccccacccccaccccccagttctacgacttccacctggccatcgtggagctgtag

SEQ ID NO: 309924 - DNA, 4167 bp, Artificial Sequence
  derived and/or modified sequence
atggctcccaggagaaacaatggccaatgttggtgccttctgatgttgctttctgtcagcactccactgcctgccgtcacgcagacacgcggtgctacagagacagcctcacagggccacctggacctcacccagctgattggggttccacttcctagtagtgttagttttgtcactggttatggtggcttcccagcctatagcttcggtccaggagcgaacgtggggcggcctgccaggacgctgattcccagcacctttttcagggatttcgccatctcagtggtggtgaagcctagttcaactaggggcggggttctgttcgctatcactgatgctttccaaaaggttatctacctcggattacgcctaagtggcgttgaggacggacatcaacgtattattctctactacaccgagcccgggagtcacgtctcgcaggaggcagcagctttttccgtgcccgtaatgacccatcgatggaaccggtttgccatgattgtgcagggcgaagaggtcactctgcttgtaaactgtgaggaacactctaggataccgttccaaaggtcctcgcaagccctggccttcgagtcgtccgccggaatatttatggggaatgccggggccaccggactggaacgattcaccggcagcttgcagcagcttaccgtgcacccagatccccgtactccggaagaactgtgtgaccctgaggaatcctccgcatccggcgagacctcaggtctccaggaggctgatggggttgcagagattctggaggccgtcacttacacccaggcctccccaaaagaggccaaggtagagccaatcaatacgcctcccaccccttcctccccctttgaggacatggagctttcaggcgaacctgtgcccgagggcaccctagaaacaactaatatgagcataattcagcacagtagtcccaagcagggttccggcgagatactcaacgatacattggagggagttcactccgtggatggcgaccctattaccgattctggctccggcgctggagcctttctggatatcgccgaggaaaagaatctcgccgctacagcagccggactcgccgaagtgccaatcagcactgccggcgaagccgaagcttcatccgtccccaccggtggacctaccttgagtatgagcacagagaaccccgaagaaggagtcacacccgggccggacaatgaggagaggctggccgctacagccgccggcgaggcggaagccctggcgtctatgccaggagaagtggaggcctccggggtggctccaggggaacttgatctatcaatgtccgcccaatctctgggcgaagaagccaccgttggaccatcttctgaggactccctcaccactgccgctgcagcgacggaagtttctctgagcactttcgaggatgaggaagcctccggggtcccgacagatggcctggctcctctgacagccactatggcccccgaacgagccgtgaccagcggacctggagatgaagaagacttagctgcagcgacaacggaggagcccttgattactgcaggcggcgaggagtcgggctcacccccccctgacggcccgccactgcccctgccaacagtggcgcccgagagatggatcacacctgcccagcgggagcatgtgggtatgaagggccaggcgggtcctaagggggaaaaaggggatgcgggagaagagttacctggcccccctgaaccaagcggaccggtggggcccacagccggggctgaagccgagggctctggactggggtggggttctgatgtgggatccggctccggtgatttggtggggtccgagcagctgctcagaggaccccctggccctccgggtccacccgggctgcccggcatccccggtaagcccgggactgatgtatttatgggtccaccaggcagccccggcgaggatgggcccgccggcgaacccgggcccccagggcccgagggccagccaggagtggacggcgcaactggcctgcctggcatgaagggggaaaagggggctcgcggccctaatggctccgtaggggagaaaggtgatcctggaaaccgtggactgcccgggccgccaggcaaaaagggccaggccggcccacctggggtaatggggccgccaggacctcccggaccccctggacctcctggtcccggttgtaccatgggcttaggtttcgaggacactgagggatctggctcaacccaactcctgaacgagcccaaactgagccggcccactgccgcaatcgggttgaaaggagagaaaggcgataggggccctaagggggaacgcggcatggacggggccagtatcgtgggaccccctggtccaagaggaccccccggtcatattaaagttctttccaatagcctcatcaacatcacccacggcttcatgaattttagcgacatccccgagctggtggggccacccgggccagatggtcttccgggcttgccgggttttcccggccctcgggggccaaaaggcgacaccggcttacctggctttcccggcctaaaaggcgaacagggcgagaaaggggaacccggtgctatcctcacagaggacattcctctggagcgcctgatgggaaagaagggagagcctggaatgcacggggcccccggaccaatgggtccaaagggaccccctggacataaaggcgaattcgggctacctgggcggcccgggcgcccgggcctgaacggattaaaagggaccaagggagatccaggagttattatgcagggaccacctggactgcctggaccacccggaccacccggccccccaggcgcagttatcaacattaagggagctatctttcctattcccgtccgcccccactgcaaaatgcctgtagatactgcgcaccccggaagcccagagctcatcacatttcacggagtcaaaggcgagaagggttcctggggtctgcctggcagcaagggcgaaaagggcgatcaaggggctcagggacctccagggccccctctggaccttgcctatctaaggcacttcctgaataacctcaaaggagaaaacggagataaaggcttcaagggtgagaagggtgagaagggtgatatcaatggaagctttttgatgagcggtcctcctgggctgcccggcaacccaggaccggcagggcagaaaggcgagaccgtggtcggacctcaaggcccacctggagcaccagggctaccggggcctcccggatttggccgtcctggcgatcctgggcctcccggacctcctgggccgccaggcccgcccgcaattctgggcgcagcggtcgccctgccgggcccgcccgggcccccaggccagcctggccttccaggatctaggaacctcgtgacagccttttcgaacatggacgatatgttgcagaaagcgcatctggtaatcgaaggaacgttcatttatttacgggactccaccgagttcttcattagggtaagggatggctggaaaaaactgcagttgggtgaactcattcctatcccagcagattccccgccacctccagccctaagcagtaatccccaccagctcctgccccctccgaatcctatctcatcagccaactatgagaagccggctcttcacttagccgcactgaacatgccatttagtggagatattcgggccgacttccaatgtttcaagcaggctcgagccgccgggttattgtctacatacagagcattcctctcaagccacctgcaggacctctcaactattgtgagaaaggccgaaaggtatagcctccctatcgtcaacctgaagggacaggtgctcttcaacaactgggactcaatttttagcggccacgggggccagtttaacatgcacataccgatctacagcttcgatggcagagatattatgacggatccctcttggccccagaaagtgatatggcacggatcgtcacctcacggagttaggctagtggacaactactgtgaagcctggagaacggctgatactgcagtaaccggcctggcaagtcctctctccacaggtaagatccttgatcagaaagcctacagttgtgctaatcggctaatagtcctctgcatcgaaaattcctttatgactgatgcgaggaaatag

SEQ ID NO: 309925 - DNA, 2238 bp, Artificial Sequence
  derived and/or modified sequence
atggctccacgaagaaacaacggccagtgctggtgtctgttaatgctgctgtctgtccctctcccttcgagtgtgagtttcgttaccggctacggaggatttcccgcatacagcttcgggcctggggcaaatgtggggcgccctgctcggacgctgatccccagtacttttttcagagactttgccatttccgtcgtggttaagccctcatccactcgaggcggtgtattattcgccattactgacgcattccagaaagtcatttatctcgggctcaggctgtccggtgtggaagatggtcatcagcggattatcttgtattacacagagcccggctcccacgtgtcccaggaggcagctgctttttccgtgccagtcatgacccacagatggaatcgttttgctatgatcgtgcaaggagaggaggttacactgctggtaaactgcgaagaacattccagaatccctttccagaggtctagtcaggcactggcatttgagtcctccgcaggcatttttatgggtaatgctggggccactgggctagagcgcttcactgggagtctgcagcaactaaccgtgcaccccgaccctcgtacaccagaagagctttgcgacccagaagaatcaagtgcaagtggagaaacctctggtctgcaagaggctgatggggtcgccgaaattttggaggctgtaacctatacacaggctagtcccaaggaggccaaagtcgagccaatcaatacaccacccaccccaagctccccgttcgaggatatggagctgagcggagaaccggttccagaaggcaccttagagactacgaatatgtcgattatccagcacagtagcccaaaacaaggttctggagagattcttaacgataccctcgaaggagttcactcggtggatggggaccctatcactgattccggcagtggcgcgggggcattccttgatatcgcagaggagaagaatttggctgccacagcagcgggcctagccgaggtgcccatctctaccgcgggcgaggctgaggcttcaagtgtgccaacagggggtccaaccctgtctatgtccacggagaatccagaggaaggggttactccgggcccagacaacgaggagcgtctcgctgccaccgctgcaggtgaggccgaggctctcgccagcatgccaggagaggtcgaagcctcaggcgttgctccaggcgagctggatctgagtatgagcgctcaatctctcggcgaagaagccacagtcggcccaagcagtgaggattccttaacgaccgctgccgctgccactgaagtatccctgtcaacgttcgaagacgaagaggcatcaggtgtgcccactgatggtttagccccattgaccgcgaccatggctccagaaagagctgtaacctctggaccgggagacgaagaagacttagccgccgcaaccacagaagaacctctaataactgccggtggagaggaatctggctccccaccacccgacggacctcctctgcctttaccaactgttgcccccgaaaggtggataactcctgcacaacgggagcacgtggggatgaagggacaagccggccccaaaggagaaaaaggcgacgccggcgaagagctccccggcccccccgaacctagcggcccagtcggccccacagcaggcgcagaagccgaagggtctggacttggatgggggtccgacgtgggctccggatccggcgaccttgtgggttccgagcagttgttaagaggtccgcccggaccccctgggccaccaggcctccccggtattcctggcaagcctggaactgacgtgttcatgggcccgccaggatcaccgggggaagacggaccagccggggagccaggtcctcccgggcctgaaggccagcctggagtggatggagctacagggctgcccggcatgaagggagagaagggggctaggggcccaaacgggagcgtcggtgagaagggagatcctggaaaccgcgggttgcctggcccaccaggaaaaaaagggcaggccgggccccctggtgtgatgggccccccgggaccacccggtcccccaggaccacccggacctggctgtaccatgggcctcgggtttgaagacactgaaggatccggatccactcaactcctgaacgagccgaagctttccagtcccactcccaccccacagttttatgattttcacctcgccatcgtggagctctag

SEQ ID NO: 309926 - DNA, 4167 bp, Artificial Sequence
  derived and/or modified sequence
atggcccccaggagaaataatggccagtgctggtgcctgctgatgctgctgtctgtgtccacccccctgcctgctgtgacccagaccaggggggccacagaaacagccagccagggccacctggacctgacccagctgattggagtgcccctgcccagctctgtgtcctttgtgacaggctatggaggcttccctgcctacagctttggacctggggccaacgtgggccggcctgcccggaccctcatccccagcaccttcttccgggactttgccatctctgtggtggtgaagcccagcagcacccggggcggcgtgctgtttgccatcacagatgccttccagaaggtgatctacctgggcctgcggctgtctggagtggaggatggccaccagaggatcatcctgtactacacagagcccggcagccacgtgtcccaggaggccgccgccttctctgtgcctgtgatgacccaccgctggaacagatttgccatgattgtgcagggcgaggaggtgaccctgctggtgaactgtgaggagcacagccgcatccccttccagaggagcagccaggccctggcctttgagagcagcgctggcatcttcatgggaaatgctggggccaccggcctggagcgcttcaccggcagcctgcagcagctgactgtgcacccagaccccaggaccccagaggagctgtgtgaccctgaggagagcagcgccagcggggagaccagcggcctgcaggaggctgatggagtggccgagatcctggaggccgtgacctacacccaggccagccccaaggaggccaaggtggagcccatcaacaccccacccacccccagcagcccctttgaggacatggagctgtctggagagcctgtgcctgagggcaccctggagaccaccaacatgagcatcatccagcacagcagccccaagcagggcagcggggagatcctgaatgacaccctggagggcgtgcacagcgtggatggagaccccatcacagattctggcagcggggccggggccttcctggacattgctgaggagaagaacctggccgccacagctgctggcctggccgaggtgcccatcagcacagctggggaggccgaggccagctctgtgcccaccggcggccccaccctgtccatgagcacagagaaccctgaggagggcgtgaccccaggccctgacaatgaggagcggctggccgccacagctgctggggaggccgaggccctggcctccatgcctggagaggtggaggccagcggcgtggcccctggagagctggacctgtccatgtctgcccagagcctgggggaggaggccaccgtgggccccagcagcgaggacagcctgaccacagctgctgctgccacagaggtgtccctgagcacctttgaagatgaggaggccagcggcgtgcccacagatggcctggcccccctgacagccaccatggcccctgagagagctgtgaccagcggccctggagatgaggaggacctggccgccgccaccacagaggagcccctcatcacagctggaggagaggagagcggcagccccccaccagatggcccccccctgcccctgcccaccgtggcccctgagcgctggatcaccccagcccagcgggagcacgtgggcatgaagggccaggccggccccaagggggagaagggagatgctggggaggagctgcccggccccccagagcccagcggccctgtgggccccacagctggagctgaggccgagggcagcggcctgggctggggcagtgatgtgggcagcggcagcggggacctggtgggcagcgagcagctgctgcggggccccccaggccccccaggccccccaggcctgcccggcatccctgggaagccaggcacagatgtgttcatgggccccccaggcagccctggagaagatggccctgctggggagcccggccccccaggccctgagggccagcccggggtggatggagccaccggcctgcccggcatgaagggggagaagggggcccggggccccaatggatctgtgggggagaagggggaccccggcaacagaggcctgcccggccccccaggcaagaagggccaggccggccccccaggagtgatgggccccccaggccccccaggccccccaggccccccaggccctggctgcaccatgggcctgggctttgaggacacagagggcagcggcagcacccagctgctgaatgagcccaagctgagccggcccacagctgccatcggcctgaagggggagaagggggaccggggccccaagggggagcggggcatggatggagccagcatcgtgggccccccaggcccccggggccccccaggccacatcaaggtgctgagcaacagcctcatcaacatcacccacggcttcatgaacttcagtgacatccctgagctggtgggccccccaggcccagatggcctgcccggcctgcccggcttccctggcccccggggccccaagggggacaccggcctgcccggcttccctggcctgaagggggagcagggcgagaagggggagcccggggccatcctgacagaggacatccccctggagcggctgatgggcaagaagggggagcccggcatgcatggagcccctggccccatgggccccaagggccccccaggccacaagggggagtttggcctgcccggccggcccggccggcccggcctgaatggcctgaagggcaccaagggggaccccggggtcatcatgcagggccccccaggcctgcccggccccccaggccccccaggccccccaggggccgtcatcaacatcaagggggccatcttccccatccctgtgcggccccactgcaagatgcctgtggacacagcccaccctggcagccctgagctgatcaccttccatggagtgaagggggagaagggctcctggggcctgcccggcagcaagggggagaagggggaccagggcgcccagggccccccaggcccccccctggacctggcctacctgcggcacttcctgaacaacctgaagggagaaaatggagacaagggcttcaagggggagaagggggagaagggggacatcaatggcagcttcctgatgagcggccccccaggcctgcccggcaaccctggccctgctggccagaagggggagaccgtggtgggcccccagggccccccaggggcccctggcctgcccggccccccaggcttcggccggcctggggaccccggccccccaggccccccaggccccccaggccccccagccatcctgggcgctgctgtggccctgcccggccccccaggccccccaggccagcccggcctgcccggcagcaggaacctggtgacagccttcagcaacatggatgacatgctgcagaaggcccacctggtgattgagggcaccttcatctacctgcgggacagcacagagttcttcatccgggtgagagatggctggaagaagctgcagctgggggagctgatccccatcccagctgacagccccccacctccagccctgagcagcaacccccaccagctgctgcccccacccaaccccatcagcagcgccaactatgagaagccagccctgcacctggccgccctgaacatgcccttcagcggggacatccgggctgacttccagtgcttcaagcaggcccgggccgccggcctgctgagcacctaccgggccttcctgagcagccacctgcaggacctgagcaccatcgtgaggaaggccgagcgctacagcctgcccatcgtgaacctgaagggccaggtgctcttcaacaactgggacagcatcttcagcggccacggcggccagttcaacatgcacatccccatctacagctttgatggccgggacatcatgacagaccccagctggccccagaaggtgatctggcacggcagcagcccccacggcgtgcggctggtggacaactactgtgaggcctggaggacagctgacacagctgtgacaggcctggccagccccctgagcacaggcaagatcctggaccagaaggcctacagctgtgccaacagactcatcgtgctgtgcattgaaaattccttcatgacagatgccaggaagtag

SEQ ID NO: 309927 - DNA, 2238 bp, Artificial Sequence
  derived and/or modified sequence
atggcccccaggagaaataatggccagtgctggtgcctgctgatgctgctgtctgtgcccctgcccagctctgtgtcctttgtgacaggctatggaggcttccctgcctacagctttggacctggggccaacgtgggccggcctgcccggaccctcatccccagcaccttcttccgggactttgccatctctgtggtggtgaagcccagcagcacccggggcggcgtgctgtttgccatcacagatgccttccagaaggtgatctacctgggcctgcggctgtctggagtggaggatggccaccagaggatcatcctgtactacacagagcccggcagccacgtgtcccaggaggccgccgccttctctgtgcctgtgatgacccaccgctggaacagatttgccatgattgtgcagggcgaggaggtgaccctgctggtgaactgtgaggagcacagccgcatccccttccagaggagcagccaggccctggcctttgagagcagcgctggcatcttcatgggaaatgctggggccaccggcctggagcgcttcaccggcagcctgcagcagctgactgtgcacccagaccccaggaccccagaggagctgtgtgaccctgaggagagcagcgccagcggggagaccagcggcctgcaggaggctgatggagtggccgagatcctggaggccgtgacctacacccaggccagccccaaggaggccaaggtggagcccatcaacaccccacccacccccagcagcccctttgaggacatggagctgtctggagagcctgtgcctgagggcaccctggagaccaccaacatgagcatcatccagcacagcagccccaagcagggcagcggggagatcctgaatgacaccctggagggcgtgcacagcgtggatggagaccccatcacagattctggcagcggggccggggccttcctggacattgctgaggagaagaacctggccgccacagctgctggcctggccgaggtgcccatcagcacagctggggaggccgaggccagctctgtgcccaccggcggccccaccctgtccatgagcacagagaaccctgaggagggcgtgaccccaggccctgacaatgaggagcggctggccgccacagctgctggggaggccgaggccctggcctccatgcctggagaggtggaggccagcggcgtggcccctggagagctggacctgtccatgtctgcccagagcctgggggaggaggccaccgtgggccccagcagcgaggacagcctgaccacagctgctgctgccacagaggtgtccctgagcacctttgaagatgaggaggccagcggcgtgcccacagatggcctggcccccctgacagccaccatggcccctgagagagctgtgaccagcggccctggagatgaggaggacctggccgccgccaccacagaggagcccctcatcacagctggaggagaggagagcggcagccccccaccagatggcccccccctgcccctgcccaccgtggcccctgagcgctggatcaccccagcccagcgggagcacgtgggcatgaagggccaggccggccccaagggggagaagggagatgctggggaggagctgcccggccccccagagcccagcggccctgtgggccccacagctggagctgaggccgagggcagcggcctgggctggggcagtgatgtgggcagcggcagcggggacctggtgggcagcgagcagctgctgcggggccccccaggccccccaggccccccaggcctgcccggcatccctgggaagccaggcacagatgtgttcatgggccccccaggcagccctggagaagatggccctgctggggagcccggccccccaggccctgagggccagcccggggtggatggagccaccggcctgcccggcatgaagggggagaagggggcccggggccccaatggatctgtgggggagaagggggaccccggcaacagaggcctgcccggccccccaggcaagaagggccaggccggccccccaggagtgatgggccccccaggccccccaggccccccaggccccccaggccctggctgcaccatgggcctgggctttgaggacacagagggcagcggcagcacccagctgctgaatgagcccaagctgagcagccccacccccaccccccagttctatgacttccacctggccatcgtggagctgtag

SEQ ID NO: 309928 - DNA, 4167 bp, Artificial Sequence
  derived and/or modified sequence
atggccccccggcggaacaacggccagtgctggtgcctgctgatgttgctgtcagtgtctacccctcttccggccgttacgcaaacacggggggcaactgagaccgcctcacaagggcacttggatctcacacagctcataggggtgcccctgccaagcagtgtgtcctttgtaaccggttatgggggctttcctgcctattcttttggaccaggggcaaatgtgggcaggcctgcacgcacactcattccatcaactttctttagggactttgcaatatccgtcgtcgtgaagccatcgagcactagagggggcgtattgttcgcgattaccgatgcttttcagaaagtgatctatctcggacttcgtctgtccggcgttgaggacggacatcaaaggatcatactgtattacactgaaccagggtcgcatgtctcccaggaagcagcagctttctccgtcccagtgatgacgcatagatggaatcggtttgccatgatcgtgcaaggggaagaggtgactctcctcgtcaactgtgaagagcacagccgtatccctttccagcggagcagtcaggccttggcattcgagtcttcagcagggatatttatgggaaatgctggcgccaccgggttggaaagatttaccggaagcctgcagcagctcactgtacatcccgatcctagaaccccagaagaactctgcgatcctgaagagtcttcagcgtccggtgagacgagtggcctgcaggaggccgatggagtggccgagattctcgaagcagtcacatatacccaggcctcccctaaagaggccaaggtggagccaatcaacacccctcccacaccctcctcgcccttcgaggacatggaactctccggtgaacccgtgcccgagggtaccctcgagaccacaaatatgtctatcattcagcatagtagtcccaagcagggctccggcgaaatcctcaatgacacactcgagggagttcacagcgtcgacggagatccaataaccgatagcggctctggtgccggggcttttttggatatagcggaggagaagaatctcgccgctaccgctgcaggtttagctgaggtgccaatctctactgccggggaggccgaggcctcctccgttcccaccggcgggcccacactgtccatgtcaaccgagaatccagaggagggtgtcacccctggaccggataacgaggagcgactggctgctacagccgccggcgaggccgaggcactggcgtcaatgcctggcgaggttgaggcatcaggtgtagctcccggagagctggacctgagtatgtccgcacagtcccttggagaagaggcgacggtgggcccatctagtgaggactccttgactaccgccgctgcagccaccgaggtgtccctgagtactttcgaggacgaggaagcatctggggtccccacagatggtctggccccgcttacggccactatggcacccgagagggcggtgacatctggcccgggcgacgaagaagacttggcggcagccactacagaggagcctcttatcacggcaggcggggaagagagcggttctccaccaccggacggaccaccgctccccttgcccacagttgcacctgagaggtggataacccctgcccaacgcgagcacgttgggatgaagggccaggcgggccctaagggggagaagggcgacgccggcgaggagctgcccggacctcctgagccctcagggccggtgggtcctactgctggggccgaagcagaaggttccggacttggctggggctcggatgtggggagcggctccggagacctggtcggctcagagcagctccttagggggcctccgggacctcccggtcccccaggcctgcccgggatcccaggaaagcccggaaccgatgtgttcatgggaccacccggcagtccgggagaggatgggcctgccggcgagccaggcccaccgggtccagagggacagcccggggtagatggggctaccggactgcctggaatgaagggagaaaagggcgccagaggccctaatggctcggttggcgagaagggcgatccagggaaccggggcttgccgggcccccccgggaagaaagggcaggcagggcctcccggagtcatgggcccacctgggcctcctggcccgccgggaccaccaggacccgggtgcacgatgggacttggcttcgaggacactgaggggtctgggtctacccagctactgaacgaacccaaactttccaggccgaccgccgccattggattgaagggcgagaagggagaccgcggtccaaagggcgaaaggggaatggatggagcctccatcgtaggaccaccagggcccagaggaccccctggacacatcaaagtactgtctaactctctcatcaatatcacgcacggctttatgaatttcagtgatatacccgaactggtgggcccaccaggccccgatggactccctggcctccccggcttcccaggacccaggggtccaaagggggatactggactcccaggcttccctggactgaagggcgaacagggtgaaaagggtgagccaggtgcgatccttaccgaggacatacccctcgaaaggttaatgggtaagaagggggaaccaggcatgcacggggcaccagggccaatgggacccaaaggccccccggggcataagggggagttcggattgcctgggcgtcccggacgcccaggtctgaatggactgaaaggcacaaagggggatccaggcgtgatcatgcagggacccccaggcctccctggcccaccaggtccacctgggccaccaggtgccgtgataaacatcaagggggccattttcccgattcccgtcaggccacactgtaagatgcctgtggataccgctcaccccgggagcccagaattaataacgtttcacggggtgaagggtgagaaagggagttggggtttgcccggttctaagggggaaaagggagaccagggtgctcagggaccacccggccctccactggaccttgcatatctgcggcattttttgaacaacttaaagggtgagaacggcgataagggcttcaagggggagaagggcgagaaaggcgatattaatggatccttccttatgtctggcccacccggcctgccaggtaaccctggtcctgctggccaaaagggcgaaactgtggttggcccacagggaccccccggcgctcctgggctccccgggccacctggcttcggaaggccgggtgacccgggaccccctggtcctcccgggccacctggccccccagccattctgggtgcagccgtggcgcttccagggcctcctgggcctccaggccaaccgggactaccagggtctcgtaatcttgtgacagcctttagcaatatggacgatatgctgcagaaagctcacctggtgatcgagggcacctttatctacctgagagattccaccgagttttttatccgagtacgcgacggatggaagaagctgcagctcggcgagctgataccaattcctgctgactctcctccgccccctgcactgtcctcgaacccccatcaactgcttccccctcctaaccccatcagcagcgccaattacgagaagcccgccctgcacttagccgctctgaatatgcccttcagcggtgatatccgggccgattttcaatgttttaaacaggccagagctgccggccttctcagtacatatcgagcatttttgtcttcccatctgcaggacctcagtacaattgtgcgcaaggcagagcgatactcccttccgatcgtgaacctgaaggggcaggtcctgtttaacaactgggattcaatcttctccggccacggcggccagttcaatatgcatattcccatttattccttcgacggacgcgacatcatgactgatccatcttggccccagaaggtcatctggcacggatccagtccccatggagtccgccttgttgacaattattgcgaggcatggagaacggccgacaccgctgtaactggtttagcctcacccctctccacgggaaaaatcctggaccagaaagcgtacagctgcgccaacaggcttattgtgctctgcattgagaactcgttcatgactgatgccagaaagtag

SEQ ID NO: 309929 - DNA, 2238 bp, Artificial Sequence
  derived and/or modified sequence
atggccccccggcggaacaacggccagtgctggtgcctgctgatgcttcttagtgtcccactcccttcgtccgtgtcgttcgtcacagggtatggaggcttcccagcttacagcttcggccccggagccaatgtcggccggcccgctcggacactgattccctctacgttctttcgcgatttcgcaatctccgttgtcgtgaagcccagttcaacacgtggtggcgtgttgttcgcaattaccgacgcttttcagaaagtgatttacttaggactgaggttgtctggggtcgaggatggccaccagaggatcatcttgtactacaccgagccgggctctcacgtgtcccaggaggctgccgcgttttctgtccccgtgatgacacaccgttggaatcggttcgcgatgattgtgcagggggaggaggtcacactgctggtgaactgcgaagaacatagtcggattccctttcagcgctctagtcaggccctggcctttgagagctcggccggcatctttatgggcaacgccggtgccacagggcttgaaagattcacaggcagccttcagcaactgaccgttcatccagaccctcggactccggaagagctctgtgaccctgaagaatcctcggcttctggcgaaacctcagggctgcaggaggctgacggcgtcgctgagatactagaggccgtgacatacacacaggcatcccctaaggaggctaaagtggagcctatcaatactccaccgaccccctcctctcccttcgaagatatggagttgagcggcgaacccgtacccgaggggactctggagacaaccaacatgtccattatacaacacagtagcccaaagcagggtagtggcgagatcctcaacgacacgctggagggggtgcattcagtggatggcgaccctatcacagatagtggatcgggcgcgggagcatttctggacattgcagaagaaaagaaccttgccgcaacagcagctggcctggcagaggtaccaatcagcacagcgggtgaagctgaagcatctagcgtgcctacagggggccctactctttcgatgagcactgaaaatcctgaagagggtgttactcctggtcccgataatgaggagaggttggccgccaccgctgctggagaggccgaggccctggcctcaatgcctggcgaagtcgaagcatcaggtgttgcgcctggggagctagatttatctatgtccgctcagtcactcggtgaggaggcaaccgtggggccttcttccgaggactcactcaccactgctgccgcagctaccgaggtgtccctctccacgtttgaggacgaggaggcttctggggtgcccaccgacggcctcgctcctttgaccgccacaatggccccagagcgggccgtgaccagtgggccaggggacgaagaagacctcgcagccgctaccacggaggaaccgctcataactgcagggggggaggagtccgggagtcctccacctgacgggccccccctgccactaccaactgtggccccggagcgctggattacgccggctcagcgtgagcatgtcggtatgaagggccaagcagggcctaaaggcgaaaagggagatgccggagaagaactgccaggcccacccgaaccatccggaccggtaggccccactgcgggagcggaggcggaggggagcgggctaggctgggggtcggacgtggggagtggttccggcgacctggtggggagcgagcagctgcttcgtgggccccctgggcccccagggcctccaggcttaccaggaattcctggcaagcctggaaccgacgtcttcatgggacccccagggtctcctggtgaagacggaccagccggagaacctggcccgcctggtccagaagggcagccaggggtggacggcgctactgggctgcccggcatgaaaggcgagaagggagctcgtggccctaatggatcagtcggagaaaaaggcgatcccggaaaccgcggcctgcctggcccgcctggtaaaaaagggcaggccgggcctcctggagtgatggggccacctggccccccaggtccgcccgggccacctggcccaggctgtacaatgggactcggcttcgaggacactgaaggttcgggctccacccagttactcaatgagcctaaactttcttctccaacaccgacccctcagttttacgatttccacctggccatagtcgaactgtag

SEQ ID NO: 309930 - DNA, 5491 bp, Artificial Sequence
  derived and/or modified sequence
acaggacagacttaagggcgggagggagcccatcccgcttgccccaacgaacgcgggcgcggggctttcctcgcaggttacataaggcagccgcgggtggaggcagcagaggcgagcgcacgtccgtcgagggggaaaggggcgtggggaggcggccggggcggccggtatcccccgggcgtgagtgcgcagcgcgcgggggagcgcagggcgcggcggagtcgggtttcagagcgcgggtgactcggggcgcgggccgggagccgggattctgcccgccgccgccgctgccgagcgccgcctttgttccctgcaggaagggcgagcgcggcggccagcgctcagcgacccttcgtcctccgctaagctccaacgctctgctcgactagccgcgcgccttccggggctccgcagacccgcgagatggcaccaaggaggaacaacgggcagtgctggtgtctgctgatgctgctctcggtctccacgcccctccctgctgtcacccagacccgcggtgcgacagagactgcttcccagggtcacctggacctcacgcagctcatcggtgtcccgctgccctcgtccgtatcctttgtcacaggctatggtggcttcccggcctacagtttcgggcctggtgccaatgttggccgcccagccaggactctcatcccatccaccttcttcagggacttcgccatcagcgtcgtggtgaagcccagcagcacccgtggtggcgtgctcttcgccatcactgacgccttccagaaggtcatctacctgggcctgcggctctcaggtgtggaggacggccaccagcggatcatcctctactacacggagccaggctcccatgtgtcccaagaggctgctgccttctcggtgcctgtgatgacccacaggtggaaccgcttcgccatgattgtccagggtgaggaagtgaccctcctcgtgaactgtgaggagcacagccgcatccccttccagcggtcctcccaggctttggcttttgagtccagcgctggaatcttcatgggcaatgcaggagctacagggctcgagagattcactggctccctccagcagctcaccgtgcaccccgaccccaggactcccgaggagctgtgtgaccctgaagagtcctcggcatctggagagaccagtgggctgcaggaggcagacggagtagctgagatcttagaagccgtcacctacactcaagcctcgcccaaagaagcaaaagttgaacccataaacacacctccaactccatcctccccctttgaagacatggaactttctggtgaacctgtacccgaggggaccctggaaaccaccaacatgagcatcatccagcacagcagccccaaacaagggtctggtgagatcctgaatgacacactggagggggttcattctgtggatggtgaccccattactgacagcggctcaggggctggggccttccttgacattgctgaagaaaagaatttagcagcaacagcagcggggctggccgaggtgcccatcagcactgctggagaagcagaggccagcagtgtgcccaccgggggaccaaccctctctatgtccacggagaacccagaggaaggggtcactccaggtccagataatgaagagcgtttagcagcaacagcagcaggggaggccgaggcactcgccagcatgcctggggaagtggaggccagtggtgtggcccccggggagctggacctctccatgtccgcccagagcctcggggaagaggccactgtgggtccaagcagtgaagacagtttaacaacagctgcagctgcaaccgaagtgtccctcagtacttttgaggatgaggaagccagtggggtccccacagatggcctggctcccctcacagccaccatggcccctgagcgggcagtcacttctggtcctggtgatgaagaagacttggcagcagccacaacagaggagcccctcatcacagctgggggtgaagagtccggcagccctccccctgatgggccaccgctgcccctgcccacagtggctcctgaaagatggatcactccagctcaaagagaacatgtgggaatgaaaggacaggctgggcccaaaggagaaaagggtgatgctggggaggagcttcctggccctcctgaaccttctgggcctgttggacccacggcaggagcagaagcagagggctctggcctaggctggggctcggacgtcggctctggctctggtgacctggtgggcagtgagcagctgctgagaggtcctccaggacccccagggccacctggcttacctgggattccaggaaaaccaggaactgatgttttcatgggaccccctggatctcctggagaggatggacctgctggtgaacctgggcccccgggccctgagggacagcctggagttgatggagccaccggccttcccgggatgaaaggggagaagggagcaagagggcctaatggctcagttggtgaaaagggtgaccctggcaacagaggcttacctggacccccggggaaaaagggacaagctggccctcctggggtcatgggacccccagggcctcctggaccccctgggcccccaggccctggatgcacaatgggacttggattcgaggataccgaaggctctggaagcacccagctattgaatgaacccaaactctccagaccaacggctgcaattggtctcaaaggagagaaaggagaccggggacccaagggagaaagggggatggatggagccagtattgtgggaccccctgggccgagagggccacctgggcacatcaaggtcttgtctaattccttgatcaatatcacccatggattcatgaatttctcggacattcctgagctggtggggcctccggggccggacgggttgcctgggctgccaggatttccaggtcctagaggaccaaaaggtgacactggtttacctggctttccaggactaaaaggagaacagggcgagaagggagagccgggtgccatcctgacagaggacattcctctggaaaggctgatggggaaaaagggtgaacctggaatgcatggagccccaggaccaatggggcccaaaggaccaccaggacataaaggagaatttggccttcccgggcgacctggtcgcccaggactgaatggcctcaagggtaccaaaggagatccaggggtcattatgcagggcccacctggcttacctggccctccaggcccccctgggccacctggagctgtgattaacatcaaaggagccattttcccaatacccgtccgaccacactgcaaaatgccagttgatactgctcatcctgggagtccagagctcatcacttttcacggtgttaaaggagagaaaggatcctggggtcttcctggctcaaagggagaaaaaggcgaccagggagcccagggaccaccaggtcctccacttgatctagcttacctgagacactttctgaacaacttgaagggggagaatggagacaaggggttcaaaggtgaaaaaggagaaaaaggagacattaatggcagcttccttatgtctgggcctccaggcctgcccggaaatccaggcccggctggccaaaaaggggagacagtcgttgggccccaaggacccccaggtgctcctggtctgcctgggccacctggctttggaagacctggtgatcctgggccaccggggcccccggggccaccaggacctccagctatcctgggagcagctgtggcccttccaggtccccctggccctccaggacagccagggcttcccggatccagaaacctggtcacagcattcagcaacatggatgacatgctgcagaaagcgcatttggttatagaaggaacattcatctacctgagggacagcactgagtttttcattcgtgttagagatggctggaaaaaattacagctgggagaactgatccccattcctgccgacagccctccaccccctgcgctttccagcaacccacatcagcttctgcctccaccaaaccctatttcaagtgccaattatgagaagcctgctctgcatttggctgctctgaacatgccattttctggggacattcgagctgattttcagtgcttcaagcaggccagagctgcaggactgttgtccacctaccgagcattcttatcttcccatttgcaagatctgtccaccattgtgaggaaagcagagagatacagccttcccatagtgaacctcaagggccaagtactttttaataattgggactcaattttttctggccacggaggtcagttcaatatgcatattccaatatactcctttgatggtcgagacataatgacagatccttcttggccccagaaagtcatttggcatggctccagcccccatggcgtccgccttgtggataactactgtgaagcatggcgaaccgcggacacagcggtcacgggacttgcctccccgctgagcacggggaagattctggaccagaaagcatacagctgtgctaatcggctaattgtcctatgtatcgaaaacagtttcatgacagacgctaggaagtaatggccttctgatgattcttaaagagttttcaattttttcttatgtgaagagttgacactgaaatctaaaatgtttaattgttgtaaatattacagttttttttttttactacatattctttacaacagcaaccaaagaaaacatacctcaatacactcaaaactgaagacatagaggactcagatcaaagacaaaatctgatccatatattggtgctagattctgcaggaaaccccagcagtgtgaacgcatcccaacataggttaagagcaagttgaaaacaaaggccatggcattctgccactgcatccttcagacagttatatcctccttttaaaccattgttgttgagtgtaagatgtccttcatgttttcttataaagtcagtgtttagaaatgttaccctttctaagttatatacagatcaaatgcttttttctttcacgtacatccatcatttgcaactgctgttcgtacacagaaacaggactgctcaaatgatcctatttgtattttctgatgctatcagactctaatgtttttttccctaaaatattattgccatcatgctttaggaattttatatttttacacaatcatattttagtatggtgtctgtttatgtaactctgacttgctggaaaagttgaaactccaaataatctgaaactagaaaagaaatagcacataattactaccttccccttggcggctctcctccccaacccccaccccacaattttatgacttccatttggcaattgttgaattataactgcgactgaaacaaacaggttcatagagatgaattttctgagaaacatatatctacatgttgtataattggattttttttccatgtaagtgaacataaaaacatcttttccgggtgctttcttca

SEQ ID NO: 309931 - DNA, 2508 bp, Artificial Sequence
  derived and/or modified sequence
attctgcccgccgccgccgctgccgagcgccgcctttgttccctgcaggaagggcgagcgcggcggccagcgctcagcgacccttcgtcctccgctaagctccaacgctctgctcgactagccgcgcgccttccggggctccgcagacccgcgagatggcaccaaggaggaacaacgggcagtgctggtgtctgctgatgctgctctcagtcccgctgccctcgtccgtatcctttgtcacaggctatggtggcttcccggcctacagtttcgggcctggtgccaatgttggccgcccagccaggactctcatcccatccaccttcttcagggacttcgccatcagcgtcgtggtgaagcccagcagcacccgtggtggcgtgctcttcgccatcactgacgccttccagaaggtcatctacctgggcctgcggctctcaggtgtggaggacggccaccagcggatcatcctctactacacggagccaggctcccatgtgtcccaagaggctgctgccttctcggtgcctgtgatgacccacaggtggaaccgcttcgccatgattgtccagggtgaggaagtgaccctcctcgtgaactgtgaggagcacagccgcatccccttccagcggtcctcccaggctttggcttttgagtccagcgctggaatcttcatgggcaatgcaggagctacagggctcgagagattcactggctccctccagcagctcaccgtgcaccccgaccccaggactcccgaggagctgtgtgaccctgaagagtcctcggcatctggagagaccagtgggctgcaggaggcagacggagtagctgagatcttagaagccgtcacctacactcaagcctcgcccaaagaagcaaaagttgaacccataaacacacctccaactccatcctccccctttgaagacatggaactttctggtgaacctgtacccgaggggaccctggaaaccaccaacatgagcatcatccagcacagcagccccaaacaagggtctggtgagatcctgaatgacacactggagggggttcattctgtggatggtgaccccattactgacagcggctcaggggctggggccttccttgacattgctgaagaaaagaatttagcagcaacagcagcggggctggccgaggtgcccatcagcactgctggagaagcagaggccagcagtgtgcccaccgggggaccaaccctctctatgtccacggagaacccagaggaaggggtcactccaggtccagataatgaagagcgtttagcagcaacagcagcaggggaggccgaggcactcgccagcatgcctggggaagtggaggccagtggtgtggcccccggggagctggacctctccatgtccgcccagagcctcggggaagaggccactgtgggtccaagcagtgaagacagtttaacaacagctgcagctgcaaccgaagtgtccctcagtacttttgaggatgaggaagccagtggggtccccacagatggcctggctcccctcacagccaccatggcccctgagcgggcagtcacttctggtcctggtgatgaagaagacttggcagcagccacaacagaggagcccctcatcacagctgggggtgaagagtccggcagccctccccctgatgggccaccgctgcccctgcccacagtggctcctgaaagatggatcactccagctcaaagagaacatgtgggaatgaaaggacaggctgggcccaaaggagaaaagggtgatgctggggaggagcttcctggccctcctgaaccttctgggcctgttggacccacggcaggagcagaagcagagggctctggcctaggctggggctcggacgtcggctctggctctggtgacctggtgggcagtgagcagctgctgagaggtcctccaggacccccagggccacctggcttacctgggattccaggaaaaccaggaactgatgttttcatgggaccccctggatctcctggagaggatggacctgctggtgaacctgggcccccgggccctgagggacagcctggagttgatggagccaccggccttcccgggatgaaaggggagaagggagcaagagggcctaatggctcagttggtgaaaagggtgaccctggcaacagaggcttacctggacccccggggaaaaagggacaagctggccctcctggggtcatgggacccccagggcctcctggaccccctgggcccccaggccctggatgcacaatgggacttggattcgaggataccgaaggctctggaagcacccagctattgaatgaacccaaactctcctccccaacccccaccccacaattttatgacttccatttggcaattgttgaattataactgcgactgaaacaaacaggttcatagagatgaattttctgagaaacatatatctacatgttgtataattggattttttttccatgtaagtgaacataaaaacatcttttccggg

SEQ ID NO: 309932 - DNA, 4167 bp, Artificial Sequence
  derived and/or modified sequence
atggctccacggaggaataacggacagtgttggtgcctgctcatgctactgtccgtctctactcccctacctgctgtcacccaaacccgcggagcaacagagactgcttcacaaggacacctcgatctaacacagcttatcggagtgcccttaccctcctctgtcagcttcgtgacgggctacggcggatttcctgcatacagctttggacccggtgccaatgtgggccgtcctgccagaacgttgattccttctacgtttttccgtgattttgccatttctgtcgtggtgaagccctcatctaccagaggcggagtcttgtttgcaattaccgatgcattccagaaggtgatttatctgggactgagactctcaggcgtcgaagacggtcatcaacgtatcatcctatattatacagagcccggatcgcacgtgagtcaggaagcagcggcttttagcgtgcctgtcatgacccatcggtggaatcggttcgccatgatcgtccagggtgaggaagtcaccctgctggtgaattgcgaggagcattcaagaattccattccagcgcagctcacaggctctggcatttgaaagtagtgcaggaatctttatgggcaacgcaggcgctactggtttggagcgatttaccggatcgctgcagcagctaacagtgcatcccgatccacgaacccccgaggagctttgcgaccctgaagagtcatccgcgtccggcgagacatccggcctccaagaggccgacggagtcgccgagattctggaggccgtcacatacacgcaggccagccccaaagaggctaaagtggagcccattaatacacctcccaccccttcctctcctttcgaggacatggagttgtctggagaaccggtaccggaagggacactggaaacgaccaatatgagtatcatccaacattcgagccccaagcaaggatctggcgagattctgaatgacaccctggaaggggtgcatagcgttgatggtgaccctataacagattctggctccggtgctggcgcatttctggacattgcagaagaaaagaacctggcagctaccgctgctggtcttgccgaggttcctattagcactgcgggtgaagccgaagcttccagtgttccaactggaggaccaacgctgtctatgagcactgagaatccagaagagggggtaactcccggtccagataatgaagagcgcctggccgctacagctgctggtgaagctgaagctctcgccagtatgccgggagaagtggaggcctcgggggtcgcacctggagagctggacttgagcatgtccgcgcagtcactgggcgaagaagccaccgtagggccaagtagcgaggactcgctaacgaccgctgctgctgcaacagaagtgtctttgtctactttcgaagatgaggaagcgagtggagttcccactgacggtctcgcacccctgactgcaaccatggcaccagagagagcggttacgtctggccctggcgacgaagaggacctcgccgcagctactactgaagaaccactgatcaccgccggtggcgaggaaagcgggtcccctccacctgatggacctcccctgcctctccccactgtggccccagagcgttggattacgccggcacaacgagaacatgtgggtatgaagggacaggcagggcctaagggggaaaaaggtgatgcaggcgaagagctgcccggtcccccagaacctagcgggccagtaggtccaaccgccggtgctgaggccgagggttcaggtctggggtgggggagcgatgtgggcagcgggtctggcgaccttgtgggttcagaacaactgctgcgcggtcctcctggcccacctggcccaccagggttgcccggaattccaggaaaacctggaaccgacgtcttcatgggacccccagggtcaccaggcgaagatggacctgccggtgaacccggtcctccaggacctgagggccagcctggagtagacggcgcaaccggtctccctggcatgaaaggagaaaaaggagcccgagggccaaatggtagcgttggtgagaagggtgaccctggcaatcgagggctcccaggccctccagggaaaaaaggacaagcgggaccacctggggtgatgggccctccagggcctccaggtccccctggcccacccggtcctggctgcactatggggcttgggtttgaggatacagaaggtagtggtagtacccaactgctgaacgaacccaagctgtctaggcctactgccgcaattggccttaaaggagaaaaaggggaccggggacctaagggtgagcggggaatggacggggcaagtattgtgggtccccctggacctcggggaccccctggacacataaaggtgctgagcaattccctgatcaatatcacccacgggtttatgaatttctcagatattccggagttggttggaccacctgggccagacgggctaccagggttaccgggatttcctggaccaaggggccctaagggtgatacagggcttcctggcttcccgggtctaaaaggcgagcaaggcgagaaaggcgaacctggggcaattctcaccgaagacatccctctggaaaggctcatgggaaagaaaggcgaacccggaatgcacggtgctcctggcccaatgggtccaaagggcccacccggtcacaaaggagagttcggtctgcccggtagacccggaaggccaggccttaatggattaaaggggacaaagggagacccgggagtcattatgcagggacccccagggctcccgggacctccaggcccacccggaccacccggtgcagtcatcaatattaagggcgctattttccctatcccagttcggcctcactgtaagatgccagtggacaccgcccaccccggaagtccagagctgattacctttcatggagtcaagggggagaagggaagctgggggctccccggttcaaaaggggagaaaggtgaccagggagcccaggggcctcccggtcctccactcgatctcgcatatttgcgccacttcctgaataacctgaagggcgagaatggagataaggggttcaaaggcgagaaaggcgaaaaaggagacattaacggctcgtttttaatgagtggcccaccaggtctacctgggaatcccggacccgcaggacaaaagggggaaacggtggtggggcctcagggacccccaggcgcaccaggcttgcccggaccacccggattcggacgcccaggagacccagggcctccaggtcccccaggtccgcctgggccacctgctatactcggggcagccgtggccttacccggacccccaggtccccctggacagcccggactcccaggctcaaggaatcttgtcactgccttctctaatatggatgacatgctgcagaaggcacatctggtgattgagggaacattcatctacctgagagactccacggagtttttcatccgcgtaagggatggttggaaaaagctccagctgggcgagctcattcccatccccgctgattcaccaccccctcccgcactaagctccaacccccaccagcttctccctcccccaaatccaatcagctccgcgaattacgagaaacctgcactccacttagcggctctgaacatgcctttctcgggtgatatcagagctgactttcagtgctttaaacaagcccgtgctgctggcctgctcagcacctacagagcctttctgagctctcacctgcaggatctgagcacgatagtgagaaaagctgaaaggtacagtttaccgatcgttaatctcaaaggccaggtgctttttaacaactgggacagcatttttagcgggcacggcggacagttcaatatgcacataccaatttatagtttcgacggaagagacattatgacagacccctcgtggccacagaaagtgatctggcacggttcatccccccatggtgtccgactggtcgacaattactgtgaagcatggcgcaccgcagacacggccgttacaggcttggcaagtcccctatccaccggcaaaattctggaccagaaggcatattcttgcgctaataggcttatagtgctgtgtattgagaatagtttcatgaccgacgcccgaaaatag

SEQ ID NO: 309933 - DNA, 2238 bp, Artificial Sequence
  derived and/or modified sequence
atggcgccaaggcgtaacaacggacaatgttggtgcttacttatgctactgtcagtgccacttccaagctcagtgtcattcgtaacaggatatggaggtttccctgcatacagcttcgggccaggtgctaacgtgggtcgccctgccaggacgcttataccctcaactttcttcagggacttcgctataagtgtcgtagtcaaacccagttcgacacgcggaggggttctgtttgctattacagatgcgtttcaaaaagtcatttacttggggcttcggctatcaggggtggaggacggccatcagcggatcatcctgtactacaccgaacctggctcccatgtaagtcaagaagctgccgctttcagtgtgcccgtcatgacacatcggtggaacaggttcgcaatgatcgtgcagggggaggaggtcaccctcctcgttaactgtgaggaacacagccggatcccctttcagcgcagttcacaggctctggcctttgaatcctccgctggaatctttatggggaacgccggtgctactggcctcgaacgatttacggggtcacttcagcagcttaccgtgcaccctgaccctcgaaccccggaagagctatgtgacccagaggaatcgagcgcctccggggagacgagtggcctccaagaagcagacggggtggccgaaatactcgaagctgtgacctatactcaggcctcgcctaaggaggccaaggtggagcctatcaataccccacctacaccttctagcccctttgaggacatggagctgtctggagaacccgtcccagaaggtacactcgaaacaaccaacatgtccatcatccaacacagtagccctaagcaaggtagtggggagattctcaatgacaccctggagggagtccactccgtagatggtgatcccattacggatagtggctccggagcaggagcctttttggacatcgccgaggaaaagaacttagccgctactgccgcaggccttgcggaggtgccaatatccacagccggagaagccgaagctagcagtgtccctaccggaggcccaacactgtcaatgagcaccgagaacccagaagagggagttacccctggtcctgataacgaagaacggttagcagcaaccgccgcaggggaagccgaggctcttgcatcaatgcccggagaagtggaggcgtctggagtagcacccggagaacttgacctctctatgagcgctcagtcgctcggcgaggaggcgacagttgggccatcctctgaggatagtttgaccacagcagcggctgctaccgaagtctcactctcgacattcgaggatgaagaagcttcaggcgtgcctaccgatggactcgccccattgacagcgaccatggctcccgagcgcgcagtcacttccggccctggagatgaagaagacttggccgctgcgaccaccgaagaacctctgattacagctgggggtgaggaatctgggagccctccgccagatggtcctccgctgccattacctactgtggcccctgagcgctggatcacccccgcacaacgcgagcatgtcggcatgaagggtcaagcaggacccaaaggagagaaaggcgacgccggagaggaattgccgggtcctccggagccatcaggccctgtgggccctacggcaggagccgaggccgaaggctcgggtctgggatggggttcggacgtgggttccggatccggagaccttgtggggtcagagcagctcctcagaggccctcctggaccgccagggcctcccggtctaccaggtatcccaggaaagcctggaaccgatgtgttcatgggccctccagggagtccaggagaagacgggcctgccggtgagccagggccacctggtccagaggggcagccaggtgtggatggggctacaggccttcccggaatgaagggagaaaagggggctagaggcccaaatggtagcgtaggggaaaaaggagatcctggtaaccgaggactgcccggaccacctggcaagaagggccaggccggaccaccaggggtgatgggacctcctgggccacccggaccgccaggtcccccagggcctggctgcacaatgggtctggggtttgaggacactgagggctccggtagcacccagctgctcaacgagcctaaactatcatctcctacacccactccacagttttatgatttccatctggcaattgtggagctatag

SEQ ID NO: 309934 - protein, 587 aa, Artificial Sequence
  derived and/or modified sequence
MSQMLHIEIPNFGNTVLGCLNEQRLLGLYCDVSIVVKGQAFKAHRAVLAASSLYFRDLFSGNSKSAFELPGSVPPACFQQILSFCYTGRLTMTASEQLVVMYTAGFLQIQHIVERGTDLMFKVSSPHCDSQTAVIEDAGSEPQSPCNQLQPAAAAAAPYVVSPSVPIPLLTRVKHEAMELPPAGPGLAPKRPLETGPRDGVAVAAGAAVAAGTAPLKLPRVSYYGVPSLATLIPGIQQMPYPQGERTSPGASSLPTTDSPTSYHNEEDEEDDEAYDTMVEEQYGQMYIKASGSYAVQEKPEPVPLESRSCVLIRRDLVALPASLISQIGYRCHPKLYSEGDPGEKLELVAGSGVYITRGQLMNCHLCAGVKHKVLLRRLLATFFDRNTLANSCGTGIRSSTSDPSRKPLDSRVLNAVKLYCQNFAPSFKESEMNVIAADMCTNARRVRKRWLPKIKSMLPEGVEMYRTVMGSAAASVPLDPEFPPAAAQVFEQRIYAERRGDAATIVALRTDAVNVDLSAAANPAFDAGEEVDGAGSVIQEVAAPEPLPADGQSPPQPFEQGGGGPSRPQTPAAAARRPEGTYAGTL

SEQ ID NO: 309935 - DNA, 2103 bp, Artificial Sequence
  derived and/or modified sequence
aaagtccatgggagccggagcgccgggacgccaagcacttcctgccgcgggcggcgcgccgcagctgcccaggccggaccgggccgggcgcccgcagatgagccccgctagggccgccccgcgctgagagcccagccccgccgctgcccgcccgccatgtctcagatgctgcacatcgagatccccaacttcgggaacacagtgctgggctgcctgaacgagcagcgcctgctgggcctctactgcgatgtgtccatcgtggtcaagggccaggccttcaaggcccaccgggcggtgctggccgccagcagcctctacttccgcgacctgttcagcggcaacagcaagagcgccttcgagctgcccggctccgtgccgcccgcctgcttccagcagatcctgtccttctgctacacgggcaggctcaccatgacggccagcgagcagctcgtggtcatgtacacggccggcttcctgcagatccagcacatcgtggagcgcggcaccgacctcatgttcaaggtgagctcgccccactgcgactcgcagaccgctgtgatcgaggacgccggctccgagccccagagcccctgcaaccagctgcagccggccgccgccgccgcggccccctacgtcgtgtccccctcggtgcccatcccgctgctgacccgagtaaagcatgaagccatggagctgccgccggccggcccaggcctggcccccaagcgcccgctggagacggggccccgggacggcgtggcggtggccgcgggggctgcggtggcggcgggcacagcccctctcaaactgccccgtgtctcctactacggggtgcccagcctggccaccctcatccccggcatccagcagatgccctacccccagggggagcggaccagtccaggcgccagcagcctgcccaccaccgacagccccacctcgtaccacaacgaggaggacgaggaggacgacgaggcctacgacaccatggtggaggagcagtacggccagatgtacatcaaggcctccggcagctatgcagtgcaagagaagcctgagccagtgccgctggagagccgctcctgcgtcctcatccgccgcgacctcgtggccctacctgccagcctcatcagccagatcggataccgctgccatcccaagctctactcggaaggggaccccggggagaagctggagctggtggcaggctctggggtctacatcacacgcggccagctgatgaactgccacctgtgtgcaggggtgaagcataaggtcttgctgcggaggctcctggccaccttctttgacaggaacacgctggccaacagctgcgggactggcatccgctcgtccaccagcgaccccagccggaagccgctggacagccgggtcctgaacgctgtgaaattgtactgtcagaacttcgcccccagcttcaaggagagcgagatgaacgtgatcgccgcggacatgtgcaccaacgcccgccgcgttcgcaagcgctggctgcccaagatcaagtccatgctgccggagggcgtggagatgtaccgcacggtcatgggctccgccgccgccagcgtgcccctcgaccccgagttcccgcctgccgcggcacaggtgttcgagcaacgcatctacgccgagcggcggggcgacgccgccaccatcgtggctctgagaactgacgccgtgaatgttgacctgagtgccgccgccaaccccgccttcgacgccggcgaggaggtggacggggctggctcggtcatccaggaggtggccgcccccgagccgctgcccgccgatggccagagccccccacagccctttgagcagggcgggggcggccccagcaggccccagacgccggcggccgcggcccggaggccggagggcacctatgcagggaccttgtaagcggagctgggtggctgcgcgagggaccgagtactagagctgcttgcatgcgttactaatacaaacaaatgtgatcaagccacttacctactgaactgctactgttgcctgagaaaaatgtgatttttattctgcttgtatttaaaattgatgaaggaaaaaaaaaaaaaaaaaaaaaaaaaa

SEQ ID NO: 309936 - DNA, 1764 bp, Artificial Sequence
  derived and/or modified sequence
atgtcacagatgctccacatagagataccaaacttcggaaacacagtcctgggatgcttgaatgagcaacgactgctggggctttattgtgacgtgtctattgtggtgaaggggcaggcatttaaggcacatcgcgccgtgttggctgcctcctctctttacttccgagatctgttcagcggaaattcaaaatcagctttcgagctgcctgggagcgtcccaccagcatgttttcagcagattctctcattttgctatactggccggctgactatgacagcctccgagcagcttgtggtgatgtatacggctggctttcttcaaatccagcacatcgtcgaacgcgggacagaccttatgttcaaggtgagttctccccactgtgactctcagacggcggtcatcgaagacgctggtagcgagcctcagagtccttgtaaccagctccagccagccgccgccgctgccgccccttacgtggtctccccaagtgtgcctattcccctactgactcgagtcaaacacgaggccatggaactacctccagccggccctggcctagcacccaaaaggccactggagacaggcccacgcgatggcgttgcggtggcagcaggtgccgccgtcgcggccggaacggcccctctgaagctgcctcgggtaagctactatggcgttccaagtctcgccactttgattcccggaatacagcagatgccatatccccaaggcgagagaactagcccaggggcctcttcgctgcccaccaccgatagccccacctcttaccataatgaggaagacgaggaggatgatgaggcatacgatacaatggtcgaggagcagtatgggcagatgtatattaaagcttccggcagctacgctgttcaggaaaaacctgagcctgtcccactggagtcacgctcctgcgtgctgattaggcgggaccttgtggctctgcccgcctccctgatctcccagataggatacagatgtcacccaaagctctattctgaaggcgaccccggcgaaaagctggagttggtggcaggatccggagtgtatatcacaagaggccagctgatgaattgccacctgtgcgctggagtgaaacacaaggtgttactgagacgccttctcgccacgttctttgatcgaaatacccttgctaactcctgtggcacggggatccgaagcagtacctccgatcccagcaggaagcccctggattcacgagtcctgaatgccgtgaagctgtattgccagaatttcgccccctctttcaaagagtcagagatgaatgtcatcgcggcggatatgtgtacgaatgcccggagggtaaggaagcgctggcttcccaaaatcaagtccatgcttcccgaaggagtggaaatgtatcgcacagtcatggggagtgccgctgccagcgtacctttggaccccgaatttcccccagccgcggcccaagtatttgagcagaggatctatgctgaaaggcggggcgatgccgctaccattgtggctttgcgcaccgacgctgtgaatgtggacctatccgccgctgccaatcctgcctttgacgccggggaggaggtagatggtgccggctcggtcatccaggaagtggctgcccctgaacctttacccgccgacggccagagcccccctcagccgttcgagcaaggggggggagggccgtccagaccccagacccccgccgctgccgctaggaggccagaaggtacatacgctggcaccctgtag

SEQ ID NO: 309937 - DNA, 1764 bp, Artificial Sequence
  derived and/or modified sequence
atgagtcaaatgctccacattgagatccccaacttcggaaacacagttctgggctgtttgaatgaacagaggctcctgggcctgtactgtgatgttagtatcgtagttaagggtcaagcttttaaggctcatagagcagtgttagcagcctcttcgctttactttcgcgatttgttttctggtaactccaagtccgcatttgaactacctggcagcgttcctccggcctgcttccagcagatactttcattctgttatactgggaggctcaccatgactgcatcagagcagcttgtcgttatgtacaccgcgggattcttacagatccagcacatagttgaaaggggcaccgatctcatgtttaaggtctcatctccacactgcgacagtcagacagcagtcatcgaagatgcggggagcgagccccagtctccctgtaaccaactacagccagctgctgccgctgccgcaccctacgtggtatctccatccgtgcccattcccctgctcactcgcgttaagcatgaagcaatggagttaccacccgctggaccggggttggcgcccaagaggccactggagacaggccccagagatggtgtggctgtagcggcaggcgctgctgtggcggcaggcaccgcccctctgaagctcccgcgggtgagctactacggggtgccaagcctggcaacacttatccccggcatacagcaaatgccatacccccagggcgagaggacctcccctggggcttcctctttgcccactaccgattcaccaacctcctatcacaatgaggaggacgaggaagatgacgaagcctacgataccatggtggaggaacagtacggccaaatgtacattaaggcatctggcagttacgcagtgcaggagaaacctgagccagtgccgctcgagtctaggtcatgtgtgttgatccgtcgggatctagtcgctctacccgcttcactgattagccagattggctaccggtgtcatcctaagctctacagcgagggagatccaggcgaaaaactcgaactagtcgccggctcaggcgtgtacatcacaagaggtcagttgatgaattgtcacttgtgcgcgggggtaaaacataaagtgctcctgagaaggctgctggcaactttcttcgaccgaaacactctggccaatagctgcggaactgggatcaggtcttcaaccagcgacccttccagaaaaccactggacagcagggtcctcaacgccgttaaactttattgccagaatttcgctccatcattcaaagaaagcgagatgaatgtcatagccgctgatatgtgtactaatgccaggagagtcaggaagcgttggcttccaaaaattaaatctatgctgccagagggtgtcgaaatgtacaggaccgtgatgggctccgctgcagcctccgttcccttagaccctgagtttcctcctgcagccgcgcaggtgttcgagcagcggatttatgcagagcgcagaggcgacgcagcaaccattgtcgccctgaggactgacgccgttaacgtcgatctgtcagccgccgcgaaccctgcgttcgatgccggagaggaggttgacggcgctggatcagtgattcaggaggttgctgcgccggaacccctgccagccgatgggcagagcccaccccaaccctttgaacagggtggcggcgggccttcaagaccacagaccccagccgccgcggctagacgcccggagggtacctatgcaggcacgctgtag

SEQ ID NO: 309938 - DNA, 2077 bp, Artificial Sequence
  derived and/or modified sequence
aaagtccatgggagccggagcgccgggacgccaagcacttcctgccgcgggcggcgcgccgcagctgcccaggccggaccgggccgggcgcccgcagatgagccccgctagggccgccccgcgctgagagcccagccccgccgctgcccgcccgccatgtctcagatgctgcacatcgagatccccaacttcgggaacacagtgctgggctgcctgaacgagcagcgcctgctgggcctctactgcgatgtgtccatcgtggtcaagggccaggccttcaaggcccaccgggcggtgctggccgccagcagcctctacttccgcgacctgttcagcggcaacagcaagagcgccttcgagctgcccggctccgtgccgcccgcctgcttccagcagatcctgtccttctgctacacgggcaggctcaccatgacggccagcgagcagctcgtggtcatgtacacggccggcttcctgcagatccagcacatcgtggagcgcggcaccgacctcatgttcaaggtgagctcgccccactgcgactcgcagaccgctgtgatcgaggacgccggctccgagccccagagcccctgcaaccagctgcagccggccgccgccgccgcggccccctacgtcgtgtccccctcggtgcccatcccgctgctgacccgagtaaagcatgaagccatggagctgccgccggccggcccaggcctggcccccaagcgcccgctggagacggggccccgggacggcgtggcggtggccgcgggggctgcggtggcggcgggcacagcccctctcaaactgccccgtgtctcctactacggggtgcccagcctggccaccctcatccccggcatccagcagatgccctacccccagggggagcggaccagtccaggcgccagcagcctgcccaccaccgacagccccacctcgtaccacaacgaggaggacgaggaggacgacgaggcctacgacaccatggtggaggagcagtacggccagatgtacatcaaggcctccggcagctatgcagtgcaagagaagcctgagccagtgccgctggagagccgctcctgcgtcctcatccgccgcgacctcgtggccctacctgccagcctcatcagccagatcggataccgctgccatcccaagctctactcggaaggggaccccggggagaagctggagctggtggcaggctctggggtctacatcacacgcggccagctgatgaactgccacctgtgtgcaggggtgaagcataaggtcttgctgcggaggctcctggccaccttctttgacaggaacacgctggccaacagctgcgggactggcatccgctcgtccaccagcgaccccagccggaagccgctggacagccgggtcctgaacgctgtgaaattgtactgtcagaacttcgcccccagcttcaaggagagcgagatgaacgtgatcgccgcggacatgtgcaccaacgcccgccgcgttcgcaagcgctggctgcccaagatcaagtccatgctgccggagggcgtggagatgtaccgcacggtcatgggctccgccgccgccagcgtgcccctcgaccccgagttcccgcctgccgcggcacaggtgttcgagcaacgcatctacgccgagcggcggggcgacgccgccaccatcgtggctctgagaactgacgccgtgaatgttgacctgagtgccgccgccaaccccgccttcgacgccggcgaggaggtggacggggctggctcggtcatccaggaggtggccgcccccgagccgctgcccgccgatggccagagccccccacagccctttgagcagggcgggggcggccccagcaggccccagacgccggcggccgcggcccggaggccggagggcacctatgcagggaccttgtaagcggagctgggtggctgcgcgagggaccgagtactagagctgcttgcatgcgttactaatacaaacaaatgtgatcaagccacttacctactgaactgctactgttgcctgagaaaaatgtgatttttattctgcttgtatttaaaattgatgaagg

SEQ ID NO: 309939 - DNA, 6802 bp, Artificial Sequence
  derived and/or modified sequence
atgagccccgctagggccgccccgcgctgagagcccagccccgccgctgcccgcccgccatgtctcagatgctgcacatcgagatccccaacttcgggaacacagtgctgggctgcctgaacgagcagcgcctgctgggcctctactgcgatgtgtccatcgtggtcaagggccaggccttcaaggcccaccgggcggtgctggccgccagcagcctctacttccgcgacctgttcagcggcaacagcaagagcgccttcgagctgcccggctccgtgccgcccgcctgcttccagcagatcctgtccttctgctacacgggcaggctcaccatgacggccagcgagcagctcgtggtcatgtacacggccggcttcctgcagatccagcacatcgtggagcgcggcaccgacctcatgttcaaggtgagctcgccccactgcgactcgcagaccgctgtgatcgaggacgccggctccgagccccagagcccctgcaaccagctgcagccggccgccgccgccgcggccccctacgtcgtgtccccctcggtgcccatcccgctgctgacccgagtaaagcatgaagccatggagctgccgccggccggcccaggcctggcccccaagcgcccgctggagacggggccccgggacggcgtggcggtggccgcgggggctgcggtggcggcgggcacagcccctctcaaactgccccgtgtctcctactacggggtgcccagcctggccaccctcatccccggcatccagcagatgccctacccccagggggagcggaccagtccaggcgccagcagcctgcccaccaccgacagccccacctcgtaccacaacgaggaggacgaggaggacgacgaggcctacgacaccatggtggaggagcagtacggccagatgtacatcaaggcctccggcagctatgcagtgcaagagaagcctgagccagtgccgctggagagccgctcctgcgtcctcatccgccgcgacctcgtggccctacctgccagcctcatcagccagatcggataccgctgccatcccaagctctactcggaaggggaccccggggagaagctggagctggtggcaggctctggggtctacatcacacgcggccagctgatgaactgccacctgtgtgcaggggtgaagcataaggtcttgctgcggaggctcctggccaccttctttgacaggaacacgctggccaacagctgcgggactggcatccgctcgtccaccagcgaccccagccggaagccgctggacagccgggtcctgaacgctgtgaaattgtactgtcagaacttcgcccccagcttcaaggagagcgagatgaacgtgatcgccgcggacatgtgcaccaacgcccgccgcgttcgcaagcgctggctgcccaagatcaagtccatgctgccggagggcgtggagatgtaccgcacggtcatgggctccgccgccgccagcgtgcccctcgaccccgagttcccgcctgccgcggcacaggtgttcgagcaacgcatctacgccgagcggcggggcgacgccgccaccatcgtggctctgagaactgacgccgtgaatgttgacctgagtgccgccgccaaccccgccttcgacgccggcgaggaggtggacggggctggctcggtcatccaggaggtggccgcccccgagccgctgcccgccgatggccagagccccccacagccctttgagcagggcgggggcggccccagcaggccccagacgccggcggccgcggcccggaggccggagggcacctatgcagggaccttgtaagcggagctgggtggctgcgcgagggaccgagtactagagctgcttgcatgcgttactaatacaaacaaatgtgatcaagccacttacctactgaactgctactgttgcctgagaaaaatgtgatttttattctgcttgtatttaaaattgatgaaggaaacaaatgcattcattatactgtaaacaattaggccactggcagcctcctgcgaggaagttcccagggctcccttttgatattcacaaggtcagcctccaagtgtagcttccctcccccttcttggggagggtgggaggccgccaggcccctggtgcccagccctgccccttcctccctgcccttcctgctcctcctgcccggaagacgaagcaggggccggcggtggtctgtggcgagggggctgggctgtgcgtcactgacccttccttccttccccatggaacctctctggggcgacggggcagggctcaggctccagggcctaactcctcgtttttccttctttcggagactcggggccaggcccaccgggccttccacctgtgtggggtgtgtgcacgagtgtgtgtgtgtgcgtgtgtgtgcaggggtgtggtgagggggcagtgatggctgtggcccacccctcggggtggagaaaagggtactttactctgcccccacaccctgtccttgttctgcccgatccgtctcggctctgcagcccctcggtcccctgacccccagggcaccgctgaccccgcctggcctcccactgtcccgcccgggcccactgtgggacgtgcacagctgatgtagcacacgctgccctctgccgcctcagccactttgggattatgcttgtcttgttttttttaggttttgttgtaatttagatctatttcatatatggtttggaaactttcagactcaatagaacaaaaactttgggtgggatgggtgtccctgtccccagcccaccatggcttggggtgggtcatctgtggccgttagggtgcgtccccctgctcccccgcccagggccagggaccactcgtctcccactgggggaaaaagggggtcccgggtgggcgactagtacgtgtgaagctgagctcagggccggacctggggagcgggggactccgctcgggcaggaggcagcggccagggctgggccagggcgagagtcggtcctcccggtgctgggctccccgtctgccttgaggggtgtgcatggatggagggtgcctgaggctgcaggcaggggatgaccgggacaggcctgggctggggcagttggaggtatgggcactggtaggggacagagggttagggatcatgttggggggccagggacagtggaggaagggcccatggaagatggggctgtttggtttgaggctggagtgcttcctttgaaatttaattactgttttttaagtggtagggctcacagactgtgtgaagtcctgtgtgaagtgctggtgtggccacctacccaggtgtccctcccttttgttttggaggcctgtgtccttgtccaggggcagccctccttcccaggtgtggccagaagaaccccccatcccaagacttgaaatgtctgttgctcacctctgtccctccagaactcggcttccccatcttcacttgcaaaacaagtgcagccctgcgcccatcagcaccccctccggtgtgcacacaggccagtgagcggtggccgaccagcgcaccccactcccccaacctccacaacccatcaagcggaggccgcctccgctaggggaggaccatgtgctgcaccctggcctggggacctacagggtgtgggttagacgcattcccactgggcggctcctttctgccccgaagcccacccctgtggcgaggccctaggagacctcccgtggggccgcctctacagacagcactcagcctcctgggctgcctccagccaggcccagcacatgcctgccctccagaaaaatacgttgctttccagaaggaggtgggggaccatgggcaggcactgtggacgctaacctcggcccctccacccattcctcagggcccacgtccagggggaccaagacctgcattcctagggctgcaggtggctcagtggtgcagaggcatccagaccttctgctgaactaagaaccacccagcctagagggagcctttctctgcctcttcctcccctgtcttgggcacaggtggggttggagcccccatggggcccgctgggaacctggaccaagccttcctcggagatgggaggaagccgcggggtggagcaggggcaggtaggtgaggttgagctgcacttgagttccctctggagtttccttcatctgccccacacccaaatttgcactttaatttgaccatccctgggggcctggctgctgacagaagggctctctctgccctccactccaaagtgggtgcccccccacccttggccaggacagggagggagccgctggctgctgccggaggtggtggctgcacagaggacgcctgactgctgttcaggcccgcacaatgtcccgtgccccttcctcactcgtttgtaatcgccgtctgttttgttctgggtaaggaaggcaagagctatagataaaacttaaataataataatttaatgtgaatgggttctgagctctccctgcgccccgggcgggccaggccgagcattttgcactaatgtgtcccacggtgggcgtgagtcgggagtgtctgtggacgtgcgtggctgctgagcggacctgctgtgtgctccctccacgtcctgaatgtaccgtggggcgggggcggcggcccgggctcagaggggccttccagagtgccttagcatcctttgatcatttttcccaaggaaaccaattaagaaagccggacccttccctcctttgtttacaagatgactaattctagaatccggggttgtcctgtcctgtgagtgtgaccctgactcatccagaccctgtagagagagacgagccactcagtatttatgagatgtctgcacctttatccctaagcctgactattagcaatacgcatatcctatatagaatctattacagagctacgttatctccacaccttttgaggaggacagaagggactggaccgtgttggagctgccgcctggcaggtggtgggcctgggatctagccgcctctcctgccctgccttcctcttccccaaggggatgggcccaggaggcagctgggttgcatggagaggtccaggagggaccggaggtgtgacagatactgtgagcccggcgggccgcgcctggctgggtgcctcggtacttgaattctgtcttgttttccgcattgtgtctgtccacccgagttctctgtcgtcacttaactttgcattggatttggttgttgtactttgcccctgaatgtggacaaagctgtgggcaagaggtcagcaggacccgcctgggggtgccggcgttggtgactgcgggtcggggctcctagaacataggagccggctgcctggcctcctttctcctccaggaagagtcattctttggcatttgtgtttagagccaggaggaaggcggaaggtagggagggagggctggtccccctctgagggggctctagtgcctgaccctgacctgtcctcattcgacagctgaaactgttaagcgctggcccagtccccccaccccacccagccgtgtactgcctgggctcccctcaaagggaaatttttatggaaacatcttggcagcaagtggaaaaagatctatggcccatgaaccaactgaaaactccaagaaccctctgtctgcctctgccagcagcgagtcctaagcgcagaatccagagctcgtagctgtcctcagctgtaactactgtttcagaatgttgctgctgcatacttttgtcatgtcagccagccagctccgtgggtgagagtgtgcgtgtgcgcgtgtctgtgtgtgtgtgcgtgtctgtgtgtgcacgtctgtgcgtctgtgtgtgcgcgtctgtgcatgtgtgtgtctgtgcgtgtgtgcgtctgtgtgtgtgcgtctgtgtgcgcgtgtgtgtgcgcgtctgtgtgtatgtgtgcacgcgcgtctgtgtgcacgtgcgtgtctctgcacgcgtgtctgtgtatgtgtgcacgcgtgtgtctgtgtgtgtgcacgcgcgtgcacgtcaccaccggagcatttagggtttggtacaagatggttctaaaatggcaaaggtttttcgtgtttgtttgttttgtttctttggaaaaagaaaaggaaaggaaaatcatgcagaatcgcaagcattcagactggacgaccggctcgtattccgatcagtcgcttccattgttagcatcgtacacgattgtgatttttatgtcaaaagaagccaaaacttgcaatactatttttagcagacaaaaaaaagaactaagtataaaatgtataaatatttttgacttgaagatttggatggcactgggtgcaagtagagcatccatccttcggatggaatgtttggaaaaaagagacttttaaaaaggagacggttgttttaaagagtctgtttaggggttaaagtactgtaactcacgactgttaaaaaataaattttcctgtgctgtaaaggaaggtttcacagtaccactgagttagatttcagccacagatgcttagctttttttttttgtcttttttttaaggaggaagcctttgttttgttttcctgagccctcactctgtttttgtgctgttactcggtagagtcaagactgttactttttagccatggctgacattgtatcaataactaaaactgaaacattcaaaagcgaacagggaaaccgagggcttcaagcgtgctcagagccgtttcagacagtggaaatccatgacaaacaaaaggatgtgatcattaattgtaaagcgctttgtaaaattcacatttacaaaataataaagtcagttcaaacctaa

SEQ ID NO: 309940 - DNA, 1764 bp, Artificial Sequence
  derived and/or modified sequence
atgagccagatgctgcacatcgagatccccaactttggaaacacagtgctgggctgcctgaatgagcagaggctgctgggcctgtactgtgatgtgtccatcgtggtgaagggccaggccttcaaggcccacagagctgtgctggccgccagcagcctgtacttccgggacctcttcagcggcaacagcaagagcgcctttgagctgcccggctctgtgcccccagcctgcttccagcagatcctgtccttctgctacacaggccgcctgaccatgacagccagcgagcagctggtggtgatgtacacagctggcttcctgcagatccagcacatcgtggagcggggcacagacctgatgttcaaggtgagcagcccccactgtgacagccagacagctgtgattgaagatgctggcagcgagccccagagcccctgcaaccagctgcagcctgctgctgctgctgctgccccctacgtggtgagccccagcgtgcccatccccctgctgaccagggtgaagcatgaggccatggagctgcccccagctggccctggcctggcccccaagaggcccctggagaccggccccagagatggagtggccgtggccgccggggctgctgtggccgccggcacagcccccctgaagctgccccgggtgtcctactacggcgtgcccagcctggccaccctcatccctggcatccagcagatgccctacccccagggcgagaggaccagccctggggccagcagcctgcccaccacagacagccccaccagctaccacaatgaagaagatgaggaggatgatgaggcctatgacaccatggtggaggagcagtatggccagatgtacatcaaggccagcggcagctatgctgtgcaggagaagccagagcctgtgcccctggagagccgcagctgtgtgctgatccggcgggacctggtggccctgcctgccagcctcatcagccagatcggctaccgctgccaccccaagctgtacagcgagggggaccccggggagaagctggagctggtggccggcagcggcgtgtacatcacccggggccagctgatgaactgccacctgtgtgccggcgtgaagcacaaggtgctgctgcggcggctgctggccaccttctttgacaggaacaccctggccaacagctgtggcaccggcatccgcagcagcaccagtgaccccagcaggaagcccctggacagccgggtgctgaatgctgtgaagctgtactgccagaactttgcccccagcttcaaggagagcgagatgaatgtgattgctgctgacatgtgcaccaatgccaggagagtgaggaagcgctggctgcccaagatcaagtccatgctgcctgagggcgtggagatgtacagaacagtgatgggcagcgctgctgcctctgtgcccctggaccctgagttccccccagctgctgcccaggtgtttgagcagaggatctatgcagagaggagaggagatgctgccaccatcgtggccctgaggacagatgctgtgaatgtggacctgtctgctgctgccaacccagcctttgatgctggggaggaggtggatggagctggcagcgtcatccaggaggtggccgcccctgagcccctgcctgcagatggccagagccccccccagccctttgagcagggcggcggcggccccagccggccccagaccccagctgctgctgcccggcggcctgagggcacctacgccggcaccctgtag

SEQ ID NO: 309941 - DNA, 1764 bp, Artificial Sequence
  derived and/or modified sequence
atgagccagatgctgcacatcgagatccccaacttcggcaacaccgtgctgggatgcctcaatgagcaaagacttttaggactgtactgcgatgtaagtattgtggttaaaggacaagcctttaaggcgcaccgggccgtcctcgccgccagttctctgtactttcgtgacctcttctcgggcaactctaagtccgcctttgagctccccggctcggtgccgcctgcatgctttcagcagatcctaagtttttgctatacaggacggctcacaatgacagcctccgagcagctggtggtgatgtacacagccggctttcttcaaatacaacatattgttgagcgcggaacggatctgatgttcaaagtgtcctcacctcactgcgactcacagaccgccgttatcgaagatgccgggtccgaaccccagagcccttgtaatcaactgcaaccggccgctgccgcagcagccccctacgtggtgtcgccatcagtgcccattccactgctgacacgcgtgaagcatgaagccatggagctgccacccgcaggacccggattagcacccaagagacctctggagacgggccctcgtgacggagtggcagttgctgctggcgccgcggtggcagcggggaccgcccctcttaagctgccaagggtgagctattacggtgtgcccagtttagcgacgctgatcccgggaatccagcagatgccttatccccaaggagagcgtacgtctcccggcgcctcaagtctcccaaccacggacagccccacgtcttaccataatgaagaagatgaggaggatgacgaagcatacgacacaatggtggaggagcaatatggccagatgtatattaaggcctcaggctcttacgctgttcaggaaaagcctgagcctgtgcctttggaaagccggtcctgtgtgttaattcgtagggacctcgtggccctccctgcttcactgatttcccaaatcggctacagatgccaccccaaactatacagcgaaggagatccaggcgaaaaactggaactggttgcgggatcgggagtctacatcacccgaggacagctgatgaattgccacctgtgcgcaggcgtgaaacacaaggtgctcctgcgccggctgttggccaccttcttcgaccggaatacactcgctaattcttgtgggactggcattcgcagctctacttcagacccttccaggaagcctttggactcccgcgttcttaacgccgtgaagctctattgtcagaattttgccccctcctttaaagagtcagagatgaatgttatcgccgccgatatgtgtactaacgccagaagggttcggaagcgatggctgcccaagatcaagtccatgctgccggaaggcgtcgaaatgtatagaacggtaatggggagcgccgctgccagcgtaccgctcgaccccgagttcccacccgccgccgctcaggtgttcgaacagcggatctacgcagaacgtcgcggggacgctgccacgatcgtggctctgcggaccgatgctgtgaacgttgacttgtcagcggctgccaacccggccttcgatgcgggcgaagaggtggacggggccggaagtgtgatccaagaagttgccgcaccagagccactccccgccgacggccagtcccccccacagccctttgagcagggtgggggaggaccctcacgcccccagacaccagccgccgcggcacgacggcccgaaggcacctatgccggcaccctttag

SEQ ID NO: 309942 - DNA, 1764 bp, Artificial Sequence
  derived and/or modified sequence
atgagccagatgctgcacatcgagatccccaacttcggcaacaccgtgctcgggtgtttgaacgagcaacggctcctcggtctgtactgcgatgtgtctatcgtggtgaagggccaggcgttcaaggcccatcgggctgttttagcagctagttcgctgtattttagagatctgttttctgggaattctaagtctgcatttgagttgccaggcagcgtgcctccagcatgctttcagcagattttgtccttctgttacacggggcggctgaccatgacggcttccgaacaactggtggtgatgtacacagctggctttctacagattcaacacatcgttgaaagaggaactgaccttatgttcaaagtgagttcaccacattgcgactcccagacggcagtgatcgaagacgccgggtccgagccacagtcgccatgtaaccagctgcaaccggccgccgcggctgctgcaccttacgtggtttcgccctccgtgcctatacctctgctcactcgagtgaagcacgaagccatggagctccctcctgctggcccgggcctggccccaaagcgccctctagagaccgggccccgggatggagtagccgtggcggctggggcagccgttgcagccggaaccgcaccactgaaactaccccgagtaagttactacggcgtcccctctctagccactctcattcccggcatccagcagatgccgtacccacagggggagaggacttctccaggcgcctcttcactgcccactactgacagcccaacctcctaccacaatgaggaggacgaggaggatgatgaggcttacgacaccatggttgaggaacaatacggccagatgtacattaaggcctcagggagctacgcagttcaagaaaagcccgagccagttccactggaatcaagaagctgtgtgttaatccgacgggacctcgttgccttgcctgcctctttaatctcacaaatcggttacaggtgtcatccgaaattgtattcagagggggacccaggcgaaaagctggagctggtggctgggagtggggtatacatcacccgcggacagctgatgaactgccatctgtgcgctggcgttaagcacaaagtcctcttgagacggcttctggccacatttttcgatcgcaacactctagccaatagctgtggaacgggcatccggagctcaactagcgatcctagccgaaaacctctggactctagggtccttaacgcggtcaagctgtactgccagaacttcgccccaagctttaaggagagtgagatgaatgtgatcgccgctgatatgtgtaccaacgcccgcagggtgcgtaagcgatggctccccaaaatcaagagcatgcttccagaaggcgtggaaatgtatcgcaccgtgatgggatccgccgccgctagtgttccgctggaccccgagttccctcccgctgcagcccaggtctttgaacagaggatctacgccgaaaggcgcggggatgcagctactatcgtcgccctgcggaccgacgccgtgaatgtggacttatccgcagctgctaacccagcctttgacgccggcgaggaagttgatggcgctggctcggtcattcaggaagtggccgcccccgaacctcttccagcagacggccagtcacccccacagccttttgagcagggtgggggaggcccttcccgacctcagacacctgccgcggccgctagacggcccgagggtacttacgccggaacactgtag

SEQ ID NO: 309943 - DNA, 1764 bp, Artificial Sequence
  derived and/or modified sequence
atgagtcagatgttacatatagagataccaaacttcgggaataccgtcctgggctgtctgaatgaacagcggctattgggtctctactgcgacgtgtccatagttgtgaaaggacaggcctttaaggcgcatcgagcagtgctggcagcttcgtcactgtactttcgggacttgttttccggtaactccaaaagcgcatttgaactcccgggaagtgtgccccctgcctgtttccaacaaatactgagcttttgctacactggacgcttaaccatgacagcttcggaacagctggtggtaatgtatacggccggttttctgcagatccagcatatcgtcgagcgcggtacagatttgatgttcaaagtgtctagcccccattgtgactctcagaccgccgtgattgaggacgcaggttcagagccacagtccccttgcaatcaactccagcctgccgcagccgcagcggctccctacgttgtaagccctagcgtgcctatcccgctgcttacccgcgttaagcatgaggcaatggaactcccaccagctggtccagggcttgcacccaaaagacccctggagaccgggccaagggatggcgtggccgtcgccgctggagcggcagtggcagccggtaccgcccctctgaaactgccacgcgtttcgtactatggcgtgccctccctcgccacgctgatacccggaatacagcaaatgccttacccccaaggagagcgtacttcccccggagcaagcagtttgcctactactgattcccccacaagctaccacaacgaggaagatgaagaggacgatgaggcttatgatactatggtcgaggagcaatatggacagatgtatatcaaagcctctggctcttacgccgtgcaggagaaaccggagcctgttcctcttgagtcccgcagttgtgtgctcatccggcgtgacctcgtggccttgccggcttctctgatctcccaaatcggttaccgctgccaccctaaactatacagcgagggcgatcccggagagaaactcgagcttgtggcgggtagcggggtgtatattacacgagggcagctgatgaattgtcacctgtgtgccggagtcaaacacaaggtgctcctgcgaagactgctagcaaccttcttcgatcggaacacactggcgaactcatgtggtaccggcatcaggtcctcaacttccgacccaagtcgcaagccactcgattcacgcgtgctgaatgccgtgaagttatattgccaaaactttgcaccctcctttaaagagtccgagatgaatgtcatcgctgctgacatgtgcacaaatgcgagacgtgtgaggaagcgttggcttccaaagattaagagcatgttgcctgaaggtgtggaaatgtatcgcaccgtgatgggatccgcagccgcatctgtgccactggatccagagtttccccctgctgcggctcaggtgttcgaacaaagaatttacgccgagcgcagaggggacgcagcgacgattgttgccctgcggaccgacgcagttaacgtggatctgtctgctgcagcaaaccctgcttttgacgccggagaagaggtggatggagccggaagtgttatccaggaggttgcagctcccgaaccgctccctgcagacggccaaagtccccctcagccatttgagcaaggcggtggcggtccctctcggccacagacccctgcggctgccgctcgacggccagaaggtacatatgccggaaccctttag

SEQ ID NO: 309944 - DNA, 1764 bp, Artificial Sequence
  derived and/or modified sequence
atgtctcagatgctccatattgagattccaaactttgggaataccgttctgggttgtcttaatgagcagcggctgcttgggctctattgcgatgtctccatcgtcgtgaaggggcaggccttcaaagcgcatagagccgtgttggcagcctcaagtttgtatttccgagacctgttctctggaaactccaagtcagcatttgagctaccagggtccgtgccccctgcctgttttcagcagattttgagtttctgctacactggtaggcttactatgacagccagtgagcaactggtcgttatgtacaccgccggattcctgcagattcaacacattgttgagcgaggaacggacctgatgtttaaagtcagctctccccactgtgactctcaaactgcagtcattgaggacgcaggttctgagccccagtccccctgcaatcaactgcagcccgcagccgctgctgcggctccctatgtggtgagcccgtcggtgccaatccccctgctgacccgcgtcaagcacgaagccatggagctgcctccagcgggaccaggattggctccaaaaagaccactcgagacgggcccaagggacggagtagccgtggccgctggcgctgcagtggccgctgggactgcccctctcaaactgccgcgagtgagctactatggtgtgccctcactggctacccttattccaggaattcagcaaatgccctacccacagggagaaaggacatcacctggcgcatccagcctccccaccactgattcgccgacctcttaccacaatgaggaggatgaagaggatgacgaggcatacgataccatggtagaagagcagtacggccagatgtatatcaaggcctccgggagctatgctgtacaagaaaagccggagcccgttcctttggaaagcagatcctgtgtactcattcgcagagatttggttgctcttcctgcctcgctgatctcccagattggttacaggtgccacccaaagctctattccgagggagacccaggagagaagctggagctggtcgcaggatccggcgtctacattactcgcggtcagctcatgaactgtcacttgtgtgcgggagtgaagcataaggtactgttgaggcgcttgcttgcaacattttttgaccgcaataccctggccaattcctgtggaacaggtattagatctagcacctctgatccaagccggaaacccctggactctagggtgctgaacgctgtgaaactgtactgccagaatttcgccccaagcttcaaagaaagtgagatgaatgtaatcgccgcagacatgtgtaccaacgccagaagagtccgcaagaggtggcttccgaagattaagtctatgctgccagaaggggtagaaatgtaccgaactgtgatgggcagtgccgctgcaagtgtgcctctggacccggaatttccgcctgcggcagctcaggtcttcgagcagaggatttacgctgagagaagaggcgatgccgctacaatagtcgcgttgcgtaccgatgctgttaacgtcgatctgtccgcagcagccaaccccgcatttgacgcgggtgaagaggtggatggtgcgggaagtgtgattcaagaggtggccgcaccagagccactgcccgcagacggtcaaagcccgcctcagcccttcgaacagggaggagggggaccaagtcggccacagacgccagccgcagccgcaaggagacctgaggggacatatgcaggcactttgtag

SEQ ID NO: 309945 - DNA, 1764 bp, Artificial Sequence
  derived and/or modified sequence
atgagccagatgctgcacatcgagatccccaacttcggcaacaccgtgctgggctgcctgaacgagcagagactgctgggcctgtactgcgacgtgagcatcgtggtgaagggccaggccttcaaggcccacagagccgtgctggccgccagcagcctgtacttcagagacctgttcagcggcaacagcaagagcgccttcgagctgcccggcagcgtgccccccgcctgcttccagcagatcctgagcttctgctacaccggcagactgaccatgaccgccagcgagcagctggtggtgatgtacaccgccggcttcctgcagatccagcacatcgtggagagaggcaccgacctgatgttcaaggtgagcagcccccactgcgacagccagaccgccgtgatcgaggacgccggcagcgagccccagagcccctgcaaccagctgcagcccgccgccgccgccgccgccccctacgtggtgagccccagcgtgcccatccccctgctgaccagagtgaagcacgaggccatggagctgccccccgccggccccggcctggcccccaagagacccctggagaccggccccagagacggcgtggccgtggccgccggcgccgccgtggccgccggcaccgcccccctgaagctgcccagagtgagctactacggcgtgcccagcctggccaccctgatccccggcatccagcagatgccctacccccagggcgagagaaccagccccggcgccagcagcctgcccaccaccgacagccccaccagctaccacaacgaggaggacgaggaggacgacgaggcctacgacaccatggtggaggagcagtacggccagatgtacatcaaggccagcggcagctacgccgtgcaggagaagcccgagcccgtgcccctggagagcagaagctgcgtgctgatcagaagagacctggtggccctgcccgccagcctgatcagccagatcggctacagatgccaccccaagctgtacagcgagggcgaccccggcgagaagctggagctggtggccggcagcggcgtgtacatcaccagaggccagctgatgaactgccacctgtgcgccggcgtgaagcacaaggtgctgctgagaagactgctggccaccttcttcgacagaaacaccctggccaacagctgcggcaccggcatcagaagcagcaccagcgaccccagcagaaagcccctggacagcagagtgctgaacgccgtgaagctgtactgccagaacttcgcccccagcttcaaggagagcgagatgaacgtgatcgccgccgacatgtgcaccaacgccagaagagtgagaaagagatggctgcccaagatcaagagcatgctgcccgagggcgtggagatgtacagaaccgtgatgggcagcgccgccgccagcgtgcccctggaccccgagttcccccccgccgccgcccaggtgttcgagcagagaatctacgccgagagaagaggcgacgccgccaccatcgtggccctgagaaccgacgccgtgaacgtggacctgagcgccgccgccaaccccgccttcgacgccggcgaggaggtggacggcgccggcagcgtgatccaggaggtggccgcccccgagcccctgcccgccgacggccagagccccccccagcccttcgagcagggcggcggcggccccagcagaccccagacccccgccgccgccgccagaagacccgagggcacctacgccggcaccctgtag

SEQ ID NO: 309946 - protein, 35 aa, Artificial Sequence
  derived and/or modified sequence
MSSQKGNVARSRPQKHQNTFSFKNDKFDKSVQTKC

SEQ ID NO: 309947 - DNA, 108 bp, Artificial Sequence
  derived and/or modified sequence
atgagcagccagaagggcaacgtggccagaagcagaccccagaagcaccagaacaccttcagcttcaagaacgacaagttcgacaagagcgtgcagaccaagtgctag

SEQ ID NO: 309948 - DNA, 172 bp, Artificial Sequence
  derived and/or modified sequence
gttcgttggttttctttcccctcatccttttgcctgctcccggcgaggggtggctttgatttcggcgatgagctcccagaaaggcaacgtggctcgttccagacctcagaagcaccagaatacgtttagcttcaaaaatgacaagttcgataaaagtgtgcagaccaagtgc

SEQ ID NO: 309949 - DNA, 108 bp, Artificial Sequence
  derived and/or modified sequence
atgtcaagccagaagggcaacgtggctagaagccggccacagaagcaccagaacaccttcagcttcaaaaatgataagttcgacaagtctgtacagactaaatgttag

SEQ ID NO: 309950 - DNA, 108 bp, Artificial Sequence
  derived and/or modified sequence
atgagcagccagaagggaaatgtggcccggagccggccccagaagcaccagaacaccttctccttcaagaatgacaagtttgacaagtctgtgcagaccaagtgctag

SEQ ID NO: 309951 - DNA, 108 bp, Artificial Sequence
  derived and/or modified sequence
atgagcagccagaagggcaacgtggcccggagccggccccagaagcaccagaatacgtttagtttcaagaacgacaagttcgacaaaagcgtgcagactaagtgctag

SEQ ID NO: 309952 - DNA, 108 bp, Artificial Sequence
  derived and/or modified sequence
atgtcttcacagaagggcaacgtggccagatctaggccacagaaacatcagaatacgttttccttcaagaatgacaagtttgacaagtctgtccagaccaagtgttag

SEQ ID NO: 309953 - protein, 859 aa, Artificial Sequence
  derived and/or modified sequence
MKEQPVLERLQSQKSWIKGVFDKRECSTIIPSSKNPHRCTPVCQVCQNLIRCYCGRLIGDHAGIDYSWTISAAKGKESEQWSVEKHTTKSPTDTFGTINFQDGEHTHHAKYIRTSYDTKLDHLLHLMLKEWKMELPKLVISVHGGIQNFTMPSKFKEIFSQGLVKAAETTGAWIITEGINTGVSKHVGDALKSHSSHSLRKIWTVGIPPWGVIENQRDLIGKDVVCLYQTLDNPLSKLTTLNSMHSHFILSDDGTVGKYGNEMKLRRNLEKYLSLQKIHCRSRQGVPVVGLVVEGGPNVILSVWETVKDKDPVVVCEGTGRAADLLAFTHKHLADEGMLRPQVKEEIICMIQNTFNFSLKQSKHLFQILMECMVHRDCITIFDADSEEQQDLDLAILTALLKGTNLSASEQLNLAMAWDRVDIAKKHILIYEQHWKPDALEQAMSDALVMDRVDFVKLLIEYGVNLHRFLTIPRLEELYNTKQGPTNTLLHHLVQDVKQDLSKNSLWNSRSTNLNRNSLHVIKMPISSLISEISASLKSPQEPHHHYSAIERNNLMRLSQTIPFTPVQLFAGEEITVYRLEESSPLNLDKSMSSWSQRGRAAMIQVLSREEMDGGLRKAMRVVSTWSEDDILKPGQVFIVKSFLPEVVRTWHKIFQESTVLHLCLREIQQQRAAQKLIYTFNQVKPQTIPYTPRFLEVFLIYCHSANQWLTIEKYMTGEFRKYNNNNGDEITPTNTLEELMLAFSHWTYEYTRGELLVLDLQGVGENLTDPSVIKPEVKQSRGMVFGPANLGEDAIRNFIAKHHCNSCCRKLKLPDLKRNDYSPERINSTFGLEIKIESAEEPPARETGRNSPEDDMQL

SEQ ID NO: 309954 - DNA, 2580 bp, Artificial Sequence
  derived and/or modified sequence
atgaaggagcagcccgtgctggagagactgcagagccagaagagctggatcaagggcgtgttcgacaagagagagtgcagcaccatcatccccagcagcaagaacccccacagatgcacccccgtgtgccaggtgtgccagaacctgatcagatgctactgcggcagactgatcggcgaccacgccggcatcgactacagctggaccatcagcgccgccaagggcaaggagagcgagcagtggagcgtggagaagcacaccaccaagagccccaccgacaccttcggcaccatcaacttccaggacggcgagcacacccaccacgccaagtacatcagaaccagctacgacaccaagctggaccacctgctgcacctgatgctgaaggagtggaagatggagctgcccaagctggtgatcagcgtgcacggcggcatccagaacttcaccatgcccagcaagttcaaggagatcttcagccagggcctggtgaaggccgccgagaccaccggcgcctggatcatcaccgagggcatcaacaccggcgtgagcaagcacgtgggcgacgccctgaagagccacagcagccacagcctgagaaagatctggaccgtgggcatccccccctggggcgtgatcgagaaccagagagacctgatcggcaaggacgtggtgtgcctgtaccagaccctggacaaccccctgagcaagctgaccaccctgaacagcatgcacagccacttcatcctgagcgacgacggcaccgtgggcaagtacggcaacgagatgaagctgagaagaaacctggagaagtacctgagcctgcagaagatccactgcagaagcagacagggcgtgcccgtggtgggcctggtggtggagggcggccccaacgtgatcctgagcgtgtgggagaccgtgaaggacaaggaccccgtggtggtgtgcgagggcaccggcagagccgccgacctgctggccttcacccacaagcacctggccgacgagggcatgctgagaccccaggtgaaggaggagatcatctgcatgatccagaacaccttcaacttcagcctgaagcagagcaagcacctgttccagatcctgatggagtgcatggtgcacagagactgcatcaccatcttcgacgccgacagcgaggagcagcaggacctggacctggccatcctgaccgccctgctgaagggcaccaacctgagcgccagcgagcagctgaacctggccatggcctgggacagagtggacatcgccaagaagcacatcctgatctacgagcagcactggaagcccgacgccctggagcaggccatgagcgacgccctggtgatggacagagtggacttcgtgaagctgctgatcgagtacggcgtgaacctgcacagattcctgaccatccccagactggaggagctgtacaacaccaagcagggccccaccaacaccctgctgcaccacctggtgcaggacgtgaagcaggacctgagcaagaacagcctgtggaacagcagaagcaccaacctgaacagaaacagcctgcacgtgatcaagatgcccatcagcagcctgatcagcgagatcagcgccagcctgaagagcccccaggagccccaccaccactacagcgccatcgagagaaacaacctgatgagactgagccagaccatccccttcacccccgtgcagctgttcgccggcgaggagatcaccgtgtacagactggaggagagcagccccctgaacctggacaagagcatgagcagctggagccagagaggcagagccgccatgatccaggtgctgagcagagaggagatggacggcggcctgagaaaggccatgagagtggtgagcacctggagcgaggacgacatcctgaagcccggccaggtgttcatcgtgaagagcttcctgcccgaggtggtgagaacctggcacaagatcttccaggagagcaccgtgctgcacctgtgcctgagagagatccagcagcagagagccgcccagaagctgatctacaccttcaaccaggtgaagccccagaccatcccctacacccccagattcctggaggtgttcctgatctactgccacagcgccaaccagtggctgaccatcgagaagtacatgaccggcgagttcagaaagtacaacaacaacaacggcgacgagatcacccccaccaacaccctggaggagctgatgctggccttcagccactggacctacgagtacaccagaggcgagctgctggtgctggacctgcagggcgtgggcgagaacctgaccgaccccagcgtgatcaagcccgaggtgaagcagagcagaggcatggtgttcggccccgccaacctgggcgaggacgccatcagaaacttcatcgccaagcaccactgcaacagctgctgcagaaagctgaagctgcccgacctgaagagaaacgactacagccccgagagaatcaacagcaccttcggcctggagatcaagatcgagagcgccgaggagccccccgccagagagaccggcagaaacagccccgaggacgacatgcagctgtag

SEQ ID NO: 309955 - DNA, 2580 bp, Artificial Sequence
  derived and/or modified sequence
atgaaagaacagcccgtattggaacgactccagtcacagaagagttggatcaagggggtgttcgataagcgagaatgtagcaccattatccctagctcgaagaaccctcacaggtgcaccccagtgtgtcaagtgtgccagaacctgattaggtgttattgcggccggctgattggagatcacgcgggaattgattactcctggaccatcagtgctgccaaggggaaagaatccgagcagtggagtgtcgagaagcatactacgaagagtcccacggatacatttggcactataaacttccaggacggcgagcatacgcaccatgccaaatatatccgcacttcttacgatacgaagctggaccatttgctccacctgatgctgaaggaatggaaaatggagcttccaaagctcgttatttctgtgcacgggggaatccagaactttacaatgccttcgaagttcaaggaaatctttagtcagggcctggttaaagccgccgaaaccacgggagcgtggataatcacagagggcatcaacacaggcgtttccaaacatgtcggcgacgctctgaaatcccactcctcacattcactgagaaagatctggacagtagggataccaccatggggggtgattgagaatcagagagacctcatcggaaaggatgtggtctgtctgtaccagaccctggacaaccccctttccaagcttacaacgttaaattccatgcactcccatttcatcctgagcgatgatgggacggtcgggaagtatgggaatgagatgaaactgcgacgtaatcttgagaaatatctgtcccttcagaagatccattgccgctcccggcaaggtgtgccggtcgtgggcctggtggtcgagggtggccccaacgtgattttgtctgtgtgggaaaccgttaaggacaaggaccctgttgtcgtctgtgagggtactggtcgggccgcagatctgctcgcctttacccacaagcacttggcggatgaaggtatgctccgacctcaggtgaaggaggagatcatctgcatgatccagaacacatttaactttagcctgaagcagtcaaagcacttgttccagatccttatggaatgcatggttcacagggattgtataactatcttcgatgctgattccgaggagcagcaggatctagacctggcaatcctgactgccctgcttaaaggtacgaatctctccgcttccgaacaacttaaccttgctatggcctgggaccgtgttgacatcgccaagaaacacatcttgatatacgagcaacattggaagccagatgccctcgagcaggccatgtctgatgccctagtgatggatagggtcgatttcgtcaagttgctgattgagtacggtgtgaacctccaccgtttcttaactattccgcggcttgaggaactctataacaccaaacaggggcccactaatacactgcttcaccacctcgtccaggacgtgaagcaagatttgagtaaaaacagcctttggaattcccggagtaccaatcttaacagaaactctttacacgtgataaaaatgccaatcagtagcctgataagcgagatttcagcttccctcaaatcaccgcaggaaccccaccaccattactcagctatcgaaagaaataatctcatgcgcttatctcagacaatccctttcactcccgtccaactcttcgccggcgaagaaatcacagtctaccggcttgaagagagttcccccctcaacctggataagtcaatgagcagctggagtcagcgcggccgtgctgctatgattcaggtcttgagcagggaggagatggatggcggcctcagaaaagctatgagagttgtcagcacgtggagtgaggacgatattctgaaacctggtcaggtctttattgtgaagtcttttttgccagaggtggtgagaacatggcataagatctttcaggaaagcaccgtgcttcatctatgtctccgggaaattcagcagcagagagcagcccagaagctgatctataccttcaatcaggttaagcctcaaacaatcccttacaccccacggtttctcgaagtttttctcatctattgccactctgcaaaccagtggttgaccatagaaaaatatatgacgggcgaattcaggaaatataacaataacaatggagatgaaattacccctacgaacacccttgaagaactgatgttagcattttcccattggacttatgaatacactagaggcgagttgcttgttctggacctgcagggagtcggcgaaaatttgaccgatccaagtgtgatcaagccggaagtgaaacaaagcagagggatggtgttcggtcctgccaatctgggggaagatgcaattaggaactttatagccaagcaccactgtaactcgtgctgtaggaaactcaagcttcccgacctgaaaaggaacgactattcccccgagcgcatcaacagcactttcggtctggaaattaagattgaaagcgcggaggagcccccagccagggagactggaagaaactctcctgaggatgatatgcagctctag

SEQ ID NO: 309956 - DNA, 2580 bp, Artificial Sequence
  derived and/or modified sequence
atgaaggagcagcctgtgctggagcggctgcagagccagaagtcctggatcaagggcgtgtttgacaagagagaatgttccaccatcatccccagcagcaagaacccccaccgctgcacccctgtgtgccaggtgtgccagaacctgatccgctgctactgcggccgcctcatcggggaccacgccggcatcgactacagctggaccatctctgctgccaagggcaaggagagcgagcagtggagcgtggagaagcacaccaccaagagccccacagacaccttcggcaccatcaacttccaggatggagagcacacccaccacgccaagtacatccgcaccagctatgacaccaagctggaccacctgctgcacctgatgctgaaggagtggaagatggagctgcccaagctggtgatctctgtgcatggaggcatccagaacttcaccatgcccagcaagttcaaggagatcttcagccagggcctggtgaaggctgctgagaccaccggggcctggatcatcacagagggcatcaacacaggagtgtccaagcacgtgggagatgccctgaagagccacagcagccacagcctgaggaagatctggacagtgggcatccccccctggggcgtgattgagaaccagagggacctgattggcaaggatgtggtgtgcctgtaccagaccctggacaaccccctgagcaagctgaccaccctgaacagcatgcacagccacttcatcctgagtgatgatggcaccgtgggcaagtatggaaatgagatgaagctgcggaggaacctggagaagtacctgagcctgcagaagatccactgccgcagccggcagggcgtgcctgtggtgggcctggtggtggagggcggccccaacgtcatcctgtctgtgtgggagaccgtgaaggacaaggaccctgtggtggtgtgtgagggcaccggccgggctgctgacctgctggccttcacccacaagcacctggctgatgagggcatgctgcggccccaggtgaaggaggagatcatctgcatgatccagaacaccttcaacttcagcctgaagcagagcaagcacctgttccagatcctgatggagtgcatggtgcaccgggactgcatcaccatctttgatgctgacagcgaggagcagcaggacctggacctggccatcctgacagccctgctgaagggcaccaacctgagcgccagcgagcagctgaacctggccatggcctgggacagagtggacatcgccaagaagcacatcctgatctatgagcagcactggaagccagatgccctggagcaggccatgtctgatgccctggtgatggacagagtggactttgtgaagctgctgattgaatatggagtgaacctgcaccgcttcctgaccatcccccggctggaggagctgtacaacaccaagcagggccccaccaacaccctgctgcaccacctggtgcaggatgtgaagcaggacctgagcaagaacagcctgtggaacagccgcagcaccaacctgaacagaaacagcctgcacgtgatcaagatgcccatcagcagcctcatcagcgagatcagcgccagcctgaagagcccccaggagccccaccaccactacagcgccatcgagaggaacaacctgatgaggctgagccagaccatccccttcacccctgtgcagctgtttgctggggaggagatcaccgtgtaccgcctggaggagagcagccccctgaacctggacaagtccatgagctcctggagccagaggggccgggccgccatgatccaggtgctgagccgggaggagatggatggcggcctgaggaaggccatgagggtggtgtccacctggagcgaagatgacatcctgaagccaggccaggtgttcatcgtgaagagcttcctgcctgaggtggtgaggacctggcacaagatcttccaggagagcacagtgctgcacctgtgcctgcgggagatccagcagcagagagctgcccagaagctgatctacaccttcaaccaggtgaagccccagaccatcccctacaccccccgcttcctggaggtgttcctgatctactgccacagcgccaaccagtggctgaccatcgagaagtacatgactggagagttcaggaagtacaacaacaacaatggagatgagatcacccccaccaacaccctggaggagctgatgctggccttcagccactggacctatgagtacaccagaggagagctgctggtgctggacctgcagggcgtgggggagaacctgacagaccccagcgtcatcaagccagaggtgaagcagagccggggcatggtgtttggacctgccaacctgggagaagatgccatccggaacttcatcgccaagcaccactgcaacagctgctgcaggaagctgaagctgcctgacctgaagagaaatgactacagccctgagcgcatcaacagcaccttcggcctggagatcaagattgaatctgctgaggagcccccagcccgggagaccggcaggaacagcccagaagatgacatgcagctgtag

SEQ ID NO: 309957 - DNA, 2580 bp, Artificial Sequence
  derived and/or modified sequence
atgaaggagcagcccgtgctggagcggctgcagagccagaagagctggattaaaggcgtttttgacaaacgggagtgcagtacaattattccatcatctaaaaaccctcatcgctgtactccagtgtgccaggtatgccagaacctgatacggtgctactgcggccgtctaattggagaccacgcaggcattgattacagctggacgatctcagccgcaaagggcaaggagtccgagcagtggtcggtggaaaaacatactactaaaagtccaaccgacacgttcggcacaatcaactttcaggatggggagcacacccaccacgctaaatatattcggacgagctatgacaccaaactggatcaccttctacatctaatgctcaaagagtggaaaatggaactgcccaagctggtaatatccgtgcacggtggcatccagaacttcaccatgccatctaaatttaaggaaatcttctcgcagggtcttgtgaaagctgcagaaaccaccggcgcgtggataattacagaaggaatcaatacaggggtgtccaagcacgtgggggacgcactcaagtctcactcctcccatagtctgcgaaaaatttggactgtcggtatcccgccatggggagtgatcgagaaccaaagggacttgattggaaaagacgtcgtgtgtctctaccagaccctggataatcccctgagcaaactcaccaccctcaatagtatgcatagccactttatcctgtccgacgatgggactgttggtaaatacgggaatgagatgaagctccggcgcaacctagagaaatacctgagtttgcaaaagattcactgtagaagccggcagggggtgcccgtcgtcgggctcgttgtggagggaggccctaatgtcatcctcagtgtgtgggaaaccgtgaaggataaagaccccgttgttgtgtgtgagggcacggggagggccgcagacctgctggccttcacccacaagcatcttgcggacgaggggatgcttaggcctcaggtaaaggaagaaattatctgcatgattcagaatacattcaatttttcactgaagcagtcaaaacacttgttccaaatattgatggagtgcatggtccaccgtgattgtatcactatctttgatgcagattcagaggaacaacaagacctcgatctggcaattctcaccgctcttcttaaaggaacaaatttgagtgcgtccgagcagcttaatctggcgatggcctgggacagggtggatatagctaaaaaacacatccttatctacgagcaacattggaaacctgacgctctagaacaggctatgagtgatgctctggtaatggaccgcgtggattttgttaaactcctgattgaatatggcgtcaatcttcatcggtttctcacaataccacggttagaggaactttataacaccaaacaaggccccaccaatacgcttctgcaccatctggtacaggacgtgaaacaggatctgtctaagaatagcttgtggaacagcagaagcacgaacctgaatcggaacagcctgcacgtaatcaagatgcctatcagtagcctgatcagtgagattagtgctagtctaaagagcccacaggagccccatcatcattactcagccatcgaaaggaataacctgatgagactttcccagaccattccattcactcctgtgcagctgttcgcaggggaggagatcacagtctacagattagaggagtcctctccgcttaatcttgataaaagcatgtccagctggtcgcagcggggacgcgccgccatgatccaggtgctgagtcgcgaggagatggatgggggactccgaaaggccatgcgggttgtgagcacttggtcagaggacgacatcctgaaacccggacaggtttttattgtaaaaagttttctgcccgaggtagtacgcacatggcacaaaattttccaagagtccacagtccttcatctctgtctacgtgagatccaacagcagagagccgcgcagaagctaatttacactttcaaccaagtgaaacctcagacgatcccttacacaccccggttcctggaggtctttcttatctactgccatagtgccaaccagtggctgacaattgagaagtacatgactggcgagttccgtaagtataataacaacaatggagacgagatcacgccaaccaatacactggaggaactcatgttggccttctcccattggacctatgagtacacgcgcggggagctgctggtgcttgatcttcaaggcgttggtgaaaacttgactgacccgtccgtgattaaacctgaggtgaagcagtcccggggcatggtttttggtcccgctaatctgggggaagacgccatcagaaacttcattgcgaaacaccactgtaattcatgctgccggaaactgaaacttcccgacttaaagcggaacgactactcgcccgaaaggattaacagcaccttcgggctggaaattaaaatcgaatccgcggaggaaccccccgctagggagacaggacggaacagccccgaggatgacatgcagctgtag

SEQ ID NO: 309958 - DNA, 2580 bp, Artificial Sequence
  derived and/or modified sequence
atgaaagaacagccagtattggagcgactgcagtcacagaaaagctggatcaagggggtattcgacaagcgcgagtgttccaccatcatccctagctctaagaatcctcatcggtgcacacccgtctgccaggtgtgtcagaatctgatcagatgttattgcgggagactaataggcgaccacgcaggaatagattattcttggaccatttctgccgctaaggggaaggagtccgagcagtggtcggttgagaagcatacaaccaaatcaccaaccgacaccttcggcacaattaatttccaggatggcgaacatactcaccacgctaagtatatcagaacatcatacgataccaaattggatcacctgctacatctcatgctgaaggaatggaagatggagctgcctaagttggtcatctcagtgcacgggggtattcagaattttacgatgccctccaaattcaaggagatctttagtcaaggcctggtgaaagcagccgaaactaccggagcctggattatcaccgaaggtatcaacacgggggtctctaaacatgtgggtgacgcactgaaatctcactccagccactccctgcgcaaaatttggacggttggtattcctccgtggggagtgattgaaaatcagcgcgacctgattggaaaggatgtggtttgcctttatcaaactctggataatcctctctcaaaactgactacattgaactccatgcacagtcactttattctgtctgatgatggaaccgtcgggaagtacggaaacgaaatgaagctccggaggaatctggagaaatacctcagtctgcaaaagatccattgcagatctagacagggtgtacccgtagtcggtctggtggtcgagggtgggcctaacgtcatcctgagtgtatgggagacagtgaaggataaggatccagtggtagtctgcgagggtacggggagggccgcagacttgttggcatttacccataagcacctggccgacgagggcatgttgcgtccccaggtcaaagaagagatcatttgtatgatccagaatacctttaatttcagcctgaagcagtcgaagcatcttttccagattctcatggagtgtatggtccacagagactgcatcaccatcttcgatgccgactcggaagaacagcaggatctcgaccttgccatcttgacagccctcctgaaaggcacgaacctatcggcgagtgaacagctaaacctcgccatggcatgggaccgagtcgacatagctaagaaacatattctcatttatgagcagcactggaagccggacgctcttgagcaagccatgtctgatgctctggttatggatcgcgtcgattttgtgaagcttctgatcgagtatggcgtaaatctccataggtttttgacaattccacgactggaggaactgtacaatacaaagcaggggcctactaatacattactgcatcacctagtgcaagatgttaaacaagatttgagcaagaacagcctttggaactctcgtagcacaaatctaaaccgcaactctttacatgtgatcaagatgccgattagctcgctgatttcagagatttccgccagccttaagagtccgcaggaaccccaccatcactactccgcgattgaaaggaacaacctgatgcgtctgagtcagaccattccatttactcccgttcagttgttcgccggagaagaaattacggtgtaccgattggaggaaagctcccctctgaacctggataaatcgatgagttcttggagccaaagaggtagagccgctatgatccaggttctgtctagggaggagatggacggaggactcagaaaggcaatgcgtgtagttagtacgtggagcgaagatgatatacttaagcccggacaggtgttcatcgtcaagtccttcttaccggaagtggttaggacctggcataagatttttcaagagagcacagtgctgcacctgtgcttgcgtgagatccagcagcagcgggctgcacagaagttaatatatacctttaatcaagtcaagcctcaaaccatcccttatacgcctagatttctggaagtgttcctcatctattgtcatagcgctaaccagtggctcacaatcgaaaagtacatgacaggcgaatttagaaagtacaataataacaatggtgacgagattacaccaaccaatacactggaggagcttatgctggctttctctcactggacctacgagtacactcgcggagaactcctagttctagacttacagggggtgggcgaaaacctaactgatccctcagttattaaacccgaggtcaaacagtcccgcggaatggtttttgggccagccaacctcggcgaggacgctataagaaatttcatcgccaagcaccactgcaacagttgctgcagaaaactaaaactgcccgatcttaaaaggaatgactactcaccagagcggatcaactccactttcggcctggaaattaagatcgagagcgccgaggagccacctgcccgagaaaccgggagaaacagtcccgaggacgatatgcagctgtag

SEQ ID NO: 309959 - DNA, 4936 bp, Artificial Sequence
  derived and/or modified sequence
actacaaaggatgtctgtgatgacagtggccatcccatttgatcctcgttattcttcttttatcgaaggaaactgagagtcaccttcttttctaggcagttaggtaactgaagccgaaaggtattgtgacagatccactgggctgtaaaaggcagcgtgtggaggtggagcccagagtttctgcctccacagttaaaagctcagacagggctttgggagcagggcctgcaaatcaaagatgaaagaacaacctgtcttggagcgcttgcagtcccagaaatcctggattaaaggagtatttgacaagagagaatgtagcacaatcatacccagctcaaaaaatcctcacagatgtactccagtatgccaagtctgccagaatttaatcaggtgttactgtggccgactgattggagaccatgctgggatagattattcctggaccatctcagctgccaagggtaaagaaagtgaacaatggtctgttgaaaagcacacaacgaaaagcccaacagatacttttggcacgattaatttccaagatggagagcacacccatcatgccaagtatattagaacttcttatgatacaaaactggatcatctgttacatttaatgttgaaagagtggaaaatggaactgcccaagcttgtgatctcagtccatgggggcatccagaactttactatgccctctaaatttaaagagattttcagccaaggtttggttaaagctgcagagacaacaggagcgtggataataactgaaggcatcaatacaggagtgtccaagcatgttggggatgccttgaaatcccattcctctcattccttgagaaaaatctggacagttggaatccctccttggggtgtcattgagaaccagagagaccttattggaaaagatgtggtgtgcctgtaccagactctggataaccccctcagcaagctcacaacactcaacagcatgcactcgcacttcatcctgtctgatgatgggaccgtgggcaagtatggaaatgaaatgaagctcagaaggaacctggagaagtacctctctctgcagaaaatacactgccgctcaagacaaggcgtgccggtcgtggggctggtggtggaaggcggtcccaacgtcatcctgtcagtgtgggagactgtcaaggacaaggacccagtggtggtgtgtgagggcacaggtagggcggctgacctcctggccttcacacacaaacacctggcagatgaagggatgctgcgacctcaggtgaaagaggagatcatctgcatgattcagaacactttcaactttagtcttaaacagtccaagcaccttttccaaattctaatggagtgtatggttcacagggattgtattaccatatttgatgctgactctgaagagcagcaagacctggacttagcaatcctaacagctttgctgaagggcacaaatttatcagcgtcagagcaattaaatctggcaatggcttgggacagggtggacattgccaagaaacatatcctaatttatgaacaacactggaagcctgatgccctggaacaagcaatgtcagatgctttagtgatggatcgggtggattttgtgaagctcttaatagaatatggagtgaacctccatcgctttcttaccatccctcgactggaagagctctacaatacaaaacaaggacctactaatacactcttgcatcatctcgtccaagatgtgaaacaggatctcagcaaaaactctttgtggaattccaggagcaccaacctcaataggaactccctccatgtaattaaaatgccaatctcctctctaatttcagagatctcagcctccttaaaaagccctcaagagcctcaccatcattattcagccattgaaaggaataatttaatgaggctttctcagaccataccatttacaccagtccaactgtttgcaggagaagaaataactgtctacaggttggaggagagttcccctttaaaccttgataaaagcatgtcctcttggtctcagcgtgggagagcggcaatgatccaggtattgtcccgagaggagatggatgggggcctccgtaaagctatgagagtcgtcagcacttggtctgaggatgacattctcaagccgggacaagttttcattgtcaagtcctttcttcctgaggttgtgcggacatggcataaaatcttccaggagagcactgtgcttcatctttgcctcagggaaattcaacaacaaagagctgctcaaaaattgatctataccttcaaccaagtgaaaccacaaaccataccctacacaccaaggttcctggaagttttcttaatctactgccattcagccaaccagtggttgaccattgagaagtatatgacaggggagttccggaagtataacaacaacaatggtgatgaaatcacccccaccaacaccctggaggagctgatgttggctttctctcactggacctatgagtacactcggggagagctgctggttttagatttgcaaggtgttggagaaaatttgacagatccatctgttataaaacctgaagtcaaacaatcaagaggaatggtgtttggaccggccaatttgggggaagatgcaattagaaacttcattgcaaaacatcattgtaactcctgctgccggaagctcaaactcccggatttaaaaagaaatgactattcccctgaaaggataaattccacctttggacttgagataaaaatagaatcagctgaggagcctccagcaagggagacgggtagaaattccccagaagatgatatgcaactataaaaagggaggagcaagaagatcccagtgcttgccctgcctgccaggaactctgtgataacatagattgatcaacgtgatgttgattacatcagcgtctccttgggacacgccttctgagcctcacatctccttctgttcaaaggcctcattggtatatgatcaatgggttctcctagacactgacctctgtccagggcactttgcagctccatcctcaagttccacacgaagatgcttggatgagtcagctgggaatattgttcttgtgtacctcattgctttagctggtcacttggaactttggagcagaatcctgcacattaaaggatggggttgggggggatacatttattttattttctcactatgtatgcagactggaccccctactactatttgtcacctcacccacagattgtatttatgtctatatatatgttcataaaaagttatgtgatttcctcctctgtcttttccacaacataggactttgaatagcaatgataggaaaaacaatggaacaagggtgggtttgcacagattggagcacattcctgcacaaactaccaagtatactggtgaaatctcgatgggtttcagatattgtcagtgaatcatatgatgcctggatatttcaggtttctgtaaaagaaagggaaacctaaaacaaatacccttccatatataatatatatggaatatgtatattatatatatttttatatatataatatatatggaatatatatattatatatataaaatacatatggaatatatatattttatatatatatatatatatttttatttttgagatggagtttcactctttttacccaggctggagtgcaatgatgcgatctcactgcaacctctgcctcccgggcttgagcgattcttgtgtctcagtcttccgggtagctgggactacaggtgtgcaccactatgcctggctaattttgtatttttagtagagatggggtttcaccatgttggccaggctggtctcaaactcctgacctcagatgatccacctgccttggcttcccaaagtgctgggattacaggcgtgagccactgcgcctggcctttttttttttttttttaaacgagaacaagaatatgaagaactggaaatcattaagaaagggtttcccttccttaaagctcaggggtactattagttaggagttgactaactcaacctgtaaaacaccactcctccttccaaagttgtatatataatattgcaggttaaattactttatgtcaggtcctatgaagaaagatacggtttcagactgaaaacatgtttcacaggtgtttgcttccttccagagcagagttccctattcccctggcataaagaatgtatatatattttgaaatatggctgagaacatgtcattggtttgtgaggcctaaggtgaagcactcctggcagccacactgtgtagtgtatttgagggatcagtcatccctcttgtatgctgggcctggttgccctacctcgaacaagcaccagcttttcacacaaggagagatgtggggctgggagtcctctccccatcctattgcatctcctttcttattataagctgttccagttcacaggcagcaaacctcctgggtttgaaaaattccaacttatttttatctttaatcctgacattagctgacttgctagtgagcttgctttaaaaatctacactcttgcattcttaggcatacaggggaaatgttgaaaaggaaggtggaaaaccaagaatttagtttgccaatgattgcctctgattcttgtaagtttgagttccacaagggctaatttattccccttttacttgggttttggggtggtggaaagcgggaaatttgggtgatttgttgattggcaatgaggataaaatgttaatacttttttggggacttaacaactttatcctattctacaagtcagtaaaggaacaattggtactcacctcagtgctgcactcaactatggaaagaggcagagtttgcttgcccaattgccaaactaaagacatcagttcattggtcaaatatttgttacctggaatggaacttgaaagcaaatacatttggatttcaaatttc

SEQ ID NO: 309960 - protein, 303 aa, Artificial Sequence
  derived and/or modified sequence
MKEQPVLERLQSQKSWIKGVFDKRECSTIIPSSKNPHRCTPVCQVCQNLIRCYCGRLIGDHAGIDYSWTISAAKGKESEQWSVEKHTTKSPTDTFGTINFQDGEHTHHAKYIRTSYDTKLDHLLHLMLKEWKMELPKLVISVHGGIQNFTMPSKFKEIFSQGLVKAAETTGAWIITEGINTGVSKHVGDALKSHSSHSLRKIWTVGIPPWGVIENQRDLIGKDVVCLYQTLDNPLSKLTTLNSMHSHFILSDDGTVGKYGNEMKLRRNLEKYLSLQKIHCREYHRGSVTQSGCRPAEVFHGLP

SEQ ID NO: 309961 - protein, 1133 aa, Artificial Sequence
  derived and/or modified sequence
MLRPQVKEEIICMIQNTFNFSLKQSKHLFQILMECMVHRDCITIFDADSEEQQDLDLAILTALLKGTNLSASEQLNLAMAWDRVDIAKKHILIYEQHWKPDALEQAMSDALVMDRVDFVKLLIEYGVNLHRFLTIPRLEELYNTKQGPTNTLLHHLVQDVKQHTLLSGYRITLIDIGLVVEYLIGRAYRSNYTRKHFRALYNNLYRKYKHQRHSSGNRNESAESTLHSQFIRTAQPYKFKEKSIVLHKSRKKSKEQNVSDDPESTGFLYPYNDLLVWAVLMKRQKMAMFFWQHGEEATVKAVIACILYRAMAHEAKESHMVDDASEELKNYSKQFGQLALDLLEKAFKQNERMAMTLLTYELRNWSNSTCLKLAVSGGLRPFVSHTCTQMLLTDMWMGRLKMRKNSWLKIIISIILPPTILTLEFKSKAEMSHVPQSQDFQFMWYYSDQNASSSKESASVKEYDLERGHDEKLDENQHFGLESGHQHLPWTRKVYEFYSAPIVKFWFYTMAYLAFLMLFTYTVLVEMQPQPSVQEWLVSIYIFTNAIEVVREICISEPGKFTQKVKVWISEYWNLTETVAIGLFSAGFVLRWGDPPFHTAGRLIYCIDIIFWFSRLLDFFAVNQHAGPYVTMIAKMTANMFYIVIIMAIVLLSFGVARKAILSPKEPPSWSLARDIVFEPYWMIYGEVYAGEIDVCSSQPSCPPGSFLTPFLQAVYLFVQYIIMVNLLIAFFNNVYLDMESISNNLWKYNRYRYIMTYHEKPWLPPPLILLSHVGLLLRRLCCHRAPHDQEEGDVGLKLYLSKEDLKKLHDFEEQCVEKYFHEKMEDVNCSCEERIRVTSERVTEMYFQLKEMNEKVSFIKDSLLSLDSQVGHLQDLSALTVDTLKVLSAVDTLQEDEALLAKRKHSTCKKLPHSWSNVICAEVLGSMEIAGEKKYQYYSMPSSLLRSLAGGRHPPRVQRGALLEITNSKREATNVRNDQERQETQSSIVVSGVSPNRQAHSKYGQFLLVPSNLKRVPFSAETVLPLSRPSVPDVLATEQDIQTEVLVHLTGQTPVVSDWASVDEPKEKHEPIAHLLDGQDKAEQVLPTLSCTPEPMTMSSPLRRYRPFARSHSFRFHKEEKLMKICKIKSKE

SEQ ID NO: 309962 - protein, 568 aa, Artificial Sequence
  derived and/or modified sequence
RESPHPALLQSQKSWIKGVFDKRECSTIIPSSKNPHRCTPVCQVCQNLIRCYCGRLIGDHAGIDYSWTISAAKGKESEQWSVEKHTTKSPTDTFGTINFQDGEHTHHAKYIRTSYDTKLDHLLHLMLKEWKMELPKLVISVHGGIQNFTMPSKFKEIFSQGLVKAAETTGAWIITEGINTGVSKHVGDALKSHSSHSLRKIWTVGIPPWGVIENQRDLIGKDVVCLYQTLDNPLSKLTTLNSMHSHFILSDDGTVGKYGNEMKLRRNLEKYLSLQKIHCPGEEITVYRLEESSPLNLDKSMSSWSQRGRAAMIQVLSREEMDGGLRKAMRVVSTWSEDDILKPGQVFIVKSFLPEVVRTWHKIFQESTVLHLCLREIQQQRAAQKLIYTFNQVKPQTIPYTPRFLEVFLIYCHSANQWLTIEKYMTGEFRKYNNNNGDEITPTNTLEELMLAFSHWTYEYTRGELLVLDLQGVGENLTDPSVIKPEVKQSRGMVFGPANLGEDAIRNFIAKHHCNSCCRKLKLPDLKRNDYSPERINSTFGLEIKIESAEEPPARETGRNSPEDDMQL

SEQ ID NO: 309963 - protein, 1133 aa, Artificial Sequence
  derived and/or modified sequence
MLRPQVKEEIICMIQNTFNFSLKQSKHLFQILMECMVHRDCITIFDADSEEQQDLDLAILTALLKGTNLSASEQLNLAMAWDRVDIAKKHILIYEQHWKPDALEQAMSDALVMDRVDFVKLLIEYGVNLHRFLTIPRLEELYNTKQGPTNTLLHHLVQDVKQHTLLSGYRITLIDIGLVVEYLIGRAYRSNYTRKHFRALYNNLYRKYKHQRHSSGNRNESAESTLHSQFIRTAQPYKFKEKSIVLHKSRKKSKEQNVSDDPESTGFLYPYNDLLVWAVLMKRQKMAMFFWQHGEEATVKAVIACILYRAMAHEAKESHMVDDASEELKNYSKQFGQLALDLLEKAFKQNERMAMTLLTYELRNWSNSTCLKLAVSGGLRPFVSHTCTQMLLTDMWMGRLKMRKNSWLKIIISIILPPTILTLEFKSKAEMSHVPQSQDFQFMWYYSDQNASSSKESASVKEYDLERGHDEKLDENQHFGLESGHQHLPWTRKVYEFYSAPIVKFWFYTMAYLAFLMLFTYTVLVEMQPQPSVQEWLVSIYIFTNAIEVVREICISEPGKFTQKVKVWISEYWNLTETVAIGLFSAGFVLRWGDPPFHTAGRLIYCIDIIFWFSRLLDFFAVNQHAGPYVTMIAKMTANMFYIVIIMAIVLLSFGVARKAILSPKEPPSWSLARDIVFEPYWMIYGEVYAGEIDVCSSQPSCPPGSFLTPFLQAVYLFVQYIIMVNLLIAFFNNVYLDMESISNNLWKYNRYRYIMTYHEKPWLPPPLILLSHVGLLLRRLCCHRAPHDQEEGDVGLKLYLSKEDLKKLHDFEEQCVEKYFHEKMEDVNCSCEERIRVTSERVTEMYFQLKEMNEKVSFIKDSLLSLDSQVGHLQDLSALTVDTLKVLSAVDTLQEDEALLAKRKHSTCKKLPHSWSNVICAEVLGSMEIAGEKKYQYYSMPSSLLRSLAGGRHPPRVQRGALLEITNSKREATNVRNDQERQETQSSIVVSGVSPNRQAHSKYGQFLLVPSNLKRVPFSAETVLPLSRPSVPDVLATEQDIQTEVLVHLTGQTPVVSDWASVDEPKEKHEPIAHLLDGQDKAEQVLPTLSCTPEPMTMSSPLSRYRPFARSHSFRFHKEEKLMKICKIKSKE

SEQ ID NO: 309964 - protein, 977 aa, Artificial Sequence
  derived and/or modified sequence
MKEQPVLERLQSQKSWIKGVFDKRECSTIIPSSKNPHRCTPVCQVCQNLIRCYCGRLIGDHAGIDYSWTISAAKGKESEQWSVEKHTTKSPTDTFGTINFQDGEHTHHAKYIRTSYDTKLDHLLHLMLKEWKMELPKLVISVHGGIQNFTMPSKFKEIFSQGLVKAAETTGAWIITEGINTGVSKHVGDALKSHSSHSLRKIWTVGIPPWGVIENQRDLIGKDVVCLYQTLDNPLSKLTTLNSMHSHFILSDDGTVGKYGNEMKLRRNLEKYLSLQKIHCRSRQGVPVVGLVVEGGPNVILSVWETVKDKDPVVVCEGTGRAADLLAFTHKHLADEGMLRPQVKEEIICMIQNTFNFSLKQSKHLFQILMECMVHRDCITIFDADSEEQQDLDLAILTALLKGTNLSASEQLNLAMAWDRVDIAKKHILIYEQHWKPDALEQAMSDALVMDRVDFVKLLIEYGVNLHRFLTIPRLEELYNTKQGPTNTLLHHLVQDVKQHTLLSGYRITLIDIGLVVEYLIGRAYRSNYTRKHFRALYNNLYRKYKIITVNACSQSDQLNPEPGENSISEEEYSKNWFTVSKFSHTGVEPYIHQKMKTKEIGQCAIQISDYLKQSQEDLSKNSLWNSRSTNLNRNSLHVIKMPISSLISEISASLKSPQEPHHHYSAIERNNLMRLSQTIPFTPVQLFAGEEITVYRLEESSPLNLDKSMSSWSQRGRAAMIQVLSREEMDGGLRKAMRVVSTWSEDDILKPGQVFIVKSFLPEVVRTWHKIFQESTVLHLCLREIQQQRAAQKLIYTFNQVKPQTIPYTPRFLEVFLIYCHSANQWLTIEKYMTGEFRKYNNNNGDEITPTNTLEELMLAFSHWTYEYTRGELLVLDLQGVGENLTDPSVIKPEVKQSRGMVFGPANLGEDAIRNFIAKHHCNSCCRKLKLPDLKRNDYSPERINSTFGLEIKIESAEEPPARETGRNSPEDDMQL

SEQ ID NO: 309965 - DNA, 3402 bp, Artificial Sequence
  derived and/or modified sequence
atgctgagaccccaggtgaaggaggagatcatctgcatgatccagaacaccttcaacttcagcctgaagcagagcaagcacctgttccagatcctgatggagtgcatggtgcacagagactgcatcaccatcttcgacgccgacagcgaggagcagcaggacctggacctggccatcctgaccgccctgctgaagggcaccaacctgagcgccagcgagcagctgaacctggccatggcctgggacagagtggacatcgccaagaagcacatcctgatctacgagcagcactggaagcccgacgccctggagcaggccatgagcgacgccctggtgatggacagagtggacttcgtgaagctgctgatcgagtacggcgtgaacctgcacagattcctgaccatccccagactggaggagctgtacaacaccaagcagggccccaccaacaccctgctgcaccacctggtgcaggacgtgaagcagcacaccctgctgagcggctacagaatcaccctgatcgacatcggcctggtggtggagtacctgatcggcagagcctacagaagcaactacaccagaaagcacttcagagccctgtacaacaacctgtacagaaagtacaagcaccagagacacagcagcggcaacagaaacgagagcgccgagagcaccctgcacagccagttcatcagaaccgcccagccctacaagttcaaggagaagagcatcgtgctgcacaagagcagaaagaagagcaaggagcagaacgtgagcgacgaccccgagagcaccggcttcctgtacccctacaacgacctgctggtgtgggccgtgctgatgaagagacagaagatggccatgttcttctggcagcacggcgaggaggccaccgtgaaggccgtgatcgcctgcatcctgtacagagccatggcccacgaggccaaggagagccacatggtggacgacgccagcgaggagctgaagaactacagcaagcagttcggccagctggccctggacctgctggagaaggccttcaagcagaacgagagaatggccatgaccctgctgacctacgagctgagaaactggagcaacagcacctgcctgaagctggccgtgagcggcggcctgagacccttcgtgagccacacctgcacccagatgctgctgaccgacatgtggatgggcagactgaagatgagaaagaacagctggctgaagatcatcatcagcatcatcctgccccccaccatcctgaccctggagttcaagagcaaggccgagatgagccacgtgccccagagccaggacttccagttcatgtggtactacagcgaccagaacgccagcagcagcaaggagagcgccagcgtgaaggagtacgacctggagagaggccacgacgagaagctggacgagaaccagcacttcggcctggagagcggccaccagcacctgccctggaccagaaaggtgtacgagttctacagcgcccccatcgtgaagttctggttctacaccatggcctacctggccttcctgatgctgttcacctacaccgtgctggtggagatgcagccccagcccagcgtgcaggagtggctggtgagcatctacatcttcaccaacgccatcgaggtggtgagagagatctgcatcagcgagcccggcaagttcacccagaaggtgaaggtgtggatcagcgagtactggaacctgaccgagaccgtggccatcggcctgttcagcgccggcttcgtgctgagatggggcgacccccccttccacaccgccggcagactgatctactgcatcgacatcatcttctggttcagcagactgctggacttcttcgccgtgaaccagcacgccggcccctacgtgaccatgatcgccaagatgaccgccaacatgttctacatcgtgatcatcatggccatcgtgctgctgagcttcggcgtggccagaaaggccatcctgagccccaaggagccccccagctggagcctggccagagacatcgtgttcgagccctactggatgatctacggcgaggtgtacgccggcgagatcgacgtgtgcagcagccagcccagctgcccccccggcagcttcctgacccccttcctgcaggccgtgtacctgttcgtgcagtacatcatcatggtgaacctgctgatcgccttcttcaacaacgtgtacctggacatggagagcatcagcaacaacctgtggaagtacaacagatacagatacatcatgacctaccacgagaagccctggctgcccccccccctgatcctgctgagccacgtgggcctgctgctgagaagactgtgctgccacagagccccccacgaccaggaggagggcgacgtgggcctgaagctgtacctgagcaaggaggacctgaagaagctgcacgacttcgaggagcagtgcgtggagaagtacttccacgagaagatggaggacgtgaactgcagctgcgaggagagaatcagagtgaccagcgagagagtgaccgagatgtacttccagctgaaggagatgaacgagaaggtgagcttcatcaaggacagcctgctgagcctggacagccaggtgggccacctgcaggacctgagcgccctgaccgtggacaccctgaaggtgctgagcgccgtggacaccctgcaggaggacgaggccctgctggccaagagaaagcacagcacctgcaagaagctgccccacagctggagcaacgtgatctgcgccgaggtgctgggcagcatggagatcgccggcgagaagaagtaccagtactacagcatgcccagcagcctgctgagaagcctggccggcggcagacacccccccagagtgcagagaggcgccctgctggagatcaccaacagcaagagagaggccaccaacgtgagaaacgaccaggagagacaggagacccagagcagcatcgtggtgagcggcgtgagccccaacagacaggcccacagcaagtacggccagttcctgctggtgcccagcaacctgaagagagtgcccttcagcgccgagaccgtgctgcccctgagcagacccagcgtgcccgacgtgctggccaccgagcaggacatccagaccgaggtgctggtgcacctgaccggccagacccccgtggtgagcgactgggccagcgtggacgagcccaaggagaagcacgagcccatcgcccacctgctggacggccaggacaaggccgagcaggtgctgcccaccctgagctgcacccccgagcccatgaccatgagcagccccctgagaagatacagacccttcgccagaagccacagcttcagattccacaaggaggagaagctgatgaagatctgcaagatcaagagcaaggagtag

SEQ ID NO: 309966 - DNA, 3402 bp, Artificial Sequence
  derived and/or modified sequence
atgctgagaccccaggtgaaggaggagatcatctgcatgatccagaacaccttcaacttcagcctgaagcagagcaagcacctgttccagatcctgatggagtgcatggtgcacagagactgcatcaccatcttcgacgccgacagcgaggagcagcaggacctggacctggccatcctgaccgccctgctgaagggcaccaacctgagcgccagcgagcagctgaacctggccatggcctgggacagagtggacatcgccaagaagcacatcctgatctacgagcagcactggaagcccgacgccctggagcaggccatgagcgacgccctggtgatggacagagtggacttcgtgaagctgctgatcgagtacggcgtgaacctgcacagattcctgaccatccccagactggaggagctgtacaacaccaagcagggccccaccaacaccctgctgcaccacctggtgcaggacgtgaagcagcacaccctgctgagcggctacagaatcaccctgatcgacatcggcctggtggtggagtacctgatcggcagagcctacagaagcaactacaccagaaagcacttcagagccctgtacaacaacctgtacagaaagtacaagcaccagagacacagcagcggcaacagaaacgagagcgccgagagcaccctgcacagccagttcatcagaaccgcccagccctacaagttcaaggagaagagcatcgtgctgcacaagagcagaaagaagagcaaggagcagaacgtgagcgacgaccccgagagcaccggcttcctgtacccctacaacgacctgctggtgtgggccgtgctgatgaagagacagaagatggccatgttcttctggcagcacggcgaggaggccaccgtgaaggccgtgatcgcctgcatcctgtacagagccatggcccacgaggccaaggagagccacatggtggacgacgccagcgaggagctgaagaactacagcaagcagttcggccagctggccctggacctgctggagaaggccttcaagcagaacgagagaatggccatgaccctgctgacctacgagctgagaaactggagcaacagcacctgcctgaagctggccgtgagcggcggcctgagacccttcgtgagccacacctgcacccagatgctgctgaccgacatgtggatgggcagactgaagatgagaaagaacagctggctgaagatcatcatcagcatcatcctgccccccaccatcctgaccctggagttcaagagcaaggccgagatgagccacgtgccccagagccaggacttccagttcatgtggtactacagcgaccagaacgccagcagcagcaaggagagcgccagcgtgaaggagtacgacctggagagaggccacgacgagaagctggacgagaaccagcacttcggcctggagagcggccaccagcacctgccctggaccagaaaggtgtacgagttctacagcgcccccatcgtgaagttctggttctacaccatggcctacctggccttcctgatgctgttcacctacaccgtgctggtggagatgcagccccagcccagcgtgcaggagtggctggtgagcatctacatcttcaccaacgccatcgaggtggtgagagagatctgcatcagcgagcccggcaagttcacccagaaggtgaaggtgtggatcagcgagtactggaacctgaccgagaccgtggccatcggcctgttcagcgccggcttcgtgctgagatggggcgacccccccttccacaccgccggcagactgatctactgcatcgacatcatcttctggttcagcagactgctggacttcttcgccgtgaaccagcacgccggcccctacgtgaccatgatcgccaagatgaccgccaacatgttctacatcgtgatcatcatggccatcgtgctgctgagcttcggcgtggccagaaaggccatcctgagccccaaggagccccccagctggagcctggccagagacatcgtgttcgagccctactggatgatctacggcgaggtgtacgccggcgagatcgacgtgtgcagcagccagcccagctgcccccccggcagcttcctgacccccttcctgcaggccgtgtacctgttcgtgcagtacatcatcatggtgaacctgctgatcgccttcttcaacaacgtgtacctggacatggagagcatcagcaacaacctgtggaagtacaacagatacagatacatcatgacctaccacgagaagccctggctgcccccccccctgatcctgctgagccacgtgggcctgctgctgagaagactgtgctgccacagagccccccacgaccaggaggagggcgacgtgggcctgaagctgtacctgagcaaggaggacctgaagaagctgcacgacttcgaggagcagtgcgtggagaagtacttccacgagaagatggaggacgtgaactgcagctgcgaggagagaatcagagtgaccagcgagagagtgaccgagatgtacttccagctgaaggagatgaacgagaaggtgagcttcatcaaggacagcctgctgagcctggacagccaggtgggccacctgcaggacctgagcgccctgaccgtggacaccctgaaggtgctgagcgccgtggacaccctgcaggaggacgaggccctgctggccaagagaaagcacagcacctgcaagaagctgccccacagctggagcaacgtgatctgcgccgaggtgctgggcagcatggagatcgccggcgagaagaagtaccagtactacagcatgcccagcagcctgctgagaagcctggccggcggcagacacccccccagagtgcagagaggcgccctgctggagatcaccaacagcaagagagaggccaccaacgtgagaaacgaccaggagagacaggagacccagagcagcatcgtggtgagcggcgtgagccccaacagacaggcccacagcaagtacggccagttcctgctggtgcccagcaacctgaagagagtgcccttcagcgccgagaccgtgctgcccctgagcagacccagcgtgcccgacgtgctggccaccgagcaggacatccagaccgaggtgctggtgcacctgaccggccagacccccgtggtgagcgactgggccagcgtggacgagcccaaggagaagcacgagcccatcgcccacctgctggacggccaggacaaggccgagcaggtgctgcccaccctgagctgcacccccgagcccatgaccatgagcagccccctgagcagatacagacccttcgccagaagccacagcttcagattccacaaggaggagaagctgatgaagatctgcaagatcaagagcaaggagtag

SEQ ID NO: 309967 - DNA, 3402 bp, Artificial Sequence
  derived and/or modified sequence
atgctccgtccacaggtcaaggaggagatcatctgcatgattcaaaacaccttcaacttctctctgaaacagagcaaacatttgtttcagatcctgatggaatgtatggtccatcgggattgcattacaatatttgacgcagattccgaagaacagcaggatctggatctggctattctgacagccctgttaaaaggcacaaacctctctgctagcgagcaactcaatcttgccatggcatgggaccgtgtggatattgccaagaagcatattttaatttacgagcaacattggaagcctgacgccttggagcaggctatgagtgacgccctggtgatggaccgagtggatttcgtaaagctgctgatcgagtacggcgtaaacctccatcggttcctgactatacctcggctggaagaactctataatactaagcagggccccactaatacactcctgcatcacctcgtacaggatgtcaaacagcacacacttcttagcgggtaccgaatcacactgatcgatattggactggtggtggagtatttgatcggtcgcgcttacaggagcaattatactcgaaagcactttagagcactgtacaataatctgtataggaagtacaaacaccaaaggcactcaagcggcaacaggaacgagagcgccgagagtacgttgcactcacagttcattaggactgctcagccgtataaattcaaagaaaaatctatcgttttgcataagagcaggaaaaagtccaaagaacagaacgtctcggatgatccagaaagcacaggattcctttatccttataatgacctgctggtgtgggccgtgctcatgaagcggcaaaagatggctatgtttttttggcagcacggcgaggaagcaactgtgaaagcagtgatcgcctgtatactgtatagagctatggcacacgaagccaaggagagtcacatggttgatgacgcttctgaggagttgaaaaattactctaagcagtttggccagctggccctagacttgctggagaaggctttcaagcagaatgaacgaatggcaatgactctattaacttacgagcttaggaactggagcaattcaacatgcctgaaattggccgtgtccggtggcctcaggccatttgtgagtcacacctgcacccagatgctgttgaccgacatgtggatgggcagattgaaaatgcgcaaaaattcttggctcaagattatcatcagcatcatcctgcctccaaccatccttactctcgaattcaagagcaaggcagaaatgtcccacgttccccaaagccaggacttccaatttatgtggtattattccgatcagaatgcctctagctcgaaggagtccgcttccgtgaaagaatatgacctggagcgggggcacgacgaaaagctggacgagaatcaacattttggcctcgaatcaggccaccagcaccttccatggacccgcaaagtgtacgagttctacagcgcacctatcgttaaattttggttctataccatggcatatctggcattcttaatgttgttcacctatacagtgctggtagagatgcagccacaaccatccgtgcaggaatggctagtgtccatttacatatttacaaatgcgatcgaggtcgtccgggagatttgcatatctgagcccgggaaatttacacagaaggtaaaagtgtggatatccgaatactggaatttgactgagactgtcgccatcggtctgtttagcgcaggatttgtgctgaggtggggggatccgccctttcacacagcaggacgcctgatttactgtattgacatcatcttttggttttcgcgactgctagatttcttcgccgtgaatcagcacgcggggccctacgtaacgatgatcgccaagatgactgccaatatgttctatatcgtgatcataatggcgatcgttctcttgtcattcggggttgctaggaaggccatcctatccccaaaggaaccaccttcctggagtctggcccgtgacatcgtgtttgaaccctactggatgatatatggcgaagtctatgcaggagagattgacgtctgctcctcacaaccttcctgccctccaggatccttccttactccatttctccaggcggtgtacctatttgtccagtacataattatggtaaatttgctgatcgctttctttaacaacgtgtacctggatatggagtccatctccaacaatttatggaagtacaatagataccgctacattatgacataccacgagaaaccatggttgcccccccctctcattcttctttcacacgtaggcctgctactccgaagactatgctgtcatagagccccacacgatcaggaagagggggatgtcggcttgaaactgtatctgagtaaggaagatctcaagaaattacatgacttcgaagaacaatgcgtagagaaatactttcacgaaaaaatggaagacgtgaattgtagttgtgaggagcggatcagggtgactagcgagcgggttacagaaatgtactttcagctcaaggaaatgaatgaaaaggtatccttcattaaggactctttattgagcctggactcacaggttgggcatctgcaggacctttcggccctaacagttgacaccctcaaggtcctgtcagccgtggataccctgcaagaggatgaagctctgctggctaaacgtaagcattcaacctgtaagaagttgccacatagctggtctaacgtgatctgcgctgaagtcctgggtagcatggaaatcgcaggcgaaaagaagtaccagtattactcgatgccgtcatccttgctgcgctcactggctgggggacgtcatccgccaagagtgcaaagaggtgcactgctggagattaccaacagcaagcgcgaagcaacaaacgtccgcaacgaccaggagcgtcaggaaactcagagctccatcgtcgtgagtggcgtatcccccaaccgtcaggcccactccaagtatggccagttcctcctcgtccccagtaatctcaaaagagttccgttttccgccgagactgttttgccactctccaggccatccgttcctgatgtcctggctacagagcaggatatccaaaccgaagttctggtgcatctgactgggcagacacccgtcgtcagtgactgggcgagtgtcgatgaaccaaaggagaaacacgagccgattgcccacctcctcgacggccaggataaagccgaacaggtgcttcccaccctgtcctgcactccagagcctatgaccatgtcttctccactgcgccgctacaggcctttcgcccgctctcacagttttagattccacaaggaggagaaactcatgaaaatctgcaagattaagagtaaagagtag

SEQ ID NO: 309968 - DNA, 3402 bp, Artificial Sequence
  derived and/or modified sequence
atgttgcggcctcaggtgaaggaagagattatctgcatgatccagaatacatttaatttctcactcaagcagtctaagcacctgttccaaattttgatggagtgtatggtacaccgcgactgtatcacaatctttgacgctgattctgaagaacagcaggacctcgatctagccattctcactgctttgctgaaaggaaccaacctttccgcaagcgaacagctcaacctggctatggcctgggatcgggtggatatcgctaagaagcatatcctcatctacgagcagcactggaagccggatgccttggaacaggcaatgtccgacgctctcgttatggatcgtgtagacttcgtcaagcttctaattgaatacggtgtaaacctccacagattcctgaccatcccaagactcgaagaattatacaataccaagcagggcccgaccaacacccttctgcaccatctggtacaagacgtcaaacagcataccctcctcagcgggtatcgtatcaccctgatagacatcggtctggtggtggaatacctcattggtcgagcctatcgatctaactatacccgcaagcactttagagcgctttacaacaacctctatcggaagtataaacaccagcggcactcaagtggcaatcgcaatgagtcagccgaaagtactttgcatagccagttcattcgcactgctcagccctacaagtttaaggagaaaagcatcgtactgcacaagtcacgcaaaaagtctaaggagcagaatgtttccgatgacccagaaagcaccggattcctctacccctataacgacttgctggtgtgggcagtgctcatgaagagacagaagatggccatgttcttttggcagcacggagaagaggcaactgtcaaagccgtgatcgcgtgtattttgtaccgagctatggcacatgaggcgaaagagtcccacatggtggacgacgcttctgaggaactgaagaactattctaaacagttcggccagctggctctggatctgttggagaaagccttcaaacagaacgagcggatggccatgaccctgctaacctacgagctgcggaattggtctaactccacgtgcctgaaacttgccgtgtcaggagggcttagaccattcgtgagccatacctgcacccaaatgctcctgaccgatatgtggatgggcagactgaagatgcggaaaaattcgtggttaaaaattatcatttctatcatcctgccacccacaatcctgacattagagttcaagtcaaaagccgagatgagccatgtgccccagagccaggattttcagtttatgtggtactactcagatcagaacgcaagtagctccaaagaaagcgctagcgtcaaggaatatgacctcgagagggggcacgatgagaagctggacgagaatcaacattttggacttgagtcaggccaccaacatctgccctggacccgcaaagtgtatgagttttactccgccccaatcgtgaagttttggttttatacaatggcatacctggctttcttgatgctttttacctacacagttttggtggaaatgcaacctcagccctcagtacaagaatggttggtctccatatatatcttcactaacgcaattgaagtggtgagagagatttgcatcagcgagccaggaaagttcacccagaaggtgaaagtgtggatctccgaatactggaacctgacagagacagtggccatcgggctgttctcagctggatttgtcctgagatggggggatcccccatttcacaccgctgggcggctgatttactgtatcgatattattttttggtttagccgtttgttagatttctttgcagttaaccagcacgctggcccctatgtgacgatgattgccaaaatgactgcaaacatgttctacatagtgataataatggcgatcgtactgctatcattcggagttgcgcgtaaagcaattctgtctccgaaggaaccacccagctggtcgctggctagagacatcgtgtttgaaccttattggatgatctacggggaggtgtacgccggggagattgatgtgtgttcaagtcagccgagttgcccaccaggaagcttcctgactcctttcctgcaggcggtgtatctcttcgtgcagtacatcatcatggttaacttgcttatagccttttttaataatgtttacctagacatggagtctatatccaataacctctggaaatataacagatatagatacattatgacctatcacgagaagccttggttgccccctcccctgatattgctaagtcacgtggggcttctgctacgacggctgtgctgccatagagcacctcatgaccaggaagagggcgacgtcggcctgaagctatacttgtcaaaagaagatctcaagaagctccacgacttcgaggagcagtgcgttgagaaatactttcacgaaaagatggaagatgtgaattgttcttgcgaagaaaggatccgtgtgacctctgaaagggtgacggagatgtattttcagctgaaggagatgaatgagaaagtgtccttcatcaaagactctttgctttcattagatagtcaggttggtcacctacaggatctctctgccttgactgtcgatactctgaaggtgctgtccgcagtagatactctgcaagaggacgaggccctgctcgcaaaaaggaagcatagcacttgcaagaaactcccacactcctggtccaacgtcatttgtgctgaagttctgggatccatggagatcgctggcgaaaaaaaataccagtactattccatgccaagctctcttctgcggagcttagccggcggaaggcaccccccaagggtgcagaggggggcactgttagagatcacaaactccaaacgtgaggcaacgaacgtacgcaatgaccaggaaaggcaggagacccagtcgagcatcgtggtttcaggggtcagccctaatagacaagcccacagcaagtacggccaatttttattggtgccttctaacctgaaacgggtgcccttctctgctgaaaccgtactgcccttgtctagaccatccgtgccggacgtcctggcgacggagcaggatatccagacagaagtgcttgtccacctgacaggacagactcccgtggtctctgactgggctagcgtggatgagcctaaagagaagcacgagccaatcgcacatctgctagacgggcaggacaaagctgagcaggtgcttcccaccctgagctgtacgccagagccgatgaccatgtcctctcccctgtcccggtacaggccattcgctaggtcccacagcttcagatttcacaaagaagaaaagctgatgaagatttgtaaaataaagtccaaagagtag

SEQ ID NO: 309969 - DNA, 3402 bp, Artificial Sequence
  derived and/or modified sequence
atgctgcggccccaggtgaaggaggagatcatctgcatgatccagaacaccttcaacttcagcctgaagcagagcaagcacctgttccagatcctgatggagtgcatggtgcaccgggactgcatcaccatctttgatgctgacagcgaggagcagcaggacctggacctggccatcctgacagccctgctgaagggcaccaacctgagcgccagcgagcagctgaacctggccatggcctgggacagagtggacatcgccaagaagcacatcctgatctatgagcagcactggaagccagatgccctggagcaggccatgtctgatgccctggtgatggacagagtggactttgtgaagctgctgattgaatatggagtgaacctgcaccgcttcctgaccatcccccggctggaggagctgtacaacaccaagcagggccccaccaacaccctgctgcaccacctggtgcaggatgtgaagcagcacaccctgctgagcggctaccgcatcaccctgattgacatcggcctggtggtggagtacctgattggccgggcctaccgcagcaactacaccaggaagcacttccgggccctgtacaacaacctgtacaggaagtacaagcaccagaggcacagcagcggcaacagaaatgaatctgctgagagcaccctgcacagccagttcatcagaacagcccagccctacaagttcaaggagaagagcatcgtgctgcacaagagcaggaagaagagcaaggagcagaatgtgtctgatgatcctgagagcacaggcttcctgtacccctacaatgacctgctggtgtgggccgtgctgatgaagaggcagaagatggccatgttcttctggcagcacggggaggaggccaccgtgaaggctgtgattgcctgcatcctgtaccgggccatggcccacgaggccaaggagagccacatggtggatgatgccagcgaggagctgaagaactacagcaagcagtttggccagctggccctggacctgctggagaaggccttcaagcagaatgaaagaatggccatgaccctgctgacctatgagctgaggaactggagcaacagcacctgcctgaagctggccgtgtctgggggcctgcggccctttgtgagccacacctgcacccagatgctgctgacagacatgtggatgggccgcctgaagatgaggaagaacagctggctgaagatcatcatcagcatcatcctgccccccaccatcctgaccctggagttcaagagcaaggccgagatgagccacgtgccccagagccaggacttccagttcatgtggtactacagcgaccagaatgccagcagcagcaaggagagcgcctctgtgaaggagtatgacctggagcggggccatgatgagaagctggatgagaaccagcacttcggcctggagagcggccaccagcacctgccctggaccaggaaggtgtatgagttctacagcgcccccatcgtgaagttctggttctacaccatggcctacctggccttcctgatgctgttcacctacacagtgctggtggagatgcagccccagcccagcgtgcaggagtggctggtgtccatctacatcttcaccaatgccatcgaggtggtgcgggagatctgcatcagcgagcccgggaagttcacccagaaggtgaaggtgtggatcagcgagtactggaacctgacagagaccgtggccatcggcctcttctctgctggctttgtgctgcgctggggagacccccccttccacacagctggccgcctcatctactgcatcgacatcatcttctggttcagccggctgctggacttctttgctgtgaaccagcacgccggcccctacgtgaccatgattgccaagatgacagccaacatgttctacatcgtcatcatcatggccatcgtgctgctgagctttggagtggccaggaaggccatcctgagccccaaggagcccccatcctggagcctggcccgggacatcgtgtttgagccctactggatgatctatggagaggtgtatgctggggagattgatgtgtgcagcagccagcccagctgccccccaggcagcttcctgacccccttcctgcaggccgtgtacctgtttgtgcagtacatcatcatggtgaacctgctgattgccttcttcaacaacgtgtacctggacatggagagcatcagcaacaacctgtggaagtacaaccgctaccgctacatcatgacctaccacgagaagccctggctgcccccacccctcatcctgctgagccacgtgggcctgctgctgcggcggctgtgctgccaccgggcccctcatgaccaggaggagggagatgtgggcctgaagctgtacctgagcaaggaggacctgaagaagctgcatgactttgaggagcagtgtgtggagaagtacttccacgagaagatggaggatgtgaactgcagctgtgaggagcgcatccgggtgaccagcgagcgggtgacagagatgtacttccagctgaaggagatgaatgagaaggtgtccttcatcaaggacagcctgctgagcctggacagccaggtgggccacctgcaggacctgagcgccctgactgtggacaccctgaaggtgctgtctgctgtggacaccctgcaggaggatgaggccctgctggccaagaggaagcacagcacctgcaagaagctgccccacagctggagcaatgtcatctgtgccgaggtgctgggctccatggagattgctggggagaagaagtaccagtactacagcatgcccagcagcctgctgcggagcctggccggcggccgccaccccccccgggtgcagagaggagccctgctggagatcaccaacagcaagcgggaggccaccaacgtgagaaatgaccaggagcggcaggagacccagagcagcatcgtggtgtctggagtgagccccaaccggcaggcccacagcaaatatggccagttcctgctggtgcccagcaacctgaagagggtgcccttctctgctgagaccgtgctgcccctgagccggcccagcgtgcctgatgtgctggccacagagcaggacatccagacagaggtgctggtgcacctgaccggccagacccctgtggtgtctgactgggcctctgtggatgagcccaaggagaagcatgagcccatcgcccacctgctggatggccaggacaaggccgagcaggtgctgcccaccctgagctgcaccccagagcccatgaccatgagcagccccctgcggcgctaccggccctttgcccggagccacagcttccgcttccacaaggaggagaagctgatgaagatctgcaagatcaagagcaaggagtag

SEQ ID NO: 309970 - DNA, 3402 bp, Artificial Sequence
  derived and/or modified sequence
atgctgcggccccaggtgaaggaggagatcatctgcatgatccagaacaccttcaacttcagcctgaagcagagcaagcacctgttccagatcctgatggagtgcatggtgcaccgggactgcatcaccatctttgatgctgacagcgaggagcagcaggacctggacctggccatcctgacagccctgctgaagggcaccaacctgagcgccagcgagcagctgaacctggccatggcctgggacagagtggacatcgccaagaagcacatcctgatctatgagcagcactggaagccagatgccctggagcaggccatgtctgatgccctggtgatggacagagtggactttgtgaagctgctgattgaatatggagtgaacctgcaccgcttcctgaccatcccccggctggaggagctgtacaacaccaagcagggccccaccaacaccctgctgcaccacctggtgcaggatgtgaagcagcacaccctgctgagcggctaccgcatcaccctgattgacatcggcctggtggtggagtacctgattggccgggcctaccgcagcaactacaccaggaagcacttccgggccctgtacaacaacctgtacaggaagtacaagcaccagaggcacagcagcggcaacagaaatgaatctgctgagagcaccctgcacagccagttcatcagaacagcccagccctacaagttcaaggagaagagcatcgtgctgcacaagagcaggaagaagagcaaggagcagaatgtgtctgatgatcctgagagcacaggcttcctgtacccctacaatgacctgctggtgtgggccgtgctgatgaagaggcagaagatggccatgttcttctggcagcacggggaggaggccaccgtgaaggctgtgattgcctgcatcctgtaccgggccatggcccacgaggccaaggagagccacatggtggatgatgccagcgaggagctgaagaactacagcaagcagtttggccagctggccctggacctgctggagaaggccttcaagcagaatgaaagaatggccatgaccctgctgacctatgagctgaggaactggagcaacagcacctgcctgaagctggccgtgtctgggggcctgcggccctttgtgagccacacctgcacccagatgctgctgacagacatgtggatgggccgcctgaagatgaggaagaacagctggctgaagatcatcatcagcatcatcctgccccccaccatcctgaccctggagttcaagagcaaggccgagatgagccacgtgccccagagccaggacttccagttcatgtggtactacagcgaccagaatgccagcagcagcaaggagagcgcctctgtgaaggagtatgacctggagcggggccatgatgagaagctggatgagaaccagcacttcggcctggagagcggccaccagcacctgccctggaccaggaaggtgtatgagttctacagcgcccccatcgtgaagttctggttctacaccatggcctacctggccttcctgatgctgttcacctacacagtgctggtggagatgcagccccagcccagcgtgcaggagtggctggtgtccatctacatcttcaccaatgccatcgaggtggtgcgggagatctgcatcagcgagcccgggaagttcacccagaaggtgaaggtgtggatcagcgagtactggaacctgacagagaccgtggccatcggcctcttctctgctggctttgtgctgcgctggggagacccccccttccacacagctggccgcctcatctactgcatcgacatcatcttctggttcagccggctgctggacttctttgctgtgaaccagcacgccggcccctacgtgaccatgattgccaagatgacagccaacatgttctacatcgtcatcatcatggccatcgtgctgctgagctttggagtggccaggaaggccatcctgagccccaaggagcccccatcctggagcctggcccgggacatcgtgtttgagccctactggatgatctatggagaggtgtatgctggggagattgatgtgtgcagcagccagcccagctgccccccaggcagcttcctgacccccttcctgcaggccgtgtacctgtttgtgcagtacatcatcatggtgaacctgctgattgccttcttcaacaacgtgtacctggacatggagagcatcagcaacaacctgtggaagtacaaccgctaccgctacatcatgacctaccacgagaagccctggctgcccccacccctcatcctgctgagccacgtgggcctgctgctgcggcggctgtgctgccaccgggcccctcatgaccaggaggagggagatgtgggcctgaagctgtacctgagcaaggaggacctgaagaagctgcatgactttgaggagcagtgtgtggagaagtacttccacgagaagatggaggatgtgaactgcagctgtgaggagcgcatccgggtgaccagcgagcgggtgacagagatgtacttccagctgaaggagatgaatgagaaggtgtccttcatcaaggacagcctgctgagcctggacagccaggtgggccacctgcaggacctgagcgccctgactgtggacaccctgaaggtgctgtctgctgtggacaccctgcaggaggatgaggccctgctggccaagaggaagcacagcacctgcaagaagctgccccacagctggagcaatgtcatctgtgccgaggtgctgggctccatggagattgctggggagaagaagtaccagtactacagcatgcccagcagcctgctgcggagcctggccggcggccgccaccccccccgggtgcagagaggagccctgctggagatcaccaacagcaagcgggaggccaccaacgtgagaaatgaccaggagcggcaggagacccagagcagcatcgtggtgtctggagtgagccccaaccggcaggcccacagcaaatatggccagttcctgctggtgcccagcaacctgaagagggtgcccttctctgctgagaccgtgctgcccctgagccggcccagcgtgcctgatgtgctggccacagagcaggacatccagacagaggtgctggtgcacctgaccggccagacccctgtggtgtctgactgggcctctgtggatgagcccaaggagaagcatgagcccatcgcccacctgctggatggccaggacaaggccgagcaggtgctgcccaccctgagctgcaccccagagcccatgaccatgagcagccccctgagccgctaccggccctttgcccggagccacagcttccgcttccacaaggaggagaagctgatgaagatctgcaagatcaagagcaaggagtag

SEQ ID NO: 309971 - DNA, 3402 bp, Artificial Sequence
  derived and/or modified sequence
atgctgcggccccaggtgaaggaggagatcatctgcatgatccagaacacgtttaatttttctctgaagcagagcaaacacctgtttcagatactgatggaatgtatggtccacagggattgtatcactatcttcgacgctgattccgaggagcagcaggatttggatctcgccatccttactgccctgttgaaaggcacaaatctttcagcatcagagcagctgaacctagctatggcctgggatagagtcgacatagctaagaaacatatccttatctatgagcagcactggaagcccgacgccctcgaacaggcaatgtctgatgcgctcgtaatggaccgcgtggatttcgttaagctgctcatagagtatggcgtaaatcttcacagattcctcacaatcccgagacttgaggagctgtataatactaagcagggtccaaccaatacactattgcaccatctcgtgcaagacgtgaaacagcataccctcctatcaggatatcgaataactcttatcgacatcggcctggtggtcgagtacttaatcgggagggcttataggtccaactacacccggaagcatttccgcgcattatacaacaacctttaccgcaagtacaagcatcagagacactcttccggcaaccggaacgaaagcgccgagtcgaccctccacagccagtttatcaggaccgcccagccttataaatttaaagaaaaaagcatcgtccttcacaaatcacggaaaaagtccaaggagcagaacgttagtgacgaccctgaaagcacgggcttcctgtacccatacaacgacctgctggtatgggctgtccttatgaagagacagaaaatggctatgtttttctggcagcacggtgaggaggccaccgttaaggcagtcatcgcttgtatactataccgcgcaatggctcatgaagccaaggagagtcatatggtagatgatgcaagtgaggagcttaaaaactactctaagcaatttggacagcttgcattagacttgcttgagaaagcattcaaacagaatgagcggatggcaatgaccctgctgacctacgagttgcgtaactggagcaacagcacgtgtctcaaactggcagtgagtggcggattgcggccgtttgtgtctcatacctgtacccaaatgctactgacagatatgtggatgggcaggctgaaaatgagaaagaacagctggctgaaaattattatatccattatcctcccaccaaccatcttgaccttggaattcaagtccaaggccgagatgtcccacgttcctcagagtcaggattttcagttcatgtggtattactccgatcaaaacgcttcatccagcaaggaatccgcatcggtaaaggaatacgacctggagcgcgggcatgatgagaagctggacgaaaaccaacattttggactggagtccggacatcagcaccttccttggacgcggaaggtctatgaattctactctgcacccatagttaaattctggttctatacaatggcctatctcgctttcctgatgctattcacttatacagtcctcgtggaaatgcagccccagccttcagtgcaggagtggctcgtctcaatttacatcttcactaacgctatagaggtcgttcgggaaatttgtatctcggagccagggaagtttacccagaaggttaaggtctggatctcagaatactggaatctgaccgaaaccgtggccatcgggctcttcagcgcaggtttcgttcttcggtggggcgatcctccctttcacacagcagggcgcctgatttactgcatcgacattattttctggttctcccgattgcttgatttttttgccgtgaatcaacacgctggtccttatgtgactatgattgctaaaatgacagctaatatgttttatatcgtgatcataatggcgattgtccttctcagcttcggggtagctcgcaaagccattctgagccccaaagagcctcccagttggagcttagctcgtgacatagtcttcgaaccatactggatgatttatggcgaagtgtatgctggggagatcgatgtatgcagttcccagcccagttgcccaccaggatctttcctgactccgttcttgcaggctgtgtatctctttgtgcagtacataataatggtaaatctgctgatcgcttttttcaacaacgtctacctggacatggagtctatcagtaataacctgtggaaatataatcgctatcggtacatcatgacttaccacgagaagccctggcttcccccaccactgattcttctgtctcacgtgggactgttgctgagacgcctgtgctgccacagagcgccacacgatcaggaggagggtgatgtgggtctgaaactttatctctcaaaggaagatctcaagaaactgcacgatttcgaggagcagtgtgttgagaagtatttccacgaaaagatggaagacgtaaattgttcatgcgaggagcggataagggtgacctccgaacgcgtaaccgaaatgtatttccagctgaaggagatgaacgaaaaggtgtcttttattaaggatagccttctgtctttggacagtcaagtgggacatctccaggatctctccgctctgaccgtcgatactcttaaggtgctgtcagcagtggacactctgcaggaggacgaggctctactggctaagcgaaagcactccacttgcaagaagttaccgcattcctggtccaatgtaatttgcgcagaagtcttagggtctatggaaatagcgggcgagaagaaatatcagtactattcaatgccctcgtcgcttctccgcagcctggccggcgggcgtcatccccctagagtccagcgcggcgccctcctggagatcaccaacagcaagagagaagccactaatgtccggaacgaccaggagcgccaggaaacgcagtccagcatcgtcgttagcggcgtcagtcccaacaggcaggcccattccaagtacggacaatttctgctggtcccctcaaatcttaagcgcgtcccattttctgcagaaactgtcctgccgctgtcccgaccgagcgtgcctgacgtgctggccacagaacaggacatacagacagaggtattggtccacttaactgggcaaaccccagtagtgtcagattgggcctctgttgatgagccaaaagaaaagcatgaaccaattgcacatttgctggacggccaggacaaggccgaacaggtgttgccaacattatcatgcacccctgagccaatgactatgagttctccactgaggaggtatcgcccatttgcaagatcccattcatttagatttcataaagaggaaaaacttatgaagatctgtaagattaagtcaaaagagtag

SEQ ID NO: 309972 - DNA, 3402 bp, Artificial Sequence
  derived and/or modified sequence
atgctgcggccccaggtgaaggaggagatcatctgcatgatccagaatacatttaatttttcgctaaagcagtcgaagcacctgttccagatcctgatggaatgtatggtgcatagggattgcatcaccatatttgatgctgattctgaagagcagcaggacctggatctcgccatactgaccgctcttctgaagggaaccaatctttccgcaagcgaacagctgaacttagcaatggcctgggaccgcgtcgacatcgcgaagaaacacattttaatttacgagcagcactggaagccagacgctctcgaacaggcaatgtcagacgccctggttatggatcgggtcgacttcgtgaagctcttaatcgagtatggcgtcaatctccaccgttttctgactatacctcgtcttgaggagttatataacacaaaacagggaccaacgaatactctactccaccaccttgtgcaggacgttaaacagcacaccctcctgagcggctatagaattaccctgatagatataggcctggtggtggaatatctgataggccgggcataccgcagcaattacacaaggaaacacttccgggctctctacaataacctgtatcggaaatacaaacaccagcgccattcttccggtaacaggaatgagtctgctgagagtacactgcattcgcagtttatcaggacagcgcagccatataagttcaaggagaaaagtattgttctgcacaagtctcggaaaaaatccaaagagcagaatgtttccgacgacccagaatcgacggggtttctatatccttataacgacttgctagtgtgggccgttctgatgaaacggcaaaagatggctatgttcttctggcaacatggggaggaggcaaccgtgaaggccgtgattgcttgtatcctctatagggccatggcgcacgaggccaaggagagtcacatggttgatgacgctagtgaagaattgaagaactactccaaacagtttggtcagctagcactcgacctgcttgaaaaggcttttaagcagaatgaaagaatggcaatgaccctgctaacctacgagctccgcaattggtcgaacagtacgtgtctgaagctcgccgtgtcgggaggcttgcgaccattcgtatcacatacatgcactcagatgctgctcacagacatgtggatgggccgactgaagatgcgtaaaaattcatggctcaagataattatttcaattatcctgccaccgacaattctgacacttgagtttaagtccaaagccgagatgtcacacgttcctcagtctcaggatttccagtttatgtggtactacagcgaccagaatgctagctctagcaaggagagtgcttcggtgaaggagtatgacttggagagagggcacgacgagaagctggacgagaaccagcattttgggctggaaagcggccaccagcatctcccctggacaaggaaagtctatgagttctacagtgctcctatcgtgaagttctggttctacaccatggcgtatctggctttcctgatgctttttacctacacagtattggtagaaatgcagcctcagccatccgtacaggaatggttggtgtcgatctacattttcacgaatgccatcgaagttgtgagggaaatctgcatcagtgagccgggaaagttcactcaaaaggtcaaggtctggatctctgagtattggaaccttactgaaacagtcgccatcggattgttcagcgcaggatttgtcctgagatggggcgaccctccttttcatacagccggccgtcttatctattgcattgacatcatcttttggttttctcgcctgctggactttttcgcagtaaaccagcatgcaggtccgtatgtcaccatgatcgcaaagatgaccgccaacatgttttatatcgtgattatcatggccattgtcctgttatcatttggagtggcaagaaaggcgatcttgagtcctaaggaaccccctagctggagtctggcccgggatattgtcttcgaaccgtactggatgatttacggcgaggtgtatgctggagaaattgatgtctgtagtagccaaccgtcttgtccccctggtagctttctgacgccatttctgcaagctgtctatcttttcgtgcagtatattataatggtcaatttgctgattgcgttctttaacaatgtgtatttagacatggaatccatctctaacaatctgtggaagtataacaggtatcggtatatcatgacctaccatgagaaaccctggttacccccaccactgatactgctctcccacgtgggtctcctgttgcgacggctttgttgccaccgggctccacacgatcaggaggaaggcgacgtaggattgaaactgtacctgagtaaggaggatttgaagaagctgcatgattttgaggagcagtgcgttgagaagtattttcacgaaaaaatggaggatgtcaattgctcttgcgaggagaggatccgcgtcacttctgagagggtgacggaaatgtacttccagctgaaagaaatgaatgagaaagtttcttttattaaagattcgctgttgtcattggattctcaggtagggcatctgcaggatctttcagccctgactgtggacacactgaaagttctgtccgctgttgataccctccaagaagacgaggccctccttgccaagcgtaaacattccacatgtaagaaacttccccactcctggtccaacgtcatctgcgccgaagtgttgggttccatggaaatcgcaggcgagaagaagtatcaatactactcaatgcctagcagcctgttacggagcttagccggaggcagacacccacctcgggtgcagcggggggccctgctggaaataactaactctaagagggaagcaacaaacgtcagaaatgatcaggagagacaggagactcagtccagtattgtggtatcgggagttagtcccaaccggcaggcccacagcaagtacgggcagttcttgttggtgcctagtaatctgaagcgagtgcccttttccgctgagaccgtattgccactgagtaggccttccgtacccgacgtgctcgccactgagcaagacatccaaacagaggtgctcgttcatctgaccggtcagacacctgttgtgagcgactgggcttcggttgacgaacccaaggaaaagcatgagcccattgctcacctcctggacgggcaagataaagctgagcaggttcttcccactctcagctgtacacctgagccgatgaccatgtcctcacccctgtcacggtataggccttttgcaaggagccactcctttcggttccataaggaagagaaactgatgaaaatctgtaaaatcaaaagcaaggaatag

SEQ ID NO: 309973 - DNA, 3402 bp, Artificial Sequence
  derived and/or modified sequence
atgctgcggcctcaggtgaaagaggagattatatgcatgatccaaaatacctttaacttctctcttaagcaatcaaaacatttgttccaaatccttatggagtgcatggtacatcgggactgcatcactatctttgatgcggattccgaagaacagcaggacctcgacctcgccattctgaccgccctgcttaaagggacaaacctgtctgcatcagaacagctgaacctggcgatggcctgggatcgagtggacatcgccaagaaacacattctcatctacgaacagcattggaaacctgacgccctggagcaggcaatgtctgatgcactggtgatggatcgggtggatttcgtgaagcttttgatcgaatacggcgtcaacctgcacaggttcctgactatccctcggcttgaagagctctataacactaagcaggggccaaccaacactctccttcaccacttagtgcaggatgtaaaacagcacacactgctgtcaggatacaggatcacactcatagacatcggcctggtcgtagaataccttatcggcagagcgtacagaagcaactatacacgtaaacacttccgtgccctgtacaacaatctttaccgcaagtataagcaccagaggcattccagcggaaaccggaatgagagtgcggagagtaccttgcattcacagttcatcaggaccgcacaaccatacaagttcaaggagaagtctatcgtgctgcataagtctcgtaaaaaaagtaaggagcagaacgtgtcagacgatccggaaagtaccggctttctttacccctataatgatttgctggtctgggctgttctcatgaaaagacaaaaaatggccatgtttttctggcagcacggcgaggaagctacggtgaaagcggtgattgcctgcatactgtatcgcgctatggctcacgaggcaaaggagagtcatatggtggatgacgcctctgaagagctgaaaaactacagcaagcagttcgggcagttagccctggatctgctcgaaaaagccttcaaacagaatgaaaggatggcaatgaccctgttaacatacgaacttcggaactggtcaaatagcacctgcctgaaactggctgtgtctgggggactcaggccatttgtgagccacacctgtacgcagatgctactgaccgacatgtggatgggcaggctgaagatgaggaagaatagctggctcaaaataatcatctcaataatacttccccctacaattttgactctggagtttaagagcaaggccgaaatgagtcacgtaccccaatcccaggacttccaattcatgtggtactactctgatcaaaacgcatcgagctcaaaagaaagcgcatccgttaaagagtatgatctggagagaggccacgacgagaaattggacgagaatcagcatttcggactcgaaagcgggcaccagcacctgccttggacccgtaaagtgtacgaattttacagtgctcctattgtgaaattctggttctacaccatggcttacctagcctttctgatgcttttcacctatacggttctcgtagagatgcaacctcagcccagcgttcaagaatggttggtcagcatttacatcttcaccaatgcaatcgaggtggtacgggaaatctgcatctccgagccgggaaagtttactcaaaaggttaaggtttggataagtgaatattggaacctgacggagacagtggccatcgggctgttttctgccggtttcgtgttgcggtggggcgatccccctttccatacagccggtaggctgatctactgcatcgatatcatcttttggttcagtcgactgctggatttctttgctgtcaatcagcatgcaggaccctacgtgactatgattgcaaagatgacagcgaacatgttttacattgtcatcatcatggctatcgttctgctatcatttggcgtggcgaggaaagctattctttcccctaaagagcccccaagttggagtctggctagggatattgtctttgagccctactggatgatctatggagaggtttatgccggagagatcgacgtgtgttcctctcagcccagctgtcccccaggctcatttctcacgccctttctccaagccgtgtacctctttgtgcagtatataattatggtcaatctgctgattgcattcttcaacaatgtgtatcttgatatggaatccatctcaaataacctgtggaaatataaccggtacagatacatcatgacataccacgagaagccttggcttccaccaccactgatcctgctgtcgcacgttgggctgctcctgcgaaggttgtgttgccaccgcgctccccatgatcaggaggagggcgacgtcggcttgaaactttacctgagcaaggaggatcttaaaaagctgcacgacttcgaagagcagtgcgtcgagaaatatttccatgaaaagatggaggacgtgaattgttcttgcgaagaacggataagggttacctcagagcgagtaaccgaaatgtattttcaactaaaagaaatgaatgaaaaagtatccttcatcaaagattccctattaagcctggattcccaggttggtcatctccaagacctttctgcactgacagtggacacactgaaggtactttccgctgttgatactcttcaggaagatgaggctctgctggcgaagagaaagcacagcacctgcaaaaagctgcctcattcctggtcaaatgtgatctgtgccgaggtattaggatcaatggaaattgctggcgaaaaaaagtatcagtactactctatgcccagctctctgctgcgatctctcgctggaggacggcatccacctcgcgtgcagcgaggggctcttctggaaataactaactccaagcgggaggcaaccaatgtgcgcaacgaccaggaaaggcaagaaacccaatcttctatcgtggtcagtggagttagtcctaatcggcaggctcactcaaagtacggacagttcctgctagtgcctagcaacttgaaacgagtaccattctcggccgagactgttctgccactatctcggccatccgtacccgatgtactggccaccgagcaagatattcaaactgaggtgctggtgcatctaaccggacagactcctgtggtctcagattgggctagcgtggatgagcctaaggagaagcatgaaccaattgcccatttgctggatggacaggacaaagccgaacaagtgctcccaactctgtcttgtacaccagaaccaatgaccatgtccagtcctttgagaaggtaccgcccttttgcacgttctcatagctttcggtttcataaggaagagaaactcatgaaaatctgtaagatcaagagtaaagagtag

SEQ ID NO: 309974 - DNA, 3402 bp, Artificial Sequence
  derived and/or modified sequence
atgcttcggcctcaggtcaaggaggagataatctgtatgatccaaaacacatttaatttttctctcaaacagtccaaacacctgttccaaatcctcatggaatgcatggtgcacagggattgtatcacaatctttgacgcagactcggaggagcaacaggacctcgacctggccatccttactgccttgctcaagggaacaaacctcagcgcgtccgaacagctgaatcttgccatggcctgggacagggtcgacatcgccaaaaaacacatcttgatatacgagcaacattggaagcctgatgctctggagcaggcgatgtccgacgccctggtaatggaccgggtggacttcgtaaaactgctgatcgaatatggagtcaatctgcacagattcctcacgatccccagactggaggagctgtacaacaccaagcaaggtcccacaaacaccttactccaccatctggtgcaggatgtaaagcaacacaccttgttgagcgggtatcgcataaccctcatagacattgggcttgtggttgagtacctcatcggacgtgcctatcggagtaactacacacgcaagcattttagagccctgtacaataacttgtaccggaagtacaaacatcagagacactcctccggcaacagaaatgaatctgctgaaagcaccctccactctcagtttataaggactgctcagccctataagtttaaagaaaaaagcatagtgctccataaatcccggaagaaaagcaaggagcagaatgtcagcgacgaccctgagagcactggcttcttatacccatataatgatctcctcgtctgggcagtgctgatgaaacggcagaaaatggccatgttcttctggcagcatggggaagaagctactgtcaaggcggtgattgcatgtattctgtatagggcaatggcccacgaagccaaagagtcacatatggtcgacgacgcctcagaggaactcaagaactattcaaaacagtttggtcaattggctctagacctgctagaaaaggccttcaagcagaatgaacggatggcgatgacgctgctcacctatgagcttcgcaattggagcaactccacctgcctgaaattagcagttagcggcggtcttaggcctttcgttagccacacctgtacacagatgctgctaactgacatgtggatgggcaggctcaaaatgagaaaaaacagctggctgaagattatcatcagcatcatccttccacctaccattctcacactcgagttcaagagtaaagctgagatgagccacgtgcctcaaagtcaggattttcagttcatgtggtattactcagatcaaaatgcctcctcttccaaagagagtgcgtcggtcaaggagtacgatctagaaaggggacacgacgagaagcttgatgagaaccaacattttggcttagaatcaggccaccagcatctcccatggacacgcaaagtgtacgaattttacagtgcccctattgttaagttctggttctacaccatggcctatctcgcattcctcatgctctttacctacacagtgctggtcgaaatgcaaccacagccaagtgtgcaagaatggctcgtgagcatttatatctttaccaatgcaatagaggttgtgcgcgaaatatgtatctcggaaccaggtaagtttactcagaaggtgaaggtttggatctctgagtactggaacttgacggagacagtcgcgattggccttttttcagctggctttgtgctgcgatggggagacccaccattccatacagctgggcgactcatatactgtattgatattattttctggttttcacgccttttggacttcttcgcagtcaaccaacacgccggtccatacgtgacgatgatcgcaaagatgaccgcaaatatgttctacattgttataatcatggccatcgtgctcctgagttttggtgtagctagaaaagcgattctgtcgccgaaagaaccaccaagttggagtctggcaagagacattgtattcgagccttactggatgatatacggcgaagtatacgcgggagagatcgatgtatgcagctcccaaccctcatgtccgccaggttccttcctgacaccttttctccaggctgtgtacctattcgtgcaatacatcattatggttaacttacttatcgccttttttaacaatgtatatctcgacatggagtcaattagcaacaatttatggaagtacaaccggtataggtacattatgacctaccacgaaaaaccatggctgccacctccacttatcctgctctctcatgtgggattgttgttgagacggctgtgttgccatcgcgctccacatgaccaagaagagggcgacgtgggcttgaagctctatttaagtaaggaagaccttaagaaattacatgatttcgaggagcagtgcgttgaaaaatatttccacgaaaaaatggaggacgttaactgcagttgcgaagaacgcatccgggtgacgtccgaacgggtcacagagatgtatttccagcttaaggagatgaacgaaaaggtgagcttcatcaaggatagcctgctctctctggacagccaggtaggtcaccttcaggacctcagcgcactgaccgtcgataccctcaaagtcctaagcgccgtcgacacgcttcaggaagacgaagctctgctggctaagcggaagcacagcacttgcaagaagctgccccacagttggtcaaatgttatttgcgccgaggtgctggggtccatggaaatagccggagagaagaagtatcagtattacagtatgcccagctctcttttgaggagcctggctggcggacgacaccctcctcgggtgcagcgaggggctctgttagaaattaccaactccaagcgtgaagctacaaatgtgcgcaatgaccaggagcggcaggagacacagtcgtccattgtggtctccggagtgtcccctaatcggcaggcccacagcaagtatggtcagttcctgctggtaccgtcaaatcttaagcgcgtgcctttcagtgcagagaccgtgctgccactgtccaggccaagcgtccctgacgtattggcaactgaacaggacatccagactgaagtattagttcatttgacaggccagactcccgtcgtgtcagactgggcgtctgtggacgagcctaaagagaagcatgagcccattgctcacttgctcgatgggcaggataaggccgaacaagtcctgccaacattaagctgtactcccgagcccatgactatgagcagcccactgtctagataccggccttttgccaggagccattcctttagattccacaaagaagagaagctcatgaaaatttgcaagattaagtctaaagagtag

SEQ ID NO: 309975 - DNA, 3740 bp, Artificial Sequence
  derived and/or modified sequence
agacaaggagcttgagatcaacctgagcaacatagggagaccccatctctacaaataactgaaaaaaaaaaaaagctaggtgtggtggtacatacctgtggtcccatctactcaggaggctgagacaggaggattgcgtgagcctggctcaagacaaggcgtgccggtcgtggggctggtggtggaaggcggtcccaacgtcatcctgtcagtgtgggagactgtcaaggacaaggacccagtggtggtgtgtgagggcacaggtagggcggctgacctcctggccttcacacacaaacacctggcagatgaagggatgctgcgacctcaggtgaaagaggagatcatctgcatgattcagaacactttcaactttagtcttaaacagtccaagcaccttttccaaattctaatggagtgtatggttcacagggattgtattaccatatttgatgctgactctgaagagcagcaagacctggacttagcaatcctaacagctttgctgaagggcacaaatttatcagcgtcagagcaattaaatctggcaatggcttgggacagggtggacattgccaagaaacatatcctaatttatgaacaacactggaagcctgatgccctggaacaagcaatgtcagatgctttagtgatggatcgggtggattttgtgaagctcttaatagaatatggagtgaacctccatcgctttcttaccatccctcgactggaagagctctacaatacaaaacaaggacctactaatacactcttgcatcatctcgtccaagatgtgaaacagcatacccttctttcaggctaccgaataaccttgattgacattggattagtagtagaatacctcattggtagagcatatcgcagcaactacactagaaaacatttcagagccctctacaacaacctctacagaaaatacaagcaccagagacactcctcaggaaatagaaatgagtctgcagaaagtacgctgcactcccagttcattagaactgcacagccatacaaattcaaggaaaagtctatagtccttcataaatcaaggaagaagtcaaaagaacaaaatgtatcagatgaccctgagtctactggctttctttacccttacaatgacctgctggtttgggctgtgctgatgaaaaggcagaagatggctatgttcttctggcagcatggagaggaggccacggttaaagccgtgattgcgtgtatcctctaccgggcaatggcccatgaagctaaggagagtcacatggtggatgatgcctcagaagagttgaagaattactcaaaacagtttggccagctggctctggacttgttggagaaggcattcaagcagaatgagcgcatggccatgacgctgttgacgtatgaactcaggaactggagcaattcgacctgccttaaactggccgtgtcgggaggattacgaccctttgtttcacatacttgtacccagatgctactgacagacatgtggatggggaggctgaaaatgaggaaaaactcttggttaaagattattataagcattattttaccacccaccattttgacactggaatttaaaagcaaagctgagatgtcacatgttccccagtcccaggacttccaatttatgtggtattacagtgaccagaacgccagcagttccaaagaaagtgcttctgtgaaagagtatgatttggaaaggggccatgatgagaaactggatgaaaatcagcattttggtttggaaagtgggcaccaacaccttccgtggaccaggaaagtctatgagttctacagtgctccaattgtcaagttttggttttatacgatggcgtatttggcattcctcatgctgttcacttacaccgtgttggtggagatgcagccccagcccagcgtgcaggagtggcttgttagcatttacatcttcaccaatgctattgaggtggtcagggagatctgtatttcagaacctgggaagtttacccaaaaggtgaaggtatggattagtgagtactggaacttaacagaaactgtggccattggcctgttttcagctggcttcgtccttcgatggggtgaccctccttttcacacagcgggaagactgatctactgcatagacatcatattctggttctcacggctcctggacttctttgctgtgaatcaacatgcaggtccatatgtgaccatgattgcaaaaatgacagcaaacatgttctatattgtgatcatcatggccatagtcctgctgagctttggagtggcacgcaaggccatcctttcgccaaaagagccaccatcttggagtctagctcgagatattgtatttgagccatactggatgatatacggagaagtctatgctggagaaatagatgtttgttcaagccagccatcctgccctcctggttcttttcttactccattcttgcaagctgtctacctcttcgtgcaatatatcatcatggtgaacctgttgattgctttcttcaacaacgtttacttagatatggaatccatttcaaataacctgtggaaatacaaccgctatcgctacatcatgacctaccacgagaagccctggctgcccccacctctcatcctgctgagccacgtgggccttctcctccgccgcctgtgctgtcatcgagctcctcacgaccaagaagagggtgacgttggattaaaactctacctcagtaaggaggatctgaaaaaacttcatgattttgaggagcagtgcgtggaaaaatacttccatgagaagatggaagatgtgaattgtagttgtgaggaacgaatccgagtgacatcagaaagggttacagagatgtacttccagctgaaagaaatgaatgaaaaggtgtcttttataaaggactccttactgtctttggacagccaggtgggacacctgcaggatctctctgccctgactgtggataccctgaaagtcctttctgctgttgacactttgcaagaggatgaggctctcctggccaagagaaagcattctacttgcaaaaaacttccccacagctggagcaatgtcatctgtgcagaggttctaggcagcatggagatcgctggagagaagaaataccagtattatagcatgccctcttctttgctgaggagcctggctggaggccggcatcccccaagagtgcagaggggggcacttcttgagattacaaacagtaaaagagaggctacaaatgtaagaaatgaccaggaaaggcaagaaacacaaagtagtatagtggtttctggggtgtctcctaacaggcaagcacactcaaagtatggccagtttcttctggtcccctctaatctaaagcgagttcctttttcagcagaaactgtcttgcctctgtccagaccctctgtgccagatgtgctggcaactgaacaggacatccagactgaggttcttgttcatctgactgggcagaccccagttgtctctgactgggcatcagtggatgaacccaaggaaaagcacgagcctattgctcacttactggatggacaagacaaggcagagcaagtgctacccactttgagttgcacacctgaacccatgacaatgagctcccctctccgcagatacaggcccttcgctaggagtcatagttttagattccataaggaggagaaattgatgaagatctgtaagattaaaagtaaggaataaacatttaaaatatcagcattaa

SEQ ID NO: 309976 - DNA, 4651 bp, Artificial Sequence
  derived and/or modified sequence
actacaaaggatgtctgtgatgacagtggccatcccatttgatcctcgttattcttcttttatcgaaggaaactgagagtcaccttcttttctaggcagttaggtaactgaagccgaaaggtattgtgacagatccactgggctgtaaaaggcagcgtgtggaggtggagcccagagtttctgcctccacagttaaaagctcagacagggctttgggagcagggcctgcaaatcaaagatgaaagaacaacctgtcttggagcgcttgcagtcccagaaatcctggattaaaggagtatttgacaagagagaatgtagcacaatcatacccagctcaaaaaatcctcacagatgtactccagtatgccaagtctgccagaatttaatcaggtgttactgtggccgactgattggagaccatgctgggatagattattcctggaccatctcagctgccaagggtaaagaaagtgaacaatggtctgttgaaaagcacacaacgaaaagcccaacagatacttttggcacgattaatttccaagatggagagcacacccatcatgccaagtatattagaacttcttatgatacaaaactggatcatctgttacatttaatgttgaaagagtggaaaatggaactgcccaagcttgtgatctcagtccatgggggcatccagaactttactatgccctctaaatttaaagagattttcagccaaggtttggttaaagctgcagagacaacaggagcgtggataataactgaaggcatcaatacaggagtgtccaagcatgttggggatgccttgaaatcccattcctctcattccttgagaaaaatctggacagttggaatccctccttggggtgtcattgagaaccagagagaccttattggaaaagatgtggtgtgcctgtaccagactctggataaccccctcagcaagctcacaacactcaacagcatgcactcgcacttcatcctgtctgatgatgggaccgtgggcaagtatggaaatgaaatgaagctcagaaggaacctggagaagtacctctctctgcagaaaatacactgccgctcaagacaaggcgtgccggtcgtggggctggtggtggaaggcggtcccaacgtcatcctgtcagtgtgggagactgtcaaggacaaggacccagtggtggtgtgtgagggcacaggtagggcggctgacctcctggccttcacacacaaacacctggcagatgaagggatgctgcgacctcaggtgaaagaggagatcatctgcatgattcagaacactttcaactttagtcttaaacagtccaagcaccttttccaaattctaatggagtgtatggttcacagggattgtattaccatatttgatgctgactctgaagagcagcaagacctggacttagcaatcctaacagctttgctgaagggcacaaatttatcagcgtcagagcaattaaatctggcaatggcttgggacagggtggacattgccaagaaacatatcctaatttatgaacaacactggaagcctgatgccctggaacaagcaatgtcagatgctttagtgatggatcgggtggattttgtgaagctcttaatagaatatggagtgaacctccatcgctttcttaccatccctcgactggaagagctctacaatacaaaacaaggacctactaatacactcttgcatcatctcgtccaagatgtgaaacagcatacccttctttcaggctaccgaataaccttgattgacattggattagtagtagaatacctcattggtagagcatatcgcagcaactacactagaaaacatttcagagccctctacaacaacctctacagaaaatacaagcaccagagacactcctcaggaaatagaaatgagtctgcagaaagtacgctgcactcccagttcattagaactgcacagccatacaaattcaaggaaaagtctatagtccttcataaatcaaggaagaagtcaaaagaacaaaatgtatcagatgaccctgagtctactggctttctttacccttacaatgacctgctggtttgggctgtgctgatgaaaaggcagaagatggctatgttcttctggcagcatggagaggaggccacggttaaagccgtgattgcgtgtatcctctaccgggcaatggcccatgaagctaaggagagtcacatggtggatgatgcctcagaagagttgaagaattactcaaaacagtttggccagctggctctggacttgttggagaaggcattcaagcagaatgagcgcatggccatgacgctgttgacgtatgaactcaggaactggagcaattcgacctgccttaaactggccgtgtcgggaggattacgaccctttgtttcacatacttgtacccagatgctactgacagacatgtggatggggaggctgaaaatgaggaaaaactcttggttaaagattattataagcattattttaccacccaccattttgacactggaatttaaaagcaaagctgagatgtcacatgttccccagtcccaggacttccaatttatgtggtattacagtgaccagaacgccagcagttccaaagaaagtgcttctgtgaaagagtatgatttggaaaggggccatgatgagaaactggatgaaaatcagcattttggtttggaaagtgggcaccaacaccttccgtggaccaggaaagtctatgagttctacagtgctccaattgtcaagttttggttttatacgatggcgtatttggcattcctcatgctgttcacttacaccgtgttggtggagatgcagccccagcccagcgtgcaggagtggcttgttagcatttacatcttcaccaatgctattgaggtggtcagggagatctgtatttcagaacctgggaagtttacccaaaaggtgaaggtatggattagtgagtactggaacttaacagaaactgtggccattggcctgttttcagctggcttcgtccttcgatggggtgaccctccttttcacacagcgggaagactgatctactgcatagacatcatattctggttctcacggctcctggacttctttgctgtgaatcaacatgcaggtccatatgtgaccatgattgcaaaaatgacagcaaacatgttctatattgtgatcatcatggccatagtcctgctgagctttggagtggcacgcaaggccatcctttcgccaaaagagccaccatcttggagtctagctcgagatattgtatttgagccatactggatgatatacggagaagtctatgctggagaaatagatgtttgttcaagccagccatcctgccctcctggttcttttcttactccattcttgcaagctgtctacctcttcgtgcaatatatcatcatggtgaacctgttgattgctttcttcaacaacgtttacttagatatggaatccatttcaaataacctgtggaaatacaaccgctatcgctacatcatgacctaccacgagaagccctggctgcccccacctctcatcctgctgagccacgtgggccttctcctccgccgcctgtgctgtcatcgagctcctcacgaccaagaagagggtgacgttggattaaaactctacctcagtaaggaggatctgaaaaaacttcatgattttgaggagcagtgcgtggaaaaatacttccatgagaagatggaagatgtgaattgtagttgtgaggaacgaatccgagtgacatcagaaagggttacagagatgtacttccagctgaaagaaatgaatgaaaaggtgtcttttataaaggactccttactgtctttggacagccaggtgggacacctgcaggatctctctgccctgactgtggataccctgaaagtcctttctgctgttgacactttgcaagaggatgaggctctcctggccaagagaaagcattctacttgcaaaaaacttccccacagctggagcaatgtcatctgtgcagaggttctaggcagcatggagatcgctggagagaagaaataccagtattatagcatgccctcttctttgctgaggagcctggctggaggccggcatcccccaagagtgcagaggggggcacttcttgagattacaaacagtaaaagagaggctacaaatgtaagaaatgaccaggaaaggcaagaaacacaaagtagtatagtggtttctggggtgtctcctaacaggcaagcacactcaaagtatggccagtttcttctggtcccctctaatctaaagcgagttcctttttcagcagaaactgtcttgcctctgtccagaccctctgtgccagatgtgctggcaactgaacaggacatccagactgaggttcttgttcatctgactgggcagaccccagttgtctctgactgggcatcagtggatgaacccaaggaaaagcacgagcctattgctcacttactggatggacaagacaaggcagagcaagtgctacccactttgagttgcacacctgaacccatgacaatgagctcccctctttccagatacaggcccttcgctaggagtcatagttttagattccataaggaggagaaattgatgaagatctgtaagattaaaagtaaggaataa

SEQ ID NO: 309977 - DNA, 1707 bp, Artificial Sequence
  derived and/or modified sequence
agagagagcccccaccccgccctgctgcagagccagaagagctggatcaagggcgtgttcgacaagagagagtgcagcaccatcatccccagcagcaagaacccccacagatgcacccccgtgtgccaggtgtgccagaacctgatcagatgctactgcggcagactgatcggcgaccacgccggcatcgactacagctggaccatcagcgccgccaagggcaaggagagcgagcagtggagcgtggagaagcacaccaccaagagccccaccgacaccttcggcaccatcaacttccaggacggcgagcacacccaccacgccaagtacatcagaaccagctacgacaccaagctggaccacctgctgcacctgatgctgaaggagtggaagatggagctgcccaagctggtgatcagcgtgcacggcggcatccagaacttcaccatgcccagcaagttcaaggagatcttcagccagggcctggtgaaggccgccgagaccaccggcgcctggatcatcaccgagggcatcaacaccggcgtgagcaagcacgtgggcgacgccctgaagagccacagcagccacagcctgagaaagatctggaccgtgggcatccccccctggggcgtgatcgagaaccagagagacctgatcggcaaggacgtggtgtgcctgtaccagaccctggacaaccccctgagcaagctgaccaccctgaacagcatgcacagccacttcatcctgagcgacgacggcaccgtgggcaagtacggcaacgagatgaagctgagaagaaacctggagaagtacctgagcctgcagaagatccactgccccggcgaggagatcaccgtgtacagactggaggagagcagccccctgaacctggacaagagcatgagcagctggagccagagaggcagagccgccatgatccaggtgctgagcagagaggagatggacggcggcctgagaaaggccatgagagtggtgagcacctggagcgaggacgacatcctgaagcccggccaggtgttcatcgtgaagagcttcctgcccgaggtggtgagaacctggcacaagatcttccaggagagcaccgtgctgcacctgtgcctgagagagatccagcagcagagagccgcccagaagctgatctacaccttcaaccaggtgaagccccagaccatcccctacacccccagattcctggaggtgttcctgatctactgccacagcgccaaccagtggctgaccatcgagaagtacatgaccggcgagttcagaaagtacaacaacaacaacggcgacgagatcacccccaccaacaccctggaggagctgatgctggccttcagccactggacctacgagtacaccagaggcgagctgctggtgctggacctgcagggcgtgggcgagaacctgaccgaccccagcgtgatcaagcccgaggtgaagcagagcagaggcatggtgttcggccccgccaacctgggcgaggacgccatcagaaacttcatcgccaagcaccactgcaacagctgctgcagaaagctgaagctgcccgacctgaagagaaacgactacagccccgagagaatcaacagcaccttcggcctggagatcaagatcgagagcgccgaggagccccccgccagagagaccggcagaaacagccccgaggacgacatgcagctgtag

SEQ ID NO: 309978 - DNA, 1707 bp, Artificial Sequence
  derived and/or modified sequence
agagagtctccccaccctgccctgctccagtctcagaaaagctggattaagggcgtctttgacaaaagggaatgttctacaattataccgagttccaagaatccgcacaggtgcactccggtgtgccaggtctgccagaaccttatccgctgttattgcggaagattgatcggagatcacgccgggattgactatagctggaccatttctgcagccaagggcaaggagtccgaacagtggtcagtcgagaaacatacaacaaagtcgccaactgacacattcggtaccatcaatttccaagacggggagcacacacaccacgctaaatacattcggacatcctacgacacaaaattggatcacctgttacatctcatgcttaaagaatggaagatggaactccctaaactggttatatccgtacacggaggtatccagaattttacaatgccttccaaattcaaggagatttttagccagggactggtgaaagccgccgagacaacaggcgcatggattattactgaagggataaacacgggcgtgagtaaacacgtcggggatgcgctgaagtcccacagttcccattcactgcgtaagatttggactgtgggaatcccaccctggggggtaattgaaaatcaacgcgacctaatcggcaaggacgtggtgtgcctgtaccagaccctggacaacccgctgagcaaactgactaccctcaattctatgcatagtcactttattctctccgacgatggaacggtcggaaaatacggcaacgagatgaagctgagaaggaatctggagaagtacttaagtcttcaaaaaatccactgccccggcgaggaaatcactgtctatagacttgaagaaagctctccacttaatttagacaaatcaatgtcttcatggtcccagcgaggcagggccgccatgatacaggtactgagccgggaggaaatggacggaggtcttaggaaagctatgcgggtggtgtctacatggtccgaagacgacatcttaaagcctgggcaagtcttcatcgtgaaatcgtttctcccagaagtcgtaagaacgtggcataaaattttccaggagagcacagtgcttcatttatgtctgagagagattcagcaacagcgggccgcgcaaaagctcatctatacatttaaccaagtcaaaccccagaccatcccttatacacccagatttctggaggtgttcctgatctactgccacagtgcgaaccaatggctcaccatcgagaaatacatgaccggcgagtttagaaaatataataacaataacggggacgaaatcaccccaactaacaccctcgaggaattaatgttagcctttagccattggacatatgagtatactcgtggggaactactggtgttagatttgcagggggtaggcgagaacttgaccgacccaagtgtgataaaacctgaagtgaaacagagtcgcggcatggtgtttggccctgccaacctcggcgaggacgctatccggaactttattgctaagcaccattgcaactcatgttgcaggaaattgaaactgcctgatctgaaaagaaacgactattcacctgaaagaatcaactccacatttgggctcgaaatcaagatcgaatcggccgaagagccaccagctcgcgagacaggtcggaactctccagaagatgacatgcagttgtag

SEQ ID NO: 309979 - DNA, 1707 bp, Artificial Sequence
  derived and/or modified sequence
cgggagagcccccacccagccctgctgcagagccagaagtcctggatcaagggcgtgtttgacaagcgggagtgcagcaccatcatccccagcagcaagaacccccaccgctgcacccctgtgtgccaggtgtgccagaacctgatccgctgctactgcggccgcctgattggagaccatgctggcatcgactacagctggaccatctctgctgccaagggcaaggagagcgagcagtggagcgtggagaagcacaccaccaagagccccacagacaccttcggcaccatcaacttccaggatggagagcacacccaccacgccaagtacatccgcaccagctatgacaccaagctggaccacctgctgcacctgatgctgaaggagtggaagatggagctgcccaagctggtgatctctgtgcacggcggcatccagaacttcaccatgcccagcaagttcaaggagatcttcagccagggcctggtgaaggctgctgagaccactggagcctggatcatcacagagggcatcaacacaggagtgtccaagcacgtgggagatgccctgaagagccacagcagccacagcctgaggaagatctggacagtgggcatccccccctggggcgtgattgagaaccagagggacctgattggcaaggatgtggtgtgcctgtaccagaccctggacaaccccctgagcaagctgaccaccctgaacagcatgcacagccacttcatcctgagtgatgatggcaccgtgggcaagtatggaaatgagatgaagctgcggaggaacctggagaagtacctgagcctgcagaagatccactgccctggagaggagatcaccgtgtaccgcctggaggagagcagccccctgaacctggacaagtccatgagctcctggagccagaggggccgggccgccatgatccaggtgctgagccgggaggagatggatggcggcctgaggaaggccatgagggtggtgtccacctggagcgaagatgacatcctgaagccaggccaggtgttcatcgtgaagagcttcctgcctgaggtggtgaggacctggcacaagatcttccaggagagcacagtgctgcacctgtgcctgcgggagatccagcagcagagagctgcccagaagctgatctacaccttcaaccaggtgaagccccagaccatcccctacaccccccgcttcctggaggtgttcctgatctactgccacagcgccaaccagtggctgaccatcgagaagtacatgaccggggagttcaggaagtacaacaacaacaatggagatgagatcacccccaccaacaccctggaggagctgatgctggccttcagccactggacctatgagtacaccagaggagagctgctggtgctggacctgcagggcgtgggggagaacctgacagaccccagcgtcatcaagccagaggtgaagcagagccggggcatggtgtttggacctgccaacctgggggaggatgccatccggaacttcatcgccaagcaccactgcaacagctgctgcaggaagctgaagctgcctgacctgaagagaaatgactacagccctgagcgcatcaacagcaccttcggcctggagatcaagattgagagcgctgaggagcccccagcccgggagactggaagaaacagcccagaagatgacatgcagctgtag

SEQ ID NO: 309980 - DNA, 1707 bp, Artificial Sequence
  derived and/or modified sequence
cgggagagcccccaccccgccctgctgcagagccagaagagctggatcaaaggggtatttgacaagcgggaatgcagcacgatcatcccatcgtcgaaaaacccccaccgatgcactcccgtctgtcaggtctgccagaatttgattaggtgttactgcggcaggctgattggagatcacgctggtatcgattattcctggactatttccgcagccaaggggaaggaaagcgagcagtggtctgtggagaaacacaccacaaagtcgccaacagatacctttgggaccatcaactttcaggatggcgagcacacccatcacgcaaaatatatccgaaccagctacgacaccaaactggaccatctgctgcatctgatgttaaaagagtggaaaatggagctgccaaagctcgtgatatctgtccatggtgggattcagaactttactatgccctctaagtttaaggaaatctttagtcagggcctggtcaaggcagccgaaactactggagcctggataataaccgagggaataaacaccggagtaagcaaacatgtcggggacgcattgaaatcacactccagtcactctctgcggaagatatggacagtgggcattcccccctggggggtgatcgaaaaccaacgcgacttaattggaaaagatgtggtgtgcctctaccagacgctcgataacccactgtcgaagctgacaaccctaaactccatgcactctcactttatactcagcgacgatggaactgtcggaaagtacggcaatgagatgaagctgagaagaaacctggagaagtatctgagccttcagaagatccactgccccggtgaagagattactgtctaccgtctggaggagtccagcccactcaacttagataaaagcatgtcctcatggtctcagcgcggcagagccgccatgattcaagtgctgagtcgggaggaaatggacgggggattaaggaaagcgatgcgtgtggtctccacttggtctgaggacgacatattaaaacccggacaggtgtttatcgtgaaaagctttctaccagaggtggtgcgtacctggcataagatatttcaggagagtacagtgcttcacctgtgcctgcgtgagattcagcagcagcgtgcagcccaaaaactgatttacacattcaaccaagttaagccacagacgatcccttacacccctcgcttcctggaggtctttttgatttattgccactccgcgaaccagtggttaacgatcgaaaaatacatgacaggggagtttaggaagtataataacaataacggcgacgagatcacccccacaaataccttagaggagttgatgctagcgtttagccactggacgtatgaatatactcggggggagctcctggtgcttgacctacagggagttggggagaatttgacagacccatccgttatcaaaccagaggtgaagcagtctcgaggaatggtcttcgggccagcaaacctgggggaggacgctatcagaaatttcatcgctaaacaccactgtaactcgtgctgtaggaagcttaaattgcccgacctgaaacgcaatgattacagccctgagaggattaactccacgtttggtctggaaattaagatcgaatccgcagaagagccgccagcgcgcgaaactggacggaatagtcctgaagatgacatgcagctatag

SEQ ID NO: 309981 - DNA, 1707 bp, Artificial Sequence
  derived and/or modified sequence
cgggaaagtccacacccagcgctactgcagtcgcagaagagctggatcaaaggcgttttcgacaagcgcgagtgcagcaccatcatcccctctagtaaaaacccgcataggtgtaccccagtatgccaagtgtgtcaaaacttaattcgctgctattgcggcagactgattggtgatcacgccggaatagattacagctggactatcagcgccgcaaaggggaaggagtccgaacagtggtccgtcgagaaacacacgacgaagtctccaaccgacacattcgggaccattaattttcaggatggggagcatacacaccacgcgaagtatattaggacatcgtacgatactaagctggatcatctgttgcacctgatgttaaaagagtggaaaatggagctgcccaagctcgtcataagcgttcacgggggaatacagaatttcacaatgccctctaaattcaaggagatcttttcccagggattggtgaaggctgccgaaaccacaggagcctggataatcaccgaaggcattaacacgggagtctcgaagcatgtgggagacgccctgaagtcccactcttctcactccctgcggaagatttggactgtgggaatccctccatggggagtcatcgagaatcagcgggacctcattggcaaagacgtggtttgtctgtatcagaccctggacaatcccttaagcaaacttaccactctcaatagcatgcattctcactttatcttatccgatgatggtaccgtcggcaaatatggcaacgagatgaagttaaggaggaatctggaaaagtacctgagtctccaaaaaatacactgcccaggcgaggagatcaccgtctaccgcttggaagaatcctctcctctgaatttagacaagtcgatgtcctcatggagtcaacggggtcgggcagcaatgatccaggtgctgagtcgagaggagatggatggtggcctgaggaaggctatgagagtcgtgtccacatggagtgaggatgacatcctgaagcccggtcaggtattcattgtgaagtcgtttttgccagaagtagtccgaacttggcacaagatcttccaagaatccactgtcttacacctgtgtctgcgggagatccagcagcagagagccgctcagaaactcatttatacattcaaccaggtgaagccccagacgataccatatacacccaggttcctggaggtgtttctaatttattgccattcagcaaatcagtggctcaccatcgaaaagtacatgacaggtgaattcaggaaatataacaacaacaatggcgacgagatcacccctactaacaccctggaggagctgatgctggccttctcccactggacttacgaatataccaggggggagttattggtacttgaccttcagggagttggcgaaaatttgactgacccctcagtgataaagcccgaggtgaagcaatctcggggaatggtgttcgggccagccaacttaggggaggatgccatacggaactttattgccaagcaccactgcaatagttgctgtagaaagctgaagctgcctgatcttaagcgcaatgactacagtccagagagaatcaacagcaccttcgggttggaaatcaagattgagtcagctgaagagcctccagcaagagaaactggtcgcaactctcctgaggacgatatgcagctatag

SEQ ID NO: 309982 - DNA, 3825 bp, Artificial Sequence
  derived and/or modified sequence
cgtgagtcaccacacccagccctccttcaatcccagaaatcctggattaaaggagtatttgacaagagagaatgtagcacaatcatacccagctcaaaaaatcctcacagatgtactccagtatgccaagtctgccagaatttaatcaggtgttactgtggccgactgattggagaccatgctgggatagattattcctggaccatctcagctgccaagggtaaagaaagtgaacaatggtctgttgaaaagcacacaacgaaaagcccaacagatacttttggcacgattaatttccaagatggagagcacacccatcatgccaagtatattagaacttcttatgatacaaaactggatcatctgttacatttaatgttgaaagagtggaaaatggaactgcccaagcttgtgatctcagtccatgggggcatccagaactttactatgccctctaaatttaaagagattttcagccaaggtttggttaaagctgcagagacaacaggagcgtggataataactgaaggcatcaatacaggagtgtccaagcatgttggggatgccttgaaatcccattcctctcattccttgagaaaaatctggacagttggaatccctccttggggtgtcattgagaaccagagagaccttattggaaaagatgtggtgtgcctgtaccagactctggataaccccctcagcaagctcacaacactcaacagcatgcactcgcacttcatcctgtctgatgatgggaccgtgggcaagtatggaaatgaaatgaagctcagaaggaacctggagaagtacctctctctgcagaaaatacactgcccaggagaagaaataactgtctacaggttggaggagagttcccctttaaaccttgataaaagcatgtcctcttggtctcagcgtgggagagcggcaatgatccaggtattgtcccgagaggagatggatgggggcctccgtaaagctatgagagtcgtcagcacttggtctgaggatgacattctcaagccgggacaagttttcattgtcaagtcctttcttcctgaggttgtgcggacatggcataaaatcttccaggagagcactgtgcttcatctttgcctcagggaaattcaacaacaaagagctgctcaaaaattgatctataccttcaaccaagtgaaaccacaaaccataccctacacaccaaggttcctggaagttttcttaatctactgccattcagccaaccagtggttgaccattgagaagtatatgacaggggagttccggaagtataacaacaacaatggtgatgaaatcacccccaccaacaccctggaggagctgatgttggctttctctcactggacctatgagtacactcggggagagctgctggttttagatttgcaaggtgttggagaaaatttgacagatccatctgttataaaacctgaagtcaaacaatcaagaggaatggtgtttggaccggccaatttgggggaagatgcaattagaaacttcattgcaaaacatcattgtaactcctgctgccggaagctcaaactcccggatttaaaaagaaatgactattcccctgaaaggataaattccacctttggacttgagataaaaatagaatcagctgaggagcctccagcaagggagacgggtagaaattccccagaagatgatatgcaactataaaaagggaggagcaagaagatcccagtgcttgccctgcctgccaggaactctgtgataacatagattgatcaacgtgatgttgattacatcagcgtctccttgggacacgccttctgagcctcacatctccttctgttcaaaggcctcattggtatatgatcaatgggttctcctagacactgacctctgtccagggcactttgcagctccatcctcaagttccacacgaagatgcttggatgagtcagctgggaatattgttcttgtgtacctcattgctttagctggtcacttggaactttggagcagaatcctgcacattaaaggatggggttgggggggatacatttattttattttctcactatgtatgcagactggaccccctactactatttgtcacctcacccacagattgtatttatgtctatatatatgttcataaaaagttatgtgatttcctcctctgtcttttccacaacataggactttgaatagcaatgataggaaaaacaatggaacaagggtgggtttgcacagattggagcacattcctgcacaaactaccaagtatactggtgaaatctcgatgggtttcagatattgtcagtgaatcatatgatgcctggatatttcaggtttctgtaaaagaaagggaaacctaaaacaaatacccttccatatataatatatatggaatatgtatattatatatatttttatatatataatatatatggaatatatatattatatatataaaatacatatggaatatatatattttatatatatatatatatatttttatttttgagatggagtttcactctttttacccaggctggagtgcaatgatgcgatctcactgcaacctctgcctcccgggcttgagcgattcttgtgtctcagtcttccgggtagctgggactacaggtgtgcaccactatgcctggctaattttgtatttttagtagagatggggtttcaccatgttggccaggctggtctcaaactcctgacctcagatgatccacctgccttggcttcccaaagtgctgggattacaggcgtgagccactgcgcctggcctttttttttttttttttaaacgagaacaagaatatgaagaactggaaatcattaagaaagggtttcccttccttaaagctcaggggtactattagttaggagttgactaactcaacctgtaaaacaccactcctccttccaaagttgtatatataatattgcaggttaaattactttatgtcaggtcctatgaagaaagatacggtttcagactgaaaacatgtttcacaggtgtttgcttccttccagagcagagttccctattcccctggcataaagaatgtatatatattttgaaatatggctgagaacatgtcattggtttgtgaggcctaaggtgaagcactcctggcagccacactgtgtagtgtatttgagggatcagtcatccctcttgtatgctgggcctggttgccctacctcgaacaagcaccagcttttcacacaaggagagatgtggggctgggagtcctctccccatcctattgcatctcctttcttattataagctgttccagttcacaggcagcaaacctcctgggtttgaaaaattccaacttatttttatctttaatcctgacattagctgacttgctagtgagcttgctttaaaaatctacactcttgcattcttaggcatacaggggaaatgttgaaaaggaaggtggaaaaccaagaatttagtttgccaatgattgcctctgattcttgtaagtttgagttccacaagggctaatttattccccttttacttgggttttggggtggtggaaagcgggaaatttgggtgatttgttgattggcaatgaggataaaatgttaatacttttttggggacttaacaactttatcctattctacaagtcagtaaaggaacaattggtactcacctcagtgctgcactcaactatggaaagaggcagagtttgcttgcccaattgccaaactaaagacatcagttcattggtcaaatatttgttacctggaatggaacttgaaagcaaatacatttggatttcaaatttc

SEQ ID NO: 309983 - DNA, 912 bp, Artificial Sequence
  derived and/or modified sequence
atgaaggagcagcccgtgctggagagactgcagagccagaagagctggatcaagggcgtgttcgacaagagagagtgcagcaccatcatccccagcagcaagaacccccacagatgcacccccgtgtgccaggtgtgccagaacctgatcagatgctactgcggcagactgatcggcgaccacgccggcatcgactacagctggaccatcagcgccgccaagggcaaggagagcgagcagtggagcgtggagaagcacaccaccaagagccccaccgacaccttcggcaccatcaacttccaggacggcgagcacacccaccacgccaagtacatcagaaccagctacgacaccaagctggaccacctgctgcacctgatgctgaaggagtggaagatggagctgcccaagctggtgatcagcgtgcacggcggcatccagaacttcaccatgcccagcaagttcaaggagatcttcagccagggcctggtgaaggccgccgagaccaccggcgcctggatcatcaccgagggcatcaacaccggcgtgagcaagcacgtgggcgacgccctgaagagccacagcagccacagcctgagaaagatctggaccgtgggcatccccccctggggcgtgatcgagaaccagagagacctgatcggcaaggacgtggtgtgcctgtaccagaccctggacaaccccctgagcaagctgaccaccctgaacagcatgcacagccacttcatcctgagcgacgacggcaccgtgggcaagtacggcaacgagatgaagctgagaagaaacctggagaagtacctgagcctgcagaagatccactgcagagagtaccacagaggcagcgtgacccagagcggctgcagacccgccgaggtgttccacggcctgccctag

SEQ ID NO: 309984 - DNA, 2934 bp, Artificial Sequence
  derived and/or modified sequence
atgaaggagcagcccgtgctggagagactgcagagccagaagagctggatcaagggcgtgttcgacaagagagagtgcagcaccatcatccccagcagcaagaacccccacagatgcacccccgtgtgccaggtgtgccagaacctgatcagatgctactgcggcagactgatcggcgaccacgccggcatcgactacagctggaccatcagcgccgccaagggcaaggagagcgagcagtggagcgtggagaagcacaccaccaagagccccaccgacaccttcggcaccatcaacttccaggacggcgagcacacccaccacgccaagtacatcagaaccagctacgacaccaagctggaccacctgctgcacctgatgctgaaggagtggaagatggagctgcccaagctggtgatcagcgtgcacggcggcatccagaacttcaccatgcccagcaagttcaaggagatcttcagccagggcctggtgaaggccgccgagaccaccggcgcctggatcatcaccgagggcatcaacaccggcgtgagcaagcacgtgggcgacgccctgaagagccacagcagccacagcctgagaaagatctggaccgtgggcatccccccctggggcgtgatcgagaaccagagagacctgatcggcaaggacgtggtgtgcctgtaccagaccctggacaaccccctgagcaagctgaccaccctgaacagcatgcacagccacttcatcctgagcgacgacggcaccgtgggcaagtacggcaacgagatgaagctgagaagaaacctggagaagtacctgagcctgcagaagatccactgcagaagcagacagggcgtgcccgtggtgggcctggtggtggagggcggccccaacgtgatcctgagcgtgtgggagaccgtgaaggacaaggaccccgtggtggtgtgcgagggcaccggcagagccgccgacctgctggccttcacccacaagcacctggccgacgagggcatgctgagaccccaggtgaaggaggagatcatctgcatgatccagaacaccttcaacttcagcctgaagcagagcaagcacctgttccagatcctgatggagtgcatggtgcacagagactgcatcaccatcttcgacgccgacagcgaggagcagcaggacctggacctggccatcctgaccgccctgctgaagggcaccaacctgagcgccagcgagcagctgaacctggccatggcctgggacagagtggacatcgccaagaagcacatcctgatctacgagcagcactggaagcccgacgccctggagcaggccatgagcgacgccctggtgatggacagagtggacttcgtgaagctgctgatcgagtacggcgtgaacctgcacagattcctgaccatccccagactggaggagctgtacaacaccaagcagggccccaccaacaccctgctgcaccacctggtgcaggacgtgaagcagcacaccctgctgagcggctacagaatcaccctgatcgacatcggcctggtggtggagtacctgatcggcagagcctacagaagcaactacaccagaaagcacttcagagccctgtacaacaacctgtacagaaagtacaagatcatcaccgtgaacgcctgcagccagagcgaccagctgaaccccgagcccggcgagaacagcatcagcgaggaggagtacagcaagaactggttcaccgtgagcaagttcagccacaccggcgtggagccctacatccaccagaagatgaagaccaaggagatcggccagtgcgccatccagatcagcgactacctgaagcagagccaggaggacctgagcaagaacagcctgtggaacagcagaagcaccaacctgaacagaaacagcctgcacgtgatcaagatgcccatcagcagcctgatcagcgagatcagcgccagcctgaagagcccccaggagccccaccaccactacagcgccatcgagagaaacaacctgatgagactgagccagaccatccccttcacccccgtgcagctgttcgccggcgaggagatcaccgtgtacagactggaggagagcagccccctgaacctggacaagagcatgagcagctggagccagagaggcagagccgccatgatccaggtgctgagcagagaggagatggacggcggcctgagaaaggccatgagagtggtgagcacctggagcgaggacgacatcctgaagcccggccaggtgttcatcgtgaagagcttcctgcccgaggtggtgagaacctggcacaagatcttccaggagagcaccgtgctgcacctgtgcctgagagagatccagcagcagagagccgcccagaagctgatctacaccttcaaccaggtgaagccccagaccatcccctacacccccagattcctggaggtgttcctgatctactgccacagcgccaaccagtggctgaccatcgagaagtacatgaccggcgagttcagaaagtacaacaacaacaacggcgacgagatcacccccaccaacaccctggaggagctgatgctggccttcagccactggacctacgagtacaccagaggcgagctgctggtgctggacctgcagggcgtgggcgagaacctgaccgaccccagcgtgatcaagcccgaggtgaagcagagcagaggcatggtgttcggccccgccaacctgggcgaggacgccatcagaaacttcatcgccaagcaccactgcaacagctgctgcagaaagctgaagctgcccgacctgaagagaaacgactacagccccgagagaatcaacagcaccttcggcctggagatcaagatcgagagcgccgaggagccccccgccagagagaccggcagaaacagccccgaggacgacatgcagctgtag

SEQ ID NO: 309985 - DNA, 912 bp, Artificial Sequence
  derived and/or modified sequence
atgaaagaacagccagttttggagagactgcagtctcagaagagttggattaaaggtgtgttcgacaaaagggagtgttctactattattccctcgtctaaaaatcctcatagatgtacaccagtatgccaggtctgccagaacctcattcgttgctactgcggccggctaattggcgaccacgccggcatagactacagttggacaatcagcgccgccaagggtaaagagagcgaacagtggtccgttgagaaacacacgaccaaaagtcccaccgatacattcgggacaattaatttccaggatggagaacacacccatcacgctaaatacatccgaacgagctatgacactaaactcgaccatctgttacatctgatgcttaaagagtggaagatggaacttccgaaactggtgatttcagtccacggaggcattcagaattttactatgcccagcaagttcaaagaaattttttctcagggacttgtgaaggcggccgagacaacgggcgcctggattatcaccgaaggcatcaatactggggtttctaaacacgtcggagacgcactgaagagccacagctcccactccctgaggaagatctggacagtagggatcccaccttggggcgtgatcgagaaccaaagggatcttatcggtaaagatgtggtatgcctctaccagacactggacaatcctctctcgaaactgaccactttgaattccatgcacagtcatttcattctgtctgatgacggcaccgtggggaaatatggcaatgagatgaagctccggagaaatctcgagaaatatttgagcctgcagaaaatacactgccgggaataccaccgaggctcagtcactcaaagcggttgtcggccagcagaggtctttcacgggttgccctag

SEQ ID NO: 309986 - DNA, 2934 bp, Artificial Sequence
  derived and/or modified sequence
atgaaggagcaacctgtcctggaaagactgcagtctcagaagagctggattaagggggtctttgacaagagagaatgctctaccatcattccatcaagcaagaatccccacaggtgcactcctgtctgccaggtgtgtcagaacttaatcagatgttactgtggccgtctcattggagaccacgccgggatcgactatagctggaccattagcgcagccaaaggaaaggagtccgaacagtggtccgttgagaaacataccactaagagccccaccgatacgttcgggaccatcaacttccaggacggggagcatacacaccatgctaaatacattcgcacttcttacgatacaaaactggaccacttgctgcatctgatgttgaaggaatggaagatggaattgccaaagttggtgatttccgtgcacggtggcatccagaatttcactatgcctagtaaattcaaagaaattttcagccagggtctcgtgaaggcagcagaaactaccggagcctggatcataactgaggggatcaataccggggtctctaaacacgtcggcgatgcattgaagagccactcctctcactccttgcggaaaatctggaccgtgggaatacccccatggggcgtgatcgagaatcagcgcgatctcatcggtaaggacgttgtctgcctgtaccagaccctggacaaccctctgtctaagcttaccacgctgaacagcatgcattctcacttcatacttagcgacgacgggacggttggcaaatacggcaatgagatgaagcttcgtcgaaatcttgaaaaatatctttcactgcagaagatccactgtcggagcagacagggtgttcccgtggtgggcctggtggtggaagggggacctaatgtgatcctatccgtgtgggagaccgtcaaggataaggaccctgtagtagtctgtgagggtacaggccgggcagccgacctcctggcatttactcacaaacacctcgccgacgagggcatgctgaggccccaggtcaaagaagagatcatctgtatgatccagaacacttttaacttttctctgaagcaatctaaacacttattccaaattttgatggagtgcatggtccacagggactgtattaccattttcgatgccgattctgaggagcaacaagacttggacttggcgattctgactgcattgctgaagggcaccaatttgtccgcctcagaacagctaaaccttgctatggcctgggaccgtgtggacattgctaagaagcatattttaatctacgagcaacactggaagcccgatgctttggagcaggctatgtccgacgccctggttatggaccgggtggatttcgtcaagttgctaattgaatacggagtgaacctgcatagatttttaactattccccgcctggaggagttatataacacaaagcagggtccaacaaatactctcctacaccatttagtgcaggatgtgaagcaacataccctgctatctgggtaccgtatcacactgatcgacattggtctggtggtagagtacctgattggcagggcgtatagaagcaactacacgcgcaagcactttcgcgcgctttacaacaatttataccgcaagtacaagatcatcaccgtcaatgcctgtagccagtcggatcagctcaatcctgagccaggagagaattctatctccgaagaggagtacagcaagaactggtttacagtgtctaaattctcacataccggcgttgagccatacattcaccaaaaaatgaaaaccaaagagatcggtcaatgcgcgatccagatctcagactatttgaagcagtcacaagaggatctgagtaagaactctctgtggaactcaaggtccaccaatctcaatcgcaacagtttgcatgtgattaagatgcccatttcttccctgatcagcgaaatctctgcttctttaaaatctccccaagaaccacaccaccattattcagctattgagagaaataacctcatgcgtctgagccagaccatcccattcacgccggtgcagctcttcgctggagaggagattacagtgtaccggttagaggagtcaagccctcttaacttagacaagtcgatgtcaagctggagccagcgggggcgggcagcaatgatccaggtgttgagccgtgaggagatggatggcgggctcaggaaagctatgcgtgtcgtgagcacctggagtgaagacgatatccttaagccagggcaggtatttatagttaaaagttttcttccagaggttgtgcgtacttggcacaagatcttccaagagtccacggttctgcacctgtgtctcagggagatccagcagcagagagccgcccagaagcttatttatacgtttaatcaggtgaaaccgcagacgatcccttatactcctagattcctggaggttttcctcatctactgccactctgccaaccagtggcttactattgagaagtatatgaccggcgagttccgcaaatataacaataataacggtgatgagataacacccaccaataccctcgaggaattgatgttggccttctcacactggacctacgaatatactaggggggaactcctggttcttgaccttcagggggtgggggaaaatctcactgacccctctgtaatcaagcccgaagttaaacaatcccggggcatggtgttcggcccagccaacctgggggaggatgccattcggaactttattgctaagcaccactgtaacagctgctgtcgtaagctgaaattgcccgatctgaagcggaacgattacagtcccgagcgcatcaatagcactttcgggctggaaataaagattgaatcagcggaggagcccccagctcgtgagactgggcgaaattctccggaagatgacatgcagctgtag

SEQ ID NO: 309987 - DNA, 912 bp, Artificial Sequence
  derived and/or modified sequence
atgaaggagcagcctgtgctggagcggctgcagagccagaagtcctggatcaagggcgtgtttgacaagagagaatgttccaccatcatccccagcagcaagaacccccaccgctgcacccctgtgtgccaggtgtgccagaacctgatccgctgctactgcggccgcctcatcggggaccacgccggcatcgactacagctggaccatctctgctgccaagggcaaggagagcgagcagtggagcgtggagaagcacaccaccaagagccccacagacaccttcggcaccatcaacttccaggatggagagcacacccaccacgccaagtacatccgcaccagctatgacaccaagctggaccacctgctgcacctgatgctgaaggagtggaagatggagctgcccaagctggtgatctctgtgcatggaggcatccagaacttcaccatgcccagcaagttcaaggagatcttcagccagggcctggtgaaggctgctgagaccaccggggcctggatcatcacagagggcatcaacacaggagtgtccaagcacgtgggagatgccctgaagagccacagcagccacagcctgaggaagatctggacagtgggcatccccccctggggcgtgattgagaaccagagggacctgattggcaaggatgtggtgtgcctgtaccagaccctggacaaccccctgagcaagctgaccaccctgaacagcatgcacagccacttcatcctgagtgatgatggcaccgtgggcaagtatggaaatgagatgaagctgcggaggaacctggagaagtacctgagcctgcagaagatccactgccgggagtaccaccggggctctgtgacccagagcggctgcaggcctgctgaggtgttccacggcctgccctag

SEQ ID NO: 309988 - DNA, 2934 bp, Artificial Sequence
  derived and/or modified sequence
atgaaggagcagcctgtgctggagcggctgcagagccagaagtcctggatcaagggcgtgtttgacaagagagaatgttccaccatcatccccagcagcaagaacccccaccgctgcacccctgtgtgccaggtgtgccagaacctgatccgctgctactgcggccgcctcatcggggaccacgccggcatcgactacagctggaccatctctgctgccaagggcaaggagagcgagcagtggagcgtggagaagcacaccaccaagagccccacagacaccttcggcaccatcaacttccaggatggagagcacacccaccacgccaagtacatccgcaccagctatgacaccaagctggaccacctgctgcacctgatgctgaaggagtggaagatggagctgcccaagctggtgatctctgtgcatggaggcatccagaacttcaccatgcccagcaagttcaaggagatcttcagccagggcctggtgaaggctgctgagaccaccggggcctggatcatcacagagggcatcaacacaggagtgtccaagcacgtgggagatgccctgaagagccacagcagccacagcctgaggaagatctggacagtgggcatccccccctggggcgtgattgagaaccagagggacctgattggcaaggatgtggtgtgcctgtaccagaccctggacaaccccctgagcaagctgaccaccctgaacagcatgcacagccacttcatcctgagtgatgatggcaccgtgggcaagtatggaaatgagatgaagctgcggaggaacctggagaagtacctgagcctgcagaagatccactgccgcagccggcagggcgtgcctgtggtgggcctggtggtggagggcggccccaacgtcatcctgtctgtgtgggagaccgtgaaggacaaggaccctgtggtggtgtgtgagggcaccggccgggctgctgacctgctggccttcacccacaagcacctggctgatgagggcatgctgcggccccaggtgaaggaggagatcatctgcatgatccagaacaccttcaacttcagcctgaagcagagcaagcacctgttccagatcctgatggagtgcatggtgcaccgggactgcatcaccatctttgatgctgacagcgaggagcagcaggacctggacctggccatcctgacagccctgctgaagggcaccaacctgagcgccagcgagcagctgaacctggccatggcctgggacagagtggacatcgccaagaagcacatcctgatctatgagcagcactggaagccagatgccctggagcaggccatgtctgatgccctggtgatggacagagtggactttgtgaagctgctgattgaatatggagtgaacctgcaccgcttcctgaccatcccccggctggaggagctgtacaacaccaagcagggccccaccaacaccctgctgcaccacctggtgcaggatgtgaagcagcacaccctgctgagcggctaccgcatcaccctgattgatattggcctggtggtggagtacctgattggccgggcctaccgcagcaactacaccaggaagcacttccgggccctgtacaacaacctgtacaggaagtacaagatcatcaccgtgaatgcctgcagccagagcgaccagctgaaccctgagcctggagaaaattccatcagcgaggaggagtacagcaagaactggttcaccgtgtccaagttcagccacactggagtggagccctacatccaccagaagatgaagaccaaggagatcggccagtgtgccatccagatcagtgactacctgaagcagagccaggaggacctgagcaagaacagcctgtggaacagccgcagcaccaacctgaacagaaacagcctgcacgtgatcaagatgcccatcagcagcctcatcagcgagatcagcgccagcctgaagagcccccaggagccccaccaccactacagcgccatcgagaggaacaacctgatgaggctgagccagaccatccccttcacccctgtgcagctgtttgctggggaggagatcaccgtgtaccgcctggaggagagcagccccctgaacctggacaagtccatgagctcctggagccagaggggccgggccgccatgatccaggtgctgagccgggaggagatggatggcggcctgaggaaggccatgagggtggtgtccacctggagcgaagatgacatcctgaagccaggccaggtgttcatcgtgaagagcttcctgcctgaggtggtgaggacctggcacaagatcttccaggagagcacagtgctgcacctgtgcctgcgggagatccagcagcagagagctgcccagaagctgatctacaccttcaaccaggtgaagccccagaccatcccctacaccccccgcttcctggaggtgttcctgatctactgccacagcgccaaccagtggctgaccatcgagaagtacatgactggagagttcaggaagtacaacaacaacaatggagatgagatcacccccaccaacaccctggaggagctgatgctggccttcagccactggacctatgagtacaccagaggagagctgctggtgctggacctgcagggcgtgggggagaacctgacagaccccagcgtcatcaagccagaggtgaagcagagccggggcatggtgtttggacctgccaacctgggagaagatgccatccggaacttcatcgccaagcaccactgcaacagctgctgcaggaagctgaagctgcctgacctgaagagaaatgactacagccctgagcgcatcaacagcaccttcggcctggagatcaagattgaatctgctgaggagcccccagcccgggagaccggcaggaacagcccagaagatgacatgcagctgtag

SEQ ID NO: 309989 - DNA, 912 bp, Artificial Sequence
  derived and/or modified sequence
atgaaggagcagcccgtgctggagcggctgcagagccagaagagctggatcaaaggcgttttcgacaagcgggagtgctcaaccataatcccctcttcgaaaaatccccacagatgcactccagtttgtcaagtgtgccaaaatctgataagatgttactgcggaagactcataggagatcacgctggaatcgactattcctggacaatctctgcagctaaaggcaaggagagcgagcaatggtcggtggaaaaacatacgaccaaatcaccgacagacacctttggcacgattaacttccaggatggcgaacatacccaccacgcaaaatacattaggacatcctatgatacaaagctcgaccatctgttacatcttatgttaaaggagtggaagatggaactgcctaaattagtaattagcgtccatggaggcattcagaatttcaccatgccgtccaaatttaaagaaatttttagccaaggcttggtcaaggctgccgagacgactggagcctggataattacagaaggaattaacactggagtgtcaaaacacgtcggagatgcactcaaatctcacagttcgcattctcttaggaagatctggactgtgggtatccctccttggggcgttatcgagaaccaacgggacctgatcggaaaggacgttgtgtgtctctaccagaccttagataatccactaagcaagttgacaaccctcaacagcatgcattcccacttcattctctccgatgacggaaccgtggggaaatacggcaacgaaatgaaattaagaaggaacctggagaagtacctaagtctgcagaagattcactgtcgagagtatcatcgggggtccgtaactcagagtggctgccggcctgccgaggtatttcacgggctgccatag

SEQ ID NO: 309990 - DNA, 2934 bp, Artificial Sequence
  derived and/or modified sequence
atgaaggagcagcccgtgctggagcggctgcagagccagaagagctggattaagggtgtttttgacaaacgcgagtgctcaactataatcccatcaagcaaaaatccccatcggtgtacacctgtttgccaggtgtgccagaacctgatccggtgttactgtgggcggctaatcggcgatcacgcaggaattgattacagttggaccattagcgcagcaaaaggtaaggagtcagagcagtggagtgttgagaaacataccacaaaaagtccgaccgatacctttggcacgataaacttccaggacggcgagcacacccatcacgccaagtatattaggaccagttatgatactaagctcgatcatcttttgcatcttatgctgaaggaatggaagatggagttgcctaaactggtaatttccgtgcacggaggtattcagaattttacgatgccctcgaaatttaaggagatcttctctcagggactggtaaaggccgctgaaacaacaggcgcttggattattacagaggggattaataccggcgtttccaaacacgtgggagatgctctcaaaagccacagctctcactccctgcgtaaaatctggacggttggaatccccccatggggggttatcgagaatcaacgagaccttatcggtaaagatgtggtgtgtctgtatcagaccctggacaatccattgagcaaacttacgacactgaacagtatgcactcacacttcatcctgagcgatgatgggacagtggggaagtacgggaacgagatgaaattacgcaggaacctggaaaaatacctttcactacaaaagatacactgtaggagtcgccagggcgttcctgtggttggcctagtggtagaaggcggcccgaacgtgattttatccgtgtgggaaacagtgaaggacaaggacccagtggtcgtttgcgagggtaccgggcgagcagccgacctcctggcgttcacccataagcatttggccgacgaaggcatgctgcgccctcaggtcaaggaagagattatctgtatgattcagaacacattcaatttcagccttaaacagtctaagcacctattccagatactgatggagtgtatggtacatcgggattgtattactattttcgacgcagactccgaagagcagcaggacctggatctcgccattctgacagctctactgaagggcactaatctgagcgcgtcagagcagctgaatctcgccatggcatgggacagagtggatattgcaaagaagcatatattgatttatgaacagcattggaaacccgatgccttggagcaggccatgtcagacgccctcgtaatggaccgcgtggattttgtgaagttacttatcgagtatggcgttaacctgcaccgttttctcactatcccgagactggaggaactgtataatacaaagcagggacccacaaataccctgctacaccacttagtgcaggacgtcaaacaacacactcttctttctggctatagaattaccctgatagacattggcctggtggtagagtatctgattggccgggcttacaggtcgaactacacgcgtaaacacttcagggctctgtacaacaatctctaccgaaaatacaagataataaccgtcaatgcctgttcccagtccgatcagcttaatcctgaacctggagaaaattccatatctgaggaggaatactctaaaaattggttcacagtgagtaaattctcgcatacaggggtagagccttatatacaccagaaaatgaagaccaaggagatcgggcaatgtgctatccagatctccgattatctgaaacagagccaagaggatctgagcaaaaactccctgtggaactcacgctccaccaacctgaaccgcaacagtctacacgtcattaagatgcccatttcaagtctgatttccgaaatctccgcctccctgaaatctccccaagaaccacaccaccactatagtgccattgagcgtaacaatttaatgagactatctcaaaccataccctttaccccagtgcagctcttcgccggtgaagagatcaccgtgtacagattggaagagagcagccccctcaacctggacaaaagcatgtcatcatggtcccagcggggtagagcagccatgattcaggttctcagtcgcgaagagatggatggaggcctccggaaggccatgagagtcgttagcacctggtccgaagacgatatcctgaaacccggccaagtttttattgtgaaaagtttcctgccagaggtggtgcgcacgtggcataaaatttttcaggaatctactgtattacacttgtgcttaagggaaattcagcagcagcgcgctgctcaaaagttaatttatacgttcaatcaagtcaagccgcagacaattccttacacacctcgtttcctggaggtgtttctgatctattgtcacagtgctaaccagtggctgacgatcgagaaatatatgaccggcgagtttagaaaatataacaataacaacggcgacgagataacacccactaatactcttgaagagctgatgctggccttctcgcactggacatatgagtatacccggggcgagctgctggtgctggatctgcaaggcgttggagagaacttaaccgacccgagcgtcatcaagcctgaggttaagcagagccggggtatggtgttcggtcccgcaaaccttggcgaggatgctatccgaaatttcatcgcaaagcatcactgcaactcatgttgtcgtaaactcaagctgccagacctcaagcggaacgattatagccctgaacgtattaatagcacttttggtctggaaattaagattgagtctgcagaggagccacctgccagggagaccggccggaactcccccgaagatgatatgcagctatag

SEQ ID NO: 309991 - DNA, 912 bp, Artificial Sequence
  derived and/or modified sequence
atgaaggagcagccagtgctggagcgtctgcagtctcagaaaagctggattaagggcgtttttgacaagcgggagtgctcaactattataccatcaagtaagaacccccatagatgcactcccgtgtgtcaggtgtgtcagaacctgattcgatgctattgcgggaggctgatcggagatcacgcaggcattgattatagttggacaatttcagccgctaaagggaaggaaagtgagcagtggtctgtggagaagcataccactaaaagtcctacggacacgtttggaaccatcaatttccaagatggggaacatactcaccatgccaagtacatccggacatcctatgacacaaaactcgatcacctgcttcatctgatgctgaaagagtggaaaatggaattgccgaagctagtaatttccgtgcatggtggcattcagaattttacaatgccatcgaagttcaaagagatcttttctcagggactggtcaaggcggctgaaacaactggagcatggattataacagagggaatcaacaccggagttagtaagcacgttggtgatgcattgaagtcccacagcagtcactccctgagaaagatctggactgtcggaatacccccatggggcgttatagagaaccagagagatctaataggaaaagacgtggtctgcctataccagactctggataaccctttgagtaaactcacaacactgaatagcatgcacagtcactttatcttatcggacgacggtaccgtcgggaaatatggtaacgagatgaagctgcgacgcaacttagagaagtacctctctctgcaaaagatccattgccgcgagtatcatcgaggctcggtaacccagagcgggtgcaggcctgcagaagtatttcatgggctcccttag

SEQ ID NO: 309992 - DNA, 2934 bp, Artificial Sequence
  derived and/or modified sequence
atgaaagagcagcctgtgctggagagactgcagtctcaaaaatcctggataaaaggagtgttcgataaacgcgaatgctccacgatcatcccttcatctaaaaatccacatcgctgtacacctgtttgccaggtgtgccaaaatctgatccgctgctactgtggcaggctgattggagaccacgccggaattgactattcctggactataagtgccgctaagggaaaggagtctgaacagtggagcgtggaaaaacatacaacaaaaagcccaacagatacctttggcacaatcaacttccaggacggtgagcacactcaccacgctaaatatatccgaacttcatatgatacgaagctggaccatctgttacacttgatgctgaaggagtggaagatggaactaccaaaattggttatctcagtgcacggaggtattcagaacttcacaatgccctccaagttcaaggaaatcttcagccaggggttggtaaaagccgctgaaaccacaggcgcttggataatcaccgaggggatcaatactggagtgtccaagcatgttggggacgctctgaagtcacattcctctcacagcctccgtaagatatggactgtgggaatccccccatggggagtgatcgagaatcaacgcgacttgataggaaaagacgtagtatgcctgtaccaaactttggacaacccactctccaaactgacgaccctgaactctatgcactcacatttcatcctgtccgacgatggcacagttgggaagtatggcaatgagatgaagctacgcagaaacctagagaagtacttgtccctgcagaaaatccactgcaggtctcgccagggtgtgcccgttgtgggcttagtcgttgagggaggacccaatgtcatcttgagtgtctgggagacagttaaggacaaagacccagttgtggtgtgtgagggtacaggtcgggctgccgacctgctggcttttacccacaagcacttagccgacgaaggaatgctcaggccccaggttaaagaggagatcatctgcatgatccagaatactttcaactttagccttaaacaaagtaagcacctatttcagatactcatggaatgcatggtgcatcgggactgtatcacaatcttcgatgcggatagtgaggagcagcaagacctcgatttggccatcttgactgcgctgttaaaagggactaatctgtctgcttctgaacagttgaacttggctatggcctgggatcgcgtggatatcgccaaaaaacacattttaatctatgaacagcactggaaaccagatgcccttgagcaggctatgagcgatgcacttgtaatggatagagtggactttgtcaagctccttatagagtacggggttaatctccaccggtttttaactattcccaggctcgaagaactgtacaacacaaagcaaggccctaccaacacattgctgcaccatctcgtgcaggatgtgaagcagcatacactactttctggatacagaattacactcattgatattggccttgtagtagaatacctaattgggagggcatacagatccaactatacccgcaagcacttccgagccctgtacaataatctatatcgaaagtacaaaataatcacagtgaatgcatgtagccaatccgaccagttgaatccagaacccggtgagaactcaatatccgaggaggaatactccaagaactggttcacagtgtctaagttttcccataccggagtagagccatatatacatcagaagatgaaaacgaaggaaatcgggcaatgcgccattcaaatttctgactacctgaagcagtcccaggaagatctgtcgaagaactctctttggaactcgaggtcaaccaatctgaaccgtaattccctccacgtcatcaaaatgccgatctcatcactgattagcgaaataagcgcctctctaaagtcgccccaggaaccgcatcatcattacagcgccattgagaggaacaacttaatgcgactgtcccagaccatcccttttacacccgtccagcttttcgccggagaggagattacagtttacaggcttgaggaaagtagcccattgaacctcgataagtcaatgtcctcgtggtctcagagagggagggcagccatgattcaggtcctgtcaagggaggagatggatggcggactgagaaaggcaatgcgtgtggtctccacatggtccgaagacgatatactgaagcccggacaggtcttcatcgtcaagtcatttcttccagaggtggtccgcacctggcacaaaattttccaagaatcaacagtcttacatctgtgcctgagggaaatccagcaacaaagggccgctcagaagcttatctataccttcaaccaagtgaaaccccagaccatcccttatacaccgaggttccttgaggtgtttctgatttattgccacagcgccaaccagtggctgaccatcgaaaaatatatgacgggcgaatttaggaagtataacaataataatggcgacgaaataactcccaccaatactctggaggaactcatgctggccttttcgcactggacatacgagtacactagaggggaattactcgtcctcgaccttcagggcgtaggggagaatttgactgatccaagcgttattaaacccgaagtcaagcagtcacggggaatggtgtttggcccagccaacctcggcgaggatgctataagaaacttcattgccaagcaccactgcaattcctgctgtagaaaactcaagctacccgacttgaagcgcaatgattactccccagaacggattaatagcacctttggccttgaaatcaaaatcgaatccgccgaagaaccccctgccagagaaacagggaggaactctcctgaggacgacatgcagctgtag

SEQ ID NO: 309993 - DNA, 1568 bp, Artificial Sequence
  derived and/or modified sequence
actacaaaggatgtctgtgatgacagtggccatcccatttgatcctcgttattcttcttttatcgaaggaaactgagagtcaccttcttttctaggcagttaggtaactgaagccgaaaggtattgtgacagatccactgggctgtaaaaggcagcgtgtggaggtggagcccagagtttctgcctccacagttaaaagctcagacagggctttgggagcagggcctgcaaatcaaagatgaaagaacaacctgtcttggagcgcttgcagtcccagaaatcctggattaaaggagtatttgacaagagagaatgtagcacaatcatacccagctcaaaaaatcctcacagatgtactccagtatgccaagtctgccagaatttaatcaggtgttactgtggccgactgattggagaccatgctgggatagattattcctggaccatctcagctgccaagggtaaagaaagtgaacaatggtctgttgaaaagcacacaacgaaaagcccaacagatacttttggcacgattaatttccaagatggagagcacacccatcatgccaagtatattagaacttcttatgatacaaaactggatcatctgttacatttaatgttgaaagagtggaaaatggaactgcccaagcttgtgatctcagtccatgggggcatccagaactttactatgccctctaaatttaaagagattttcagccaaggtttggttaaagctgcagagacaacaggagcgtggataataactgaaggcatcaatacaggagtgtccaagcatgttggggatgccttgaaatcccattcctctcattccttgagaaaaatctggacagttggaatccctccttggggtgtcattgagaaccagagagaccttattggaaaagatgtggtgtgcctgtaccagactctggataaccccctcagcaagctcacaacactcaacagcatgcactcgcacttcatcctgtctgatgatgggaccgtgggcaagtatggaaatgaaatgaagctcagaaggaacctggagaagtacctctctctgcagaaaatacactgccgtgagtatcacaggggctcagtcacccagtctggttgcaggcctgctgaggtctttcatggtcttccctgaccatcagagctagcttgaggggactaggggtgtgagctttgatggtcagggaagatgacatttcatgtgttggtggggtggccctaggcagggaaggggttaagaccagacaggatttttagaaatagggaccttggggctgggtgtggtggctcacgcctgtaatcccagcactttgggaggctgaggcgggtggatcacctgaagtcaggagtcgagaccaacctggccaacatggtgaaaccctgtctctgctaaaaatacaaaaattagccaggtgtggtggtgcatgcctgtaatcccagctactcaggaggctgaggcaggagaatgacttgaacctggggtgtagaggttacagtgagctgagatcgccccactgcacttcagcccaggtgacagagcaagactctgtctc

SEQ ID NO: 309994 - DNA, 5290 bp, Artificial Sequence
  derived and/or modified sequence
actacaaaggatgtctgtgatgacagtggccatcccatttgatcctcgttattcttcttttatcgaaggaaactgagagtcaccttcttttctaggcagttaggtaactgaagccgaaaggtattgtgacagatccactgggctgtaaaaggcagcgtgtggaggtggagcccagagtttctgcctccacagttaaaagctcagacagggctttgggagcagggcctgcaaatcaaagatgaaagaacaacctgtcttggagcgcttgcagtcccagaaatcctggattaaaggagtatttgacaagagagaatgtagcacaatcatacccagctcaaaaaatcctcacagatgtactccagtatgccaagtctgccagaatttaatcaggtgttactgtggccgactgattggagaccatgctgggatagattattcctggaccatctcagctgccaagggtaaagaaagtgaacaatggtctgttgaaaagcacacaacgaaaagcccaacagatacttttggcacgattaatttccaagatggagagcacacccatcatgccaagtatattagaacttcttatgatacaaaactggatcatctgttacatttaatgttgaaagagtggaaaatggaactgcccaagcttgtgatctcagtccatgggggcatccagaactttactatgccctctaaatttaaagagattttcagccaaggtttggttaaagctgcagagacaacaggagcgtggataataactgaaggcatcaatacaggagtgtccaagcatgttggggatgccttgaaatcccattcctctcattccttgagaaaaatctggacagttggaatccctccttggggtgtcattgagaaccagagagaccttattggaaaagatgtggtgtgcctgtaccagactctggataaccccctcagcaagctcacaacactcaacagcatgcactcgcacttcatcctgtctgatgatgggaccgtgggcaagtatggaaatgaaatgaagctcagaaggaacctggagaagtacctctctctgcagaaaatacactgccgctcaagacaaggcgtgccggtcgtggggctggtggtggaaggcggtcccaacgtcatcctgtcagtgtgggagactgtcaaggacaaggacccagtggtggtgtgtgagggcacaggtagggcggctgacctcctggccttcacacacaaacacctggcagatgaagggatgctgcgacctcaggtgaaagaggagatcatctgcatgattcagaacactttcaactttagtcttaaacagtccaagcaccttttccaaattctaatggagtgtatggttcacagggattgtattaccatatttgatgctgactctgaagagcagcaagacctggacttagcaatcctaacagctttgctgaagggcacaaatttatcagcgtcagagcaattaaatctggcaatggcttgggacagggtggacattgccaagaaacatatcctaatttatgaacaacactggaagcctgatgccctggaacaagcaatgtcagatgctttagtgatggatcgggtggattttgtgaagctcttaatagaatatggagtgaacctccatcgctttcttaccatccctcgactggaagagctctacaatacaaaacaaggacctactaatacactcttgcatcatctcgtccaagatgtgaaacagcatacccttctttcaggctaccgaataaccttgattgacattggattagtagtagaatacctcattggtagagcatatcgcagcaactacactagaaaacatttcagagccctctacaacaacctctacagaaaatacaagatcataacagtcaatgcctgctctcagagtgaccagttgaatccagagccaggagaaaacagcatctctgaagaggagtacagcaagaactggttcacagtgtccaaatttagtcacacaggtgtagaaccttacatacatcagaaaatgaaaactaaagaaattggacaatgtgctatacaaatcagtgattacctaaagcagtctcaagaggatctcagcaaaaactctttgtggaattccaggagcaccaacctcaataggaactccctccatgtaattaaaatgccaatctcctctctaatttcagagatctcagcctccttaaaaagccctcaagagcctcaccatcattattcagccattgaaaggaataatttaatgaggctttctcagaccataccatttacaccagtccaactgtttgcaggagaagaaataactgtctacaggttggaggagagttcccctttaaaccttgataaaagcatgtcctcttggtctcagcgtgggagagcggcaatgatccaggtattgtcccgagaggagatggatgggggcctccgtaaagctatgagagtcgtcagcacttggtctgaggatgacattctcaagccgggacaagttttcattgtcaagtcctttcttcctgaggttgtgcggacatggcataaaatcttccaggagagcactgtgcttcatctttgcctcagggaaattcaacaacaaagagctgctcaaaaattgatctataccttcaaccaagtgaaaccacaaaccataccctacacaccaaggttcctggaagttttcttaatctactgccattcagccaaccagtggttgaccattgagaagtatatgacaggggagttccggaagtataacaacaacaatggtgatgaaatcacccccaccaacaccctggaggagctgatgttggctttctctcactggacctatgagtacactcggggagagctgctggttttagatttgcaaggtgttggagaaaatttgacagatccatctgttataaaacctgaagtcaaacaatcaagaggaatggtgtttggaccggccaatttgggggaagatgcaattagaaacttcattgcaaaacatcattgtaactcctgctgccggaagctcaaactcccggatttaaaaagaaatgactattcccctgaaaggataaattccacctttggacttgagataaaaatagaatcagctgaggagcctccagcaagggagacgggtagaaattccccagaagatgatatgcaactataaaaagggaggagcaagaagatcccagtgcttgccctgcctgccaggaactctgtgataacatagattgatcaacgtgatgttgattacatcagcgtctccttgggacacgccttctgagcctcacatctccttctgttcaaaggcctcattggtatatgatcaatgggttctcctagacactgacctctgtccagggcactttgcagctccatcctcaagttccacacgaagatgcttggatgagtcagctgggaatattgttcttgtgtacctcattgctttagctggtcacttggaactttggagcagaatcctgcacattaaaggatggggttgggggggatacatttattttattttctcactatgtatgcagactggaccccctactactatttgtcacctcacccacagattgtatttatgtctatatatatgttcataaaaagttatgtgatttcctcctctgtcttttccacaacataggactttgaatagcaatgataggaaaaacaatggaacaagggtgggtttgcacagattggagcacattcctgcacaaactaccaagtatactggtgaaatctcgatgggtttcagatattgtcagtgaatcatatgatgcctggatatttcaggtttctgtaaaagaaagggaaacctaaaacaaatacccttccatatataatatatatggaatatgtatattatatatatttttatatatataatatatatggaatatatatattatatatataaaatacatatggaatatatatattttatatatatatatatatatttttatttttgagatggagtttcactctttttacccaggctggagtgcaatgatgcgatctcactgcaacctctgcctcccgggcttgagcgattcttgtgtctcagtcttccgggtagctgggactacaggtgtgcaccactatgcctggctaattttgtatttttagtagagatggggtttcaccatgttggccaggctggtctcaaactcctgacctcagatgatccacctgccttggcttcccaaagtgctgggattacaggcgtgagccactgcgcctggcctttttttttttttttttaaacgagaacaagaatatgaagaactggaaatcattaagaaagggtttcccttccttaaagctcaggggtactattagttaggagttgactaactcaacctgtaaaacaccactcctccttccaaagttgtatatataatattgcaggttaaattactttatgtcaggtcctatgaagaaagatacggtttcagactgaaaacatgtttcacaggtgtttgcttccttccagagcagagttccctattcccctggcataaagaatgtatatatattttgaaatatggctgagaacatgtcattggtttgtgaggcctaaggtgaagcactcctggcagccacactgtgtagtgtatttgagggatcagtcatccctcttgtatgctgggcctggttgccctacctcgaacaagcaccagcttttcacacaaggagagatgtggggctgggagtcctctccccatcctattgcatctcctttcttattataagctgttccagttcacaggcagcaaacctcctgggtttgaaaaattccaacttatttttatctttaatcctgacattagctgacttgctagtgagcttgctttaaaaatctacactcttgcattcttaggcatacaggggaaatgttgaaaaggaaggtggaaaaccaagaatttagtttgccaatgattgcctctgattcttgtaagtttgagttccacaagggctaatttattccccttttacttgggttttggggtggtggaaagcgggaaatttgggtgatttgttgattggcaatgaggataaaatgttaatacttttttggggacttaacaactttatcctattctacaagtcagtaaaggaacaattggtactcacctcagtgctgcactcaactatggaaagaggcagagtttgcttgcccaattgccaaactaaagacatcagttcattggtcaaatatttgttacctggaatggaacttgaaagcaaatacatttggatttcaaatttc

SEQ ID NO: 309995 - DNA, 87 bp, Artificial Sequence
  derived and/or modified sequence
atggccggacgagtgccatctctcttggtgcttctggttttcccctcctcatgcctggcctttcggtctcccctgtctgtgttctag

SEQ ID NO: 309996 - protein, 225 aa, Artificial Sequence
  derived and/or modified sequence
MNPTLILAAFCLGIASATLTFDHSLEAQWTKWKAMHNRLYGMNEEGWRRAVWEKNMKMIELHNQEYREGKHSFTMAMNAFGDMTSEEFRQVMNGFQNRKPRKGKVFQEPLFYEAPRSVDWREKGYVTPVKNQGQCGSCWAFSATGALEGQMFRKTGRLISLSEQNLVDCSGPQGNEGCNGGLMDYAFQYVQDNGGLDSEESYPYEATVSGAPCHHSSSAFGRWTL

SEQ ID NO: 309997 - DNA, 678 bp, Artificial Sequence
  derived and/or modified sequence
atgaacccgacactgatattggccgctttctgtctgggtatcgcctccgccaccctgaccttcgatcacagcctagaggcacagtggacaaagtggaaggctatgcataaccgcctatatggcatgaatgaagaggggtggaggagggccgtgtgggagaaaaatatgaagatgatcgaattgcacaaccaggagtatcgagagggtaaacatagtttcacaatggcgatgaacgcctttggtgacatgacaagtgaggagttcaggcaggtgatgaacggcttccagaatcgcaaaccaagaaaaggcaaggtatttcaggagccactgttctatgaagcccctaggtcggttgactggcgcgagaagggttacgttactcctgtcaaaaaccagggtcagtgcggcagctgctgggcctttagcgcgacaggggcgctggaaggccagatgttcaggaagaccggtcgcctgattagtttgtccgagcaaaacctcgtcgactgcagtggaccccagggcaatgagggctgtaacggaggcctcatggactatgctttccagtatgtccaggataacggaggactggattcagaggagagctacccctacgaggccacagtttctggcgccccatgccatcatagttcgtccgcctttggccgttggaccctgtag

SEQ ID NO: 309998 - DNA, 120 bp, Artificial Sequence
  derived and/or modified sequence
atgaatccaaccttaatcctggctgccttctgtcttggaatcgcctcagctactctgacctttgatcactcccttgaagcccagtggacaaaatggaaagccatgcacaataggctgtag

SEQ ID NO: 309999 - DNA, 678 bp, Artificial Sequence
  derived and/or modified sequence
atgaaccccaccctcatcctggccgccttctgcctgggcatcgccagcgccaccctgacctttgaccacagcctggaggcccagtggaccaagtggaaggccatgcacaaccggctgtatggcatgaatgaggagggctggaggagagctgtgtgggagaagaacatgaagatgattgagctgcacaaccaggagtaccgggagggcaagcacagcttcaccatggccatgaatgccttcggggacatgaccagcgaggagttccggcaggtgatgaatggcttccagaacaggaagcccaggaagggcaaggtgttccaggagcccctcttctatgaggcccccaggtctgtggactggagggagaagggctacgtgacccctgtgaagaaccagggccagtgtggcagctgctgggccttcagcgccaccggggccctggagggccagatgttcaggaagacaggccgcctcatcagcctgtctgagcagaacctggtggactgcagcggcccccagggcaatgaaggctgcaatggaggcctgatggactatgccttccagtatgtgcaggacaatggaggcctggacagcgaggagagctacccctatgaggccaccgtgtctggggccccctgccaccacagcagcagcgccttcggccgctggaccctgtag

SEQ ID NO: 310000 - DNA, 120 bp, Artificial Sequence
  derived and/or modified sequence
atgaaccccaccctcatcctggccgccttctgcctgggcatcgccagcgccaccctgacctttgaccacagcctggaggcccagtggaccaagtggaaggccatgcacaaccggctgtag

SEQ ID NO: 310001 - DNA, 678 bp, Artificial Sequence
  derived and/or modified sequence
atgaaccccaccctgatcctggccgccttctgcctgggcatcgcctctgcaacattgacctttgatcactctctggaggcccagtggactaagtggaaggcaatgcacaaccgcttgtatggcatgaatgaagaggggtggcggcgggccgtgtgggaaaagaatatgaaaatgatagaactccataatcaagaataccgcgaaggtaaacattcattcaccatggccatgaatgcttttggagacatgacctctgaggagtttcgacaggtgatgaacggctttcagaatcggaaaccaaggaagggcaaagtgtttcaagaacccttattctacgaggccccgagatccgtcgattggcgtgagaaggggtatgtgacacccgtaaaaaatcaggggcagtgtgggtcttgttgggcgttctctgcaactggcgctctggaagggcagatgttcaggaaaaccgggaggctcatttcattgagtgaacagaaccttgtcgactgttccggtccacagggaaacgagggctgcaacggaggactgatggattatgcatttcaatacgttcaggacaacggcggcttagactctgaggagagctacccatatgaggccacagtgtccggagctccatgccatcattctagctcggcatttgggcggtggaccctgtag

SEQ ID NO: 310002 - DNA, 120 bp, Artificial Sequence
  derived and/or modified sequence
atgaaccccaccctgatcctggccgccttctgcctgggcatcgcctcagccaccctcacattcgaccacagtctggaagcacagtggactaaatggaaggctatgcacaacaggttatag

SEQ ID NO: 310003 - DNA, 678 bp, Artificial Sequence
  derived and/or modified sequence
atgaaccccacattaatactggccgctttctgccttgggattgcttccgctactcttacctttgaccacagccttgaggcacagtggaccaagtggaaagccatgcataacagactctatggaatgaacgaggaagggtggcgcagggccgtctgggaaaagaatatgaagatgatagagttacacaatcaggagtacagggagggtaagcactcttttactatggcgatgaacgcctttggggatatgacctcggaagagttccgtcaagttatgaatgggtttcagaacagaaagccaaggaaggggaaagtattccaggaacccctgttctatgaggcgccaagaagcgttgactggcgagaaaaagggtatgtaactccagtgaaaaatcaaggccagtgtggttcctgctgggcatttagcgctacaggtgccctggagggccagatgtttaggaaaaccggacgcctgatcagtctgagcgagcagaatttagtcgattgcagtgggccacagggcaacgagggttgcaacggagggctcatggactatgcatttcaatacgtgcaggataatggtggtctcgattccgaagagagttacccatacgaagcaactgtcagcggcgctccttgccaccactcttccagcgcatttggcaggtggaccttgtag

SEQ ID NO: 310004 - DNA, 120 bp, Artificial Sequence
  derived and/or modified sequence
atgaacccaacactgatcctagccgcattttgtctcggaattgcaagtgccactttgacattcgaccactcattggaggctcaatggaccaaatggaaggcaatgcataacaggctgtag

SEQ ID NO: 310005 - DNA, 678 bp, Artificial Sequence
  derived and/or modified sequence
atgaatccaaccctgatattagccgctttttgcctcggaattgcaagcgccactctaacgttcgatcattctttggaggcccaatggacaaagtggaaagctatgcacaatcgtctgtacggcatgaatgaggaaggctggaggcgagccgtgtgggaaaagaacatgaaaatgattgaattacacaaccaggaatacagagaaggaaaacacagctttacaatggcgatgaacgctttcggagacatgacaagtgaagaatttagacaggtgatgaatggtttccagaatagaaaaccccgcaaaggcaaggtgtttcaagagccactcttctacgaagccccgcgctccgtcgattggagggagaaggggtatgtgacacccgtaaaaaaccagggtcagtgcggtagttgctgggccttttcagccaccggagcactagaggggcagatgttcaggaaaacaggcaggctcatttcactgagtgaacaaaacctggtagattgcagtggtccacaggggaacgaaggatgtaatggcggactaatggattacgctttccagtacgtgcaggacaacggtggactggactctgaggaaagctatccatatgaggcaactgtgtccggagctccatgccatcactcttcatccgccttcggacgttggaccctctag

SEQ ID NO: 310006 - DNA, 120 bp, Artificial Sequence
  derived and/or modified sequence
atgaaccccactctgattttagccgctttctgtcttggtatagctagcgcaacattaacatttgatcactcactggaggcccaatggacaaaatggaaagctatgcacaaccgactctag

SEQ ID NO: 310007 - DNA, 678 bp, Artificial Sequence
  derived and/or modified sequence
atgaatccaaccctgatattagccgctttttgcctcggaattgcaagcgccactctaacgttcgatcattctttggaggcccaatggacaaagtggaaagctatgcacaatcgtctgtacggcatgaatgaggaaggctggaggcgagccgtgtgggaaaagaacatgaaaatgattgaattacacaaccaggaatacagagaaggaaaacacagctttacaatggcgatgaacgctttcggagacatgacaagtgaagaatttagacaggtgatgaatggtttccagaatagaaaacccagaaagggtaaggtgttccaggagcctctgttctatgaggcccctcgttcagtagactggagagagaagggctacgtcacccctgtaaaaaatcagggacagtgtggaagttgctgggctttcagcgccactggagctctcgagggtcagatgttcaggaagacgggtaggctcatatctctcagcgaacagaatctagttgattgctcgggccctcagggaaatgaaggatgcaatggcggactcatggactatgcatttcagtacgtacaggataacggtggcttagacagtgaggagtcctatccatacgaagctacagtttccggcgccccttgtcaccatagttcttctgcttttggacggtggacactatag

SEQ ID NO: 310008 - DNA, 933 bp, Artificial Sequence
  derived and/or modified sequence
ttgagcggcatccgtggagtgcgcctgcgcagctacgaccgcagcaggaaagcgccgccggccaggcccagctgtggccggacagggactggaagagaggacgcggtcgagtaggttttaaaacatgaatcctacactcatccttgctgccttttgcctgggaattgcctcagctactctaacatttgatcacagtttagaggcacagtggaccaagtggaaggcgatgcacaacagattatacggcatgaatgaagaaggatggaggagagcagtgtgggagaagaacatgaagatgattgaactgcacaatcaggaatacagggaagggaaacacagcttcacaatggccatgaacgcctttggagacatgaccagtgaagaattcaggcaggtgatgaatggctttcaaaaccgtaagcccaggaaggggaaagtgttccaggaacctctgttttatgaggcccccagatctgtggattggagagagaaaggctacgtgactcctgtgaagaatcagggtcagtgtggttcttgttgggcttttagtgctactggtgctcttgaaggacagatgttccggaaaactgggaggcttatctcactgagtgagcagaatctggtagactgctctgggcctcaaggcaatgaaggctgcaatggtggcctaatggattatgctttccagtatgttcaggataatggaggcctggactctgaggaatcctatccatatgaggcaacagtaagtggagctccttgtcatcattccagctcagcttttggaaggtggacactttaagagataacagatacctttttcggaattcatatattagggctgggtggggtggctcacgcctgtaatcccagccctttaggaggctgagccaggcagatggcttaagctcaggagtttgagaccagcctggg

SEQ ID NO: 310009 - DNA, 354 bp, Artificial Sequence
  derived and/or modified sequence
tttgcctgggcacgaaacctggattttttgcgattggtacaaaacctggatcaaccgtttcccggtttcctagttgttgccttaagcttctcacacacaaggtagtttcataccgttctcataacctaaattgtcatcgcataaactgtttcagctcctacagctctggacaggctgcttttcattttggttttaaaacatgaatcctacactcatccttgctgccttttgcctgggaattgcctcagctactctaacatttgatcacagtttagaggcacagtggaccaagtggaaggcgatgcacaacagattatacggcatgaatgaagaaggatggaggagagcagtgtg

SEQ ID NO: 310010 - DNA, 678 bp, Artificial Sequence
  derived and/or modified sequence
atgaaccccaccctgatcctggccgccttctgcctgggcatcgccagcgccaccctgaccttcgaccacagcctggaggcccagtggaccaagtggaaggccatgcacaacagactgtacggcatgaacgaggagggctggagaagagccgtgtgggagaagaacatgaagatgatcgagctgcacaaccaggagtacagagagggcaagcacagcttcaccatggccatgaacgccttcggcgacatgaccagcgaggagttcagacaggtgatgaacggcttccagaacagaaagcccagaaagggcaaggtgttccaggagcccctgttctacgaggcccccagaagcgtggactggagagagaagggctacgtgacccccgtgaagaaccagggccagtgcggcagctgctgggccttcagcgccaccggcgccctggagggccagatgttcagaaagaccggcagactgatcagcctgagcgagcagaacctggtggactgcagcggcccccagggcaacgagggctgcaacggcggcctgatggactacgccttccagtacgtgcaggacaacggcggcctggacagcgaggagagctacccctacgaggccaccgtgagcggcgccccctgccaccacagcagcagcgccttcggcagatggaccctgtag

SEQ ID NO: 310011 - DNA, 120 bp, Artificial Sequence
  derived and/or modified sequence
atgaaccccaccctgatcctggccgccttctgcctgggcatcgccagcgccaccctgaccttcgaccacagcctggaggcccagtggaccaagtggaaggccatgcacaacagactgtag

SEQ ID NO: 310012 - RNA, 678 nt, Artificial Sequence
  derived and/or modified sequence
augaauccaacccugauauuagccgcuuuuugccucggaauugcaagcgccacucuaacguucgaucauucuuuggaggcccaauggacaaaguggaaagcuaugcacaaucgucuguacggcaugaaugaggaaggcuggaggcgagccgugugggaaaagaacaugaaaaugauugaauuacacaaccaggaauacagagaaggaaaacacagcuuuacaauggcgaugaacgcuuucggagacaugacaagugaagaauuuagacaggugaugaaugguuuccagaauagaaaaccccgcaaaggcaagguguuucaagagccacucuucuacgaagccccgcgcuccgucgauuggagggagaagggguaugugacacccguaaaaaaccagggucagugcgguaguugcugggccuuuucagccaccggagcacuagaggggcagauguucaggaaaacaggcaggcucauuucacugagugaacaaaaccugguagauugcagugguccacaggggaacgaaggauguaauggcggacuaauggauuacgcuuuccaguacgugcaggacaacgguggacuggacucugaggaaagcuauccauaugaggcaacuguguccggagcuccaugccaucacucuucauccgccuucggacguuggacccucuag

SEQ ID NO: 310013 - RNA, 120 nt, Artificial Sequence
  derived and/or modified sequence
augaaccccacucugauuuuagccgcuuucugucuugguauagcuagcgcaacauuaacauuugaucacucacuggaggcccaauggacaaaauggaaagcuaugcacaaccgacucuag

SEQ ID NO: 310014 - RNA, 678 nt, Artificial Sequence
  derived and/or modified sequence
augaauccaacccugauauuagccgcuuuuugccucggaauugcaagcgccacucuaacguucgaucauucuuuggaggcccaauggacaaaguggaaagcuaugcacaaucgucuguacggcaugaaugaggaaggcuggaggcgagccgugugggaaaagaacaugaaaaugauugaauuacacaaccaggaauacagagaaggaaaacacagcuuuacaauggcgaugaacgcuuucggagacaugacaagugaagaauuuagacaggugaugaaugguuuccagaauagaaaacccagaaaggguaagguguuccaggagccucuguucuaugaggccccucguucaguagacuggagagagaagggcuacgucaccccuguaaaaaaucagggacaguguggaaguugcugggcuuucagcgccacuggagcucucgagggucagauguucaggaagacggguaggcucauaucucucagcgaacagaaucuaguugauugcucgggcccucagggaaaugaaggaugcaauggcggacucauggacuaugcauuucaguacguacaggauaacgguggcuuagacagugaggaguccuauccauacgaagcuacaguuuccggcgccccuugucaccauaguucuucugcuuuuggacgguggacacuauag

SEQ ID NO: 310015 - DNA, 3210 bp, Artificial Sequence
  derived and/or modified sequence
agccagcccaagctggacagaaaccacagcttcagacacatcctgcccggcttcagaagcgccgccgccgccgccgccgacaacgagagaagccacctgatgcccagactgaaggagagcagaagccacgagagcctgctgagccccagcagcgccgtggaggccctggacctgagcatggaggaggaggtggtgatcaagcccgtgcacagcagcatcctgggccaggactactgcttcgaggtgaccaccagcagcggcagcaagtgcttcagctgcagaagcgccgccgagagagacaagtggatggagaacctgagaagagccgtgcaccccaacaaggacaacagcagaagagtggagcacatcctgaagctgtgggtgatcgaggccaaggacctgcccgccaagaagaagtacctgtgcgagctgtgcctggacgacgtgctgtacgccagaaccaccggcaagctgaagaccgacaacgtgttctggggcgagcacttcgagttccacaacctgccccccctgagaaccgtgaccgtgcacctgtacagagagaccgacaagaagaagaagaaggagagaaacagctacctgggcctggtgagcctgcccgccgccagcgtggccggcagacagttcgtggagaagtggtaccccgtggtgacccccaaccccaagggcggcaagggccccggccccatgatcagaatcaaggccagataccagaccatcaccatcctgcccatggagatgtacaaggagttcgccgagcacatcaccaaccactacctgggcctgtgcgccgccctggagcccatcctgagcgccaagaccaaggaggagatggccagcgccctggtgcacatcctgcagagcaccggcaaggtgaaggacttcctgaccgacctgatgatgagcgaggtggacagatgcggcgacaacgagcacctgatcttcagagagaacaccctggccaccaaggccatcgaggagtacctgaagctggtgggccagaagtacctgcaggacgccctgggcgagttcatcaaggccctgtacgagagcgacgagaactgcgaggtggaccccagcaagtgcagcgccgccgacctgcccgagcaccagggcaacctgaagatgtgctgcgagctggccttctgcaagatcatcaacagctactgcgtgttccccagagagctgaaggaggtgttcgccagctggagacaggagtgcagcagcagaggcagacccgacatcagcgagagactgatcagcgccagcctgttcctgagattcctgtgccccgccatcatgagccccagcctgttcaacctgctgcaggagtaccccgacgacagaaccgccagaaccctgaccctgatcgccaaggtgacccagaacctggccaacttcgccaagttcggcagcaaggaggagtacatgagcttcatgaaccagttcctggagcacgagtggaccaacatgcagagattcctgctggagatcagcaaccccgagaccctgagcaacaccgccggcttcgagggctacatcgacctgggcagagagctgagcagcctgcacagcctgctgtgggaggccgtgagccagctggagcagagcatcgtgagcaagctgggccccctgcccagaatcctgagagacgtgcacaccgccctgagcacccccggcagcggccagctgcccggcaccaacgacctggccagcacccccggcagcggcagcagcagcatcagcgccggcctgcagaagatggtgatcgagaacgacctgagcggcctgatcgacttcaccagactgcccagccccacccccgagaacaaggacctgttcttcgtgaccagaagcagcggcgtgcagcccagccccgccagaagcagcagctacagcgaggccaacgagcccgacctgcagatggccaacggcggcaagagcctgagcatggtggacctgcaggacgccagaaccctggacggcgaggccggcagccccgccggccccgacgtgctgcccaccgacggccaggccgccgccgcccagctggtggccggctggcccgccagagccacccccgtgaacctggccggcctggccaccgtgagaagagccggccagacccccaccacccccggcaccagcgagggcgcccccggcagaccccagctgctggcccccctgagcttccagaaccccgtgtaccagatggccgccggcctgcccctgagccccagaggcctgggcgacagcggcagcgagggccacagcagcctgagcagccacagcaacagcgaggagctggccgccgccgccaagctgggcagcttcagcaccgccgccgaggagctggccagaagacccggcgagctggccagaagacagatgagcctgaccgagaagggcggccagcccaccgtgcccagacagaacagcgccggcccccagagaagaatcgaccagccccccccccccccccccccccccccccccgcccccagaggcagaaccccccccaacctgctgagcaccctgcagtaccccagacccagcagcggcaccctggccagcgccagccccgactgggtgggccccagcaccagactgagacagcagagcagcagcagcaagggcgacagccccgagctgaagcccagagccgtgcacaagcagggccccagccccgtgagccccaacgccctggacagaaccgccgcctggctgctgaccatgaacgcccagctgctggaggacgagggcctgggccccgaccccccccacagagacagactgagaagcaaggacgagctgagccaggccgagaaggacctggccgtgctgcaggacaagctgagaatcagcaccaagaagctggaggagtacgagaccctgttcaagtgccaggaggagaccacccagaagctggtgctggagtaccaggccagactggaggagggcgaggagagactgagaagacagcaggaggacaaggacatccagatgaagggcatcatcagcagactgatgagcgtggaggaggagctgaagaaggaccacgccgagatgcaggccgccgtggacagcaagcagaagatcatcgacgcccaggagaagagaatcgccagcctggacgccgccaacgccagactgatgagcgccctgacccagctgaaggagagcatgcactag

SEQ ID NO: 310016 - DNA, 5193 bp, Artificial Sequence
  derived and/or modified sequence
agccagcccaagctggaccgcaaccacagcttccgccacatcctgccggggttccggagcgccgccgccgccgccgcggacaatgagaggtcccatctgatgccgaggctgaaggagtctcgctcccacgagtccctgctcagccccagcagtgcggtggaggcgctggacctcagcatggaggaagaggtggtcatcaagcccgtgcacagcagcatccttggccaggactactgcttcgaggtgacgacgtcatcaggaagcaagtgcttttcctgccggtctgcagctgagcgggataagtggatggagaacctccggcgagcggtgcatcccaacaaggacaacagccggcgtgtggagcacatcctgaagctgtgggtgatcgaggccaaggacctgccagccaagaagaagtacctgtgcgagctgtgcctggacgatgtgctctatgcccgcaccacgggcaagctcaagacggacaatgttttctggggcgagcacttcgagttccacaacttgccgcctctgcgcacggtcactgtccacctgtaccgggagaccgacaagaagaagaagaaggagcgcaacagttacctgggcctggtgagcctacctgctgcctcggtggccgggcggcagttcgtggagaagtggtacccggtggtgacgcccaaccccaagggcggcaagggccctggacccatgatccgcatcaaggcgcgctaccaaaccatcaccatcctgcccatggagatgtacaaagagttcgctgagcacatcaccaaccactacctggggctgtgtgcagccctcgagcccatcctcagtgccaagaccaaggaggagatggcatctgccctggtgcacatcctgcagagcacgggcaaggtgaaggacttcctgacagacctgatgatgtcagaggtggaccgctgcggggacaacgagcacctcatcttccgggagaacacactggccaccaaggccattgaggagtacctcaagctagtgggccagaagtacctgcaggacgccctaggtgagttcatcaaagcgctgtatgagtcagatgagaactgcgaagtggatcccagcaagtgctcggccgctgacctcccagagcaccagggcaacctcaagatgtgctgcgagctggccttctgcaagatcatcaactcctactgtgtcttcccacgggagttgaaagaggtgtttgcctcgtggaggcaggagtgcagcagtcgcggccgcccggacatcagtgagcggctcatcagcgcctccctcttcctgcgcttcctctgcccagccatcatgtcgccctcactcttcaacctgctgcaggagtaccctgatgaccgcactgcccgcaccctcaccctcatcgccaaggtcacccagaacctggccaactttgccaaatttggcagcaaggaggaatacatgtccttcatgaaccagttcctagagcatgagtggaccaacatgcagcgcttcctgctggagatctccaaccccgagaccctctccaatacagccggcttcgagggctacatcgacctgggccgcgagctctccagcctgcactcactgctctgggaggccgtcagccagctggagcagagcatagtatccaaactgggacccctgcctcggatcctgagggacgtccacacagcactgagcaccccaggtagcgggcagctcccagggaccaatgacctggcctccacaccgggctctggcagcagcagcatctcagctgggctgcagaagatggtgattgagaacgatctttccggtctgatagatttcacccggttaccgtctccaacccccgaaaacaaggacttgttttttgtcacaaggtcctccggggtccagccctcacctgcccgcagctcgagttactcggaagccaacgagcctgatcttcagatggccaacggtggcaagagcctctccatggtggacctccaggacgcccgcacgctggatggggaggcaggctccccggcgggccccgacgtcctccccacagatgggcaggccgctgcagctcagctggtggccgggtggccggcccgggcaaccccagtgaacctggcagggctggccacggtgcggcgggcaggccagacaccaaccacaccaggcacctccgagggcgcgccaggccggccccagctgttggcaccgctctccttccagaaccctgtgtaccagatggcggctggcctgccgctgtcaccccgtggccttggcgactcaggctctgagggccacagctccctgagctcacacagcaacagcgaggagttggcggctgctgccaagctgggaagtttcagcactgccgcggaggagctggctcggcggcccggtgagctggcacggcgacagatgtcactgactgaaaaaggcgggcagcccacggtgccacggcagaacagtgctggcccccagaggaggatcgaccagcctccgcccccacccccgccgccacctcctgccccccgcggccggacgccccccaacctgctgagcaccctgcagtacccaagaccctcaagcggaaccctggcgtcggcctcacctgattgggtgggccccagtacccgcctgaggcagcagtcctcttcctccaagggggacagcccagaactgaagccacgggcagtgcacaagcagggcccttcacctgtgagccccaatgccctggaccgcacagccgcttggctcttgaccatgaacgcgcagttgttagaagacgagggcctgggcccagaccccccccacagggataggctaaggagtaaggacgagctcagccaagcagaaaaggacctggcggtgctgcaggacaagctgcgaatctccaccaagaagctggaggagtatgagaccctgttcaagtgccaggaggagacgacgcagaagctggtgctggagtaccaggcacggctggaggagggcgaggagcggctgcggcggcagcaggaggacaaggacatccagatgaagggcatcatcagcaggttgatgtccgtggaggaagaactgaagaaggaccacgcagagatgcaagcggctgtggactccaaacagaagatcattgatgcccaggagaagcgcattgcctcgttggatgccgccaatgcccgcctcatgagtgccctgacccagctgaaagagagtatgcattagaaacaaaagcccgcttgctcgcttgctggaacacaggggccttttaagttgagcgtgcgcactgcatgggaaatagcggccctggaggatgttagacttgctccctctccaagacagcagcagcctgcacctgccccgtgtgtgtggccggcctcctcctcacccttcccggcccccggccaaggacccaggcgctgcatacaggggaggggcgcaccccacagctggggccggttttcctcagctctaggctgttctgtagcttatctgcccctcccccactttcaagacagatgagcaggagcttgggtctctctcggcccctgtctgttcccagcccctgcagattctgagcaaaggccctgggtaagaagggtgggagtggggcctttgccagcagagccagggcagggcgagctgcaggaatcacccctctgcccctgcagctggaatgtgccacagaggccccacctgaagggtggatgtgctggaggggtggcccagagccatactgcgtccaccctgagctcggggacaggtgacagtggctgctctgggaaggggcttttagatgtaacctacaattcagttaggctagagacagatgctggtggaggaagggctgggccaccagggatcacagaccacaggaagatgggaggtggaagcagaggccctgcccccaccccttcctgtctcactcttctgtcttgtccccacccatgcgccttcgtgcctgagaccagggtggccacacaggcagggcctggctccagtctcatcctcccattgcccagtgagccctgctcttctctccccagccccctcccaccgctgcctcgtagagtgacctcggacagagcccccctagcaatacagggaggctcccggggcctggacaggcgggctcggaggctacccgctgtggccggtgccagctgcccttgcagggtgggtgagctctcaggccgagagccttatttacctagtgcaaaaactgtaaaagtgtacagactcttcacagatttttatcttaattgcaagtctgccgattttgtaaatgttcttggtgtttgactgtaatgtaactatctcacctaatggttgtacatatcctttggtcctggtgctgccgagggctggccgggactgctgctctcccaagggttttattttatttctgaatctagagaacagtattgggcaggaggaaaaggcttggtgtctgcggggggtgtcttccctgcctgtggcatttgtgtgttggctttgcagctgctgtctgagtagtggccactggggtgccttcactgggccagtcaacggggggctcctgcccaggccacagagaacctgagttcccgggagctgggccctgcctgcagccagggctggggttgccagaggccctggagggaaggacagtccctgctggggaagaacagccccggggccccctggtcaccgagactcagcctctgctggagaaagccacgccctccctgctagcacagaggcctgactgacttttttgcttaacttccatgttctgggtgatggaaactgccaaacctcctgtcagtgaggactctttccgactgcccagaaagtgggggtggaggaccgaggctacagctccacacgccccggtcccccagagcatctgccccaggtacacctccccctgcgccccgcacgactgcgggagccagactgtccagggaaacagcctctctcttttctacacactcagccacaaagccccccagctcccacaccgcgtcccagctcccctcttttgtaagtatgtgaaaaggaaaaaatgcaaacgttggagtttgggctggagctcctccctccagctgcgacttttaactatgtaataatgtacagaggaagctgttggtgttctaagactctgtgtggctgtgcaatttctgtacatttgcaattagaaatattaaagatttatttagctatttt

SEQ ID NO: 310017 - DNA, 3210 bp, Artificial Sequence
  derived and/or modified sequence
agccagccaaagctggacagaaaccattcctttcgtcacatcttacctgggttccgcagcgccgccgcagccgccgctgataatgaacgcagccacctaatgcctaggctcaaggaatctagaagtcacgaatccttattaagcccctcctccgcagtcgaggccctggacctctctatggaggaagaggtcgtgataaagcctgtgcacagttccatccttggccaggattattgcttcgaggttacaacaagttctgggagtaaatgctttagctgtcgaagcgcagcagaacgtgacaaatggatggagaatctccgccgcgcagtgcatccaaacaaagacaattcgagaagggtcgagcatattctaaaattatgggtgatcgaggctaaagacctgcctgcgaaaaagaagtacctttgcgagctgtgcttggacgatgtgctgtatgccaggacgacagggaagctaaagaccgataacgtgttctggggggagcactttgagttccacaacttgccaccattgagaactgttacagtacacctgtatcgtgaaaccgacaagaaaaaaaagaaagagagaaattcttaccttggccttgtctccctgccagccgcctcggtagccggcagacagttcgtcgaaaagtggtacccagttgtgactccaaatcctaaaggaggtaaaggccctggccccatgatcaggatcaaggcgcgttaccagacaatcaccatccttcccatggaaatgtacaaagaattcgccgagcacattactaaccattacctgggattatgcgctgcactggaacccattttgtcggccaaaacaaaagaagagatggcgtccgcactggtgcatatcctccagtccaccggcaaagtcaaggatttcctgaccgatcttatgatgtctgaggtggatagatgcggcgacaacgagcatctgatttttcgcgagaataccttggccaccaaagcaatagaggagtatctgaaactggtgggtcagaagtacctccaggacgccctcggcgaattcattaaggcactgtatgagtccgatgagaactgcgaggttgacccatctaagtgttccgctgctgacctcccggaacaccagggcaatttgaaaatgtgctgtgaacttgcattctgcaagattatcaacagctattgcgtgttcccgcgcgagctcaaggaagtcttcgcttcctggcgccaagaatgctcctccagaggccgccccgacatcagcgagcgtttaatctctgcctcgctgtttctccggttcctctgtcccgcgataatgagcccatccctgtttaatcttttgcaagagtatccagatgatcggactgctcgcacacttaccctcatcgcgaaggttacccaaaacctcgccaacttcgcaaagtttggctccaaagaggaatacatgagctttatgaaccagttcctcgagcacgagtggactaacatgcaaaggttcctgctggaaataagcaatccagaaactctctccaacaccgcagggttcgagggatatatcgatctgggacgtgaactatctagcctacacagcctgctgtgggaagctgtctcacagctggagcagtccattgtgtctaaactgggcccgctaccacgtatattgcgtgatgtccatacggcgctgtccaccccaggtagcggccagttacctggcacaaacgacctggcttccactcccggcagtggctcgtctagtatctccgcagggctgcagaaaatggtgatagagaacgacctcagtggcctgatagatttcacgcgtctgccatcccctacccccgagaacaaggacctcttttttgttaccagatcatccggcgtacagccctcccccgccaggtcttcctcctattcagaggccaacgaaccagacttgcagatggccaacgggggaaaatccctgtctatggtggacctccaagatgccaggacactggacggcgaggcgggatcccccgcaggtccggatgtgctccctacggatggccaggccgctgccgctcagctggtggcgggctggcccgctcgcgcaactccggtgaatctggctgggctcgccacagtgcgaagggctgggcaaacgcctactacaccaggcacctcagagggagcaccagggcgccctcagctgctcgctcctctctcattccagaacccggtgtatcagatggccgccgggttgcccctctctcccagggggctgggcgattcaggttccgagggccattcctcattgtcatcccatagtaactcggaagagctggccgcagccgctaagctagggagtttcagtactgccgctgaggagctggccaggagacccggtgagctcgccagaagacagatgagtttgactgaaaagggtggccagcctaccgttccacgtcagaattccgcgggccctcagagacgcatagaccagcccccgccccctcccccccctcccccacccgctcctcgaggtcggacgccccctaacctgctttctaccctccagtatccccgtcctagtagtggcaccctcgcatcggcttcaccggactgggttgggcccagcaccaggctgaggcagcaatcatctagttcaaaaggcgacagcccagaattgaaaccgcgggccgttcacaaacagggccccagtcctgttagccccaacgctttggaccgcaccgccgcatggcttctgacgatgaatgctcagttgctcgaggatgaaggcctagggcccgatccacctcaccgcgacaggctacggtccaaggatgaactgtcccaggccgaaaaagacctggcagtgctgcaggataagctgaggattagcactaagaagctggaagagtacgagactctcttcaagtgtcaggaagagacaacgcagaagctagtcctggagtatcaggcgagactcgaggaaggggaggagagacttcgcagacaacaggaagacaaagatatccaaatgaaggggattatctcacgactcatgagcgtcgaggaggagctaaagaaggaccacgctgagatgcaggccgctgtcgactctaaacagaagattatcgacgcccaagagaaaaggatcgccagtctcgatgccgctaatgctcggcttatgtctgctcttacccaactcaaggagtctatgcactag

SEQ ID NO: 310018 - DNA, 3210 bp, Artificial Sequence
  derived and/or modified sequence
agccagcccaagctggacaggaaccacagcttccgccacatcctgcccggcttccgctctgctgctgctgctgctgctgacaatgaaagaagccacctgatgccccggctgaaggagagccgcagccatgagagcctgctgagccccagcagcgctgtggaggccctggacctgtccatggaggaggaggtggtgatcaagcctgtgcacagcagcatcctgggccaggactactgctttgaggtgaccaccagcagcggcagcaagtgcttcagctgccgctctgctgctgagcgggacaagtggatggagaacctgcggcgggctgtgcaccccaacaaggacaacagccggcgggtggagcacatcctgaagctgtgggtgattgaggccaaggacctgcctgccaagaagaagtacctgtgtgagctgtgcctggatgatgtgctgtatgcccggaccaccgggaagctgaagacagacaacgtgttctggggcgagcactttgagttccacaacctgccccccctgaggacagtgacagtgcacctgtaccgggagacagacaagaagaagaagaaggagaggaacagctacctgggcctggtgtccctgcctgctgcctctgtggccggccggcagtttgtggagaagtggtaccctgtggtgacccccaaccccaagggcggcaaaggacctggccccatgatccgcatcaaggcccgctaccagaccatcaccatcctgcccatggagatgtacaaggagtttgctgagcacatcaccaaccactacctgggcctgtgtgccgccctggagcccatcctgagcgccaagaccaaggaggagatggccagcgccctggtgcacatcctgcagagcacaggcaaggtgaaggacttcctgacagacctgatgatgtctgaggtggacagatgtggggacaatgagcacctgatcttccgggagaacaccctggccaccaaggccatcgaggagtacctgaagctggtgggccagaagtacctgcaggatgccctgggggagttcatcaaggccctgtatgaaagtgatgagaactgtgaggtggaccccagcaaatgttctgctgctgacctgcctgagcaccagggcaacctgaagatgtgctgtgagctggccttctgcaagatcatcaacagctactgtgtgttcccccgggagctgaaggaggtgtttgcctcctggaggcaggagtgcagcagccggggccgcccagacatcagcgagcggctcatcagcgccagcctcttcctgcgcttcctgtgcccagccatcatgagccccagcctcttcaacctgctgcaggagtacccagatgacagaacagcccggaccctgaccctgattgccaaggtgacccagaacctggccaactttgccaagtttggcagcaaggaggagtacatgtccttcatgaaccagttcctggagcacgagtggaccaacatgcagcgcttcctgctggagatcagcaaccctgagaccctgagcaacacagctggctttgagggctacatcgacctgggccgggagctgagcagcctgcacagcctgctgtgggaggccgtgtcccagctggagcagagcatcgtgtccaagctgggccccctgccccgcatcctgagagatgtgcacacagccctgagcaccccaggcagcggccagctgcccggcaccaatgacctggccagcaccccaggcagcggcagcagcagcatctctgctggcctgcagaagatggtgattgaaaatgacctgagcggcctgattgacttcacccggctgcccagccccaccccagagaacaaggacctcttctttgtgaccaggagcagcggcgtgcagcccagccctgcccggagcagcagctacagcgaggccaatgaaccagacctgcagatggccaacggcggcaagagcctgtccatggtggacctgcaggatgcccggaccctggatggagaggccggcagccctgctggcccagatgtgctgcccacagatggccaggccgctgctgcccagctggtggccggctggccagcccgggccacccctgtgaacctggccggcctggccaccgtgcggcgggccggccagacccccaccaccccaggcaccagcgagggcgcccctggccggccccagctgctggcccccctgtccttccagaaccctgtgtaccagatggccgccggcctgcccctgagcccccggggcctgggggacagcggcagcgagggccacagcagcctgagcagccacagcaacagcgaggagctggccgccgccgccaagctgggcagcttcagcacagctgctgaggagctggcccggcggcctggagagctggcccggcggcagatgagcctgacagagaagggcggccagcccaccgtgccccggcagaacagcgctggcccccagaggagaattgaccagcccccacctcctcctcctcctcctcctccagccccccggggccgcaccccacccaacctgctgagcaccctgcagtacccccggcccagcagcggcaccctggccagcgccagcccagactgggtgggccccagcacccggctgcggcagcagagcagcagcagcaagggggacagccctgagctgaagcccagggctgtgcacaagcagggccccagccctgtgagccccaatgccctggacagaacagctgcctggctgctgaccatgaatgcccagctgctggaggatgagggcctgggccctgaccccccccaccgggaccggctgcggagcaaggatgagctgagccaggccgagaaggacctggccgtgctgcaggacaagctgcgcatcagcaccaagaagctggaggagtatgagaccctcttcaagtgccaggaggagaccacccagaagctggtgctggagtaccaggcccggctggaggagggggaggagcggctgcggcggcagcaggaggacaaggacatccagatgaagggcatcatcagccggctgatgtctgtggaggaggagctgaagaaggaccatgctgagatgcaggccgctgtggacagcaagcagaagatcattgatgcccaggagaagagaattgccagcctggatgctgccaatgcccggctgatgtctgccctgacccagctgaaggagagcatgcactag

SEQ ID NO: 310019 - DNA, 3210 bp, Artificial Sequence
  derived and/or modified sequence
agccagcccaagctggaccggaaccacagcttccggcacatcctgcctggttttcggtcagccgctgctgccgccgcagataacgaaaggagccatctgatgccccgactcaaggagtcccgttcccacgagtccctgttgagcccctcaagcgctgtggaagctctcgacctgtcaatggaggaggaggtggtgattaagcccgttcattctagtatcctcggccaagactactgtttcgaagtgacaacgtccagcggcagcaaatgcttcagttgcaggtccgctgctgaaagggataagtggatggagaacctgcgtagagcggttcatcctaacaaggacaattctcgaagagttgaacatattctaaaactctgggtgattgaggcgaaggacctccccgcaaaaaagaaatatttgtgtgaactctgtctggacgatgtgttgtacgcacggacaacaggaaagcttaagactgataacgtgttctggggagagcacttcgagttccacaacttgcctcccctccgcacggtcaccgtgcacctgtaccgggagactgacaagaaaaagaaaaaggagagaaactcctacctgggcctggtgagtcttcccgccgcttccgtcgctggaagacaattcgtcgagaaatggtaccctgtcgttaccccaaatcccaaaggcggaaaggggccaggccctatgatacggattaaggctcgctaccaaaccattactattctcccaatggaaatgtacaaagagtttgctgaacatattaccaatcactatctgggtctgtgcgccgcattggagccgattcttagcgcaaagacaaaagaggagatggcctcagcgctggttcacatcctacagtctacaggcaaagttaaagatttcctcaccgacctgatgatgtctgaggtggatcggtgcggcgacaacgaacacctgattttccgagaaaacactctggccacgaaggccattgaagagtatctgaagttggtgggacagaaatacctacaggacgctcttggcgagtttattaaagccctgtacgaatctgatgaaaattgcgaagttgatcctagcaagtgttcagccgcagaccttccagaacatcagggcaacctgaagatgtgctgcgagcttgcattctgcaagatcatcaatagttattgcgtgtttccacgcgagcttaaagaggtcttcgccagttggagacaggagtgttcttccaggggccgacccgatataagtgagagactgatctccgccagcctcttccttcgattcctttgccctgccatcatgtccccgtccctgttcaatctccttcaggagtacccggacgaccgcacagccaggacactgactctgatcgccaaggtgactcagaacctcgccaactttgccaagttcggatctaaggaggaatacatgtcgttcatgaaccagtttcttgaacacgagtggactaatatgcagagattccttctggagatatctaaccctgagactctctcaaacaccgcggggttcgaagggtatattgacctcggtagagaactctcctcactgcactcactcctctgggaggcagtttctcaattggagcagtcaatcgtgtcaaagcttggacccctacccagaattctgcgtgacgtccacactgctctctcaacacccggcagcggtcagctgccaggaaccaatgacctagctagcactcctggcagcggcagctcaagcataagcgccggcttacagaagatggtgattgagaacgacctgtcaggtcttattgatttcactaggctgccaagccccacccccgaaaacaaggacctgttttttgtaacaaggagctcaggtgtccaaccatcccctgccagatcctcttcttacagcgaagctaacgaaccagacctgcagatggccaacgggggaaaatccctgtcaatggttgacctccaggatgctcggactctggatggcgaggcagggtcaccagccggacccgatgtactcccaacagacggacaggccgctgctgcacagttagtggccggctggcccgcccgcgcaaccccagtgaatctcgccggtctcgccacagtccgccgggctggccagacccccacaacccctggcacctcagagggcgctcccggccgcccccagctgctagctcccctgtccttccagaaccctgtgtaccaaatggcggctggtctgccactgtccccaaggggcctcggagattcaggctctgaggggcattcctccctctcttctcacagcaacagtgaagagctggcagcggcagctaaactgggcagcttttccaccgctgccgaagagctcgcgcgaagacctggtgaacttgccaggcgacagatgtctctcaccgaaaaaggtgggcagcccactgttccgcggcagaactctgcaggtccccaaagaaggatagaccagcctccccctcccccgccaccccccccaccagctcctcgtggacgcaccccccctaacctgctgagcaccctgcagtaccctcggccttcttcaggtactctcgccagcgcctctccggactgggtaggaccatcaacccgactgcggcagcagtcctcttccagtaagggagactccccagagctgaaacctcgggctgtgcataagcagggcccaagccctgtctcaccaaacgccctcgatagaacagctgcatggttattaacaatgaacgcgcagctgctcgaggatgagggactcggcccagacccacctcaccgagatcgtctgcgaagcaaggacgagctgagtcaggcagaaaaggacctggctgttctgcaggacaaactgaggatctctacgaagaaacttgaggaatatgaaaccctctttaagtgccaagaagaaacaacgcagaaactcgtgctcgagtatcaggcacggctggaagagggagaggaacgactcagaagacagcaggaggataaagacatacagatgaaagggattatcagccggctgatgagcgtggaagaagaactgaagaaggaccatgctgagatgcaggccgcagtggattccaagcagaagataatagatgcccaagagaaaaggatcgcctctctggatgccgccaacgcccgactgatgtccgcactgactcagctgaaggaaagcatgcactag

SEQ ID NO: 310020 - DNA, 3210 bp, Artificial Sequence
  derived and/or modified sequence
tcccaaccaaaactcgaccggaaccattcttttcggcacatccttccaggtttccgaagcgcggcagccgctgcggctgacaatgagaggtcccacctcatgcccagactgaaggagagcagaagtcatgaaagcctgctctcaccctcaagcgcggtggaggccttggacctctctatggaagaagaggtcgtaataaaacctgtgcactcatcaatactaggacaagattactgctttgaggtcaccacctcaagtggatccaagtgttttagctgcaggagtgcagcggagagagacaaatggatggagaacctcagacgggcagtacatccaaacaaggacaacagccgcagggtggagcacatcctcaaactgtgggtcattgaggccaaggacctgcctgcaaaaaaaaaatatctgtgcgagttgtgcctagacgatgtgctctacgccagaaccacaggaaagctgaagaccgataatgtgttctggggtgagcacttcgaattccacaacttacctccattgaggactgtcactgttcacctgtaccgggagactgataaaaaaaaaaagaaggagaggaattcgtatcttggcctggtgtctctccctgctgccagcgtggccggaagacaatttgtcgagaagtggtaccctgtggtgacacctaatccaaaaggagggaaaggaccgggacctatgatacggattaaggctagataccagacaattactatcctgcccatggaaatgtataaggagttcgcagagcatatcacgaaccattatcttggtctctgcgccgctttagagccgattctgtcagccaaaaccaaggaggaaatggcctccgccttagtgcatattctgcagtctacgggcaaggttaaggattttctcactgacctgatgatgtccgaagtagatagatgtggcgacaacgaacaccttatatttagagagaacactcttgcaaccaaggccattgaagaatacttgaaactagtgggccaaaagtacctgcaggatgccttgggcgaatttatcaaggcactgtacgagagcgacgaaaactgtgaggtggatcccagcaagtgcagcgctgccgacctccctgaacatcagggtaatctgaagatgtgctgcgagctcgccttttgtaagatcattaattcttattgcgtgttccctcgagaactgaaagaggtgtttgctagctggcgccaggagtgtagcagccgcggacggcctgatattagtgaaaggttaatctccgctagtctatttctgagatttctttgccccgctattatgtcaccatcactgttcaacttgttgcaggagtatcccgacgatagaacagccagaacactgaccctcatcgcaaaggtaacccaaaatctggccaacttcgccaagttcggcagcaaagaggaatacatgtcatttatgaaccaatttcttgagcatgaatggaccaatatgcagagatttttgctggagatatcgaacccagaaacgctcagcaacaccgctggtttcgagggctatatagatcttggtcgggagctgagctcactgcacagcctcctgtgggaggcagtctcacagctggaacagtctatagtctccaaactaggcccactaccacgaatcctgagggatgtccacacagctctgagcacacctgggtcaggtcagttgccaggaactaacgacttagctagtactccagggtccgggagctcctccatcagtgctggcctccagaaaatggtcatcgagaatgacctgtcgggcttgattgactttacccgcttaccttctcctacaccagaaaataaggatctgtttttcgtgactcgcagttccggagtccagccgtcaccagccagaagttcctcttactcagaggcaaacgagcctgatcttcagatggccaatggaggcaaatcattatcgatggtggaccttcaggatgccagaacactggatggggaggcagggagtccagccggtcccgatgtcttacctacagatggacaggcggcagccgcacagcttgtagctgggtggcctgctcgggcaacaccggttaatctggctggcttagccactgtccgtagggccggacagactccgaccaccccaggcacaagcgagggcgcaccgggaaggccccagctgcttgccccactttcctttcaaaaccctgtgtaccagatggctgcaggtcttcctctgagcccccgaggtttgggcgatagcggctcagagggccatagttcactgagctcgcatagtaactcagaagaacttgctgctgccgcaaaacttggatcttttagtacagccgcagaagagttagcccgtaggcccggagaactcgcacgaaggcagatgtcgctgacagagaaaggtggacagcctactgtgccccgtcagaattccgcagggcctcagagaaggatcgatcagccacctccgcctcccccaccccctcctcccgctcccagaggtcgtactcccccaaatctcctgagcacattgcagtacccaaggcccagcagcgggaccttggccagcgccagccctgattgggtcgggcctagcacccggctgcggcagcagtcatcatctagcaagggtgattcccccgaacttaagcctcgtgccgtgcataaacaaggcccatcgcctgtgagccccaatgcgttggacaggacagcagcctggttactcaccatgaatgcccaactcctggaggacgagggacttgggcctgatcctccacatcgcgatcggctgcggtctaaggacgaactcagccaggcagaaaaggacctcgcagtcctacaggataagctcagaatctccactaagaagctcgaagaatatgagaccctgttcaagtgccaggaggagactacccagaaattggtcctcgagtaccaagcccgtctggaagaaggggaggaacggctacggcgacagcaagaggacaaggatatccagatgaaaggcattattagccgtctcatgtccgtcgaggaagagctcaaaaaggatcacgctgagatgcaggccgctgttgactcaaaacagaaaattatagacgcccaggaaaagcgaattgcttccttggacgcagccaatgcacgcttgatgagcgccctgactcagctcaaggagagtatgcattag

SEQ ID NO: 310021 - DNA, 3198 bp, Artificial Sequence
  derived and/or modified sequence
atgcccagactgaaggagagcagaagccacgagagcctgctgagccccagcagcgccgtggaggccctggacctgagcatggaggaggaggtggtgatcaagcccgtgcacagcagcatcctgggccaggactactgcttcgaggtgaccaccagcagcggcagcaagtgcttcagctgcagaagcgccgccgagagagacaagtggatggagaacctgagaagagccgtgcaccccaacaaggacaacagcagaagagtggagcacatcctgaagctgtgggtgatcgaggccaaggacctgcccgccaagaagaagtacctgtgcgagctgtgcctggacgacgtgctgtacgccagaaccaccggcaagctgaagaccgacaacgtgttctggggcgagcacttcgagttccacaacctgccccccctgagaaccgtgaccgtgcacctgtacagagagaccgacaagaagaagaagaaggagagaaacagctacctgggcctggtgagcctgcccgccgccagcgtggccggcagacagttcgtggagaagtggtaccccgtggtgacccccaaccccaagggcggcaagggccccggccccatgatcagaatcaaggccagataccagaccatcaccatcctgcccatggagatgtacaaggagttcgccgagcacatcaccaaccactacctgggcctgtgcgccgccctggagcccatcctgagcgccaagaccaaggaggagatggccagcgccctggtgcacatcctgcagagcaccggcaaggtgaaggacttcctgaccgacctgatgatgagcgaggtggacagatgcggcgacaacgagcacctgatcttcagagagaacaccctggccaccaaggccatcgaggagtacctgaagctggtgggccagaagtacctgcaggacgccctgggcgagttcatcaaggccctgtacgagagcgacgagaactgcgaggtggaccccagcaagtgcagcgccgccgacctgcccgagcaccagggcaacctgaagatgtgctgcgagctggccttctgcaagatcatcaacagctactgcgtgttccccagagagctgaaggaggtgttcgccagctggagacaggagtgcagcagcagaggcagacccgacatcagcgagagactgatcagcgccagcctgttcctgagattcctgtgccccgccatcatgagccccagcctgttcaacctgctgcaggagtaccccgacgacagaaccgccagaaccctgaccctgatcgccaaggtgacccagaacctggccaacttcgccaagttcggcagcaaggaggagtacatgagcttcatgaaccagttcctggagcacgagtggaccaacatgcagagattcctgctggagatcagcaaccccgagaccctgagcaacaccgccggcttcgagggctacatcgacctgggcagagagctgagcagcctgcacagcctgctgtgggaggccgtgagccagctggagcagagcatcgtgagcaagctgggccccctgcccagaatcctgagagacgtgcacaccgccctgagcacccccggcagcggccagctgcccggcaccaacgacctggccagcacccccggcagcggcagcagcagcatcagcgccggcctgcagaagatggtgatcgagaacgacctgagcggcctgatcgacttcaccagactgcccagccccacccccgagaacaaggacctgttcttcgtgaccagaagcagcggcgtgcagcccagccccgccagaagcagcagctacagcgaggccaacgagcccgacctgcagatggccaacggcggcaagagcctgagcatggtggacctgcaggacgccagaaccctggacggcgaggccggcagccccgccggccccgacgtgctgcccaccgacggccaggccgccgccgcccagctggtggccggctggcccgccagagccacccccgtgaacctggccggcctggccaccgtgagaagagccggccagacccccaccacccccggcaccagcgagggcgcccccggcagaccccagctgctggcccccctgagcttccagaaccccgtgtaccagatggccgccggcctgcccctgagccccagaggcctgggcgacagcggcagcgagggccacagcagcctgagcagccacagcaacagcgaggagctggccgccgccgccaagctgggcagcttcagcaccgccgccgaggagctggccagaagacccggcgagctggccagaagacagatgagcctgaccgagaagggcggccagcccaccgtgcccagacagaacagcgccggcccccagagaagaatcgaccagccccccccccccccccccccccccccccccgcccccagaggcagaaccccccccaacctgctgagcaccctgcagtaccccagacccagcagcggcaccctggccagcgccagccccgactgggtgggccccagcaccagactgagacagcagagcagcagcagcaagggcgacagccccgagctgaagcccagagccgtgcacaagcagggccccagccccgtgagccccaacgccctggacagaaccgccgcctggctgctgaccatgaacgcccagctgctggaggacgagggcctgggccccgaccccccccacagagacagactgagaagcaaggacgagctgagccaggccgagaaggacctggccgtgctgcaggacaagctgagaatcagcaccaagaagctggaggagtacgagaccctgttcaagtgccaggaggagaccacccagaagctggtgctggagtaccaggccagactggaggagggcgaggagagactgagaagacagcaggaggacaaggacatccagatgaagggcatcatcagcagactgatgagcgtggaggaggagctgaagaaggaccacgccgagatgcaggccgccgtggacagcaagcagaagatcatcgacgcccaggagaagagaatcgccagcctggacgccgccaacgccagactgatgagcgccctgacccagctgaaggagagatacagcatgcaggccagaaacggcatcagccccaccaaccccaccaagctgcagatcaccgagaacggcgagttcagaaacagcagcaactgctag

SEQ ID NO: 310022 - DNA, 690 bp, Artificial Sequence
  derived and/or modified sequence
atgcccagactgaaggagagcagaagccacgagagcctgctgagccccagcagcgccgtggaggccctggacctgagcatggaggaggaggtggtgatcaagcccgtgcacagcagcatcctgggccaggactactgcttcgaggtgaccaccagcagcggcagcaagtgcttcagctgcagaagcgccgccgagagagacaagtggatggagaacctgagaagagccgtgcaccccaacaaggacaacagcagaagagtggagcacatcctgaagctgtgggtgatcgaggccaaggacctgcccgccaagaagaagtacctgtgcgagctgtgcctggacgacgtgctgtacgccagaaccaccggcaagctgaagaccgacaacgtgttctggggcgagcacttcgagttccacaacctgccccccctgagaaccgtgaccgtgcacctgtacagagagaccgacaagaagaagaagaaggagagaaacagctacctgggcctggtgagcctgcccgccgccagcgtggccggcagacagttcgtggagaagtggtaccccgtggtgacccccaaccccaagggcggcaagggccccggccccatgatcagaatcaaggccagataccagaccatcaccatcctgcccatggagatgtacaaggagttcgccgagcacatcacctag

SEQ ID NO: 310023 - DNA, 3198 bp, Artificial Sequence
  derived and/or modified sequence
atgccgagactgaaagaatcaagaagccacgagtcactcctgtcgcccagttccgctgtagaagccctcgacctgagcatggaagaagaggttgtcattaagccagtgcactccagcatcctgggacaggactactgctttgaggtgactacctcaagcggcagtaaatgcttctcttgcagaagcgcggcagagcgcgacaagtggatggaaaaccttcgaagagcggtacatccaaataaagacaactccaggcgcgtggaacacatcttgaagctgtgggttatcgaggcaaaggaccttccagcaaagaagaagtatctctgtgagctgtgccttgatgacgtgctgtacgcccggactaccggcaaactgaagacagacaatgtcttctggggcgagcacttcgaatttcacaacttaccaccccttcgaaccgtaacggtccacctataccgcgaaaccgacaaaaaaaaaaaaaaagaacgcaactcgtacttgggtctggtgtctctcccagccgcctcagtggcgggacgtcagttcgtggagaagtggtatcccgttgttacacctaaccctaaaggcggcaaagggcccggacctatgatcaggattaaggcccgctaccaaacgattaccatcctccccatggagatgtataaggagttcgcggaacacatcacaaatcattacttgggactctgtgccgcacttgagcccatactgagcgccaaaacgaaagaagagatggcctctgctctggttcacatccttcagtctacggggaaggtgaaggacttcttaaccgacctgatgatgagcgaagtggacagatgtggcgataacgaacacctgatatttagagagaacactctcgccaccaaggcaattgaagagtatttgaagttggtgggccaaaagtacttgcaagatgcgctgggcgagttcattaaagcgctttatgaatctgatgagaattgcgaagtggatcctagcaaatgcagtgccgccgacttgcctgaacaccaagggaatctcaagatgtgctgcgaattagccttctgcaagattataaattcgtactgcgtatttccacgcgaattaaaggaagtgtttgcatcgtggcggcaggaatgcagttctagaggcaggcctgacataagtgagagacttatcagcgcctccttgtttttaagattcttatgcccggccatcatgtctccttcactgtttaacctgcttcaggagtaccccgatgacagaaccgctaggaccctgacattgatcgctaaggtcacgcagaacctggcgaactttgccaagttcggctccaaggaggagtacatgtccttcatgaaccagttcctcgaacacgaatggaccaacatgcaaagattcctcctggaaatctccaacccagaaactctgtctaatactgcggggttcgaaggctatatcgatcttggtcgagaattgagcagcctgcatagcctgctgtgggaagcagtgtcccagctagaacagtccattgtgagcaaattaggccctctacctagaatactgagggacgtccataccgctctgagtaccccaggctctggacagctacctggcaccaacgacctggcatcaacaccagggtccggatcgtcaagcatctcagcgggactgcagaagatggtgattgaaaatgacctctccggcttgatcgactttacaagactgcctagtcctacccccgagaacaaagatttgttcttcgtcacccgcagctctggggtacagccttctccagcgaggtccagctcttattcagaagcaaatgaacctgatctccagatggcgaatggcggcaaatccctctccatggtggacctgcaagacgcccgaaccttggacggagaggcgggcagccctgcaggacctgacgtcctgcctacggatggtcaggccgctgccgcccagttggtcgccggctggcccgctcgggcgacccccgtcaatttggcagggcttgccaccgtgagaagggccgggcagacccccacaactcccggtaccagtgaaggcgctcctggccgtcctcagcttttggctccattaagttttcagaaccccgtataccaaatggccgccggattgccattgagccctcgggggctgggggacagtggctcggaaggccactccagcttgagttcccactcaaactcagaggaactggctgcggccgccaaactgggaagtttctctaccgccgctgaggagctggccaggcggcccggagagctggcgcggcgccagatgtcactgacagaaaagggtgggcagcctaccgtgccccgccaaaactctgcagggcctcagagaagaattgaccaaccacccccgcctcccccccccccacctcctgctccaagaggccgtactccccctaacctgctttccacccttcagtatcccaggcccagcagtggaactctcgcttcagcgtcaccggattgggtaggcccatccacaagattgaggcaacagtcaagtagtagcaagggggactcaccggagttgaagccgagggcagtccacaagcaggggcccagtcctgtctctccaaacgcactggatcgtaccgccgcgtggttgctgacgatgaatgcccagctccttgaagatgaaggcctggggcccgacccaccccacagggaccgactgcgatctaaggatgaactgtcacaggcagagaaagacctcgctgtgctacaggacaagctgagaatttccaccaagaaattggaggagtacgagactcttttcaagtgccaggaggaaaccacccagaagctggttttggagtaccaggcccggctggaggaaggagaagagagactaagaaggcagcaggaagataaagatatccaaatgaaaggtattatttctagattgatgtcagttgaagaggaactgaaaaaagaccatgccgaaatgcaagccgcggtggacagcaaacagaagataatcgacgctcaagagaagcgcatagctagtctggacgctgccaatgctcgactgatgagcgcccttacacagctgaaggaacggtacagtatgcaggcaagaaatgggatttctcctacgaatcctacgaaacttcagataaccgaaaatggcgaatttaggaactccagtaactgctag

SEQ ID NO: 310024 - DNA, 690 bp, Artificial Sequence
  derived and/or modified sequence
atgccaagacttaaggagtctcggtcacacgagagcctgctcagcccttcctcggctgtcgaggccctggatctttctatggaggaggaagtcgttattaaaccagtgcattctagcattctggggcaggactactgctttgaggtgactaccagctcagggtctaagtgtttctcatgtcgctccgccgccgagcgggataaatggatggaaaatttacggagggcagtgcaccccaacaaagacaatagccgccgagttgaacacatcctgaaactgtgggtgattgaggccaaggacctccctgctaaaaagaagtatctgtgtgaattgtgcctcgacgatgtcctctacgcccgcactacgggcaaactaaagacggataacgtgttctggggggagcattttgagttccacaacttgccccccctgcggaccgtgaccgtccatttgtatcgagagaccgacaagaagaagaaaaaggagcgcaattcctatctggggctcgtctcactaccagcggcctctgtcgcaggacgtcaattcgttgaaaaatggtacccagtcgtgacccccaaccctaagggaggcaagggcccaggcccgatgatcaggatcaaagctcgataccagacaatcactattctgcctatggagatgtacaaggagttcgcagaacacatcacttag

SEQ ID NO: 310025 - DNA, 3198 bp, Artificial Sequence
  derived and/or modified sequence
atgccccggctgaaggagagccgcagccatgagagcctgctgagccccagcagcgctgtggaggccctggacctgtccatggaggaggaggtggtgatcaagcctgtgcacagcagcatcctgggccaggactactgctttgaggtgaccaccagcagcggcagcaagtgcttcagctgccgctctgctgctgagcgggacaagtggatggagaacctgcggcgggctgtgcaccccaacaaggacaacagcagaagagtggagcacatcctgaagctgtgggtgattgaggccaaggacctgcctgccaagaagaagtacctgtgtgagctgtgcctggatgatgtgctgtatgcccggaccaccgggaagctgaagacagacaacgtgttctggggcgagcactttgagttccacaacctgccccccctgaggacagtgacagtgcacctgtaccgggagacagacaagaagaagaagaaggagagaaattcctacctgggcctggtgtccctgcctgctgcctctgtggccggccggcagtttgtggagaagtggtaccctgtggtgacccccaaccccaagggcggcaagggccctggccccatgatccgcatcaaggcccgctaccagaccatcaccatcctgcccatggagatgtacaaggagtttgctgagcacatcaccaaccactacctgggcctgtgtgccgccctggagcccatcctgagcgccaagaccaaggaggagatggccagcgccctggtgcacatcctgcagagcacaggcaaggtgaaggacttcctgacagacctgatgatgtctgaggtggacagatgtggggacaatgagcacctgatcttccgggagaacaccctggccaccaaggccatcgaggagtacctgaagctggtgggccagaagtacctgcaggatgccctgggggagttcatcaaggccctgtatgaaagtgatgagaactgtgaggtggaccccagcaagtgcagcgctgctgacctgcctgagcaccagggcaacctgaagatgtgctgtgagctggccttctgcaagatcatcaacagctactgtgtgttcccccgggagctgaaggaggtgtttgcctcctggaggcaggagtgcagcagccggggccgcccagacatcagcgagcggctcatcagcgccagcctcttcctgcgcttcctgtgcccagccatcatgagccccagcctcttcaacctgctgcaggagtacccagatgacagaacagcccggaccctgaccctcatcgccaaggtgacccagaacctggccaactttgccaagtttggcagcaaggaggagtacatgtccttcatgaaccagttcctggagcacgagtggaccaacatgcagcgcttcctgctggagatcagcaaccctgagaccctgagcaacacagctggctttgagggctacatcgacctgggccgggagctgagcagcctgcacagcctgctgtgggaggccgtgtcccagctggagcagagcatcgtgtccaagctgggccccctgccccgcatcctgagagatgtgcacacagccctgagcaccccaggcagcggccagctgcccggcaccaatgacctggccagcaccccaggcagcggcagcagcagcatctctgctggcctgcagaagatggtgattgaaaatgacctgagcggcctgattgacttcacccggctgcccagccccaccccagagaacaaggacctcttctttgtgaccaggagcagtggagtgcagcccagccctgcccggagcagcagctacagcgaggccaatgaaccagacctgcagatggccaatggaggcaagagcctgtccatggtggacctgcaggatgcccggaccctggatggagaggccggcagccctgctggcccagatgtgctgcccacagatggccaggccgccgccgcccagctggtggccggctggccagcccgggccacccctgtgaacctggccggcctggccaccgtgagaagagctggccagacccccaccaccccaggcaccagcgagggcgcccctggccggccccagctgctggcccccctgtccttccagaaccctgtgtaccagatggctgctggcctgcccctgagcccccggggcctgggggacagcggcagcgagggccacagcagcctgagcagccacagcaacagcgaggagctggccgctgctgccaagctgggcagcttcagcacagctgctgaggagctggcccggcggcctggagagctggcccggcggcagatgagcctgacagagaagggcggccagcccaccgtgccccggcagaacagcgctggcccccagaggagaattgaccagcccccacctcctcctcctcctcctcctccagccccccggggccgcaccccacccaacctgctgagcaccctgcagtacccccggcccagcagcggcaccctggccagcgccagcccagactgggtgggccccagcacccggctgcggcagcagagcagcagcagcaaaggagacagccctgagctgaagcccagggctgtgcacaagcagggccccagccctgtgagccccaatgccctggacagaacagctgcctggctgctgaccatgaatgcccagctgctggaggatgagggcctgggccctgaccccccccaccgggaccggctgcggagcaaggatgagctgagccaggccgagaaggacctggccgtgctgcaggacaagctgcgcatcagcaccaagaagctggaggagtatgagaccctcttcaagtgccaggaggagaccacccagaagctggtgctggagtaccaggcccggctggaggagggggaggagcggctgcggcggcagcaggaggacaaggacatccagatgaagggcatcatcagccggctgatgtctgtggaggaggagctgaagaaggaccacgccgagatgcaggccgctgtggacagcaagcagaagatcattgatgcccaggagaagagaattgccagcctggatgctgccaatgcccggctgatgtctgccctgacccagctgaaggagcgctacagcatgcaggccagaaatggcatcagccccaccaaccccaccaagctgcagatcacagaaaatggagagttcaggaacagcagcaactgctag

SEQ ID NO: 310026 - DNA, 690 bp, Artificial Sequence
  derived and/or modified sequence
atgccccggctgaaggagagccgcagccatgagagcctgctgagccccagcagcgctgtggaggccctggacctgtccatggaggaggaggtggtgatcaagcctgtgcacagcagcatcctgggccaggactactgctttgaggtgaccaccagcagcggcagcaagtgcttcagctgccgctctgctgctgagcgggacaagtggatggagaacctgcggcgggctgtgcaccccaacaaggacaacagcagaagagtggagcacatcctgaagctgtgggtgattgaggccaaggacctgcctgccaagaagaagtacctgtgtgagctgtgcctggatgatgtgctgtatgcccggaccaccgggaagctgaagacagacaacgtgttctggggcgagcactttgagttccacaacctgccccccctgaggacagtgacagtgcacctgtaccgggagacagacaagaagaagaagaaggagagaaattcctacctgggcctggtgtccctgcctgctgcctctgtggccggccggcagtttgtggagaagtggtaccctgtggtgacccccaaccccaagggcggcaagggccctggccccatgatccgcatcaaggcccgctaccagaccatcaccatcctgcccatggagatgtacaaggagtttgctgagcacatcacctag

SEQ ID NO: 310027 - DNA, 3198 bp, Artificial Sequence
  derived and/or modified sequence
atgccccggctgaaggagagccggagccacgagagcctgctgagccccagcagcgccgttgaggccctcgatctttctatggaagaagaggttgtcattaagcccgtccattcctccatcctaggccaagattattgcttcgaagtgacgacctcttctggaagtaagtgcttctcctgcaggagcgcagccgagcgcgacaagtggatggagaatctaaggagggctgtccacccaaataaggacaattctagacgagttgaacacatcctcaaactctgggtgattgaagccaaggacttgccagccaagaagaaatatctctgcgagctctgtctcgatgacgtcctgtacgctaggactaccggcaaactgaaaactgacaacgtgttttggggggaacatttcgaattccacaatttgccgcccctacgcaccgttacagtgcatttatatagggagacagacaagaagaaaaagaaggagcgcaattcctatctagggttagtgtcactgccagccgccagtgtagctggacgtcaatttgtagaaaagtggtaccccgttgtaaccccgaacccaaaggggggaaagggcccaggccctatgatcagaattaaagcaagataccaaactatcacaattctcccgatggagatgtataaggaattcgctgagcacatcactaaccattatctgggattatgtgccgctcttgagccaatcctctccgctaagaccaaggaggagatggccagcgccttggtccatattctgcagtctacaggaaaggtgaaggacttcctcactgatctgatgatgagtgaagttgatcgatgtggggataatgagcacttgatcttccgcgaaaataccctggcaacaaaggcgatcgaggagtacctaaagctcgttggccagaagtaccttcaggacgcccttggcgaatttatcaaagctctatatgaatcggacgagaactgcgaggtagatccctctaaatgcagcgcagccgatctgcctgaacatcaaggtaatcttaagatgtgctgtgagctcgccttctgcaagattatcaacagttactgcgtctttccacgagagctgaaggaagtcttcgcctcctggcgtcaggagtgtagtagcaggggccggccagatatctctgaacgcctcatttccgcctccctcttcctgcgtttcttgtgccccgccatcatgagcccctctcttttcaacctgttgcaggaatatccagacgaccgcactgctcgcaccttaacactgatcgccaaggtgacccaaaacctcgctaacttcgccaaatttggatccaaggaagaatatatgagtttcatgaaccagttcttggaacacgaatggacgaatatgcagagattcttgttggaaatctccaatccagaaacattgagtaataccgccggtttcgaagggtacattgacttgggccgagagttgagctccttgcactccctgctatgggaagctgtcagccagctcgaacaatccatcgtcagtaagctgggtccgcttccccgaatcctgcgggatgtccatacagccttgtctacacccggctcggggcagcttccagggaccaatgatttagctagtacccccgggtccggcagcagttcaatttctgccgggcttcagaagatggtgattgaaaatgatctctccggcttaattgacttcactcggctgcccagccctactccagagaataaagacctgtttttcgtcaccagatcttcaggagtgcaaccttctcccgctagatcatcgagctactcggaggcgaacgagcccgacctgcagatggcaaatggcggcaagtcactctctatggttgacttgcaggacgcccgcacgctggacggtgaggcggggtcccctgccggacccgatgtgcttcccacagatggccaagccgccgctgcgcagctggtcgccggctggcccgccagggccactcctgtgaacctcgcgggactggcaacggtcaggagggctggacaaacacccacgacccccgggaccagtgagggagcaccagggaggccccaactactggctcctctgtccttccaaaatcccgtgtaccaaatggctgccgggctgcccctgtctcccagaggcctcggtgatagcggctccgagggccacagcagcctatctagtcattccaatagcgaggaacttgctgcagccgcgaaactcggcagtttttccaccgcggccgaggaactagcaagacgcccgggggagctggccaggcggcagatgtctctgactgagaaaggaggtcaacccactgtgcctcgccagaatagcgccggtccccagagacggatagatcagcctccaccgcctcctcctccgccccccccggccccccgcggtcgcacaccccccaatctcctgtctacgctgcagtaccctcgcccgtcctcaggtactctcgcctccgcatcgccagactgggtaggcccatcaacccgcctgagacagcagagtagctcgagcaaaggagactctcctgagttaaaaccccgggccgtgcacaaacagggcccatctccagtgtcacccaacgcgctggacaggaccgccgcgtggctactgaccatgaatgcccaacttctcgaggatgaaggactgggccccgacccaccacaccgggatcgactgaggagtaaggatgagctctcccaggctgagaaggatctggccgtgttacaggacaagctccggatttccacaaaaaaacttgaggagtacgagaccctgttcaaatgtcaggaggagacaacacagaaactagtgctagagtatcaggcgcggctggaggaaggcgaagaacgtcttcgacgacaacaagaagacaaagatatccaaatgaaaggaattattagtagactgatgagcgtcgaggaggagcttaagaaggaccacgcagagatgcaggctgccgtggattcaaaacagaaaattatcgatgctcaagagaaacgaattgcgagcctcgacgcagccaatgcccggcttatgagcgctctcactcagttaaaggagaggtattccatgcaagcgcggaatggtattagccctactaacccaacaaagttgcagataactgagaacggggaattccggaactcgtccaattgctag

SEQ ID NO: 310028 - DNA, 690 bp, Artificial Sequence
  derived and/or modified sequence
atgccccggctgaaggagagccggagccacgagagcctgctgagcccttcgagcgcagttgaagccctggacctgtccatggaggaggaggtggtgatcaagccggtgcactcaagcatcttaggacaggactattgctttgaagttaccacctccagcggaagtaaatgtttctcttgtaggtccgccgcagaaagggacaaatggatggagaacttaagaagagcagtgcacccaaacaaggacaattctcgtagggtcgagcatattctgaaattgtgggtaattgaggccaaagatcttccggcaaaaaagaaatacctctgtgaactgtgtttggatgacgttctgtacgccagaacaaccggtaaactcaaaaccgataatgttttttggggtgaacattttgaatttcataacctcccccctcttcgcactgttacggtccatctgtatagagagacagacaaaaagaagaagaaggagcggaactcctacctcggcctggtctccctgccagccgcctctgttgcggggcgccaatttgtggagaagtggtatcccgtcgtaaccccaaatccaaaagggggaaaaggccctggacctatgatacgaatcaaggcgcgctatcaaacaataaccatcctgcccatggagatgtacaaggagtttgccgagcatattacatag

SEQ ID NO: 310029 - DNA, 3198 bp, Artificial Sequence
  derived and/or modified sequence
atgccacggttgaaggagtctaggagccatgagtctcttttgtcccccagctcagccgtggaggccttggatttgtccatggaagaggaagtcgtgatcaaaccggtccacagctccattctgggtcaggactactgtttcgaagtgacgacgtccagtggaagcaagtgcttttcctgtcggagcgcagcagagagggataagtggatggagaatctgaggcgcgctgtgcaccctaataaggataattctaggcgagtcgaacatattttgaagctttgggtaatcgaggctaaggacctacctgctaagaagaaatatttatgcgaactgtgtttggatgatgttctgtatgctcgaaccaccggaaaattgaaaactgataatgtgttttggggtgagcacttcgagttccacaatctgccacccctgcgcactgtaaccgttcacctgtaccgagagactgataaaaagaagaaaaaggaacgcaattcctaccttggcctggtgagcttaccagccgcttccgtggccggaagacaattcgtcgaaaagtggtaccctgtagtaactccaaaccccaaggggggtaagggacctggcccaatgattcgcatcaaggctcgatatcagaccatcacgattctgcccatggaaatgtacaaggagttcgctgagcatatcacaaatcactaccttgggctatgcgcagccttggagcccattctgtctgccaagactaaggaagaaatggcttctgcacttgtccacatcttacagtccacagggaaagtaaaggacttcctgacggatttgatgatgtcagaggttgatagatgcggagacaatgaacatttaatattccgcgaaaacactctggccaccaaagcaattgaggagtatctcaagctggtaggccagaaatacctgcaggacgcattgggtgagtttattaaggccctttacgagtctgacgaaaactgcgaagtggacccatcaaagtgttccgccgcagacctgcccgagcaccaggggaacctcaaaatgtgctgtgagctcgcattctgcaagatcatcaatagctattgtgtcttcccaagagagctcaaagaagtattcgcatcttggaggcaagagtgttcttctcgaggtcgcccagacatttctgagagacttattagtgcttcattgttcctgagattcttgtgccccgctattatgtccccaagcctttttaatctgctgcaggaatatccagatgaccgcacagcacgcacattgaccctgatcgcaaaggtgactcagaatctcgctaatttcgccaaattcgggagcaaagaggagtacatgtccttcatgaaccagtttctggagcacgagtggaccaatatgcaacggttcctgcttgagatatctaacccagagacactgagcaacaccgccggatttgaaggctacattgatctggggcgagaactgagctctctgcattccctcttgtgggaagctgttagtcaattggagcagtctatcgtatccaaactcggcccactgccccgtatcctgagagacgtccacaccgctctgtccacccccggttctggtcagctacctggcacaaatgacctggcgtctaccccaggctcaggatcttcctccatatctgccggactacagaagatggtgattgagaacgacctgagcggactgatcgatttcacccgcttgccctcccctacaccggagaataaggacttattcttcgtaacacggagtagcggggtgcaaccatctccggcaaggagtagttcttattccgaggccaatgagccggatctgcagatggccaacggcggaaaaagtctgtctatggtcgatctgcaggacgctagaactctcgatggtgaggcgggaagccctgccggtcccgatgtgcttcctaccgatggtcaggctgcagccgcacagttggttgctggttggcctgcgagagctacccccgtaaacttggctggcctcgctacagtgaggagagcaggccagactcctaccacaccaggtacatccgaaggggcacctggccgtccgcaactgctcgctcccttgtccttccagaacccagtgtaccagatggctgctggactccccctgtcccctcgagggctgggtgatagtggcagcgaggggcatagcagcctctcaagtcattccaacagcgaggagcttgctgccgctgccaagctgggttcattctccactgccgctgaggagctggcaaggagaccgggtgagctggcaaggcggcagatgtccttaaccgagaaaggcggacaacccacggttcccaggcagaattccgcaggaccgcagcggaggatcgatcagccaccacccccacccccaccccctcctcccgcacctcggggtcgaaccccccctaatcttctgagtaccctgcagtatccacgcccatcgagcggaacattagcgtctgccagcccagactgggtggggccatccactcggctgaggcagcaatcaagttcatcaaagggagatagccctgaactcaaacccagggctgtacataaacaaggaccatcccctgtcagtccaaacgctcttgatagaaccgcagcctggctcttgaccatgaacgctcagttgttagaagacgaaggcttggggcctgatccccctcatcgagacaggctaaggtccaaagacgagctgagccaggccgaaaaggatctcgccgtgcttcaggataagcttaggatttccaccaaaaagcttgaagagtacgaaaccttgttcaaatgtcaggaggaaactacacaaaaactggtcctggaatatcaggccagactggaagagggcgaggagcgactgcgacgccagcaggaagataaggatattcagatgaaggggattatctcacgccttatgtcggtcgaggaggagcttaagaaagatcacgccgaaatgcaggcggcagtagactcaaaacaaaaaatcatcgatgcacaggaaaagcggatagcctcactggacgccgcaaatgcacgccttatgagtgctctgacgcagctgaaggagcggtatagtatgcaggccagaaatgggatctcccctactaatccaacaaagcttcagatcaccgaaaatggcgagttcagaaattcgagcaattgttag

SEQ ID NO: 310030 - DNA, 690 bp, Artificial Sequence
  derived and/or modified sequence
atgccacgactgaaggagtctaggtcgcacgagagcctcctttcaccaagttctgccgttgaggctctggatctgagcatggaagaggaagtcgtgatcaagcctgtccattccagcatactagggcaggattactgtttcgaggtaactacaagctccgggagcaagtgtttttcctgcaggtcagcagcagagcgggacaagtggatggagaacctgcggagagcagtgcaccctaataaggacaatagccgaagggtcgagcatattctgaaactgtgggtgatagaggcgaaggatctgcccgcaaagaaaaaatacctgtgcgagctgtgcctggacgacgtgctatatgctcggactaccggtaagctgaagaccgacaacgtgttctggggcgaacattttgaattccacaatctaccaccactgcgcactgtgacagttcacctctaccgcgaaacagacaagaaaaaaaaaaaggaaaggaactcttatttggggctggtgtcactgcccgctgcctctgtggcgggacggcagtttgtcgagaagtggtatcctgtggtcacccctaaccctaagggaggaaaggggccaggaccgatgatcaggatcaaggcacgctatcaaactatcacaatcctacccatggagatgtacaaggagttcgccgagcacattacttag

SEQ ID NO: 310031 - protein, 1324 aa, Artificial Sequence
  derived and/or modified sequence
MADSLYNIRLLREFSNEYLNKCFYLTLEDMLYAPLVLKPNVMVFIAELFWWFENVKPDFVQPRDVQELKDAKTVLHQKSSRPPVPISNATKRSFLGSPAAGTLAELQPPVQLPAEGCHRHYLHPEEPEYLGKGTAAFSPSHPLLPLRQKQQKSIQGEDIPDQRHRSNSLTRVDGQPRGAAIAWPEKKTRPASQPTPFALHHAASCEVDPSSGDSISLARSISKDSLASNIVNLTPQNQPHPTATKSHGKSLLSNVSIEDEEEELVAIVRADVVPQQADPEFPRASPRALGLTANARSPQGQLDTSESKPDSFFLEPLMPAVLKPAKEKQVITKEDERGEGRPRSIVSRRPSEGPQPLVRRKMTGSRDLNRTFTPIPCSEFPMGIDPTETGPLSVETAGEVCGGPLALGGFDPFPQGPSTDGFFLHVGRADEDTEGRLYVSCSKSPNSHDSEPWTLLRQDSDSDVVDIEEAEHDFMGEAHPVVFSRYIGEEESAKLQEDMKVKEHEDKDDASGRSSPCLSTASQMSSVSMASGSVKMTSFAERKLQRLNSCETKSSTSSSQKTTPDASESCPAPLTTWRQKREQSPSQHGKDPASLLASELVQLHMQLEEKRRAIEAQKKKMEALSARQRLKLGKAAFLHVVKKGKAEAAPPLRPEHFAKEYSQHNGEDCGDAVSKTEDFLVKEEQREELLHEPQDVDKESLAFAQQHKAKDPVALHELERNKVISAALLEDTVGEVVDVNECDLSIEKLNETISTLQQAILKISQQQEQLLMKSPTVPVPGSKNNSQDHKVKAPVHFVEPLSPTGVAGHRKAPRLGQGRNSRSGRPAELKVPKDRPQGSSRSKTPTPSVETLPHLRPFPASSHPRTPTDPGLDSALEPSGDPHGKCLFDSYRLHDESNQRTLTLSSSKDANILSEQMSLKEVLDASVKEVGSSSSDVSGKESVPVEEPLRSRASLIEVDLSDLKAPDEDGELVSLDGSADLVSEGDQKPGVGFFFKDEQKAEDELAKKRAAFLLKQQRKAEEARVRKQQLEAEVELKRDEARRKAEEDRVRKEEEKARRELIKQEYLRRKQQQILEEQGLGKPKSKPKKPRPKSVHREESCSDSGTKCSSTPDNLSRTQSGSSLSLASAATTEPESVHSGGTPSQRVESMEALPILSRNPSRSTDRDWETASAASSLASVAEYTGPKLFKEPSSKSNKPIIHNAISHCCLAGKVNEPHKNSILEELEKCDANHYIILFRDAGCQFRALYCYYPDTEEIYKLTGTGPKNITKKMIDKLYKYSSDRKQFNLIPAKTMSVSVDALTIHNHLWQPKRPAVPKKAQTRK

SEQ ID NO: 310032 - protein, 2730 aa, Artificial Sequence
  derived and/or modified sequence
MVSNSRTSSTEAVAGSAPLSQGSSGIMELYGSDIEPQPSSVNFIENPPDLNDSNQAQVDANVDLVSPDSGLATIRSSRSSKESSVFLSDDSPVGEGAGPHHTLLPGLDSYSPIPEGAVAEEHAWSGEHGEHFDLFNFDPAPMASGQSQQSSHSADYSPADDFFPNSDLSEGQLPAGPEGLDGMGTNMSNYSSSSLLSGAGKDSLVEHDEEFVQRQDSPRDNSERNLSLTDFVGDESPSPERLKNTGKRIPPTPMNSLVESSPSTEEPASLYTEDMTQKATDTGHMGPPQTHARCSSWWGGLEIDSKNIADAWSSSEQESVFQSPESWKEHKPSSIDRRASDSVFQPKSLEFTKSGPWESEFGQPELGSNDIQDKNEESLPFQNLPMEKSPLPNTSPQGTNHLIEDFASLWHSGRSPTAMPEPWGNPTDDGEPAAVAPFPAWSAFGKEDHDEALKNTWNLHPTSSKTPSVRDPNEWAMAKSGFAFSSSELLDNSPSEINNEAAPEIWGKKNNDSRDHIFAPGNPSSDLDHTWTNSKPPKEDQNGLVDPKTRGKVYEKVDSWNLFEENMKKGGSDVLVPWEDSFLSYKCSDYSASNLGEDSVPSPLDTNYSTSDSYTSPTFAGDEKETEHKPFAKEEGFESKDGNSTAEETDIPPQSLQQSSRNRISSGPGNLDMWASPHTDNSSEINTTHNLDENELKTEHTDGKNISMEDDVGESSQSSYDDPSMMQLYNETNRQLTLLHSSTNSRQTAPDSLDLWNRVILEDTQSTATISDMDNDLDWDDCSGGAAIPSDGQTEGYMAEGSEPETRFTVRQLEPWGLEYQEANQVDWELPASDEHTKDSAPSEHHTLNEKSGQLIANSIWDSVMRDKDMSSFMLPGSSHITDSEQRELPPEIPSHSANVKDTHSPDAPAASGTSESEALISHLDKQDTERETLQSDAASLATRLENPGYFPHPDPWKGHGDGQSESEKEAQGATDRGHLDEEEVIASGVENASGISEKGQSDQELSSLVASEHQEICIKSGKISSLAVTFSPQTEEPEEVLEYEEGSYNLDSRDVQTGMSADNLQPKDTHEKHLMSQRNSGETTETSDGMNFTKYVSVPEKDLEKTEECNFLEPENVGGGPPHRVPRSLDFGDVPIDSDVHVSSTCSEITKNLDVKGSENSLPGAGSSGNFDRDTISSEYTHSSASSPELNDSSVALSSWGQQPSSGYQEENQGNWSEQNHQESELITTDGQVEIVTKVKDLEKNRINEFEKSFDRKTPTFLEIWNDSVDGDSFSSLSSPETGKYSEHSGTHQESNLIASYQEKNEHDISATVQPEDARVISTSSGSDDDSVGGEESIEEEIQVANCHVAEDESRAWDSLNESNKFLVTADPKSENIYDYLDSSEPAENENKSNPFCDNQQSSPDPWTFSPLTETEMQITAVEKEKRSSPETGTTGDVAWQISPKASFPKNEDNSQLEMLGFSADSTEWWKASPQEGRLIESPFERELSDSSGVLEINSSVHQNASPWGVPVQGDIEPVETHYTNPFSDNHQSPFLEGNGKNSHEQLWNIQPRQPDPDADKFSQLVKLDQIKEKDSREQTFVSAAGDELTPETPTQEQCQDTMLPVCDHPDTAFTHAEENSCVTSNVSTNEGQETNQWEQEKSYLGEMTNSSIATENFPAVSSPTQLIMKPGSEWDGSTPSEDSRGTFVPDILHGNFQEGGQLASAAPDLWIDAKKPFSLKADGENPDILTHCEHDSNSQASDSPDICHDSEAKQETEKHLSACMGPEVESSELCLTEPEIDEEPIYEPGREFVPSNAELDSENATVLPPIGYQADIKGSSQPASHKGSPEPSEINGDNSTGLQVSEKGASPDMAPILEPVDRRIPRIENVATSIFVTHQEPTPEGDGSWISDSFSPESQPGARALFDGDPHLSTENPALVPDALLASDTCLDISEAAFDHSFSDASGLNTSTGTIDDMSKLTLSEGHPETPVDGDLGKQDICSSEASWGDFEYDVMGQNIDEDLLREPEHFLYGGDPPLEEDSLKQSLAPYTPPFDLSYLTEPAQSAETIEEAGSPEDESLGCRAAEIVLSALPDRRSEGNQAETKNRLPGSQLAVLHIREDPESVYLPVGAGSNILSPSNVDWEVETDNSDLPAGGDIGPPNGASKEISELEEEKTIPTKEPEQIKSEYKEERCTEKNEDRHALHMDYILVNREENSHSKPETCEERESIAELELYVGSKETGLQGTQLASFPDTCQPASLNERKGLSAEKMSSKSDTRSSFESPAQDQSWMFLGHSEVGDPSLDARDSGPGWSGKTVEPFSELGLGEGPQLQILEEMKPLESLALEEASGPVSQSQKSKSRGRAGPDAVTLQAVTHDNEWEMLSPQPVQKNMIPDTEMEEETEFLELGTRISRPNGLLSEDVGMDIPFEEGVLSPSAADMRPEPPNSLDLNDTHPRRIKLTAPNINLSLDQSEGSILSDDNLDSPDEIDINVDELDTPDEADSFEYTGHEDPTANKDSGQESESIPEYTAEEEREDNRLWRTVVIGEQEQRIDMKVIEPYRRVISHGGYYGDGLNAIIVFAACFLPDSSRADYHYVMENLFLYVISTLELMVAEDYMIVYLNGATPRRRMPGLGWMKKCYQMIDRRLRKNLKSFIIVHPSWFIRTILAVTRPFISSKFSSKIKYVNSLSELSGLIPMDCIHIPESIIKLDEELREASEAAKTSCLYNDPEMSSMEKDIDLKLKEKP

SEQ ID NO: 310033 - DNA, 8193 bp, Artificial Sequence
  derived and/or modified sequence
atggtctccaatagccgtaccagttccactgaggccgtggcaggctccgctccactcagtcaaggctctagcggcatcatggaactttacgggagcgatattgagcctcagccatcttccgttaatttcatcgagaaccctcccgaccttaacgacagcaatcaggcacaagttgacgcgaacgtcgacctggtgtcccctgactctggcttagctacaatcaggagttcaaggagcagcaaggagtcaagcgtgtttctgtcggatgattcccctgtcggagagggcgccggcccccatcatactctgctccccggcttggatagctactctcccattcctgagggtgcagtggctgaagaacacgcctggtccggtgagcacggagagcatttcgatctcttcaatttcgatccagcccccatggcttctgggcagtctcagcaatcttcccattccgctgactacagcccagctgacgacttttttccaaactccgacctttcggaggggcaactgcccgctggcccagaaggcctggatggcatgggcaccaacatgtcaaactacagcagctccagcttacttagcggtgccggtaaggatagcctagtcgaacatgacgaggaatttgtgcaacgccaggattctcccagagataatagtgaaagaaatctgtcactcactgactttgtaggagacgagagcccctcacctgagaggttaaagaacaccggcaagaggatacccccaacacccatgaactccttggttgagtcctccccatctactgaagaacccgcttctctatataccgaggacatgacccagaaggctacggacacagggcacatgggcccccctcaaactcacgcccggtgttccagttggtggggcggcctggaaattgacagtaagaatattgccgatgcctggagctcttcggaacaggaaagcgtttttcagagccccgagtcctggaaagaacacaaaccctcatctattgatagacgcgcatcagattcagtatttcagccgaagagcctggagtttactaaaagcgggccgtgggagtcagagtttggccaacccgaactgggaagcaacgatattcaggataagaatgaggagtctctgcccttccaaaatttacccatggagaaaagcccactgcccaatactagcccccagggcacgaaccatctgattgaggattttgctagcttgtggcatagcgggcgctccccaaccgccatgcccgaaccctggggtaacccgaccgatgatggcgagcctgcagctgtggcacctttccccgcttggtctgctttcggtaaggaagatcatgatgaggcgctgaaaaacacctggaacttgcatccgacgagcagtaagactccgtctgtgcgagatcctaatgaatgggctatggcgaaaagcggctttgctttctcaagctctgaactgttagacaattctccctctgaaatcaataacgaggccgccccggagatttgggggaagaagaacaacgacagtagggatcacatcttcgctcctggaaaccctagttccgatcttgaccacacttggacaaatagtaaacccccaaaggaggatcagaacgggctcgttgaccccaaaacccgtgggaaggtctacgaaaaggttgacagttggaatctgttcgaagaaaacatgaaaaaagggggatctgatgtcctagtcccttgggaagatagcttcctgtcctataagtgtagcgattacagtgctagcaatcttggtgaagactccgtaccgtcccctctggacactaactatagcacatccgattcctatacatcccccacatttgccggggatgagaaagaaactgaacacaaaccatttgccaaagaggaaggctttgagtctaaagatgggaactccacggccgaggagacagacattccacctcagtctttgcagcaatccagtcggaatcggatctccagcggtccggggaacctggacatgtgggctagcccacacaccgacaactcctccgagatcaatacaacgcacaatctggatgagaacgaattgaagacggagcatacggacggcaaaaatataagtatggaggatgatgtgggagagagcagccaatcgagttatgatgatccgtcgatgatgcagctgtacaacgagaccaaccggcagctgacattactccactcatccacaaattcccggcagaccgcgccggattcccttgacctctggaatcgagttattctggaggacacacaaagcactgcaacaatcagcgacatggataacgatctggattgggatgattgcagcggtggcgccgcaattccgagtgacggacagaccgaagggtacatggccgaggggagcgaacctgagactcgatttacagtgaggcaactcgagccctgggggctggaatatcaggaggcgaaccaagtggactgggagctaccggcaagcgacgaacatactaaagatagtgccccctctgagcatcacactcttaatgagaagagtgggcagctaatagctaactctatatgggatagcgtgatgagggataaagatatgtcctccttcatgttaccaggctcatcacacatcacagatagcgaacagcgcgagctgccacctgaaataccttctcactcagcaaacgtgaaggatacccactctccggatgccccagcagccagcgggaccagtgagtcagaggccctgatcagccacctggataagcaggatacagagcgggagaccctccagagcgatgccgcaagtcttgctacaaggctagagaatccgggctacttccctcatcctgacccttggaaaggacatggcgacgggcagtctgaaagtgaaaaagaggctcagggcgcgacagatcgcggacatctggacgaggaagaggtaatcgcatcaggcgttgagaacgcctcagggattagtgaaaaaggacagtcggaccaggagctgagctccctcgttgcctctgaacaccaggagatctgcattaaatccgggaagatttccagcctagccgtgaccttttccccccagacagaggaacctgaagaagtgctggagtacgaagagggctcctataatctcgacagcagggatgtgcagaccggaatgagcgctgataacctccagcctaaggacacccacgaaaagcatctgatgtctcaaaggaactccggggagaccaccgaaaccagtgacgggatgaatttcaccaaatatgtatctgttcccgaaaaggaccttgagaaaacagaggaatgcaactttctggaacccgagaatgtgggaggagggcccccgcaccgcgtgcctcgctctcttgacttcggcgacgtacctatagatagcgacgttcacgttagctcgacatgtagcgagattaccaaaaatcttgacgtgaagggctccgagaatagcctgcccggcgccgggtcctctggtaactttgacagagatacaatcagttcggagtacacacactcttccgccagctcacctgaattgaatgattcttctgtagccttgtcttcctggggccaacagcccagctctggataccaggaggagaaccagggaaactggtctgagcagaatcaccaagagagcgagctgatcactaccgatggccaggtagagattgtgacgaaggtaaaagatctagaaaaaaaccgcattaacgagtttgagaagagcttcgaccgcaagactcccactttccttgaaatttggaacgacagcgtggatggggattcctttagctccctgtccagccccgaaacaggcaagtactccgagcacagcggaacacaccaggagagcaatctgatcgctagttaccaagaaaaaaatgagcacgatattagcgcaaccgttcagccagaagacgcgagggttatatccacaagttccgggtctgatgacgattcagttggcggagaggagtcgatcgaggaggaaattcaggtggctaactgccacgtagctgaggatgagtcccgcgcctgggattcgcttaatgagagcaataaatttctggtgactgccgacccaaaatctgagaatatttatgattatctcgatagcagtgagccggcagaaaatgaaaataaatccaaccctttttgtgataatcagcagtcctctccggacccctggacctttagtcccctcaccgaaaccgagatgcaaatcaccgctgtggagaaagagaaaaggagctcgcctgagactggaaccaccggtgacgtggcctggcagataagtccaaaagccagttttccaaaaaacgaagataacagccaactcgagatgctgggcttttctgctgatagcacagaatggtggaaagcatctccccaggagggcagactaatcgagagccctttcgaacgagagctgtccgatagcagcggagtcctggagatcaactcttctgtacaccaaaacgcttcgccctggggagtgcccgtacagggagatatcgagcctgtagagacacactacacaaatccgttctctgacaaccaccaatctccttttcttgaaggaaacggcaaaaactcccacgaacagctctggaatatacagccacgccagccggatcccgatgccgataaattttcacagctggttaaactggatcaaatcaaagagaaagactctcgagagcaaacatttgtctcagcggcaggagatgaactcaccccagaaaccccaacccaggagcagtgccaggacactatgcttcctgtgtgcgaccacccagacactgcattcacacacgctgaagaaaacagttgcgtgaccagcaatgtgagtaccaatgaagggcaagaaaccaatcaatgggagcaggagaaatcgtacttgggcgaaatgacaaatagctctatcgctaccgagaacttccccgcggtgtcttcgccgacccagctgatcatgaagccagggtctgagtgggatggcagcacaccctcagaggattctcgcgggacattcgtccctgatatcctgcacgggaattttcaggaggggggccaactcgccagtgccgcacctgacctgtggatcgatgcaaagaagccgtttagcctaaaagcggacggggagaaccctgacatcctcactcactgtgaacacgactccaatagccaagcctcagacagccccgatatctgccacgattcagaagccaagcaggagaccgagaagcatctgagcgcctgcatgggcccagaggtggagtccagtgagctctgtctcaccgaaccagaaatcgatgaagagcccatctacgaaccaggcagggagttcgttccatctaatgctgaactggatagtgaaaatgctacagtgctgcctcccatcgggtatcaggccgacataaaagggtcttcacagcctgcttcacacaaaggcagcccagagcctagtgaaataaatggcgataattctaccggcctacaagtgagcgagaagggggcaagccccgatatggcaccaattttggagcccgtggaccgaagaattcctaggattgaaaatgtcgccacatcgatatttgtgacccatcaggaaccgacccccgagggggacggaagctggatcagcgactccttttcccccgagtcgcagccaggagcccgcgccctcttcgacggggacccccacttgtcgaccgagaatcccgctttggtcccggatgctctgctagcctccgatacatgtctcgacatctcagaagccgcttttgaccacagtttttccgacgcctctggcctgaacacctctactgggactatcgatgacatgtccaagttgaccctgtccgagggtcacccagagacaccagtggacggagacctgggcaaacaagatatctgtagcagtgaggcctcctggggggacttcgaatatgatgtaatgggccagaatattgatgaagatcttcttagggagcccgagcacttcctgtacgggggggatccaccactggaggaagactctctgaaacaatccctcgcgccctacactcctcccttcgatctctcatacctgactgaacccgcccagagtgctgaaacaatagaagaagcgggctcacctgaggatgagagcctgggctgtagggcagcagagatagttttgtccgccctgccagaccgtaggtctgagggcaatcaagccgagactaaaaatagacttcctggatctcagctagccgtgctccacattcgagaggatccagaaagtgtttacctgcctgtgggtgcaggtagtaacatcctctctccatccaacgtggactgggaggttgaaactgacaacagcgatctgcctgcgggcggagatattggccctcccaatggtgcttcaaaggagatctccgaactcgaggaagagaagaccataccaaccaaggagcctgaacagataaagtctgagtacaaagaggagaggtgtaccgagaagaatgaggatagacacgccctacacatggactatatcttagtcaatagggaagagaatagtcactcaaaacctgagacctgtgaagaacgcgagagcattgccgaattagagctgtatgtgggatccaaggagacaggtctgcaggggacacagctggccagttttccggacacctgtcaaccagctagccttaacgaaagaaaaggtctctccgccgagaaaatgtccagcaaatcagatacccgcagttcgttcgaaagtcccgcccaggaccagagctggatgttcttggggcactccgaagttggagatccaagcctggacgcccgcgactctggcccagggtggtcagggaagaccgtggaacccttcagcgagctgggactgggcgagggaccccagctgcaaattctggaggagatgaaacccctcgaaagtctggctctggaagaggcaagcggtccagtgagccagtcccagaagagtaagtcccgcggacgggcaggaccggacgccgtaaccctccaggcggtaacccacgacaatgagtgggaaatgctgtctccccagcctgtccagaagaatatgattccagataccgagatggaagaagagacagagttcctcgaacttggtaccagaatctcaaggcccaacgggctattaagcgaggatgtgggaatggatattcctttcgaggagggagtcctgtcaccgagtgccgcagacatgcgacctgagccccccaacagcctagatctcaatgacacacaccccagacgcataaagttgaccgcccccaatatcaatctcagcctggatcagtccgaaggttctatcctgtccgacgacaatctggacagtccagacgagattgatatcaatgtggatgaactcgatactccagacgaggcagattcattcgaatataccggccacgaggaccctaccgccaataaggacagcgggcaggagagcgaatcaatacccgagtatacagcagaagaagagagggaagacaatcgcttatggagaaccgtggtgattggagaacaggaacagcgtatcgatatgaaggttatcgagccctatagaagggtgatttctcatggaggatactacggcgacggcctcaatgccatcattgtctttgccgcctgtttcctgcccgattcgtctcgcgcagattatcactacgtgatggagaacctattcttatatgtaatttccactctcgagctgatggtggctgaagattatatgattgtataccttaacggggctaccccccgtagacggatgccaggactggggtggatgaaaaagtgttaccaaatgatcgatcgtagactccgcaaaaacttgaaaagctttattattgtacaccctagctggtttattagaacaatcttggccgtcacacgcccttttatttcttccaagttctcatctaagatcaaatacgtcaatagcttaagcgagctgtccgggctgataccaatggattgcatccacatccctgagagcattataaagctcgacgaggagctcagagaagcttccgaagctgcgaagacatcttgtctgtacaatgacccagagatgagctctatggagaaggatattgatctgaaactgaaggaaaagccgtag

SEQ ID NO: 310034 - DNA, 8193 bp, Artificial Sequence
  derived and/or modified sequence
atggtgagcaacagcaggaccagcagcacagaggccgtggccggcagcgcccccctgagccagggcagcagcggcatcatggagctgtatggcagtgacatcgagccccagcccagctctgtgaacttcattgaaaatcctccagacctgaatgacagcaaccaggcccaggtggatgccaacgtggacctggtgtccccagattctggcctggccaccatccgcagcagccgcagcagcaaggagagcagcgtcttcctgagtgatgacagccctgtgggggagggcgccggcccccaccacaccctgctgcccggcctggacagctacagccccatccctgagggcgctgtggccgaggagcacgcctggagcggggagcacggggagcactttgacctcttcaactttgatcctgcccccatggccagcggccagagccagcagagcagccacagcgctgactacagccctgcagatgacttcttccccaacagcgacctgtctgagggccagctgcctgctggccctgagggcctggatggcatgggcaccaacatgagcaactacagcagcagcagcctgctgtctggagctgggaaggacagcctggtggagcatgatgaggagtttgtgcagaggcaggacagcccccgggacaacagcgagaggaacctgagcctgacagactttgtgggagatgagagccccagccctgagcggctgaagaacacaggcaagaggatcccccccacccccatgaacagcctggtggagagcagccccagcacagaggagcccgccagcctgtacacagaggacatgacccagaaggccacagacaccggccacatgggccccccccagacccacgcccgctgcagctcctggtggggcggcctggagattgacagcaagaacattgctgatgcctggagcagcagcgagcaggagagcgtcttccagagccctgagagctggaaggagcacaagcccagcagcattgacagaagagccagtgacagcgtcttccagcccaagagcctggagttcaccaagagcggcccctgggagagcgagtttggccagcctgagctgggcagcaatgacatccaggacaagaatgaggagagcctgcccttccagaacctgcccatggagaagagccccctgcccaacaccagcccccagggcaccaaccacctgattgaggactttgccagcctgtggcacagcggccgcagccccacagccatgcctgagccctggggcaaccccacagatgatggagagcctgctgctgtggcccccttccctgcctggagcgccttcggcaaggaggaccatgatgaggccctgaagaacacctggaacctgcaccccaccagcagcaagacccccagcgtgcgggaccccaatgagtgggccatggccaagagcggctttgccttcagcagcagcgagctgctggacaacagccccagcgagatcaacaatgaagctgcccctgagatctggggcaagaagaacaatgacagccgggaccacatctttgcccctggcaaccccagcagtgacctggaccacacctggaccaacagcaagccacccaaggaggaccagaatggcctggtggaccccaagacccggggcaaggtgtatgagaaggtggacagctggaacctgtttgaggagaacatgaagaagggcggcagtgatgtgctggtgccctgggaggacagcttcctgagctacaagtgcagcgactacagcgccagcaacctgggagaagattctgtgcccagccccctggacaccaactacagcaccagtgacagctacaccagccccacctttgctggagatgagaaggagacagagcacaagccctttgccaaggaggagggctttgagagcaaggatggcaacagcacagctgaggagacagacatccccccccagagcctgcagcagagcagcaggaaccgcatcagcagcggccctggcaacctggacatgtgggccagcccccacacagacaacagcagcgagatcaacaccacccacaacctggatgaaaatgagctgaagacagagcacacagatggcaagaacatctccatggaggatgatgtgggggagagcagccagagcagctatgatgaccccagcatgatgcagctgtacaatgagaccaaccggcagctgaccctgctgcacagcagcaccaacagccggcagacagccccagacagcctggacctgtggaacagagtcatcctggaggacacccagagcacagccaccatcagtgacatggacaatgacctggactgggatgactgcagcggcggggccgccatccccagtgatggccagacagagggctacatggccgagggcagcgagcctgagacccgcttcaccgtgcggcagctggagccctggggcctggagtaccaggaggccaaccaggtggactgggagctgcctgccagtgatgagcacaccaaggacagcgcccccagcgagcaccacaccctgaatgagaagagcggccagctgattgccaacagcatctgggacagcgtgatgagggacaaggacatgagcagcttcatgctgcccggcagcagccacatcacagacagcgagcagcgggagctgcccccagagatccccagccacagcgccaacgtgaaggacacccacagcccagatgccccagctgccagcggcaccagcgagagcgaggccctgatcagccacctggacaagcaggacacagagcgggagaccctgcagagtgatgctgccagcctggccacccggctggagaaccctggctacttcccccacccagacccctggaagggccatggagatggccagagcgagagcgagaaggaggcccagggcgccacagaccggggccacctggatgaggaggaggtgattgccagcggcgtggagaatgccagcggcatcagcgagaagggccagagcgaccaggagctgagcagcctggtggccagcgagcaccaggagatctgcatcaagagcggcaagatcagcagcctggccgtgaccttcagcccccagacagaggagcctgaggaggtgctggagtatgaggagggcagctacaacctggacagcagagatgtgcagacaggcatgtctgctgacaacctgcagcccaaggacacccatgagaagcacctgatgagccagagaaattctggagagaccacagagaccagtgatggcatgaacttcaccaagtatgtgtctgtgcctgagaaggacctggagaagacagaggagtgcaacttcctggagccagaaaatgtgggcggcggccccccccaccgggtgcccaggagcctggactttggagatgtgcccatcgacagtgatgtgcacgtgagcagcacctgcagcgagatcaccaagaacctggatgtgaagggcagcgagaacagcctgcccggggccggcagcagcggcaactttgaccgggacaccatcagcagcgagtacacccacagcagcgccagcagccctgagctgaatgacagctctgtggccctgagctcctggggccagcagcccagcagcggctaccaggaggagaaccagggcaactggagcgagcagaaccaccaggagagcgagctgatcaccacagatggccaggtggagatcgtgaccaaggtgaaggacctggagaagaaccgcatcaatgaatttgagaagagctttgacaggaagacccccaccttcctggagatctggaatgattctgtggatggagacagcttcagcagcctgagcagccctgagaccgggaagtacagcgagcacagcggcacccaccaggagagcaacctgattgccagctaccaggagaagaatgaacatgacatcagcgccaccgtgcagccagaagatgcccgggtcatcagcaccagcagcggcagtgatgatgacagcgtgggcggggaggagagcattgaggaggagatccaggtggccaactgccacgtggccgaggatgagagccgggcctgggacagcctgaatgaaagcaacaagttcctggtgacagctgaccccaagtctgagaacatctatgactacctggacagcagcgagccagcagaaaatgaaaacaagagcaaccccttctgtgacaaccagcagagcagcccagacccctggaccttcagccccctgacagaaacagagatgcagatcacagctgtggagaaggagaagaggagcagccctgagaccggcaccactggagatgtggcctggcagatcagccccaaggccagcttccccaagaatgaagacaacagccagctggagatgctgggcttctctgctgacagcacagagtggtggaaggccagcccccaggagggccgcctgattgagagcccctttgagcgggagctgagtgacagcagtggagtgctggagatcaacagctctgtgcaccagaatgccagcccctggggcgtgcctgtgcagggcgacatcgagcctgtggagacccactacaccaaccccttcagtgacaaccaccagagccccttcctggagggcaatggcaagaacagccatgagcagctgtggaacatccagccccggcagcctgaccctgatgctgacaagttcagccagctggtgaagctggaccagatcaaggagaaggacagccgggagcagacctttgtgtctgctgctggagatgagctgaccccagagacccccacccaggagcagtgccaggacaccatgctgcctgtgtgtgaccacccagacacagccttcacccacgccgaggagaacagctgtgtgaccagcaatgtgtccaccaatgaaggccaggagaccaaccagtgggagcaggagaagagctacctgggggagatgaccaacagcagcatcgccacagagaacttccctgctgtgagcagccccacccagctgatcatgaagccaggcagcgagtgggatggcagcacccccagcgaggacagccggggcacctttgtgcctgacatcctgcacggcaacttccaggagggcggccagctggccagcgctgccccagacctgtggattgatgccaagaagcccttcagcctgaaggcagatggagagaacccagacatcctgacccactgtgaacatgacagcaacagccaggccagtgacagcccagacatctgccacgacagcgaggccaagcaggagacagagaagcacctgagcgcctgcatgggccctgaggtggagagcagcgagctgtgcctgacagagcctgagattgatgaggagcccatctatgagcccggccgggagtttgtgcccagcaatgctgagctggacagtgaaaatgccaccgtgctgccccccatcggctaccaggccgacatcaagggcagcagccagcctgccagccacaagggcagccctgagcccagcgagatcaatggagacaacagcacaggcctgcaggtgtctgagaagggggccagcccagacatggcccccatcctggagcctgtggaccggcgcatccccagaattgaaaatgtggccaccagcatctttgtgacccaccaggagcccaccccagaaggagatggctcctggatcagtgacagcttcagccctgagagccagcccggggcccgggccctgtttgatggagacccccacctgagcacagaaaatcctgccctggtgcctgatgccctgctggccagtgacacctgcctggacatcagcgaggccgcctttgaccacagcttcagtgatgccagcggcctgaacaccagcacaggcaccattgatgacatgagcaagctgaccctgtctgagggccaccctgagacccctgtggatggagacctgggcaagcaggacatctgcagcagcgaggcctcctggggagactttgaatatgatgtgatgggccagaacattgatgaggacctgctgcgggagcctgagcacttcctgtatggaggagacccccccctggaggaggacagcctgaagcagagcctggccccctacaccccaccatttgacctgagctacctgacagagcccgcccagagcgctgagaccatcgaggaggccggcagcccagaagatgagagcctgggctgcagagctgctgagatcgtgctgagcgccctgcctgaccggcgctctgagggcaaccaggccgagaccaagaaccggctgcccggcagccagctggccgtgctgcacatcagagaagatcctgagagcgtgtacctgcctgtgggcgccggcagcaacatcctgagccccagcaatgtggactgggaggtggagacagacaacagcgacctgcctgctggaggagacatcggccccccaaatggagccagcaaggagatcagcgagctggaggaggagaagaccatccccaccaaggagcctgagcagatcaagtctgagtacaaggaggagcgctgcacagagaagaatgaagatagacatgccctgcacatggactacatcctggtgaaccgggaggagaacagccacagcaagccagagacctgtgaggagcgggagagcattgctgagctggagctgtatgtgggcagcaaggagaccggcctgcagggcacccagctggccagcttcccagacacctgccagcctgccagcctgaatgaaaggaagggcctgtctgctgagaagatgagcagcaagagtgacaccaggagcagctttgagagccctgcccaggaccagagctggatgttcctgggccacagcgaggtgggggaccccagcctggatgcccgggacagcggccctggctggagcggcaagacagtggagcccttcagcgagctgggcctgggggagggcccccagctgcagatcctggaggagatgaagcccctggagagcctggccctggaggaggccagcggccctgtgtcccagagccagaagagcaagagccggggccgggccggcccagatgctgtgaccctgcaggccgtgacccatgacaatgagtgggagatgctgagcccccagcctgtgcagaagaacatgatcccagacacagagatggaggaggagacagagttcctggagctgggcacccgcatcagccggcccaacggcctgctgtctgaagatgtgggcatggacatcccctttgaggagggcgtgctgagccccagcgctgctgacatgaggcctgagccccccaacagcctggacctgaatgacacccacccccggcgcatcaagctgacagcccccaacatcaacctgagcctggaccagagcgagggcagcatcctgagtgatgacaacctggacagcccagatgaaattgacatcaacgtggatgagctggacaccccagatgaagctgacagctttgagtacacaggccacgaggaccccacagccaacaaggacagcggccaggagagcgagagcatccctgagtacacagctgaggaggagcgggaggacaaccggctgtggaggacagtggtgattggagagcaggagcagagaattgacatgaaggtgattgagccctacagaagagtcatcagccacggcggctactatggagatggcctgaatgccatcatcgtgtttgctgcctgcttcctgcctgacagcagcagagctgactaccactacgtgatggagaacctcttcctgtatgtgatcagcaccctggagctgatggtggccgaggactacatgattgtgtacctgaatggagccaccccaagaagaaggatgcctggcctgggctggatgaagaagtgctaccagatgattgaccggcggctgaggaagaacctgaagagcttcatcatcgtgcaccccagctggttcatccgcaccatcctggccgtgacccggcccttcatcagcagcaagttcagcagcaagatcaagtatgtgaacagcctgtctgagctgagcggcctcatccccatggactgcatccacatccctgagagcatcatcaagctggatgaggagctgcgggaggccagcgaggccgccaagaccagctgcctgtacaatgaccctgagatgagctccatggagaaggacatcgacctgaagctgaaggagaagccctag

SEQ ID NO: 310035 - DNA, 8193 bp, Artificial Sequence
  derived and/or modified sequence
atggtgagcaacagccggaccagcagcaccgaggccgtggccggctcggctccactttcccagggcagtagcggaatcatggagctgtatggatccgatattgaacctcaaccatcctccgtcaacttcattgagaacccgcccgacttgaatgacagcaatcaggctcaagtggacgccaacgtagatcttgtgtctcctgactccggactcgccactatccgttcaagcagaagctctaaggaatcttctgtgttcctttctgacgactctcccgtcggcgaaggcgccggaccccaccacaccctcctgcccggactcgactcctactcccctatccctgaaggtgcagtggccgaggagcacgcatggtcaggtgaacatggtgaacacttcgatttattcaattttgatccggccccgatggcaagtggacaatctcagcagagctcccactccgctgactattccccagctgatgatttcttcccaaattctgatctgtctgagggccagctccctgccggcccagaaggactcgacggtatgggaaccaatatgtcaaactattcttcaagcagtctgctgagcggggctggcaaagactcactcgtggagcatgatgaggaattcgtgcagaggcaggacagtcctcgtgacaattcagaacggaatttatcactgaccgacttcgtgggcgacgagagcccctctcctgaacgcctaaaaaacactggcaagagaattcccccaactcccatgaactcacttgtggaatcttccccgagcacggaggaaccagcatctttgtataccgaggacatgacacagaaggccacggacaccggccacatggggcccccacagactcatgcccggtgctcctcctggtggggggggttagagattgattcaaagaacatcgccgacgcctggtctagcagtgagcaagagagtgtgtttcagtcacccgaaagttggaaagagcacaagccctcgtcgattgacagaagggcttctgatagcgtgtttcagcccaagtctctggaattcaccaagtccggcccgtgggaaagcgaattcgggcaaccagaactaggcagcaacgatattcaggataaaaatgaggagtcgctgccgttccaaaatctgccgatggagaaaagtccattgccgaacactagtccccaggggaccaaccacctgattgaagactttgcctctctgtggcactctggtcgctcccctacagctatgcccgaaccctggggcaatcccacagacgacggagagccagctgctgtggcgccgtttcctgcatggtcagcttttgggaaggaagaccacgatgaggccctgaaaaacacgtggaatttgcaccccacatcttctaaaaccccttcagtccgcgaccctaatgaatgggcaatggccaagtcgggctttgccttctccagcagtgaacttttagataattcaccaagcgagataaacaatgaagccgcccccgagatctggggcaaaaagaataatgattcccgcgaccatatctttgcacccggtaacccttccagtgacctggaccatacctggacaaattctaagccccctaaagaggatcagaatggcttggtggaccctaaaactcgaggaaaggtctacgaaaaggtcgattcttggaacctgttcgaagaaaatatgaaaaaagggggttccgatgtgctggtcccgtgggaggactcctttctgtcttataagtgttcagactactccgcctccaatttaggagaggattccgtgcccagtcccctggataccaattactccactagcgactcttacacctcaccaacctttgcgggcgatgaaaaggagacggaacataaaccattcgccaaggaagagggatttgagtccaaagatggaaattcaactgctgaggagacagacattcccccgcaatctttgcagcagtcctcacggaaccgtatttcaagcgggccaggaaacttggatatgtgggcatccccacatactgataactcctcagagatcaacactactcacaacctggacgagaacgagctcaagactgagcacaccgacggtaaaaacatttctatggaggacgatgtgggcgagagcagtcagagctcctatgacgacccctccatgatgcagctgtacaacgagaccaacagacagctgactctgctgcacagcagtaccaactcgcgccagactgcacccgatagcctggacctctggaatcgcgtaatcctcgaggatacccaaagcacagccaccatctctgatatggacaacgacctggactgggatgactgctcaggtggcgccgccattccatccgacggtcagaccgagggttacatggcagaaggatccgagcctgagacaaggtttacagtgaggcaattagaaccctggggtctggagtatcaggaggctaatcaggtggactgggagctgccggcttccgatgagcacaccaaggattcagcgccatcagaacaccacacccttaacgagaagagcggccagctcatagcaaatagtatctgggactctgtgatgagagacaaggatatgtctagctttatgctcccaggctctagtcacattaccgacagcgagcagcgggagctgccccccgagatcccctctcactccgccaacgtgaaagacacgcactcgccagacgcacctgccgccagtgggacttctgagtccgaggctctgatctctcatctggacaagcaggacacagagagagaaacactgcagtcagatgccgccagcctggccacccgccttgaaaacccagggtatttcccacatccggacccatggaagggtcacggggatggccagagcgaaagcgagaaagaggcccagggcgctacagaccgaggacacctggatgaagaagaggtgattgcaagtggcgtcgagaacgcttccggaatttccgagaagggccagtctgatcaagagttgtcttctttggtagcctccgaacatcaggagatctgcatcaaatcaggaaagatcagtagcctggctgttacattttccccccagaccgaagagcccgaggaggttctggagtacgaggagggttcatacaacttagattcccgtgatgttcagactggtatgagcgccgataatctgcagcccaaagatactcacgagaagcacttgatgagtcagaggaactcaggagagactacagaaacgagcgatggcatgaacttcactaagtacgtcagcgtccctgagaaagatctcgagaagaccgaggaatgcaactttttggagcctgaaaacgtgggcggcggcccaccccatagagtgcccagaagcctggatttcggagacgtgcctatagactccgatgtgcatgtctcatcaacatgttctgaaattacaaaaaatctggatgttaaaggttccgaaaatagcctgcctggagccgggagcagtgggaatttcgaccgcgacaccatctcatctgagtatactcattcaagcgcttctagccccgaattaaacgattctagcgttgcccttagttcctgggggcagcagccttcttctggctaccaagaagaaaaccagggcaactggagcgagcaaaatcaccaagagtccgagctcattacgacagatggccaagttgagattgttaccaaggtaaaggatctggagaaaaataggattaatgaattcgagaaaagcttcgacaggaaaaccccgaccttcctcgaaatctggaacgattcggtggacggcgactctttcagctcgctctcttctccggagacagggaaatactccgagcactcagggactcaccaggagagcaatctcatcgcttcctaccaggaaaaaaacgagcacgatatctccgccaccgtccagcctgaggatgcaagagtcatcagcacctctagcgggagtgacgatgatagcgttgggggcgaggagtccattgaagaagaaatacaagtagctaactgtcatgtggcggaagatgagtcaagagcctgggatagtctaaatgaatctaataagttcctcgtgacggccgatccaaagtcagagaacatctacgattacctggacagttccgagcctgccgagaacgagaacaagtccaatcctttttgcgataatcagcaatctagcccagatccatggaccttttcacccctcaccgagacagaaatgcagattactgccgtggaaaaagaaaaaaggtctagccccgaaactgggacgacaggggacgtggcttggcagatctctccgaaagcctcctttccaaagaatgaggataatagccaacttgagatgctcgggttctctgccgattctacagaatggtggaaggcttcacctcaggaagggaggctgattgaatcccctttcgagagggagctgagtgatagcagtggggtgctggagattaacagcagcgtgcatcagaacgcttccccttggggggtccccgtgcagggagatatcgagccggtggaaacacactacactaacccttttagcgacaaccatcaaagtcccttcctggaggggaacggaaaaaatagtcacgagcagctgtggaacatacagccaaggcagccagatcctgacgctgacaagtttagccagttggtgaagctggatcagataaaagagaaggactcccgcgagcagacattcgtcagtgccgcaggcgacgagctgactcctgaaacaccaacccaggagcagtgtcaggatactatgctacctgtctgcgaccatcctgacacagccttcacccatgcagaggagaatagctgcgtgaccagtaacgtaagcacaaacgagggacaggagacaaaccagtgggagcaggaaaagtcttacctgggtgaaatgaccaattcctctatcgccacggagaacttcccagcagtctcctctcctacacaattaataatgaaaccagggtcagaatgggacggttccactcccagtgaggactcacggggcacctttgtccccgacattctgcatggtaattttcaggagggcggtcagctggcctctgctgcccctgatctgtggatagatgccaagaaaccatttagcctgaaagctgatggggaaaatcccgatattttgacacattgcgaacacgattctaatagccaagcctccgactcaccagacatttgccatgactccgaggcgaaacaggagacggagaagcatttgagtgcctgcatgggtcccgaggtagagtccagcgagctgtgtctgaccgaaccagaaatagacgaagagccgatttacgagccaggaagagaattcgttccatcaaatgcggagttagattctgagaatgccacagtgttgcctcccattggttatcaggcagacatcaagggaagttcccagcccgcaagccataaaggtagcccagaaccttcagaaatcaacggcgataattcgactggactgcaggtgtccgagaaaggggcctctcccgatatggctcctatcctcgagccggttgacagacgcatccctcggatcgagaacgtggccacctctatttttgtcacacaccaggaaccaacccctgaaggagacgggagttggatctctgactccttctccccggagagccagcccggagccagagcgctgttcgatggcgatccgcatctatcgacagagaacccagctcttgtgccagacgcccttttggcatcggatacatgtttggacattagtgaggcagcgttcgaccacagtttttcggacgcttccggactgaatacaagcacgggaacgatagacgacatgtccaagctcacactctctgaagggcacccggagactcccgtggacggcgatctgggtaagcaggatatctgttcttcagaagcctcctggggcgattttgaatacgatgttatggggcagaacattgacgaggatttgctccgtgagcctgaacactttttgtacgggggggacccccccttggaggaggacagtctgaaacaaagtctagccccgtacacgccccccttcgacctatcctatctcactgaaccggcccagtcagccgaaacaattgaggaggcgggaagtccggaggatgaatccctcggctgccgagcggccgagatcgttctttctgccctaccagatagaaggtctgagggcaaccaggcagagacaaagaaccggctccccggctctcagcttgcagtgttacacatccgcgaggaccctgagagcgtgtatctgcctgtcggggcaggaagcaacatcttgagtcctagcaacgtggattgggaggtggagaccgacaattctgatctcccagcaggcggcgacatcggcccacctaacggggcttctaaggagatttcggaactcgaggaggagaagactatcccaacaaaggagcccgaacaaatcaagtccgagtataaggaagagcggtgtacagaaaagaacgaggataggcacgcattacacatggactatatcctcgtgaaccgggaggagaacagtcacagcaagccagaaacgtgcgaggagagggaaagcattgcggaattggaactgtatgtagggagtaaagaaaccgggctgcagggaacacagctggcaagctttcctgacacctgccagcccgccagtcttaacgagagaaaaggcctgtccgctgagaagatgagcagcaagtctgatacacgctccagtttcgagagtcccgcacaggatcaatcttggatgtttctgggacacagcgaagtaggtgatccaagcctcgacgcgcgcgacagcggtccggggtggtccgggaagacagtcgaacctttctccgagcttggtctgggagaaggtccccagctgcagatcctggaggagatgaaacctttggaatcgctcgccttggaggaggcatctggcccagtcagccagtcacagaagagcaagtcacgaggcagggctggcccagacgccgttaccctccaggccgtcacccacgataacgagtgggagatgctgagccctcaaccagtgcaaaagaacatgatccccgataccgagatggaggaagagacagaatttctcgagttgggcacccgaatctccaggccaaacggcctgctgagcgaggacgtgggcatggatattccctttgaggagggagttctgtcaccctctgcagccgacatgaggcccgaacctcctaattcgctggacctgaacgatactcatcctcggcgcataaagttaacagcccccaatattaaccttagcttggatcagagtgagggctcaatcttgtcagacgataatctggatagccccgacgagatcgatattaacgtcgatgagttagacactcctgacgaggcagacagttttgaatacactggccatgaggaccctaccgcaaataaggattcaggtcaagagagcgagagcatccccgagtacacggccgaggaagagagagaagacaatcggctatggaggaccgttgtgattggtgagcaggagcaacgcattgatatgaaagtaattgagccttataggagggtgatcagccatggtggttactacggagatggtctcaatgcgatcatcgtctttgcagcctgttttttgccagatagttccagggctgactaccattatgtcatggaaaacctattcctttacgtgattagcacccttgagctaatggtagccgaggattacatgattgtgtacctgaacggggctacaccccgccgaagaatgcccggcctcggttggatgaaaaaatgctaccagatgatcgatcggcggctccggaagaatctgaaatcttttataatcgtacatccatcctggtttatcaggacaattctggcggttacaagaccatttatctcgtccaaatttagtagtaagattaaatatgtgaatagcctcagcgagctctccgggttgattccgatggattgcatacatattccagaatccattattaagcttgatgaggaactgagggaagcatcagaagctgcaaaaacaagctgcctgtacaacgaccccgagatgagttctatggaaaaagatatcgacctgaagctgaaagaaaaaccgtag

SEQ ID NO: 310036 - DNA, 8192 bp, Artificial Sequence
  derived and/or modified sequence
atggtgagcaattcccgaaccagttcgactgaggcggtggcaggatctgctcccctgtcacagggatcatccggaatcatggagctgtacgggtccgacatcgaacctcagcccagcagtgttaatttcatagaaaaccctccagacttgaacgactcaaaccaggcgcaggttgatgcaaacgtggatctggtcagtcccgattcgggtttagccacaattaggtccagccgatcctccaaggagagtagcgttttcctgtccgacgactctccagtgggtgaaggtgccggtcctcaccacaccctgttgccaggattggactcctactccccaataccggagggcgctgtcgccgaagagcatgcttggagcggagagcatggcgagcattttgacttattcaatttcgatcccgcacccatggcctccggccagtcgcagcagagttctcatagcgctgactattctcctgccgacgatttttttcctaactctgatctcagcgagggccagctgcctgcaggaccggaaggactcgacggcatgggcacaaacatgagtaattacagtagtagctccctactttccggggctgggaaggacagtctggttgaacacgatgaggaatttgtgcagaggcaggattcacctcgtgataactccgagcgaaacttatctttgacggacttcgtgggtgacgagtccccatcccctgaacgtctgaaaaatacggggaagcggatcccccctacccctatgaactccctggtggaaagtagcccgagcacagaggaaccagcgtctctgtatactgaggacatgactcaaaaggccacagacacggggcacatgggtcctccccagacccacgccaggtgttccagttggtgggggggactggagattgatagcaaaaacattgcggacgcgtggtcatcatcagagcaggaatcagtgtttcagagtcctgagagttggaaagaacataaaccatcttcaatcgataggcgggcatccgatagtgtgtttcagccaaaaagcctcgaatttacaaaaagcggaccttgggaatctgaatttggtcagcctgaactcggctctaatgacattcaggataaaaacgaagaaagcttgccttttcagaacctgcctatggagaaaagcccactgccaaacacctcgccacagggaactaaccacctcatcgaggatttcgcctcattgtggcattctggacggagcccaaccgcaatgccagagccttggggcaaccctacagatgacggtgagcccgctgccgtggcaccatttcctgcctggtcagctttcggaaaagaggaccatgacgaagctctcaagaatacgtggaaccttcaccccacgagtagtaagaccccaagtgtaagagaccctaacgaatgggctatggctaaaagcggcttcgccttttcttcgtctgagttgctggacaatagcccgtctgagatcaataacgaggcagcaccagaaatctggggcaagaagaacaatgatagccgtgaccacatttttgcgccagggaacccctcctctgatttggaccacacatggaccaacagcaagccacccaaagaggaccaaaatggcctggtggatcctaagacacggggtaaggtatatgagaaggtcgacagctggaacctcttcgaggaaaatatgaagaaaggcggttctgatgtgctggttccctgggaggactcattcctgagttataaatgctcggattattccgcgagtaacttgggggaagacagcgtgccctctccgctggacactaattacagcacatccgattcctatactagtccaacatttgccggtgatgagaaggagacagaacataaaccattcgccaaggaggaaggtttcgaatccaaggatggcaatagtacagctgaggaaacagatattcctcctcagtcactacagcaatccagccggaatcggatcagtagtgggccaggcaacctggatatgtgggcgtccccacatactgacaactcctctgaaattaacacgacccataatcttgatgagaatgaacttaaaaccgaacatacagatggaaaaaacatcagcatggaggacgatgttggcgagtctagtcagtcatcctatgacgacccctccatgatgcaactatacaacgagaccaataggcagctcaccctcttgcactccagtactaattcacgccagaccgctcctgacagcctggatctgtggaatagagtcattctagaggacacacagtctaccgctaccatttcggacatggacaacgaccttgactgggacgattgtagtgggggagccgcaatcccttcagacggacaaactgagggctatatggctgaaggttcagagccagagactaggtttaccgtgagacagctggagccatggggactggagtaccaagaggcaaatcaagtcgactgggagttgccagctagcgatgagcacacaaaggacagtgcaccctcggagcaccacaccttgaatgaaaaatcaggacagctcatcgcaaactccatttgggactccgtgatgcgcgataaggacatgagtagtttcatgcttccagggtcttctcatatcacagacagtgagcagcgggagttaccccctgagataccctctcattcagctaacgtcaaggacacccactcccccgatgctccagccgcttcagggacatctgaatctgaggccctgatcagtcatctcgataaacaggatacagagagagaaacgttgcagagcgacgccgcttccctcgccactcgtctcgaaaaccctggttatttcccacatcccgatccttggaaaggccacggcgacggacagtctgagagcgaaaaggaagcccagggagcgaccgatcggggacatctcgatgaggaagaagtcatagcctctggagttgagaacgctagcggcatcagtgagaagggtcagtcagatcaggaactctcctcgctggttgcctcagagcatcaagagatttgcattaagagcggcaaaatttctagtctggctgtgacattctcaccccagacagaggaaccagaagaggttctggaatacgaagaggggtcatataatctggactctcgcgacgtccagacgggcatgtctgccgataacttacaacctaaggacacgcacgagaagcaccttatgtcacagaggaattccggggagactacagaaacatctgacggaatgaatttcacaaaatacgtttctgtgccagaaaaggacctagagaaaaccgaagagtgtaatttccttgaaccggaaaatgttggcggagggccacctcaccgagtgccgaggagcctggatttcggtgatgtgcccatcgattcagacgttcacgtatcttcgacgtgttctgagataacgaagaatctcgatgttaagggaagtgagaacagtctgccgggagctggaagcagtggaaactttgatcgcgacacaatctccagtgaatacactcattcctctgcgtcaagccctgaactcaacgactccagcgttgcactgtcaagttggggccagcagccaagttcaggataccaggaggaaaatcagggaaattggagtgagcagaaccaccaagaatctgaactgatcactactgatggacaggtggagatcgttactaaggtgaaggacctcgagaagaatcgaatcaacgaattcgagaagagttttgatcggaaaaccccaacattcctggaaatttggaatgactctgtggacggggactcctttagctccttgagtagtccagagaccggcaagtacagcgaacattcgggtacgcaccaggagtcaaacttgatcgcaagttatcaggaaaaaaacgagcacgatataagtgccactgtccagccggaagatgccagggtgatctcgacctcctcaggaagcgacgacgacagtgtgggcggagaggaatctatcgaagaggaaattcaggtggctaactgtcacgtcgcggaagacgaaagtagggcctgggactcgctgaacgagagcaataagttcctcgtgacagccgatccaaagtccgaaaatatatacgattatttagatagttcagagcctgccgaaaacgaaaataaaagcaatccattttgcgacaaccaacagtcatcgcctgatccctggaccttcagcccacttacagagactgaaatgcaaatcacagccgtcgagaaagagaaaaggagttcacccgagaccgggaccacaggggatgttgcctggcagatatctcccaaggcaagtttcccaaagaacgaagataattctcaacttgagatgctggggttcagtgctgactccacagaatggtggaaggcttctccccaggaggggaggttgatagaatcacccttcgaaagggaactatcagactccagtggcgtactggagataaactcttccgtgcaccagaacgcatctccttggggggtccccgtgcagggcgacatcgagcctgtcgagacgcactacactaacccatttagcgataaccaccagagccctttcctagaagggaatggcaaaaacagccatgagcaactgtggaatatacagccacggcaaccggatccagatgccgataagttttcacaactggtcaaactggatcaaatcaaggaaaaggattctagagaacaaacattcgtgtccgctgctggggacgagctgacccccgagacaccgacccaggaacagtgtcaagatacaatgcttcccgtgtgcgaccacccagataccgcattcactcacgccgaggagaattcatgcgtaacaagtaatgtgagtacgaatgagggacaagagaccaatcagtgggaacaagagaagagctacctgggagaaatgacaaacagttccattgccactgaaaatttccccgcagtgtccagcccaacgcaactgataatgaaacctggctcagagtgggacggaagcacgccgtcagaggatagccggggaacatttgtacccgacatcctccatggtaactttcaggagggaggacaacttgcaagcgctgccccagatctctggattgacgccaaaaagccctttagcctgaaagcagatggagaaaaccccgacatactgacccactgtgagcacgacagcaacagccaagcatcggacagccccgatatctgccacgatagcgaagccaagcaagagacagagaagcacctttccgcctgcatggggccagaagtggagagttccgagctgtgcttgaccgagcctgaaattgacgaggagccaatttacgaaccgggaagagaatttgtgccgtcaaacgctgagttggactctgagaacgccaccgtgctgcccccaatcggctaccaggcagatattaaaggctccagccagccagctagtcacaaggggtcaccagagccaagtgaaatcaatggtgacaatagcaccggactgcaggttagcgaaaagggggcaagccccgacatggcaccaatcttagagcctgtggatagaagaatccccaggatagaaaacgtcgctacatccatcttcgtgacacaccaggaacccacccctgagggtgacgggagctggatttctgattcctttagtccagagtcccaacctggcgcacgcgctttattcgacggagacccacaccttagcacagagaatcccgctttggtgcctgacgccttgttagcatccgatacctgtctggatatcagtgaggctgccttcgatcactccttctcagatgctagcggactcaacacatcgacaggaaccatcgacgacatgtcaaagctcaccctgagtgagggccatccagagacccctgtcgacggagacttaggaaaacaggacatctgctccagcgaagctagttggggagacttcgagtacgacgtgatgggtcagaacattgatgaagatttgctccgggagccggagcatttcttgtatggcggtgatcctcccctggaggaggatagtctgaagcaatcgctcgccccttacaccccaccctttgacctaagttacctgactgagcctgctcagtccgccgagacaattgaagaggctggctctcccgaggatgagtcactgggctgtcgggcagccgagattgtgctcagcgccctccccgatagacgtagcgaaggcaatcaagcagaaaccaagaaccgcctccccggatctcagctcgccgtacttcacatccgggaggatccagaatccgtttacctccccgtcggtgctggctccaatattctgagcccctcaaacgtggactgggaggtggagaccgataatagcgacctgcctgccggtggggatatcggacccccaaacggcgcttctaaggaaatctctgaactggaggaagaaaagactattccaacaaaggaacctgaacagatcaaatcagaatataaggaggaaagatgcacagaaaagaacgaggatcggcatgccctccatatggactatatattagttaatagggaagagaactcacactctaagcctgagacatgcgaggagagagaaagtatcgctgagttggagctttacgtgggcagtaaagagacggggctgcaaggaactcagctagctagcttccctgacacttgtcagcccgcatcacttaatgagcggaaggggctgtcggcggagaaaatgagctctaagagcgacaccaggtcgagcttcgagtctccagctcaggatcagagctggatgtttttagggcatagcgaggtcggtgacccatccctagacgctcgagacagcggaccagggtggagcggcaagacagtggagcctttttctgagcttgggttgggcgaaggtccccagctccagatcctcgaagaaatgaagcctctggagtcattggcactcgaggaggccagcggcccagtgtcacagagccagaagagcaaaagcagaggacgagccggacctgatgccgtcactctgcaggctgtcacccatgacaatgaatgggagatgctgagcccccagccagtgcaaaaaaacatgattcccgacaccgaaatggaagaggaaaccgagttcctggagctcggaaccagaatcagccggccaaacggccttctaagcgaagatgtcggaatggatatcccgttcgaggagggcgttctgagtccctccgctgccgacatgagacctgaacccccaaattcccttgatttgaatgacacgcaccccaggcgcattaaactcacagctcccaatattaacctgtctctggaccagtccgaggggagcatactcagtgacgacaacctggacagtcctgatgagattgacattaacgtggatgagctggacacaccagatgaggccgattcttttgagtatacgggacatgaagatcctaccgcgaacaaagacagcggccaagagtccgagtctatccctgaatatactgctgaagaagaacgtgaagataacagactttggcggacagtggtgatcggcgagcaggaacaaagaatcgacatgaaggtgatcgaaccctaccgcagggtcatttcacacggagggtactacggcgatggcctcaatgccattatagtgttcgccgcatgctttctacctgactccagtagggcagactatcactacgtcatggaaaatctgttcctgtatgtaatttcaaccctcgagttaatggtggccgaggattacatgatcgtttacctgaatggagcaactccaagacggagaatgcctggattgggctggatgaagaagtgctatcagatgattgaccgccgtttaaggaaaaatctgaaaagttttattatcgtccacccaagctggttcatcaggactatccttgcggtcactcggccattcatcagctcaaagttttcatccaaaattaagtacgtcaattccctgagcgagctgtccggactgatcccaatggattgtatccacattccggagagcattatcaagctcgacgaggagctgagagaggcgtctgaggccgctaagacatcttgtttatacaacgatcccgagatgagtagtatggaaaaggacatcgacctcaagttaaaggagaaacccta

SEQ ID NO: 310037 - DNA, 12587 bp, Artificial Sequence
  derived and/or modified sequence
ggagggagcagtcggtcgctgcgccccggcgggccactttcccgggaccccgctcgtcttccttgggccgagattttccactgcgcccctccgagtacccgggttccaaacccctagccacgacatggaagaatttttgcaacgcgccaaatctaaactgaatcgaagcaaacgcttggagaaggtccatgtggttattgggcctaaatcgtgtgacttggattctctcatttctaccttcacatatgcttactttctagacaaggtcagtccaccaggggttctgtgtttaccagtgctgaacataccaagaactgaattcaactacttcaccgagacgaggtttattttagaagagctaaatatttccgaatcattccacatattccgggatgaaattaacctgcatcagctaaatgatgaagggaagttatcgataacacttgttggcagcagtgtgctggcgagtgaagacaaaactttagaatcagcagttgtcaaagtcattaatccggttgagcagagcgatgccaacgttgagttccgagagtcttcctcttctctcgtgctaaaggagattctccaagaggctcctgagctcatcaccgagcaactggctcatcgcctcagaggtagcattcttttcaagtggatgaccatggaatcagagaagatctcagagaagcaggaggaaattctttctatcctggaagaaaaatttcctaacttgcctccaagagaggacatcatcaacgtcctacaggagacccagttcagtgctcagggtttaagtattgaacagacaatgttgaaagatctaaaggagctgtcagatggagaaataaaagtggccattagtactgtgagcatgaaccttgagaattgtctatttcacagcaatattaccagtgacttgaaagcatttacagacaagtttggttttgatgtcctcatcctgttctccagctatctgtcagaggagcagcagccgagacgacagattgctgtgtactcagaaaacatggagctgtgcagtcagatttgctgtgagctggaagagtgtcagaacccttgcctagaactggagccctttgactgtggctgtgatgagatcctggtgtaccaacaagaggacccttcagtgacttgtgatcaggtggttctcgttgtcaaggaagtcatcaacaggaggtgtccagagatggtctccaatagccggacatcctcaacagaagccgtggcaggcagtgcccccctctcccaggggtcttctgggattatggaattgtatggttctgacatagagccacaacccagctctgtgaatttcatagagaaccctccagatctcaatgattctaaccaggctcaggtggatgccaatgtagaccttgttagcccagacagcggactggctaccattaggagcagccgctcatccaaggagagctctgttttcctcagtgacgacagccccgtgggagaaggtgctgggcctcaccacacccttctcccagggcttgactcctacagccccatccctgaaggggcggtggcggaggaacatgcatggtctggagaacacggtgagcacttcgacctcttcaattttgacccagcacccatggcttctgggcagtcccagcaatcttctcattctgcagactactccccagcagatgacttcttccccaacagtgacctgtcagaaggacagctccccgctgggcctgaaggacttgatggcatgggaaccaacatgtctaattattcatccagttcacttttgtcaggggctggcaaagatagccttgtggaacatgatgaggagtttgtccagagacaagacagtcccagagataactctgaaagaaatttgagcctgacagattttgtgggagatgaatccccttccccagaaaggctaaaaaatactggaaagaggatcccaccaacacccatgaatagtttagtagaaagctcgccatccactgaagaaccagcctcactctatacagaagatatgacccaaaaagcaactgacacaggtcacatggggccacctcagacccatgcacggtgcagcagctggtggggtggtttggaaattgactccaaaaatattgcagatgcgtggagttccagtgaacaggaatctgttttccagagccctgaatcatggaaagagcataagccaagctccattgataggagagcctcagattctgtatttcaaccaaagagcctcgaatttacaaagtcaggtccctgggagtctgaatttggtcagcctgaactgggtagcaatgatattcaagacaaaaatgaggaaagcttgccgttccagaacctgcccatggagaagtcacctttgccaaatacatctccccaaggaacaaaccacctgatagaagactttgcttctttgtggcattctggtcgctctcccacagccatgcccgagccctggggaaatcctacagatgatggtgaaccagcagctgtggcgccattcccagcctggagtgcatttggtaaagaagatcatgatgaagctttaaaaaatacctggaatttgcacccaacaagcagcaagacaccttctgttagggacccgaatgagtgggccatggcaaaaagtgggtttgccttttcttcttcagaactactggacaattcacccagtgagataaacaatgaagcagctccagaaatctggggcaagaaaaacaatgactccagggatcacatctttgcacctggaaatcccagttctgatctggatcacacatggactaattctaagccaccaaaagaagatcagaatggtttagtggatcctaaaactaggggcaaggtatatgaaaaggtagattcctggaacctttttgaggagaatatgaagaaaggagggtcagatgtcctagttccttgggaagattccttcttatcttacaaatgttctgattacagtgcatccaacctaggagaagattcggtgccttcccccttagataccaattattccacctcagactcttacacatcaccaacatttgctggagacgaaaaggaaactgaacacaagccatttgctaaagaggaaggttttgagtcaaaagatggtaactccacggcagaggagactgacattcctcctcagtcactgcaacagtcatctcgaaatcgaatcagttcaggtcctgggaacctagacatgtgggcttcacctcatacagataacagttctgaaataaataccactcacaacctggatgaaaatgaactcaagacagagcacacagatggtaagaatatctccatggaggatgacgtcggggaaagcagccagtccagttacgacgaccccagcatgatgcaactgtacaatgaaacaaaccgacaactcacacttttgcacagcagcaccaactcccggcagacggcccctgacagtctcgacttgtggaacagagtgattttggaggatactcagtccactgcaacgatctcagatatggacaatgatttggactgggatgactgcagtgggggtgcggcaatccccagtgatggtcaaacagaaggatacatggctgaaggttccgagccggaaacccgatttacagtgagacagctggaaccctggggcttggagtatcaggaagcaaatcaggtagattgggagctccctgcctctgatgagcataccaaggacagtgctcccagtgaacatcacacattgaatgagaaaagtgggcagctaattgcaaacagtatttgggattctgtcatgagagataaagacatgtcatcattcatgttaccaggctcctcacatatcacagattcagagcaaagggaattgcctcctgaaatccccagccattcagcaaatgttaaagacactcattccccagatgcgccagcagcctctggaaccagtgaatcagaggcacttatatctcatcttgacaagcaggacacagagagggaaaccctgcaaagtgatgcagcatccttggcgactaggcttgagaatccagggtattttccacacccagatccatggaaaggtcatggcgatggacaaagtgaaagtgagaaggaagcccagggagccactgacagggggcaccttgatgaagaggaggtgatcgcctctggtgtggagaatgcctcagggatttctgaaaaagggcagagtgaccaggaactgtcttctctggttgcatctgaacatcaggaaatctgcattaaatcaggcaaaatcagctctcttgctgtcactttcagtcctcaaaccgaggaaccagaggaagttttagagtatgaggaggggtcttacaatctagactcccgtgatgtgcaaacagggatgtccgcagataacctgcagccaaaagatacccatgaaaaacacctcatgagtcaaagaaattcaggtgaaactactgagacttcagatgggatgaatttcacaaaatatgtatctgtacctgaaaaggatcttgagaaaactgaagaatgtaactttctagagccagagaacgtgggtggagggccacctcacagagttccccgaagtcttgattttggggacgtccctatagacagtgatgtgcatgtcagcagcacatgttctgagataaccaaaaatcttgacgttaaggggtctgaaaatagccttccaggagccggttcgtctggaaattttgacagagatactatttctagtgagtatactcattcaagtgcatcaagtcctgagttaaatgactcttcagttgcactgtcctcctggggccagcaacccagttctgggtatcaagaagaaaaccaaggcaactggagtgaacagaatcaccaagaatctgaactaattaccactgatggccaagtagaaatagttaccaaagtgaaggatttagagaaaaacagaataaatgagtttgaaaagagctttgatcgcaaaactcctacatttttagagatctggaatgactcagttgatggtgattccttttcctctttatccagtcctgaaacaggcaaatattctgaacattcagggacacatcaggaaagcaatctaattgctagctaccaggagaaaaatgaacatgacatttctgcaactgtgcagccagaggatgccagggtcatttcaacaagctcaggttctgatgatgacagtgtcggtggtgaagagtcaatagaggaagagatccaggtggccaactgccacgttgctgaggatgaatccagagcttgggattcattgaatgaatctaataagttcttggtcacagctgatcctaagtctgaaaatatttatgactacctagacagctcagagccagcagagaatgagaataagtcaaacccattctgtgacaatcaacaaagcagccctgatccctggactttctcaccattaacggagactgaaatgcagattacagcagtggagaaggagaagagatcttctccagaaacagggacaacaggagatgttgcatggcaaatatctcccaaagcttcgttcccaaagaacgaagataattctcaactggaaatgctgggcttctcagctgatagcactgagtggtggaaggcctcaccccaggaagggagactaattgaaagtccatttgaaagggagctgtctgactccagtggtgtgttggagataaattcttcagtacaccaaaatgccagtccctggggagtaccagttcagggtgatattgagcccgtggaaacacactatactaatccttttagtgacaaccatcagtcaccctttctggaaggtaatgggaagaactcccatgagcaactctggaacattcaaccaaggcagccagacccagatgctgacaagttcagccagcttgtaaaattagaccaaattaaagaaaaggactcaagagagcaaacctttgtgtctgctgctggtgatgagctgactcctgaaacacctacccaagagcagtgtcaggacaccatgctgccagtctgtgatcatccggacacagcctttactcacgcagaggaaaatagttgtgttacatctaatgtttcaactaatgaaggtcaagaaacaaatcagtgggaacaagaaaaatcatacctaggtgagatgacaaattcaagcattgccacagaaaattttcctgctgtcagttctcccacccaactgataatgaagccaggctctgaatgggatggctctaccccaagtgaggactcccgaggtacctttgtgccagatattttacatggcaactttcaagagggtgggcagctggcctctgccgcgcctgacttgtggatagatgctaagaagcccttcagtttgaaagcagatggtgagaatcctgatatcctgacgcactgcgaacatgacagcaattctcaggcttccgacagccctgatatatgtcacgattctgaagcaaagcaagagactgagaagcacctcagtgcttgcatgggacctgaagtggaatccagtgagctttgtctcactgagccagagatagatgaagaacccatttatgagcctggacgggagtttgtcccatccaatgcagaactcgattctgaaaacgcaactgtgctgcctccaattggctatcaagcagacataaagggctcctctcagcccgcctctcataaaggttcacctgaaccttctgaaataaacggtgacaacagtacaggtttacaagtatcagaaaaaggagccagcccagatatggcaccaattttggaaccagttgacagaagaatcccaaggattgaaaatgtggcaactagcatttttgtaactcaccaagagccaactccagaaggtgacggttcttggatatcagacagcttttctcctgaaagtcagcctggtgcaagagctttgtttgatggtgatccacatttatccacagagaatcctgccttggttcctgatgctttgctagcctcagacacttgtctggatataagcgaagctgcctttgaccacagtttcagcgatgcctcaggtctcaacacatccacgggaacaatagatgacatgagtaaactgacattatccgaaggccatccggaaacgccagttgatggggacctagggaagcaagatatctgctcatctgaagcctcgtggggtgattttgaatatgatgtaatgggccagaatatcgatgaagatttactgagagagcctgaacacttcctgtatggtggtgaccctcctttggaggaagattctctgaagcagtcgctggcaccgtacacacctccctttgatttgtcttatctcacagaacctgcccagagtgctgaaacaatagaggaagctgggtctccagaggatgaatctctgggatgcagagcagcagagatagtgctttctgcacttcctgatcgaagaagtgagggaaaccaggctgagaccaaaaacagactgcctggatcccagctggctgtgctgcatattcgtgaagaccctgagtccgtttatttgccggtaggagcaggctccaacattttgtctccatcaaacgttgactgggaagtagaaacagataattctgatttaccagcaggtggagacataggaccaccaaatggtgccagcaaggaaatatcagaattggaagaagaaaaaacaattcctaccaaagagcctgagcagataaaatcagaatacaaggaagaaagatgtacagagaagaatgaagatcgtcatgcactacacatggattacatacttgtaaaccgtgaagaaaattcacactcaaagccagagacctgtgaagaaagagaaagcatagctgaattagaattgtatgtaggttccaaagaaacagggctgcagggaactcagttagcaagcttcccagacacatgtcagccagcctccttaaatgaaagaaaaggtctctctgcagagaaaatgtcttctaaaagcgatacgagatcatcttttgaaagccctgcacaagaccagagttggatgttcttgggccatagtgaggttggtgatccatcactggatgccagggactcagggcctgggtggtctggcaagactgtggagccgttctctgaactcggcttgggtgagggtccccagctgcagattctggaagaaatgaagcctctagaatctttggcactagaggaagcctctggtccagtcagccaatcacagaagagtaagagccgaggcagggctggcccggatgcagttacgttgcaggctgtcacccatgacaatgaatgggaaatgctttcaccacagcctgttcagaaaaacatgatccctgacacggaaatggaggaggagacagagttccttgagctcggaaccaggatatcaagaccaaatggactactgtcagaggatgtaggaatggacatcccctttgaagagggcgtgctgagtcccagtgctgcagacatgaggcctgaacctcctaattctctggatcttaatgacactcatcctcggagaatcaagctcacagccccaaatatcaatctttctctggaccaaagtgaaggatctattctctctgatgataacttggacagtccagatgaaattgacatcaatgtggatgaacttgatacccccgatgaagcagattcttttgagtacactggccatgaagatcccacagccaacaaagattctggccaagagtcagagtctattccagaatatacggccgaagaggaacgggaggacaaccggctttggaggacagtggtcattggagaacaagagcagcgcattgacatgaaggtcatcgagccctacaggagagtcatttctcacggaggatactatggggacggtctaaatgccatcattgtgtttgccgcctgttttctgccagacagcagtcgggcggattaccactatgtcatggaaaatcttttcctatatgtaataagtactttagagttgatggtagctgaagactatatgattgtgtacttgaatggtgcaaccccaagaaggaggatgccagggctaggctggatgaagaaatgctaccagatgattgacagacggttgaggaagaatttgaaatcattcatcattgttcatccatcttggttcatcagaacaatccttgctgtgacacgaccttttataagttcaaaattcagcagtaaaattaaatatgtcaatagcttatcagaactcagtgggctgatcccaatggattgcatccacattccagagagcatcatcaaactggatgaagaactgagggaagcatcagaggcagctaaaactagctgcctttacaatgatccagaaatgtcttctatggagaaggatattgacttgaagctgaaagaaaagccttagttggccatgctggaagaagaggatgcttttctggttcatggttctgttgaaacatatctacctgaaagagacagggctgatgttacctttttccactttgcactacctggtgccattctaaatttctaaggggaaaaatagaaagtttgtttactcttaagatattttatgaaattgtgtgtactttcctattttgccaattatgtgcctcaaagattttagttgagccttagcaagaaagtaggaccttccatttcaatacttcattaacacggtgtagtgatactttgtcccttagactggtgtttaccagtaagatacctttaatccactgttaagtatgagtggatttgtttccatagattagctggatttccttttggtgattgcattaggtttaaagtacacaggtctcaactctccccaggaaagtttcccctgtttgactccacctttaaaatcctaagcctgactaggacagccacaaaccacacaaggtgtaaaaccatcatcagctaagtgcccgttttgttcttgtttaccagaatctcctttaacttctcaaagggaagccgggctttctaatccacgtcaactttattttagttgtcaaattgggcattatattttatgtaaattggtcttttaacatcattttcctgatgaatgttggtgaccaccacattgtgaaatttaagaatccgtgttgcatgtttggtagctctctgagtttcaggccataaactcagctccagaggttaccttttaagtgccaagaactcaagtgcaaggtggcctactcaaaaatcatttggtagcattcagttattcatgaattcctctctcgcatgcattataaaaagtgatctgctttaaaacaccgtaatctgatcataggcttaaaattaaatatgagtattactttcatgtacaaaatatttcctttatagtcttcatatgccctttaaaatgccaacaagatttcaagtctgtaggcctctagtgaggtggggtggcaaaccacagctaagtctcgctcaccactgcaagctaagaatggtttttacattttgggttggaaaaattttttttgaatatttcatgacacatgaaaattattcaaatgttagtgccgataaataaagtggtactgaaacacagccacacaaacttgtttttgtactgtctacagctactttcacactacagccgcagagctgagcagttcagcagaccgtatgtcccacaatgcctaaaacattgactatgtttacagaaaaagtttgctgacccctgctctagcaaacgcatcctttcctactccaccccaatttgtatttagatagtttctctaacagaacggacaaatgaggctgcaaactaatttatttttgtcaaaaatcaatgttttgacatccacagacagtgaaataaaagaaatggcttgctgaaaaacatgaggagtcctagccacaaaatcactgcttaggttgcaattgccaaaatgaagccttcttagaagcacttctttagtatatacaggtgttggctgaagtccgtgcctcactctgggaaccattcttagtctccagtgtctcctattacaaagaagctggcagaaataaaaatgaaggggtgagagcggttccaccctagtctcatggtggaaaattcattggggagagctgtccaggatatttggagtcctgggtagaaggagcttgtaactactttaaagtcgacatctttgcacaggtgattgagtttctctgacctcattgcttcacctctgtctcctcccgtccttccgcacgtgcccacacacacgcagttcagccctctttcctccataagcctccatcgttttctcttttctcctcttgatcctttcaagcgagtatcttgttgaattgtatgttctgttggatctcctccttcataacatctggcttgttggacagaaaaaccctacagcccaccccctcccacagcccacctccacttttgaaagcccaaattacacctctcccagaacacagtgttgacgtaaatacagttacccaatattcctgtttgttcacctatttgctactttcactcagtagcatcccattttgtaaaatgaattccatggtcaccctgtcacaggaagtaatgaaaaatccagtgttcagtgtagtggtgcaaacctgagggcatagagctgttcatagagggctcttgttatagccaaacagacacagcaacaatctcaccatttatatatatatttttaacttgtccagctcatctatggaaaactactcaggtggtatgctgtttgaagcctcatcttcctacatgaaaattatgggcatttgtcccaatgattttgtttcagctgttctgtaggctgcataaccactctgatatttaggtatctgctattttattatcttaaaagacaaattaatttaattgcatgtgctagggaaaagctaccatgtacattcaccccaagtaaatagaatcctagatgaatcctagaaaaataatccctaagcagataggtagacagaggtaaacattcacatgatttagctctctagctcttgcactctgaacattcttgctttggttctgacttctgggaactgctttgcatttctcctatagatctgtagttaagggaaccaaggggtcattggggcaaaagcattgtttctcaaagctccttgattaagagaaagaacagaaatttgcacagaagatagtgtcaaggagtgagaaagtttgtttgagggcagtagctcagtgtggaagaaaatcctgaagtttctgttgaagccatacaatgttctatggggttactctctaagacattctctgaggtgtgtgaggaagtcactactcctagcctttgttaagatgtaattttaaatattcagttatggtactatgtttgcaactctcgtcttatcacaatgcctcagtagtttgttcccttagaaacatttagatgtgcacaaattaatcttttatatatctaaaggtttttctatcatgcattggattgctcagaataaagtgtctgttagacttcgttttggtaaataaattctccataatgtagattaataatataaaagtctttaatgacacaatatatctatatagcctcactgtataattcagaaataaaaattgattctgc

SEQ ID NO: 310038 - DNA, 8193 bp, Artificial Sequence
  derived and/or modified sequence
atggtgagcaacagcagaaccagcagcaccgaggccgtggccggcagcgcccccctgagccagggcagcagcggcatcatggagctgtacggcagcgacatcgagccccagcccagcagcgtgaacttcatcgagaacccccccgacctgaacgacagcaaccaggcccaggtggacgccaacgtggacctggtgagccccgacagcggcctggccaccatcagaagcagcagaagcagcaaggagagcagcgtgttcctgagcgacgacagccccgtgggcgagggcgccggcccccaccacaccctgctgcccggcctggacagctacagccccatccccgagggcgccgtggccgaggagcacgcctggagcggcgagcacggcgagcacttcgacctgttcaacttcgaccccgcccccatggccagcggccagagccagcagagcagccacagcgccgactacagccccgccgacgacttcttccccaacagcgacctgagcgagggccagctgcccgccggccccgagggcctggacggcatgggcaccaacatgagcaactacagcagcagcagcctgctgagcggcgccggcaaggacagcctggtggagcacgacgaggagttcgtgcagagacaggacagccccagagacaacagcgagagaaacctgagcctgaccgacttcgtgggcgacgagagccccagccccgagagactgaagaacaccggcaagagaatcccccccacccccatgaacagcctggtggagagcagccccagcaccgaggagcccgccagcctgtacaccgaggacatgacccagaaggccaccgacaccggccacatgggccccccccagacccacgccagatgcagcagctggtggggcggcctggagatcgacagcaagaacatcgccgacgcctggagcagcagcgagcaggagagcgtgttccagagccccgagagctggaaggagcacaagcccagcagcatcgacagaagagccagcgacagcgtgttccagcccaagagcctggagttcaccaagagcggcccctgggagagcgagttcggccagcccgagctgggcagcaacgacatccaggacaagaacgaggagagcctgcccttccagaacctgcccatggagaagagccccctgcccaacaccagcccccagggcaccaaccacctgatcgaggacttcgccagcctgtggcacagcggcagaagccccaccgccatgcccgagccctggggcaaccccaccgacgacggcgagcccgccgccgtggcccccttccccgcctggagcgccttcggcaaggaggaccacgacgaggccctgaagaacacctggaacctgcaccccaccagcagcaagacccccagcgtgagagaccccaacgagtgggccatggccaagagcggcttcgccttcagcagcagcgagctgctggacaacagccccagcgagatcaacaacgaggccgcccccgagatctggggcaagaagaacaacgacagcagagaccacatcttcgcccccggcaaccccagcagcgacctggaccacacctggaccaacagcaagccccccaaggaggaccagaacggcctggtggaccccaagaccagaggcaaggtgtacgagaaggtggacagctggaacctgttcgaggagaacatgaagaagggcggcagcgacgtgctggtgccctgggaggacagcttcctgagctacaagtgcagcgactacagcgccagcaacctgggcgaggacagcgtgcccagccccctggacaccaactacagcaccagcgacagctacaccagccccaccttcgccggcgacgagaaggagaccgagcacaagcccttcgccaaggaggagggcttcgagagcaaggacggcaacagcaccgccgaggagaccgacatccccccccagagcctgcagcagagcagcagaaacagaatcagcagcggccccggcaacctggacatgtgggccagcccccacaccgacaacagcagcgagatcaacaccacccacaacctggacgagaacgagctgaagaccgagcacaccgacggcaagaacatcagcatggaggacgacgtgggcgagagcagccagagcagctacgacgaccccagcatgatgcagctgtacaacgagaccaacagacagctgaccctgctgcacagcagcaccaacagcagacagaccgcccccgacagcctggacctgtggaacagagtgatcctggaggacacccagagcaccgccaccatcagcgacatggacaacgacctggactgggacgactgcagcggcggcgccgccatccccagcgacggccagaccgagggctacatggccgagggcagcgagcccgagaccagattcaccgtgagacagctggagccctggggcctggagtaccaggaggccaaccaggtggactgggagctgcccgccagcgacgagcacaccaaggacagcgcccccagcgagcaccacaccctgaacgagaagagcggccagctgatcgccaacagcatctgggacagcgtgatgagagacaaggacatgagcagcttcatgctgcccggcagcagccacatcaccgacagcgagcagagagagctgccccccgagatccccagccacagcgccaacgtgaaggacacccacagccccgacgcccccgccgccagcggcaccagcgagagcgaggccctgatcagccacctggacaagcaggacaccgagagagagaccctgcagagcgacgccgccagcctggccaccagactggagaaccccggctacttcccccaccccgacccctggaagggccacggcgacggccagagcgagagcgagaaggaggcccagggcgccaccgacagaggccacctggacgaggaggaggtgatcgccagcggcgtggagaacgccagcggcatcagcgagaagggccagagcgaccaggagctgagcagcctggtggccagcgagcaccaggagatctgcatcaagagcggcaagatcagcagcctggccgtgaccttcagcccccagaccgaggagcccgaggaggtgctggagtacgaggagggcagctacaacctggacagcagagacgtgcagaccggcatgagcgccgacaacctgcagcccaaggacacccacgagaagcacctgatgagccagagaaacagcggcgagaccaccgagaccagcgacggcatgaacttcaccaagtacgtgagcgtgcccgagaaggacctggagaagaccgaggagtgcaacttcctggagcccgagaacgtgggcggcggccccccccacagagtgcccagaagcctggacttcggcgacgtgcccatcgacagcgacgtgcacgtgagcagcacctgcagcgagatcaccaagaacctggacgtgaagggcagcgagaacagcctgcccggcgccggcagcagcggcaacttcgacagagacaccatcagcagcgagtacacccacagcagcgccagcagccccgagctgaacgacagcagcgtggccctgagcagctggggccagcagcccagcagcggctaccaggaggagaaccagggcaactggagcgagcagaaccaccaggagagcgagctgatcaccaccgacggccaggtggagatcgtgaccaaggtgaaggacctggagaagaacagaatcaacgagttcgagaagagcttcgacagaaagacccccaccttcctggagatctggaacgacagcgtggacggcgacagcttcagcagcctgagcagccccgagaccggcaagtacagcgagcacagcggcacccaccaggagagcaacctgatcgccagctaccaggagaagaacgagcacgacatcagcgccaccgtgcagcccgaggacgccagagtgatcagcaccagcagcggcagcgacgacgacagcgtgggcggcgaggagagcatcgaggaggagatccaggtggccaactgccacgtggccgaggacgagagcagagcctgggacagcctgaacgagagcaacaagttcctggtgaccgccgaccccaagagcgagaacatctacgactacctggacagcagcgagcccgccgagaacgagaacaagagcaaccccttctgcgacaaccagcagagcagccccgacccctggaccttcagccccctgaccgagaccgagatgcagatcaccgccgtggagaaggagaagagaagcagccccgagaccggcaccaccggcgacgtggcctggcagatcagccccaaggccagcttccccaagaacgaggacaacagccagctggagatgctgggcttcagcgccgacagcaccgagtggtggaaggccagcccccaggagggcagactgatcgagagccccttcgagagagagctgagcgacagcagcggcgtgctggagatcaacagcagcgtgcaccagaacgccagcccctggggcgtgcccgtgcagggcgacatcgagcccgtggagacccactacaccaaccccttcagcgacaaccaccagagccccttcctggagggcaacggcaagaacagccacgagcagctgtggaacatccagcccagacagcccgaccccgacgccgacaagttcagccagctggtgaagctggaccagatcaaggagaaggacagcagagagcagaccttcgtgagcgccgccggcgacgagctgacccccgagacccccacccaggagcagtgccaggacaccatgctgcccgtgtgcgaccaccccgacaccgccttcacccacgccgaggagaacagctgcgtgaccagcaacgtgagcaccaacgagggccaggagaccaaccagtgggagcaggagaagagctacctgggcgagatgaccaacagcagcatcgccaccgagaacttccccgccgtgagcagccccacccagctgatcatgaagcccggcagcgagtgggacggcagcacccccagcgaggacagcagaggcaccttcgtgcccgacatcctgcacggcaacttccaggagggcggccagctggccagcgccgcccccgacctgtggatcgacgccaagaagcccttcagcctgaaggccgacggcgagaaccccgacatcctgacccactgcgagcacgacagcaacagccaggccagcgacagccccgacatctgccacgacagcgaggccaagcaggagaccgagaagcacctgagcgcctgcatgggccccgaggtggagagcagcgagctgtgcctgaccgagcccgagatcgacgaggagcccatctacgagcccggcagagagttcgtgcccagcaacgccgagctggacagcgagaacgccaccgtgctgccccccatcggctaccaggccgacatcaagggcagcagccagcccgccagccacaagggcagccccgagcccagcgagatcaacggcgacaacagcaccggcctgcaggtgagcgagaagggcgccagccccgacatggcccccatcctggagcccgtggacagaagaatccccagaatcgagaacgtggccaccagcatcttcgtgacccaccaggagcccacccccgagggcgacggcagctggatcagcgacagcttcagccccgagagccagcccggcgccagagccctgttcgacggcgacccccacctgagcaccgagaaccccgccctggtgcccgacgccctgctggccagcgacacctgcctggacatcagcgaggccgccttcgaccacagcttcagcgacgccagcggcctgaacaccagcaccggcaccatcgacgacatgagcaagctgaccctgagcgagggccaccccgagacccccgtggacggcgacctgggcaagcaggacatctgcagcagcgaggccagctggggcgacttcgagtacgacgtgatgggccagaacatcgacgaggacctgctgagagagcccgagcacttcctgtacggcggcgacccccccctggaggaggacagcctgaagcagagcctggccccctacaccccccccttcgacctgagctacctgaccgagcccgcccagagcgccgagaccatcgaggaggccggcagccccgaggacgagagcctgggctgcagagccgccgagatcgtgctgagcgccctgcccgacagaagaagcgagggcaaccaggccgagaccaagaacagactgcccggcagccagctggccgtgctgcacatcagagaggaccccgagagcgtgtacctgcccgtgggcgccggcagcaacatcctgagccccagcaacgtggactgggaggtggagaccgacaacagcgacctgcccgccggcggcgacatcggcccccccaacggcgccagcaaggagatcagcgagctggaggaggagaagaccatccccaccaaggagcccgagcagatcaagagcgagtacaaggaggagagatgcaccgagaagaacgaggacagacacgccctgcacatggactacatcctggtgaacagagaggagaacagccacagcaagcccgagacctgcgaggagagagagagcatcgccgagctggagctgtacgtgggcagcaaggagaccggcctgcagggcacccagctggccagcttccccgacacctgccagcccgccagcctgaacgagagaaagggcctgagcgccgagaagatgagcagcaagagcgacaccagaagcagcttcgagagccccgcccaggaccagagctggatgttcctgggccacagcgaggtgggcgaccccagcctggacgccagagacagcggccccggctggagcggcaagaccgtggagcccttcagcgagctgggcctgggcgagggcccccagctgcagatcctggaggagatgaagcccctggagagcctggccctggaggaggccagcggccccgtgagccagagccagaagagcaagagcagaggcagagccggccccgacgccgtgaccctgcaggccgtgacccacgacaacgagtgggagatgctgagcccccagcccgtgcagaagaacatgatccccgacaccgagatggaggaggagaccgagttcctggagctgggcaccagaatcagcagacccaacggcctgctgagcgaggacgtgggcatggacatccccttcgaggagggcgtgctgagccccagcgccgccgacatgagacccgagccccccaacagcctggacctgaacgacacccaccccagaagaatcaagctgaccgcccccaacatcaacctgagcctggaccagagcgagggcagcatcctgagcgacgacaacctggacagccccgacgagatcgacatcaacgtggacgagctggacacccccgacgaggccgacagcttcgagtacaccggccacgaggaccccaccgccaacaaggacagcggccaggagagcgagagcatccccgagtacaccgccgaggaggagagagaggacaacagactgtggagaaccgtggtgatcggcgagcaggagcagagaatcgacatgaaggtgatcgagccctacagaagagtgatcagccacggcggctactacggcgacggcctgaacgccatcatcgtgttcgccgcctgcttcctgcccgacagcagcagagccgactaccactacgtgatggagaacctgttcctgtacgtgatcagcaccctggagctgatggtggccgaggactacatgatcgtgtacctgaacggcgccacccccagaagaagaatgcccggcctgggctggatgaagaagtgctaccagatgatcgacagaagactgagaaagaacctgaagagcttcatcatcgtgcaccccagctggttcatcagaaccatcctggccgtgaccagacccttcatcagcagcaagttcagcagcaagatcaagtacgtgaacagcctgagcgagctgagcggcctgatccccatggactgcatccacatccccgagagcatcatcaagctggacgaggagctgagagaggccagcgaggccgccaagaccagctgcctgtacaacgaccccgagatgagcagcatggagaaggacatcgacctgaagctgaaggagaagccctag

SEQ ID NO: 310039 - protein, 3054 aa, Artificial Sequence
  derived and/or modified sequence
RNLMHRMKESENRSKRLEKVHVVIGPKSCDLDSLISTFTYAYFLDKVSPPGVLCLPVLNIPRTEFNYFTETRFILEELNISESFHIFRDEINLHQLNDEGKLSITLVGSSVLASEDKTLESAVVKVINPVEQSDANVEFRESSSSLVLKEILQEAPELITEQLAHRLRGSILFKWMTMESEKISEKQEEILSILEEKFPNLPPREDIINVLQETQFSAQGLSIEQTMLKDLKELSDGEIKVAISTVSMNLENCLFHSNITSDLKAFTDKFGFDVLILFSSYLSEEQQPRRQIAVYSENMELCSQICCELEECQNPCLELEPFDCGCDEILVYQQEDPSVTCDQVVLVVKEVINRRCPEMVSNSRTSSTEAVAGSAPLSQGSSGIMELYGSDIEPQPSSVNFIENPPDLNDSNQAQVDANVDLVSPDSGLATIRSSRSSKESSVFLSDDSPVGEGAGPHHTLLPGLDSYSPIPEGAVAEEHAWSGEHGEHFDLFNFDPAPMASGQSQQSSHSADYSPADDFFPNSDLSEGQLPAGPEGLDGMGTNMSNYSSSSLLSGAGKDSLVEHDEEFVQRQDSPRDNSERNLSLTDFVGDESPSPERLKNTGKRIPPTPMNSLVESSPSTEEPASLYTEDMTQKATDTGHMGPPQTHARCSSWWGGLEIDSKNIADAWSSSEQESVFQSPESWKEHKPSSIDRRASDSVFQPKSLEFTKSGPWESEFGQPELGSNDIQDKNEESLPFQNLPMEKSPLPNTSPQGTNHLIEDFASLWHSGRSPTAMPEPWGNPTDDGEPAAVAPFPAWSAFGKEDHDEALKNTWNLHPTSSKTPSVRDPNEWAMAKSGFAFSSSELLDNSPSEINNEAAPEIWGKKNNDSRDHIFAPGNPSSDLDHTWTNSKPPKEDQNGLVDPKTRGKVYEKVDSWNLFEENMKKGGSDVLVPWEDSFLSYKCSDYSASNLGEDSVPSPLDTNYSTSDSYTSPTFAGDEKETEHKPFAKEEGFESKDGNSTAEETDIPPQSLQQSSRNRISSGPGNLDMWASPHTDNSSEINTTHNLDENELKTEHTDGKNISMEDDVGESSQSSYDDPSMMQLYNETNRQLTLLHSSTNSRQTAPDSLDLWNRVILEDTQSTATISDMDNDLDWDDCSGGAAIPSDGQTEGYMAEGSEPETRFTVRQLEPWGLEYQEANQVDWELPASDEHTKDSAPSEHHTLNEKSGQLIANSIWDSVMRDKDMSSFMLPGSSHITDSEQRELPPEIPSHSANVKDTHSPDAPAASGTSESEALISHLDKQDTERETLQSDAASLATRLENPGYFPHPDPWKGHGDGQSESEKEAQGATDRGHLDEEEVIASGVENASGISEKGQSDQELSSLVASEHQEICIKSGKISSLAVTFSPQTEEPEEVLEYEEGSYNLDSRDVQTGMSADNLQPKDTHEKHLMSQRNSGETTETSDGMNFTKYVSVPEKDLEKTEECNFLEPENVGGGPPHRVPRSLDFGDVPIDSDVHVSSTCSEITKNLDVKGSENSLPGAGSSGNFDRDTISSEYTHSSASSPELNDSSVALSSWGQQPSSGYQEENQGNWSEQNHQESELITTDGQVEIVTKVKDLEKNRINEFEKSFDRKTPTFLEIWNDSVDGDSFSSLSSPETGKYSEHSGTHQESNLIASYQEKNEHDISATVQPEDARVISTSSGSDDDSVGGEESIEEEIQVANCHVAEDESRAWDSLNESNKFLVTADPKSENIYDYLDSSEPAENENKSNPFCDNQQSSPDPWTFSPLTETEMQITAVEKEKRSSPETGTTGDVAWQISPKASFPKNEDNSQLEMLGFSADSTEWWKASPQEGRLIESPFERELSDSSGVLEINSSVHQNASPWGVPVQGDIEPVETHYTNPFSDNHQSPFLEGNGKNSHEQLWNIQPRQPDPDADKFSQLVKLDQIKEKDSREQTFVSAAGDELTPETPTQEQCQDTMLPVCDHPDTAFTHAEENSCVTSNVSTNEGQETNQWEQEKSYLGEMTNSSIATENFPAVSSPTQLIMKPGSEWDGSTPSEDSRGTFVPDILHGNFQEGGQLASAAPDLWIDAKKPFSLKADGENPDILTHCEHDSNSQASDSPDICHDSEAKQETEKHLSACMGPEVESSELCLTEPEIDEEPIYEPGREFVPSNAELDSENATVLPPIGYQADIKGSSQPASHKGSPEPSEINGDNSTGLQVSEKGASPDMAPILEPVDRRIPRIENVATSIFVTHQEPTPEGDGSWISDSFSPESQPGARALFDGDPHLSTENPALVPDALLASDTCLDISEAAFDHSFSDASGLNTSTGTIDDMSKLTLSEGHPETPVDGDLGKQDICSSEASWGDFEYDVMGQNIDEDLLREPEHFLYGGDPPLEEDSLKQSLAPYTPPFDLSYLTEPAQSAETIEEAGSPEDESLGCRAAEIVLSALPDRRSEGNQAETKNRLPGSQLAVLHIREDPESVYLPVGAGSNILSPSNVDWEVETDNSDLPAGGDIGPPNGASKEISELEEEKTIPTKEPEQIKSEYKEERCTEKNEDRHALHMDYILVNREENSHSKPETCEERESIAELELYVGSKETGLQGTQLASFPDTCQPASLNERKGLSAEKMSSKSDTRSSFESPAQDQSWMFLGHSEVGDPSLDARDSGPGWSGKTVEPFSELGLGEGPQLQILEEMKPLESLALEEASGPVSQSQKSKSRGRAGPDAVTLQAVTHDNEWEMLSPQPVQKNMIPDTEMEEETEFLELGTRISRPNGLLSEDVGMDIPFEEGVLSPSAADMRPEPPNSLDLNDTHPRRIKLTAPNINLSLDQSEGSILSDDNLDSPDEIDINVDELDTPDEADSFEYTGHEDPTANKDSGQESESIPEYTAEEEREDNRLWRTVVIGEQEQRIDMKVIEPYRRVISHGGSRGYYGDGLNAIIVFAACFLPDSSRADYHYVMENLFLYVISTLELMVAEDYMIVYLNGATPRRRMPGLGWMKKCYQMIDRRLRKNLKSFIIVHPSWFIRTILAVTRPFISSKFSSKIKYVNSLSELSGLIPMDCIHIPESIINY

SEQ ID NO: 310040 - DNA, 9165 bp, Artificial Sequence
  derived and/or modified sequence
cgtaacttgatgcacagaatgaaggagagcgagaatcgcagcaagcgcctggagaaagtgcatgtcgttatcggaccaaaatcttgtgacctggattctctgatctcaacatttacgtacgcatacttcctcgacaaagtctccccaccgggagtgctttgcctgcccgtcctcaacattcccaggaccgagttcaactacttcacagagactcgatttattttggaggagcttaacatatccgaaagctttcacattttcagggacgaaattaacctgcaccagctgaacgatgaggggaagctttctataaccctggtcggatcatctgtcctggcaagtgaagacaaaactcttgaatcggcagtggtgaaggtgataaacccagtggaacagtcagacgccaacgttgagttcagagagagtagctctagtttagtgctaaaggagattctccaggaagctcccgagctcattacagaacaactggcacaccggcttcgtggcagcatcctttttaagtggatgacaatggagtccgaaaaaattagcgaaaagcaggaagagatcttaagcattctggaggaaaaattccccaacctccccccccgagaagatattatcaatgtcctgcaggaaacacagtttagcgcacagggactgtctatcgagcaaacgatgctgaaggacttgaaggagctcagtgacggcgaaatcaaagtggcgattagcacagtgtcaatgaacctggagaactgcctgttccactcaaatataacctctgatctgaaagcattcaccgacaagtttggcttcgacgttttgatcctcttcagtagttatctgagcgaggaacagcagccacgtcggcagatagctgtctattctgagaatatggaactatgttcgcagatttgctgtgaactggaagaatgtcaaaatccgtgtctggagttggagccttttgactgtggctgtgacgagatactggtatatcaacaggaagacccttcggtgacttgtgatcaagtggtgctggtggtgaaggaggtcattaaccgccggtgtccagaaatggtcagcaactcacgcactagctccactgaagcggtggctggcagtgcaccccttagccagggaagctccggaatcatggaactctacgggtcggacatcgaacctcagccaagcagcgtcaacttcattgaaaatccgccagacctgaacgactcaaaccaggctcaagtcgacgcaaacgtggatttggtgtccccggactcaggccttgctaccattaggtcttctcggtcttctaaggagtcttccgttttcctgagtgatgatagccctgtgggggagggagcaggcccacaccacacactgctgccgggcttggattcttatagtcccatacctgaaggcgccgtcgcggaggaacacgcctggtccggcgaacatggagagcacttcgatctgttcaatttcgaccccgcaccaatggctagcgggcaatcccaacaatctagccatagtgccgactattctccagccgacgacttcttccccaattccgacttaagcgaggggcaactacccgctggccccgaaggattagatggaatgggaaccaacatgagcaactattcatcttcttcactcctctctggtgccggcaaggactctctagtagagcatgatgaagagttcgtccaacgccaagattcaccaagagacaatagtgaaagaaatctgagcctaaccgactttgtgggcgacgaatcaccatccccagaaaggcttaagaacacgggcaagcgaatacctccaacacccatgaactctctggtagaatcctccccctcaaccgaagaacccgcgtccctgtacactgaagatatgacacagaaagccacagatactggccatatggggcccccacagacacatgctcgctgttccagctggtgggggggcttggagattgacagcaagaacatcgcggatgcttggtcgtcaagcgaacaggaaagtgttttccagtcccctgaaagctggaaagaacataagccatcttccattgacagaagagcctccgattcagtctttcagcccaaatcactcgaattcaccaaaagcggcccgtgggagagtgaatttggacaaccggagctgggcagcaatgatattcaagacaagaatgaagaaagtctgcctttccagaatcttcctatggagaagtcccctttaccaaataccagcccgcagggaactaaccacctaatcgaagatttcgcatctctgtggcattcaggtagaagcccaacagccatgcccgaaccatggggaaacccgacagatgacggggagcctgccgccgtcgcgccgtttccagcctggtccgcatttggtaaggaggatcacgacgaggctctcaagaatacgtggaatctccaccccacatcttctaaaaccccctcagtccgagacccgaacgagtgggccatggcaaagtccggtttcgccttcagcagtagcgaactgctggacaattcaccgagtgagattaataatgaggcggcgccagagatttggggaaagaaaaataatgatagtcgcgatcatatatttgcccctggaaaccctagcagcgacctggaccatacatggaccaactccaagccccccaaagaggaccaaaacggacttgtggatccgaagactagagggaaagtgtacgaaaaggtcgactcttggaacctgtttgaggagaatatgaaaaaaggcggttcagatgtgctggtgccatgggaagactcattcctgtcttacaagtgctcggactactctgccagtaacctgggggaggactccgtaccttctccgctggatacgaattattcaacatccgattcgtatacatcccccacatttgctggtgacgaaaaagagacagagcataagccgtttgcaaaagaagaaggattcgagtccaaagatggcaacagtacagcagaggaaacagatatccccccacagtcactgcagcagtcctccagaaataggatctcttcaggtcccggaaatctcgatatgtgggcgagtccccataccgacaactcatcagaaatcaacacaacccacaatctcgacgaaaatgagttaaagaccgaacataccgatggaaagaatataagcatggaagatgatgtaggggagtctagccaatcatcgtatgatgatcccagcatgatgcagttgtataatgagaccaaccgccaactgacacttctgcactcttccactaattctagacagaccgccccagatagtctggatctgtggaaccgagtgatcttggaggatacccagtcgaccgctacaataagcgatatggacaatgatcttgattgggacgactgctctggaggagcagcaatcccttccgacgggcaaacagaaggctacatggccgaaggatctgaacctgagaccaggttcactgttcggcaattagaaccgtggggcctggagtatcaagaggcgaatcaggtggattgggaactcccagcgtccgatgagcacactaaggatagtgccccctccgaacaccacaccttgaatgaaaaatcaggacagttgatcgcaaacagcatctgggatagcgttatgagagacaaggacatgagtagcttcatgctccccggctccagccacattaccgactctgaacagagagagctgccgcccgagataccgagccacagtgccaatgttaaggacacacacagcccggatgctcccgcagccagcggcacttcagagtccgaggctttgatctctcatctcgacaagcaagacacagaaagagagaccttgcagtcagacgccgcttccttggcaactcgactggaaaaccccgggtacttcccccatcccgatccttggaagggccacggtgatggccaatccgaaagcgaaaaagaggcccagggagccacagataggggacatctggacgaggaagaagtgatcgcttctggcgtagaaaacgcatctggaatctccgaaaaggggcagagcgaccaggagctgtcttccctcgttgcctcagagcatcaagaaatctgtatcaaatcaggaaaaatttcctctctggctgtcacattctcccctcagactgaagagccggaagaggtattagagtacgaagaggggtcatacaaccttgacagtagggacgtccagaccgggatgtctgcggacaatctgcagccaaaggacacacacgagaaacatctcatgtcgcagcgtaactctggagaaactactgaaacttcagatggaatgaacttcaccaaatatgtctccgtgccagagaaggatcttgaaaagactgaagagtgcaattttctcgaaccagagaatgtcggtggcggtccaccgcacagggtgcccaggagtctggactttggggacgtgccaatagactccgacgttcacgtgtccagtacctgcagcgagatcactaaaaacctagacgtgaaaggttccgagaattcccttcctggggctggctccagtggtaatttcgatcgagacacaatcagttcggagtacacacattcctcagccagttccccagaattaaatgattcctccgtggcccttagctcctgggggcagcagccttcatcaggctatcaggaggagaatcaggggaattggagcgaacagaaccaccaggagtctgagttaataacaaccgatggccaggttgagatcgtgacaaaggtaaaggacctggaaaagaaccgaatcaatgagtttgaaaagagcttcgatcggaagacccctaccttcctcgaaatctggaacgattcagttgatggcgactcattctcttccctttcttctccagagacaggaaaatactccgaacatagcgggacccatcaggagagtaatctcattgcctcttatcaggagaagaatgagcacgatatcagtgccaccgttcagccagaagacgcccgagtcatcagtacaagctcgggcagcgacgacgactccgtgggcggcgaggagtccatcgaggaagagattcaggtagccaactgccacgtggccgaggatgagtctagagcgtgggacagcttgaacgagagcaacaaatttctggttaccgcggatcctaaaagcgaaaacatttacgattatctagacagcagcgagcctgccgagaatgagaataagtctaatccattttgtgataatcagcagtcaagccccgatccctggactttctccccccttaccgagacagagatgcaaatcactgcggttgagaaagagaagcgttcctctcctgaaactggcaccaccggggatgtggcctggcagatcagtccaaaggctagtttccccaaaaatgaggataactcccagctagagatgctgggattcagcgccgattctacggaatggtggaaggcctcccctcaggaaggtcggttaattgaaagccccttcgaaagagagctgtcagatagcagcggggttctagagattaactcctctgtgcatcagaacgcctccccgtggggggttcctgtgcagggcgacattgaaccggtggaaactcattatactaaccctttttccgataatcaccaatctccttttctggaagggaacggcaagaatagccacgagcagctgtggaacatccagcccagacagcctgaccccgacgcagacaagttctcccaactcgtgaagctggaccagattaaggagaaagacagccgggagcaaacattcgtcagcgcggccggggatgaattaaccccagaaactcccacacaggagcagtgccaagacacaatgctgccagtctgcgaccatccagatacagcttttactcatgctgaggagaattcgtgcgttacatccaacgtgagcacaaacgaaggccaggagacaaatcaatgggaacaagagaaaagctacctcggggaaatgaccaactcctctattgcaactgaaaatttccccgcggtgtccagccccacccaacttataatgaagcctggatcagaatgggatggcagcacacctagtgaagacagcagggggaccttcgttccggatatactccacggaaatttccaggagggcggacaactcgcaagtgctgcccccgacctctggatcgacgcgaagaagccttttagcctcaaggctgacggagagaaccctgatatactgacacactgtgaacatgattctaactcgcaggcctctgattcccctgacatctgtcacgacagcgaagccaagcaggaaacagagaaacacctgtcagcatgcatggggccagaagtggagagcagcgagctgtgtttaaccgagccagaaattgatgaagaacctatctacgagcccggccgggaattcgtccccagcaacgcggagctcgacagcgagaacgctaccgtcctcccccccattggataccaagcggatatcaagggatcaagccagcctgccagccacaaaggaagcccagagccttctgagattaatggcgataattcaactggcttgcaggtgtccgagaagggtgcctcccccgatatggcccccattctcgagccagtggataggcggatcccccggattgaaaatgtggcgacatcaatattcgtgacacatcaggagccaacccccgaaggcgatgggagttggatctctgatagcttcagtccagagtcccaacctggcgcacgggccctgtttgacggggatccacacctgagcaccgagaaccctgccttggttcctgacgctctccttgcctccgacacttgcctcgatatctctgaagctgcttttgaccacagtttttccgatgccagcggtctgaacacttcaaccggcacaattgacgacatgtctaagttaacgctgtcagaaggacaccctgagacacccgtcgatggagacctgggtaaacaggacatctgtagctctgaagcatcctggggggacttcgaatacgacgtgatgggccaaaacatcgacgaggatctcctccgggagcccgagcattttctatacggcggcgatccccccctcgaagaagatagtctgaaacagagcctcgccccatacacacctccatttgacctgagttatcttactgaaccggctcagtctgctgaaaccatcgaggaggccgggtccccagaagacgagagccttgggtgcagggcagcagagatagttctatccgccctgccagacagaagatctgagggcaatcaggccgaaacaaagaatcgtcttccgggctcgcaactggccgtgctgcatatccgggaggatccggaaagtgtttatctgcctgtaggcgccgggagtaacatattaagcccaagtaatgtcgattgggaagtggagactgataattcagatctgccagccggcggcgacataggtccccccaacggggctagcaaagagatctctgaactcgaagaagagaaaacgatccctacaaaagaaccagagcagataaagtcagaatataaggaggagaggtgtaccgagaaaaacgaggatcgtcacgcccttcacatggattacattctcgtgaacagggaggagaactcacactctaaacctgaaacttgcgaggagcgcgagtcgattgcagaactggaactttacgtcggctcaaaggaaaccggcctacagggaacccaacttgcctcttttccagatacttgccaaccagcctcactgaatgaacggaaggggctgtcagccgaaaagatgtcgtcgaaaagcgatacaagaagctcattcgagagtccagcccaggaccaatcttggatgttcttggggcacagtgaggtgggtgatccctctctggacgccagagacagcgggcctggatggtctgggaaaacggtagagccattttccgaacttggccttggcgaagggccacaattgcagatcctggaggagatgaagccattggagtctctagctttagaagaagctagcggcccagtgtcgcagtcccaaaagagtaagtctcggggccgcgccggcccagacgccgtgacgttgcaggccgtgactcacgacaatgaatgggagatgctgagcccacaacccgtccagaaaaatatgataccagatactgagatggaggaagaaacagagttcttggagcttggaacccggattagtcggcctaatggtcttttatccgaagatgtgggtatggacatcccctttgaagagggagttctgtctccttcagctgcggatatgaggcccgagccaccaaattcactggatctgaacgatacccatccacggcggattaagttaactgcaccaaacattaacctcagtctcgaccagagtgagggaagcatcctgtccgatgataatcttgattcgccagacgagattgacattaatgtggacgagttagatactccggacgaagcggattccttcgaatacaccgggcacgaggaccccacagctaacaaggacagcggccaggagagtgagagtatccctgagtacacagccgaagaggagcgagaggataaccgtctgtggcgcacagtcgtaatcggcgagcaagaacaaagaattgatatgaaagtgatcgagccctatagacgggtcatttcacacggaggctcaagggggtattacggtgacggtctcaacgctatcattgtctttgctgcctgctttctcccggacagctctcgggctgattaccactatgtgatggagaatctgtttctttatgtcattagcacactcgaattaatggtagcagaggactacatgatagtttatctcaacggggccacaccgcgaagaaggatgcccggcctcggatggatgaagaaatgctaccaaatgatcgatcgacgtctccgtaaaaacctcaagagcttcattatcgtgcacccttcttggttcattcggacgatactggcagtcaccaggccatttatctccagtaagttctccagcaagataaaatacgtaaatagcctcagcgagctgagcggccttataccgatggactgcattcacattccagagtctatcataaattattag

SEQ ID NO: 310041 - DNA, 9165 bp, Artificial Sequence
  derived and/or modified sequence
agaaacctgatgcacaggatgaaggagagtgaaaatagaagcaagaggctggagaaggtgcacgtggtgattggccccaagagctgtgacctggacagcctcatcagcaccttcacctacgcctacttcctggacaaggtgtccccacctggggtgctgtgcctgcctgtgctgaacatccccaggacagagttcaactacttcacagagacccgcttcatcctggaggagctgaacatcagcgagagcttccacatcttcagagatgagatcaacctgcaccagctgaatgatgagggcaagctgagcatcaccctggtgggcagctctgtgctggccagcgaggacaagaccctggagagcgctgtggtgaaggtgatcaaccctgtggagcagagtgatgccaacgtggagttccgggagagcagcagcagcctggtgctgaaggagatcctgcaggaggcccctgagctgatcacagagcagctggcccaccggctgcggggcagcatcctcttcaagtggatgaccatggagagcgagaagatcagcgagaagcaggaggagatcctgagcatcctggaggagaagttccccaacctgcccccccgggaggacatcatcaacgtgctgcaggagacccagttcagcgcccagggcctgagcattgagcagaccatgctgaaggacctgaaggagctgagtgatggagagatcaaggtggccatcagcacagtgtccatgaacctggagaactgcctcttccacagcaacatcaccagtgacctgaaggccttcacagacaagtttggatttgatgtgctgatcctcttcagcagctacctgtctgaggagcagcagccccggcggcagattgctgtgtacagcgagaacatggagctgtgcagccagatctgctgtgagctggaggagtgccagaacccctgcctggagctggagccctttgactgtggctgtgatgagatcctggtgtaccagcaggaggaccccagcgtgacctgtgaccaggtggtgctggtggtgaaggaggtgatcaacagacgctgcccagagatggtgagcaacagcaggaccagcagcacagaggccgtggccggcagcgcccccctgagccagggcagcagcggcatcatggagctgtatggcagtgacatcgagccccagcccagctctgtgaacttcattgaaaatcctccagacctgaatgacagcaaccaggcccaggtggatgccaacgtggacctggtgtccccagattctggcctggccaccatccgcagcagccgcagcagcaaggagagcagcgtcttcctgagtgatgacagccctgtgggggagggcgccggcccccaccacaccctgctgcccggcctggacagctacagccccatccctgagggcgctgtggccgaggagcacgcctggagcggggagcacggggagcactttgacctcttcaactttgatcctgcccccatggccagcggccagagccagcagagcagccacagcgctgactacagccctgcagatgacttcttccccaacagcgacctgtctgagggccagctgcctgctggccctgagggcctggatggcatgggcaccaacatgagcaactacagcagcagcagcctgctgtctggagctgggaaggacagcctggtggagcatgatgaggagtttgtgcagaggcaggacagcccccgggacaacagcgagaggaacctgagcctgacagactttgtgggagatgagagccccagccctgagcggctgaagaacacaggcaagaggatcccccccacccccatgaacagcctggtggagagcagccccagcacagaggagcccgccagcctgtacacagaggacatgacccagaaggccacagacaccggccacatgggccccccccagacccacgcccgctgcagctcctggtggggcggcctggagattgacagcaagaacattgctgatgcctggagcagcagcgagcaggagagcgtcttccagagccctgagagctggaaggagcacaagcccagcagcattgacagaagagccagtgacagcgtcttccagcccaagagcctggagttcaccaagagcggcccctgggagagcgagtttggccagcctgagctgggcagcaatgacatccaggacaagaatgaggagagcctgcccttccagaacctgcccatggagaagagccccctgcccaacaccagcccccagggcaccaaccacctgattgaggactttgccagcctgtggcacagcggccgcagccccacagccatgcctgagccctggggcaaccccacagatgatggagagcctgctgctgtggcccccttccctgcctggagcgccttcggcaaggaggaccatgatgaggccctgaagaacacctggaacctgcaccccaccagcagcaagacccccagcgtgcgggaccccaatgagtgggccatggccaagagcggctttgccttcagcagcagcgagctgctggacaacagccccagcgagatcaacaatgaagctgcccctgagatctggggcaagaagaacaatgacagccgggaccacatctttgcccctggcaaccccagcagtgacctggaccacacctggaccaacagcaagccacccaaggaggaccagaatggcctggtggaccccaagacccggggcaaggtgtatgagaaggtggacagctggaacctgtttgaggagaacatgaagaagggcggcagtgatgtgctggtgccctgggaggacagcttcctgagctacaagtgcagcgactacagcgccagcaacctgggagaagattctgtgcccagccccctggacaccaactacagcaccagtgacagctacaccagccccacctttgctggagatgagaaggagacagagcacaagccctttgccaaggaggagggctttgagagcaaggatggcaacagcacagctgaggagacagacatccccccccagagcctgcagcagagcagcaggaaccgcatcagcagcggccctggcaacctggacatgtgggccagcccccacacagacaacagcagcgagatcaacaccacccacaacctggatgaaaatgagctgaagacagagcacacagatggcaagaacatctccatggaggatgatgtgggggagagcagccagagcagctatgatgaccccagcatgatgcagctgtacaatgagaccaaccggcagctgaccctgctgcacagcagcaccaacagccggcagacagccccagacagcctggacctgtggaacagagtcatcctggaggacacccagagcacagccaccatcagtgacatggacaatgacctggactgggatgactgcagcggcggggccgccatccccagtgatggccagacagagggctacatggccgagggcagcgagcctgagacccgcttcaccgtgcggcagctggagccctggggcctggagtaccaggaggccaaccaggtggactgggagctgcctgccagtgatgagcacaccaaggacagcgcccccagcgagcaccacaccctgaatgagaagagcggccagctgattgccaacagcatctgggacagcgtgatgagggacaaggacatgagcagcttcatgctgcccggcagcagccacatcacagacagcgagcagcgggagctgcccccagagatccccagccacagcgccaacgtgaaggacacccacagcccagatgccccagctgccagcggcaccagcgagagcgaggccctgatcagccacctggacaagcaggacacagagcgggagaccctgcagagtgatgctgccagcctggccacccggctggagaaccctggctacttcccccacccagacccctggaagggccatggagatggccagagcgagagcgagaaggaggcccagggcgccacagaccggggccacctggatgaggaggaggtgattgccagcggcgtggagaatgccagcggcatcagcgagaagggccagagcgaccaggagctgagcagcctggtggccagcgagcaccaggagatctgcatcaagagcggcaagatcagcagcctggccgtgaccttcagcccccagacagaggagcctgaggaggtgctggagtatgaggagggcagctacaacctggacagcagagatgtgcagacaggcatgtctgctgacaacctgcagcccaaggacacccatgagaagcacctgatgagccagagaaattctggagagaccacagagaccagtgatggcatgaacttcaccaagtatgtgtctgtgcctgagaaggacctggagaagacagaggagtgcaacttcctggagccagaaaatgtgggcggcggccccccccaccgggtgcccaggagcctggactttggagatgtgcccatcgacagtgatgtgcacgtgagcagcacctgcagcgagatcaccaagaacctggatgtgaagggcagcgagaacagcctgcccggggccggcagcagcggcaactttgaccgggacaccatcagcagcgagtacacccacagcagcgccagcagccctgagctgaatgacagctctgtggccctgagctcctggggccagcagcccagcagcggctaccaggaggagaaccagggcaactggagcgagcagaaccaccaggagagcgagctgatcaccacagatggccaggtggagatcgtgaccaaggtgaaggacctggagaagaaccgcatcaatgaatttgagaagagctttgacaggaagacccccaccttcctggagatctggaatgattctgtggatggagacagcttcagcagcctgagcagccctgagaccgggaagtacagcgagcacagcggcacccaccaggagagcaacctgattgccagctaccaggagaagaatgaacatgacatcagcgccaccgtgcagccagaagatgcccgggtcatcagcaccagcagcggcagtgatgatgacagcgtgggcggggaggagagcattgaggaggagatccaggtggccaactgccacgtggccgaggatgagagccgggcctgggacagcctgaatgaaagcaacaagttcctggtgacagctgaccccaagtctgagaacatctatgactacctggacagcagcgagccagcagaaaatgaaaacaagagcaaccccttctgtgacaaccagcagagcagcccagacccctggaccttcagccccctgacagaaacagagatgcagatcacagctgtggagaaggagaagaggagcagccctgagaccggcaccactggagatgtggcctggcagatcagccccaaggccagcttccccaagaatgaagacaacagccagctggagatgctgggcttctctgctgacagcacagagtggtggaaggccagcccccaggagggccgcctgattgagagcccctttgagcgggagctgagtgacagcagtggagtgctggagatcaacagctctgtgcaccagaatgccagcccctggggcgtgcctgtgcagggcgacatcgagcctgtggagacccactacaccaaccccttcagtgacaaccaccagagccccttcctggagggcaatggcaagaacagccatgagcagctgtggaacatccagccccggcagcctgaccctgatgctgacaagttcagccagctggtgaagctggaccagatcaaggagaaggacagccgggagcagacctttgtgtctgctgctggagatgagctgaccccagagacccccacccaggagcagtgccaggacaccatgctgcctgtgtgtgaccacccagacacagccttcacccacgccgaggagaacagctgtgtgaccagcaatgtgtccaccaatgaaggccaggagaccaaccagtgggagcaggagaagagctacctgggggagatgaccaacagcagcatcgccacagagaacttccctgctgtgagcagccccacccagctgatcatgaagccaggcagcgagtgggatggcagcacccccagcgaggacagccggggcacctttgtgcctgacatcctgcacggcaacttccaggagggcggccagctggccagcgctgccccagacctgtggattgatgccaagaagcccttcagcctgaaggcagatggagagaacccagacatcctgacccactgtgaacatgacagcaacagccaggccagtgacagcccagacatctgccacgacagcgaggccaagcaggagacagagaagcacctgagcgcctgcatgggccctgaggtggagagcagcgagctgtgcctgacagagcctgagattgatgaggagcccatctatgagcccggccgggagtttgtgcccagcaatgctgagctggacagtgaaaatgccaccgtgctgccccccatcggctaccaggccgacatcaagggcagcagccagcctgccagccacaagggcagccctgagcccagcgagatcaatggagacaacagcacaggcctgcaggtgtctgagaagggggccagcccagacatggcccccatcctggagcctgtggaccggcgcatccccagaattgaaaatgtggccaccagcatctttgtgacccaccaggagcccaccccagaaggagatggctcctggatcagtgacagcttcagccctgagagccagcccggggcccgggccctgtttgatggagacccccacctgagcacagaaaatcctgccctggtgcctgatgccctgctggccagtgacacctgcctggacatcagcgaggccgcctttgaccacagcttcagtgatgccagcggcctgaacaccagcacaggcaccattgatgacatgagcaagctgaccctgtctgagggccaccctgagacccctgtggatggagacctgggcaagcaggacatctgcagcagcgaggcctcctggggagactttgaatatgatgtgatgggccagaacattgatgaggacctgctgcgggagcctgagcacttcctgtatggaggagacccccccctggaggaggacagcctgaagcagagcctggccccctacaccccaccatttgacctgagctacctgacagagcccgcccagagcgctgagaccatcgaggaggccggcagcccagaagatgagagcctgggctgcagagctgctgagatcgtgctgagcgccctgcctgaccggcgctctgagggcaaccaggccgagaccaagaaccggctgcccggcagccagctggccgtgctgcacatcagagaagatcctgagagcgtgtacctgcctgtgggcgccggcagcaacatcctgagccccagcaatgtggactgggaggtggagacagacaacagcgacctgcctgctggaggagacatcggccccccaaatggagccagcaaggagatcagcgagctggaggaggagaagaccatccccaccaaggagcctgagcagatcaagtctgagtacaaggaggagcgctgcacagagaagaatgaagatagacatgccctgcacatggactacatcctggtgaaccgggaggagaacagccacagcaagccagagacctgtgaggagcgggagagcattgctgagctggagctgtatgtgggcagcaaggagaccggcctgcagggcacccagctggccagcttcccagacacctgccagcctgccagcctgaatgaaaggaagggcctgtctgctgagaagatgagcagcaagagtgacaccaggagcagctttgagagccctgcccaggaccagagctggatgttcctgggccacagcgaggtgggggaccccagcctggatgcccgggacagcggccctggctggagcggcaagacagtggagcccttcagcgagctgggcctgggggagggcccccagctgcagatcctggaggagatgaagcccctggagagcctggccctggaggaggccagcggccctgtgtcccagagccagaagagcaagagccggggccgggccggcccagatgctgtgaccctgcaggccgtgacccatgacaatgagtgggagatgctgagcccccagcctgtgcagaagaacatgatcccagacacagagatggaggaggagacagagttcctggagctgggcacccgcatcagccggcccaacggcctgctgtctgaagatgtgggcatggacatcccctttgaggagggcgtgctgagccccagcgctgctgacatgaggcctgagccccccaacagcctggacctgaatgacacccacccccggcgcatcaagctgacagcccccaacatcaacctgagcctggaccagagcgagggcagcatcctgagtgatgacaacctggacagcccagatgaaattgacatcaacgtggatgagctggacaccccagatgaagctgacagctttgagtacacaggccacgaggaccccacagccaacaaggacagcggccaggagagcgagagcatccctgagtacacagctgaggaggagcgggaggacaaccggctgtggaggacagtggtgattggagagcaggagcagagaattgacatgaaggtgattgagccctacagaagagtcatcagccacggcggcagccggggctactatggagatggcctgaatgccatcatcgtgtttgctgcctgcttcctgcctgacagcagcagagctgactaccactacgtgatggagaacctcttcctgtatgtgatcagcaccctggagctgatggtggccgaggactacatgattgtgtacctgaatggagccacccccaggaggaggatgcctggcctgggctggatgaagaagtgctaccagatgattgaccggcggctgaggaagaacctgaagagcttcatcatcgtgcaccccagctggttcatccgcaccatcctggccgtgacccggcccttcatcagcagcaagttcagcagcaagatcaagtatgtgaacagcctgtctgagctgagcggcctcatccccatggactgcatccacatccctgagagcatcatcaactactag

SEQ ID NO: 310042 - DNA, 9165 bp, Artificial Sequence
  derived and/or modified sequence
cggaacctgatgcaccggatgaaggagagcgagaaccggagcaagcgattggaaaaggtccacgtggtgatcggtcccaagtcttgcgatctggactccctgatcagcaccttcacatacgcgtattttttggacaaagtgtcgccgcctggggtactgtgtctaccagtactgaacattcccaggacagagtttaactattttaccgagactaggttcatactcgaagagcttaacatttccgaaagtttccacatcttcagggatgagataaacctccatcagcttaacgatgagggtaaattatccattaccctcgtagggtcgtctgtattggccagcgaagacaaaactctagagagcgctgtggtgaaggtcatcaaccctgtcgagcaatccgacgcgaacgtcgaattcagggaatcctcgagcagtcttgtgctcaaagaaatcttacaggaagctccagagttaataacagagcagctggctcaccggctgcggggctccatcttgtttaagtggatgaccatggagagcgagaaaattagcgaaaagcaagaggagatcctgtcaatcctagaggagaaatttccaaatctgccccctagggaggacattatcaatgtacttcaagagacccagttctccgctcagggcctgagtatcgagcagacaatgttgaaggatttgaaggagcttagcgacggtgagattaaggtggcaatttcaaccgtgagcatgaacttagagaactgtctctttcatagcaacattacatccgatttaaaggcttttacagacaaatttggtttcgatgttctcatcctgttcagctcctacctgagtgaagagcaacagccaaggaggcagatcgcagtttattcagagaacatggagttgtgttcacaaatctgctgcgagcttgaggaatgccagaatccttgtctcgaactggaaccgttcgattgcggatgtgatgagattttagtttaccagcaggaggaccctagtgtgacatgcgaccaagttgttctcgtggtgaaggaagtgatcaatcgccgctgccccgagatggtctctaactcccgcactagctctacggaagcagttgccggatcagcgcccctgtctcagggttcgtccggcattatggagttatatgggagtgatatcgagccgcagccttcgtccgtgaacttcatcgagaaccctcccgatctcaatgactcaaatcaggctcaggtagacgctaacgtggaccttgtcagccctgacagcggcctggccacaattcgtagttccaggagtagtaaagaaagcagtgtcttccttagtgacgactccccggtgggggaaggagccggacctcaccacacgttacttcccggcctggacagctacagcccaattcccgaaggcgccgttgccgaagaacacgcatggagtggagagcacggtgagcatttcgacctgttcaacttcgatccggctcccatggcatcaggtcagagccagcagtcctctcattctgccgactactctcctgcggacgactttttcccaaatagcgacctatctgagggacagctgcccgccggcccggagggactcgatggcatgggcaccaatatgtctaattattctagttctagcctcctaagtggcgctggaaaagattccctggttgagcatgacgaggagtttgtgcagagacaggattcaccaagagacaactccgaacgcaacctgtccctgaccgactttgttggtgatgagtcaccttcgccagagagattgaagaacactgggaagcgcattccccccactccaatgaacagcctggtcgagtccagcccatctacagaagagccagcttctctttataccgaagatatgacccagaaagccactgacaccggccacatgggcccccctcaaacccatgctaggtgctcctcatggtggggcggcctggaaatcgattccaaaaacatcgcagacgcttggagctcatccgagcaagagagtgtgttccagtcacccgaatcttggaaagaacataagccgtcgagtatcgaccgcagggcctctgattcggtattccagcctaagagtctggaatttacaaaatcaggcccttgggaaagtgaatttggccagccagaattgggatcaaatgacatccaagataaaaacgaagaaagtctgccattccaaaatttgcctatggagaagtcccctctccctaacacatccccccagggaaccaatcatctgatagaagacttcgctagcctctggcactcgggcagatcaccaaccgcgatgcctgagccatgggggaatccgactgacgatggagagcctgcggccgtggcgccctttcctgcgtggtctgctttcggcaaggaagaccacgatgaggcactcaaaaacacatggaatctccatcccaccagttcgaaaaccccatcagtaagagaccccaacgagtgggctatggctaagagcggttttgccttctcaagctctgaactgctagacaacagcccctccgaaatcaataatgaggcagccccagaaatctggggcaaaaagaacaatgactcacgagatcacatatttgctcctggaaatccatcctctgatttggatcatacctggactaacagcaaaccaccaaaggaggaccagaacggactcgtggatcccaagacccgagggaaagtgtatgagaaggtcgactcttggaatctttttgaagagaacatgaaaaaaggaggctccgatgttctggtgccctgggaggatagcttcctgagctataagtgtagtgactactctgcgtctaacctcggagaagacagtgtgcccagccccctcgatactaactatagcacaagcgactcttatacttcaccaacctttgcaggtgacgaaaaggagacggaacacaagccttttgctaaagaggaggggttcgagagcaaggacgggaattccactgctgaggagacagacattccaccccaatccctgcagcagagttctcggaaccgcattagctccggtccaggcaacttagacatgtgggcctccccccacacagacaacagttcagagattaataccacccacaacctggacgaaaatgaactgaaaacagaacataccgacggcaaaaacatcagcatggaggatgatgtaggcgagtcttcgcagtcaagctatgacgacccatccatgatgcagttgtacaatgaaacaaatcggcagctgacactgctgcactcctctaccaacagccgccagactgccccagactctttagatctgtggaatagggtgatcctggaggacacgcaaagcactgcaacaatcagcgacatggataatgacctcgactgggatgactgcagtggaggggccgcaatcccctcggatggacagactgaaggctacatggctgagggctccgaacccgaaacacggtttactgtgcgtcagctcgaaccgtggggtttagagtaccaggaagcaaaccaggtagattgggaactgccagcaagcgatgagcacaccaaagacagtgctccttcggaacatcacactctaaatgagaaatccggccagctgattgccaatagcatttgggattccgtaatgcgagataaggatatgtcgagctttatgctccctggctcaagtcatatcacggattctgagcagcgggagttacccccagagataccatcccacagcgctaacgtgaaggacacccactcaccagacgcaccggctgcctctggaacctctgagagcgaagcacttattagccatttagacaagcaggatactgagcgggagactctccagtccgatgccgcgtcgctggctactagattggagaatcctggttatttccctcaccccgacccatggaaaggccacggagacgggcagagcgaatcagaaaaagaagctcaaggagctacagacaggggacatttggatgaagaagaagtgatcgctagtggcgtggagaacgcctcgggcataagtgagaaggggcagtctgaccaggagctctcatccctcgtcgcatcagagcaccaggaaatttgcataaaaagcggtaagatttcttccttggcggttaccttctctccacaaactgaagagccggaggaggttctggagtatgaagagggttcctacaacctagactcacgtgatgtgcaaactgggatgtccgccgataacctgcagcccaaagatacacatgagaagcatctcatgtcccaaaggaacagcggcgaaaccaccgagacttctgacggcatgaattttacaaagtacgtttcggtccctgagaaggatctggagaaaactgaggagtgcaactttctggagcctgagaacgtgggtggagggcccccccaccgggtcccacgttctttggactttggggatgtgcctatcgatagtgacgtgcacgtgtcctctacctgttctgaaattacgaaaaatctagatgtcaagggcagcgagaacagccttcccggcgccgggtcctccggaaacttcgatcgtgatactatttccagtgagtacacccatagcagcgcttcttctcctgagcttaatgacagtagtgtagctttaagttcctggggccagcagccctcgagtggctaccaggaggagaaccagggaaattggagtgaacagaatcaccaggaaagcgagttgattacaactgacggtcaggttgagattgtcaccaaggtaaaagacctcgagaagaacaggatcaacgaattcgagaagagtttcgacagaaagacacctacatttctggaaatctggaatgactctgtggatggggactccttctcttcactctccagccctgagaccgggaaatacagtgagcactcgggaactcatcaggaatccaatttaattgccagttatcaggaaaagaacgagcatgatattagtgcaacggttcagccagaggacgctcgcgtgatctctaccagcagtgggagtgatgacgactctgtggggggggaagaatctatagaagaggagattcaggttgcgaactgtcacgttgcggaagatgagtctcgagcctgggattctcttaatgagagtaacaagttcctggttactgctgatcccaagtctgaaaatatttacgattatttagatagttcggagccagcagagaacgaaaataagagcaacccattttgtgataaccagcagtcctctcctgacccttggacttttagccctctgacagagacggagatgcagatcaccgcagtggagaaagagaaacggtcatccccggagactgggacaacaggagatgtagcgtggcagatttctcccaaggcatcctttccaaaaaacgaggataactctcaactggaaatgctaggctttagcgcagatagtactgagtggtggaaagcttccccacaggaggggaggctgattgagtctcctttcgaacgcgaactgtctgactcctcaggtgtactagagattaattcgtctgtgcatcagaacgcttctccttggggcgtacctgtgcaaggcgacatcgagccggtcgagacgcattatactaatcccttcagcgacaatcatcagagtccttttctcgaaggcaacgggaaaaattcccacgaacagctgtggaacattcaacctaggcagcccgatccggacgccgacaagttttctcaactcgtgaagttggatcagatcaaggagaaggacagccgggaacagactttcgtgtctgcggccggagatgagctcactcccgagacaccaacccaggagcaatgtcaagatactatgctgcctgtctgcgaccaccccgatactgcttttacccacgccgaggagaatagttgtgtgaccagcaatgtcagcacaaatgaggggcaggagacgaaccagtgggagcaagagaagtcatacctgggtgagatgacaaattcttctatcgctaccgagaacttccccgccgtgagctccccaacccagttaattatgaagccgggttccgaatgggatggctccaccccatccgaagattcccgaggcacatttgttcctgatattctgcacggtaactttcaagagggcggacagctggcctccgcagcccccgatctctggattgacgcaaagaagcccttttctttgaaagccgatggcgaaaatcctgacattctaacccactgtgagcacgatagcaacagtcaagcttccgacagtcctgatatctgtcacgattctgaagccaaacaagagacagagaaacatttatccgcctgtatgggaccagaagtagagtcctccgaactgtgtcttacggagcctgagatcgatgaggagcccatctatgaacccggccgagagttcgtcccgtccaatgccgaactggacagcgagaacgctaccgtcctgccccccatcgggtaccaggctgatattaaaggcagctcacagcccgccagtcacaagggcagcccagagccttccgagataaatggcgataactctactggactacaagtgagcgagaagggcgccagcccagatatggcccccatcctcgagcctgtagacaggcgtattcccaggatagaaaacgtcgccacctctatatttgtcacgcaccaggaaccaacccctgaaggcgatggatcatggatatccgactcgttctcaccggagtcccagccgggcgctagagccctctttgatggcgatccacacctatctacggagaaccctgctttggtgcccgatgcgctgctggcttccgacacatgtctggacatctcagaagccgcattcgaccacagcttttctgacgcttctggcctgaatactagtaccgggaccatcgacgacatgtcaaagctgaccctgtcagaagggcatccagagacacccgtagacggcgacctgggaaaacaggatatctgttcgagcgaggcatcctggggtgacttcgaatatgacgtgatgggccagaacatcgacgaggatctgctgagagagcctgagcatttcttatatgggggggatcctcctctggaggaagattcccttaaacaaagtctggcgccgtacacccctccattcgatctctcttacctgactgaaccggcccaaagtgccgagacaattgaagaagccggctcacccgaagacgaatccctgggatgccgggccgctgagatcgtattgtccgccctcccagacagacgcagcgagggtaatcaggccgagactaaaaaccgactgcccggatctcagctggcagtcctacacatccgagaggatcctgagtcagtctacttgcctgtcggcgctgggtccaacattttaagtccgtcaaacgtcgactgggaggtagaaactgataattccgatctgccagctgggggcgatataggcccaccgaacggagccagtaaggagatctcggagttagaggaggagaagaccatcccaacaaaggagccagagcagatcaaatccgaatacaaagaggaacgttgtacagaaaaaaacgaagatcgccatgcgctgcacatggactacatccttgtcaatcgcgaagagaatagccacagcaagcccgaaacttgcgaagagagagaaagtatagctgagctcgagctgtacgtgggctcaaaggagacaggtttacaggggacccagctggcttcttttcctgatacctgccagcccgcctcactgaacgaaaggaaaggcctgagcgccgagaaaatgtcaagtaaatcagacacccggtcgtcattcgagtctccggcacaggatcagtcttggatgtttctaggacactcagaggtaggtgaccccagtctggacgccagggactcaggccccggctggagcgggaagacggtagagcccttctctgaactcgggctgggtgaggggccccaactacagatcctggaggagatgaagccactggagagcttggctcttgaggaggcctctggcccagtatctcagtcccagaagagcaaatctcgtggccgggctggacccgacgccgtcaccctccaggcagtcacccatgacaacgagtgggagatgctgtccccacaacccgtgcagaaaaatatgattcccgataccgagatggaagaggagactgagtttctagagcttgggacccgaataagtcggccgaatggcctgctttccgaggatgtggggatggacattccttttgaagaaggcgtgctctcacccagcgcggctgatatgagacccgaaccacctaactcattggacctcaatgacacccaccccagaagaattaaacttacggcacctaacataaatttgtccctggatcaatccgaggggtctatcctctctgatgacaatttagactcgccagatgagatcgacattaacgtcgacgaactggatacacctgatgaggcggactcctttgagtatactgggcatgaagatccaacggccaataaggactctggccaggagtcagagtctattccggaatacacagctgaggaagaacgcgaggataaccgcctgtggcgcactgtcgttattggggaacaggaacagcgcattgacatgaaggtgattgagccataccgtagagtgatttcacatggaggaagccgagggtattatggcgacggcctgaatgctataattgtctttgctgcgtgttttcttcctgactctagtagggccgactatcactatgttatggaaaatctgtttctgtatgttatctcaacactggagctcatggttgctgaagactacatgatcgtgtatctgaatggcgccactcctcggagaaggatgcccggactcggctggatgaagaagtgctaccagatgattgacaggaggcttcggaaaaaccttaaaagtttcatcatcgtccacccttcctggtttattcggacaatcctggccgtaacaaggccctttatcagtagtaagttctcctctaaaatcaagtacgtgaattctctgtccgagctcagtggccttattcccatggactgtattcatattcctgaatctatcatcaactactag

SEQ ID NO: 310043 - DNA, 9164 bp, Artificial Sequence
  derived and/or modified sequence
cggaatttgatgcacagaatgaaggagtctgaaaaccggtcaaaaagacttgagaaagtgcacgttgtgatcgggccaaagtcgtgtgatctggacagcctgatatctaccttcacctatgcctacttcttggataaggtgagcccgcctggcgtgctttgcctgccagtgttaaatatacctcgcacagagtttaattacttcactgaaactcggtttattttagaggaactgaatatcagtgagtcctttcacatattcagggacgagatcaacttgcatcagctgaatgacgaagggaagttgtctatcacactcgttggtagcagtgtcctggcctcagaggacaagacccttgagtcagccgtggtgaaggtgattaaccccgtggagcagagcgacgcaaatgtggaatttagggagagcagcagcagcctggttcttaaagaaatacttcaggaagcacccgaactcattacagagcagctagcacacagactgagaggctcaattctgtttaagtggatgactatggagagcgaaaaaatttcagagaagcaggaggaaatcctctctattctcgaggagaaatttcccaacctgccacctcgggaggatatcataaatgtgctgcaagagacacagttcagcgcacaggggctgtctatcgagcaaaccatgctgaaagacctgaaggaactgtctgacggagagattaaagtcgctataagtacagtcagcatgaaccttgagaattgtttgtttcacagcaatatcacctcagacctgaaagcctttaccgataaatttggttttgacgttctgatcttattttcctcatatctttccgaggagcagcaacctcggagacagatagcagtctacagtgagaacatggaactgtgtagtcagatttgctgtgaacttgaggagtgtcaaaacccatgcctggagctcgaaccattcgattgcggatgcgatgaaattctggtgtaccagcaagaagaccccagcgtgacttgtgaccaggtcgtcctggtagtgaaggaggtaattaaccgaaggtgcccagagatggtgtctaacagcaggacctcctctacagaggccgtggccggtagtgctcccctcagtcagggtagcagtggcatcatggagctctacggatcagacatagagccacagcccagctccgtcaacttcatcgagaatccacctgatcttaacgattctaaccaggctcaggtggacgccaatgtggatttggtatcgcctgactctgggctggctaccatccggtctagtcgaagcagtaaggaatcctccgtgttcttatctgacgacagtcccgttggagagggcgcagggcctcaccacactctcttacccggattagactcctacagtccgatccctgagggagccgttgccgaagagcacgcctggagtggcgagcatggagaacattttgaccttttcaattttgacccagcaccaatggcaagcggccaaagccagcagtcctctcattccgcggattattctccagctgacgatttcttccctaattctgatctgtccgaagggcagctgcccgctgggcctgagggccttgatggaatgggtaccaacatgtcaaattattcatcttcatccctgctgtccggcgctggcaaagactccttggtggagcacgacgaagagtttgtgcagcggcaggatagtcctagggacaactccgaaagaaaccttagcttaaccgattttgtgggggacgaaagcccgtccccggagcgcttaaaaaatacaggaaagaggatccctccaaccccaatgaattccctggtggagtcctccccttcaaccgaagaaccggctagtctgtatactgaggatatgacacagaaagccaccgacactggccacatggggcctcctcagactcatgcccgttgctcatcctggtggggtggtctggagatcgactctaagaacattgcagatgcctggagctcttccgagcaggaatccgtttttcagtctcctgaatcctggaaggagcacaagccgtcttccatagatcggagggcaagcgactcagtattccaaccaaaaagtctcgagtttaccaaatccgggccttgggaatccgaatttggtcagcctgagctgggcagcaatgatatacaggacaaaaatgaggagtctctccccttccagaacctgcccatggaaaaatcacctcttcctaacacatcacctcagggaactaatcatctgatcgaagatttcgccagtctctggcattcagggaggagcccgacagccatgccagaaccctgggggaaccccaccgacgacggtgaaccggctgctgtcgctccattccccgcttggtccgcatttggcaaagaggaccatgacgaagccctcaaaaacacctggaacctgcatcccactagcagcaagacgccatccgtcagagaccccaatgagtgggccatggctaaatctggcttcgcattctcaagcagcgagctgctggacaacagccccagcgagattaacaacgaggcggctcctgaaatctgggggaagaagaacaatgactctcgtgaccacatcttcgctccgggaaatccgtcctccgacctggaccacacctggaccaacagtaagccgcctaaagaggatcaaaacggtctggtggaccctaagaccagaggaaaggtttacgaaaaggtcgactcctggaatctgttcgaagagaatatgaaaaagggcggttccgacgtgctggtgccttgggaggactcattcctgtcctacaagtgcagtgactactccgcctctaacctaggcgaggatagcgtgcccagccctctggacaccaactactctacgtctgattcctacacctctcccacgtttgccggtgatgagaaggaaacagagcacaagccatttgccaaggaagaaggtttcgaaagcaaagatggcaacagcacagccgaggagactgacatcccccctcagtcacttcagcagtctagccgcaaccgcatttcctccggcccaggaaacctggacatgtgggcctcaccgcatacagacaattccagtgaaattaatacgacccataacctggacgagaacgagcttaagacagaacatacggacggtaaaaacatctctatggaggacgacgtcggtgaaagtagccagagctcgtacgatgacccttccatgatgcagctctataacgagacgaaccgccagctgactctgctgcacagctccaccaactcacggcaaaccgctcctgacagccttgacctgtggaatcgtgtgatcctcgaggatacacaaagcaccgccacgatcagtgatatggataatgatttggattgggacgattgctcaggcggtgcagcaattccttccgacgggcagactgaggggtacatggcggaaggatctgagcctgagactcgtttcaccgtccggcagttagaaccatgggggctcgaataccaagaagctaaccaggtggactgggaactcccagccagtgacgaacacaccaaggattccgccccatcagaacaccacactctgaacgaaaaatccgggcagctgatcgctaattccatttgggactcagtcatgcgcgataaggacatgagtagctttatgttaccgggttcaagtcatatcaccgactcagagcaacgagagctgcccccagaaattcccagccatagcgccaacgtgaaggacactcactcccccgacgcaccagccgcaagcggcacatccgagtccgaagccctgattagtcatttggacaagcaggacactgagagagagacattacaatcagatgccgcatctcttgccacaagattggaaaaccccggatacttcccacaccctgacccctggaaggggcacggagacggccaatcagaatcagagaaagaagctcagggcgctaccgaccgcggacaccttgatgaggaagaggtaattgcctccggcgtcgaaaatgcctccgggataagtgaaaagggtcagtccgaccaggaattgtcctctctggtggctagcgagcatcaggagatttgtatcaagtccggcaagatcagttccctcgcagtcaccttttcgccgcagaccgaggagcctgaagaggtcctggagtacgaggagggatcctataatctggacagtagggacgtgcagacgggcatgtctgccgataacttgcagccaaaagatacacatgagaaacacttgatgtctcagcgcaactccggagaaacaactgaaacatccgacggcatgaacttcaccaagtacgtcagtgtgcctgaaaaggacctggaaaaaactgaggaatgcaatttcctcgaacctgaaaacgttggcggaggaccaccccaccgtgtcccaagatccttagattttggcgacgtgcctatcgactctgacgtgcacgtgagctccacttgcagcgagataaccaaaaacctggacgtgaagggcagcgagaatagtctgccaggtgccggaagttctggcaatttcgatagagataccatttcctcagaatatacacatagcagtgcttctagtcccgaactgaacgatagttccgtcgctctttctagttggggacagcaacctagctcagggtatcaggaggagaaccaggggaattggagcgagcagaaccaccaggagtctgagctgatcacgactgatggacaggtggaaatcgtcacgaaggtgaaagatctcgagaagaataggatcaacgaatttgaaaagagtttcgatcgcaagacacccaccttcctggagatctggaacgattcagtcgacggtgactctttctcctccctctcatcaccagagaccgggaagtacagcgagcactctggcacccaccaggaaagcaacctgattgcttcctaccaggagaagaatgaacacgacattagcgcaacggttcagcccgaagatgctcgcgtgatcagcacctcttcaggctcagacgacgatagcgttggcggagaggaatcgatcgaagaggagatccaggttgctaactgtcatgtcgcggaagacgagagtcgggcttgggattcccttaatgagagcaacaagttcttggttacggcagatcccaagtcggaaaatatctacgactacctggacagttcagagcctgccgagaacgagaataaaagcaatcccttttgtgacaatcagcagtcatcacccgacccttggaccttctccccattgactgagactgagatgcagataactgcggtggagaaggagaaaaggagtagtcccgaaaccggcactaccggcgacgtggcctggcagatttccccaaaagccagctttcccaagaacgaggacaattctcagctcgaaatgttagggtttagcgccgatagcaccgaatggtggaaggctagtccacaggagggtagactgattgagtcaccctttgagagggagttgtctgatagcagcggtgtactggaaattaactcctcggtgcatcaaaacgcaagtccttggggagttccggtgcagggagacatagagcccgttgaaactcattacaccaatcccttttcagacaaccaccagtcacccttcttggagggcaacggcaaaaattcccatgagcagctctggaatattcagcccaggcagccagaccctgacgcggacaagttctctcagctagtgaagttggaccaaatcaaggaaaaagactcacgagagcagaccttcgtgtctgctgccggagacgagctgactccagaaactccgacgcaggaacaatgccaagacacgatgttgccggtttgtgaccatcctgatactgcatttacacatgccgaggagaattcctgtgtgacatcaaacgtatcaacaaacgagggccaagagaccaaccagtgggagcaggagaagagctatctgggggagatgactaactcaagcatcgccaccgaaaactttcccgctgtgtccagtcctacacagctcatcatgaaaccgggaagtgagtgggatggatctacgcccagcgaagattcccgcggaactttcgtgcccgacatcctacacggaaattttcaggagggtggccagttagcttctgcagctccggacctgtggattgacgctaaaaagccattctctctaaaagcagatggcgaaaatcccgacattctcacgcactgtgaacatgactctaattcccaagcatctgactcacccgacatctgccatgacagtgaggccaagcaagaaactgagaagcatctgtccgcgtgtatgggtccggaagtggaaagctccgagctttgcctaacagaaccagagattgacgaggagccaatttatgagccgggtagggagtttgtgccctcaaacgcagagttggattcggagaatgctaccgtgcttccgcctatcggctaccaggccgacatcaaaggttccagtcaacctgcttcgcacaagggcagccccgaaccatcagagatcaatggcgacaactccacaggcttacaggtgtccgaaaaaggggcttcccctgacatggccccaatcctagagccagtcgatagacgcattcccaggatcgaaaatgtggccactagtatcttcgtgactcatcaagagcccacgcccgaaggcgatggctcatggatatctgacagtttctcccctgaatcccaacctggggcacgcgctttattcgatggagaccctcatctgagcactgagaacccagctctggtcccggatgctttattggcaagcgatacatgtttggatataagcgaggccgcttttgatcattcattctctgacgccagcggcttgaatacatctacagggacaatagacgacatgtcgaagttgacactctctgagggccacccagagacgcctgtggatggagatttggggaagcaagacatttgctcttcagaggcgtcgtggggggacttcgagtatgacgtaatgggacaaaacattgacgaagacttactgagggagcccgaacactttctgtacggcggtgatccaccccttgaggaggactccctgaagcagtccttagccccttatacaccacctttcgatctgagttatttaactgagccggcacagtccgccgaaaccatcgaggaagcaggctcacctgaagacgagagcctgggatgccgcgctgctgaaattgtcttgtcagcgctgcctgaccgaaggtctgagggaaatcaggccgaaactaagaacagactccctggcagtcagctggctgtactccacatccgcgaggacccagaatccgtgtatctgcctgtaggagccggttcaaatatcttatcccctagcaacgtggattgggaggtggagaccgataacagcgacttgcctgctggcggagatattggccctcccaatggcgcttcgaaagaaattagcgagttagaggaagagaagacaatacccactaaagaaccggaacagatcaaaagcgaatacaaagaagagaggtgtaccgagaagaacgaagatcgccatgccctgcacatggactatatcctggtgaatcgagaggagaactctcattccaaacccgaaacctgtgaggaacgagagtcaatcgcagagctggagctgtatgtcggaagcaaggaaactggattgcaaggcacccagctagccagcttccccgatacctgtcagcccgcttctctaaatgagcggaagggtctgtctgccgagaagatgagttcaaaaagtgacacccgtagcagcttcgaaagtccagcccaggatcagtcctggatgtttctggggcacagcgaagttggagatcccagcctagatgccagagacagtgggccaggttggtccggaaaaacggtagagccattttctgagctcggattgggcgagggtcctcagctccagattttggaggagatgaagccattggaaagcctggccctggaggaagcttccggccctgtgtctcagtctcaaaaatccaagagcaggggcagagccggacccgacgcggtgacactgcaagcggtgacccacgacaatgagtgggagatgctgtctcctcaaccagtgcaaaagaacatgattcctgatacggagatggaggaggagaccgaattcctggaactgggcactcgcatctcccggccaaacggactgctctcagaggacgtgggaatggacatcccctttgaagaaggcgtgctgagcccatctgccgctgacatgagaccagagcctccaaattctctggatctgaacgatacacacccaagacggattaaactgactgctcctaatatcaatctgtcattggaccagtccgaaggcagcatcctatctgacgacaatctggatagtcctgatgaaatcgatatcaacgtggatgagctggacacccctgatgaagcagacagttttgagtacaccggccatgaggatcccaccgccaataaagattccggacaggagtccgagtccattccagaatacacagcagaagaagaaagggaagacaatcgattgtggcggaccgtcgtcatcggggaacaggagcaacgaatcgacatgaaggttattgagccctatagacgcgtaatcagtcacggtggcagcagaggatattacggcgacggtctgaacgctattattgttttcgcagcatgtttcctaccggatagctcccgagcggactaccattatgtaatggagaatctattcctttatgtgatttctacactggaactgatggtagcggaggactatatgatagtttacctgaacggcgctactcctcggagaagaatgccaggcctcgggtggatgaaaaagtgttaccaaatgattgacagacgcctgcgaaaaaaccttaagtcttttatcatcgtgcatccgtcctggttcatccggacgattttggcggttacccgacctttcatctcctccaaattctcttctaagatcaaatatgtcaactcactgagtgagctcagcggactgatccctatggactgcatccatatcccggagtctataatcaactacta

SEQ ID NO: 310044 - DNA, 9162 bp, Artificial Sequence
  derived and/or modified sequence
aggaacttgatgcataggatgaaggaaagtgagaatcgaagcaaacgcttggagaaggtccatgtggttattgggcctaaatcgtgtgacttggattctctcatttctaccttcacatatgcttactttctagacaaggtcagtccaccaggggttctgtgtttaccagtgctgaacataccaagaactgaattcaactacttcaccgagacgaggtttattttagaagagctaaatatttccgaatcattccacatattccgggatgaaattaacctgcatcagctaaatgatgaagggaagttatcgataacacttgttggcagcagtgtgctggcgagtgaagacaaaactttagaatcagcagttgtcaaagtcattaatccggttgagcagagcgatgccaacgttgagttccgagagtcttcctcttctctcgtgctaaaggagattctccaagaggctcctgagctcatcaccgagcaactggctcatcgcctcagaggtagcattcttttcaagtggatgaccatggaatcagagaagatctcagagaagcaggaggaaattctttctatcctggaagaaaaatttcctaacttgcctccaagagaggacatcatcaacgtcctacaggagacccagttcagtgctcagggtttaagtattgaacagacaatgttgaaagatctaaaggagctgtcagatggagaaataaaagtggccattagtactgtgagcatgaaccttgagaattgtctatttcacagcaatattaccagtgacttgaaagcatttacagacaagtttggttttgatgtcctcatcctgttctccagctatctgtcagaggagcagcagccgagacgacagattgctgtgtactcagaaaacatggagctgtgcagtcagatttgctgtgagctggaagagtgtcagaacccttgcctagaactggagccctttgactgtggctgtgatgagatcctggtgtaccaacaagaggacccttcagtgacttgtgatcaggtggttctcgttgtcaaggaagtcatcaacaggaggtgtccagagatggtctccaatagccggacatcctcaacagaagccgtggcaggcagtgcccccctctcccaggggtcttctgggattatggaattgtatggttctgacatagagccacaacccagctctgtgaatttcatagagaaccctccagatctcaatgattctaaccaggctcaggtggatgccaatgtagaccttgttagcccagacagcggactggctaccattaggagcagccgctcatccaaggagagctctgttttcctcagtgacgacagccccgtgggagaaggtgctgggcctcaccacacccttctcccagggcttgactcctacagccccatccctgaaggggcggtggcggaggaacatgcatggtctggagaacacggtgagcacttcgacctcttcaattttgacccagcacccatggcttctgggcagtcccagcaatcttctcattctgcagactactccccagcagatgacttcttccccaacagtgacctgtcagaaggacagctccccgctgggcctgaaggacttgatggcatgggaaccaacatgtctaattattcatccagttcacttttgtcaggggctggcaaagatagccttgtggaacatgatgaggagtttgtccagagacaagacagtcccagagataactctgaaagaaatttgagcctgacagattttgtgggagatgaatccccttccccagaaaggctaaaaaatactggaaagaggatcccaccaacacccatgaatagtttagtagaaagctcgccatccactgaagaaccagcctcactctatacagaagatatgacccaaaaagcaactgacacaggtcacatggggccacctcagacccatgcacggtgcagcagctggtggggtggtttggaaattgactccaaaaatattgcagatgcgtggagttccagtgaacaggaatctgttttccagagccctgaatcatggaaagagcataagccaagctccattgataggagagcctcagattctgtatttcaaccaaagagcctcgaatttacaaagtcaggtccctgggagtctgaatttggtcagcctgaactgggtagcaatgatattcaagacaaaaatgaggaaagcttgccgttccagaacctgcccatggagaagtcacctttgccaaatacatctccccaaggaacaaaccacctgatagaagactttgcttctttgtggcattctggtcgctctcccacagccatgcccgagccctggggaaatcctacagatgatggtgaaccagcagctgtggcgccattcccagcctggagtgcatttggtaaagaagatcatgatgaagctttaaaaaatacctggaatttgcacccaacaagcagcaagacaccttctgttagggacccgaatgagtgggccatggcaaaaagtgggtttgccttttcttcttcagaactactggacaattcacccagtgagataaacaatgaagcagctccagaaatctggggcaagaaaaacaatgactccagggatcacatctttgcacctggaaatcccagttctgatctggatcacacatggactaattctaagccaccaaaagaagatcagaatggtttagtggatcctaaaactaggggcaaggtatatgaaaaggtagattcctggaacctttttgaggagaatatgaagaaaggagggtcagatgtcctagttccttgggaagattccttcttatcttacaaatgttctgattacagtgcatccaacctaggagaagattcggtgccttcccccttagataccaattattccacctcagactcttacacatcaccaacatttgctggagacgaaaaggaaactgaacacaagccatttgctaaagaggaaggttttgagtcaaaagatggtaactccacggcagaggagactgacattcctcctcagtcactgcaacagtcatctcgaaatcgaatcagttcaggtcctgggaacctagacatgtgggcttcacctcatacagataacagttctgaaataaataccactcacaacctggatgaaaatgaactcaagacagagcacacagatggtaagaatatctccatggaggatgacgtcggggaaagcagccagtccagttacgacgaccccagcatgatgcaactgtacaatgaaacaaaccgacaactcacacttttgcacagcagcaccaactcccggcagacggcccctgacagtctcgacttgtggaacagagtgattttggaggatactcagtccactgcaacgatctcagatatggacaatgatttggactgggatgactgcagtgggggtgcggcaatccccagtgatggtcaaacagaaggatacatggctgaaggttccgagccggaaacccgatttacagtgagacagctggaaccctggggcttggagtatcaggaagcaaatcaggtagattgggagctccctgcctctgatgagcataccaaggacagtgctcccagtgaacatcacacattgaatgagaaaagtgggcagctaattgcaaacagtatttgggattctgtcatgagagataaagacatgtcatcattcatgttaccaggctcctcacatatcacagattcagagcaaagggaattgcctcctgaaatccccagccattcagcaaatgttaaagacactcattccccagatgcgccagcagcctctggaaccagtgaatcagaggcacttatatctcatcttgacaagcaggacacagagagggaaaccctgcaaagtgatgcagcatccttggcgactaggcttgagaatccagggtattttccacacccagatccatggaaaggtcatggcgatggacaaagtgaaagtgagaaggaagcccagggagccactgacagggggcaccttgatgaagaggaggtgatcgcctctggtgtggagaatgcctcagggatttctgaaaaagggcagagtgaccaggaactgtcttctctggttgcatctgaacatcaggaaatctgcattaaatcaggcaaaatcagctctcttgctgtcactttcagtcctcaaaccgaggaaccagaggaagttttagagtatgaggaggggtcttacaatctagactcccgtgatgtgcaaacagggatgtccgcagataacctgcagccaaaagatacccatgaaaaacacctcatgagtcaaagaaattcaggtgaaactactgagacttcagatgggatgaatttcacaaaatatgtatctgtacctgaaaaggatcttgagaaaactgaagaatgtaactttctagagccagagaacgtgggtggagggccacctcacagagttccccgaagtcttgattttggggacgtccctatagacagtgatgtgcatgtcagcagcacatgttctgagataaccaaaaatcttgacgttaaggggtctgaaaatagccttccaggagccggttcgtctggaaattttgacagagatactatttctagtgagtatactcattcaagtgcatcaagtcctgagttaaatgactcttcagttgcactgtcctcctggggccagcaacccagttctgggtatcaagaagaaaaccaaggcaactggagtgaacagaatcaccaagaatctgaactaattaccactgatggccaagtagaaatagttaccaaagtgaaggatttagagaaaaacagaataaatgagtttgaaaagagctttgatcgcaaaactcctacatttttagagatctggaatgactcagttgatggtgattccttttcctctttatccagtcctgaaacaggcaaatattctgaacattcagggacacatcaggaaagcaatctaattgctagctaccaggagaaaaatgaacatgacatttctgcaactgtgcagccagaggatgccagggtcatttcaacaagctcaggttctgatgatgacagtgtcggtggtgaagagtcaatagaggaagagatccaggtggccaactgccacgttgctgaggatgaatccagagcttgggattcattgaatgaatctaataagttcttggtcacagctgatcctaagtctgaaaatatttatgactacctagacagctcagagccagcagagaatgagaataagtcaaacccattctgtgacaatcaacaaagcagccctgatccctggactttctcaccattaacggagactgaaatgcagattacagcagtggagaaggagaagagatcttctccagaaacagggacaacaggagatgttgcatggcaaatatctcccaaagcttcgttcccaaagaacgaagataattctcaactggaaatgctgggcttctcagctgatagcactgagtggtggaaggcctcaccccaggaagggagactaattgaaagtccatttgaaagggagctgtctgactccagtggtgtgttggagataaattcttcagtacaccaaaatgccagtccctggggagtaccagttcagggtgatattgagcccgtggaaacacactatactaatccttttagtgacaaccatcagtcaccctttctggaaggtaatgggaagaactcccatgagcaactctggaacattcaaccaaggcagccagacccagatgctgacaagttcagccagcttgtaaaattagaccaaattaaagaaaaggactcaagagagcaaacctttgtgtctgctgctggtgatgagctgactcctgaaacacctacccaagagcagtgtcaggacaccatgctgccagtctgtgatcatccggacacagcctttactcacgcagaggaaaatagttgtgttacatctaatgtttcaactaatgaaggtcaagaaacaaatcagtgggaacaagaaaaatcatacctaggtgagatgacaaattcaagcattgccacagaaaattttcctgctgtcagttctcccacccaactgataatgaagccaggctctgaatgggatggctctaccccaagtgaggactcccgaggtacctttgtgccagatattttacatggcaactttcaagagggtgggcagctggcctctgccgcgcctgacttgtggatagatgctaagaagcccttcagtttgaaagcagatggtgagaatcctgatatcctgacgcactgcgaacatgacagcaattctcaggcttccgacagccctgatatatgtcacgattctgaagcaaagcaagagactgagaagcacctcagtgcttgcatgggacctgaagtggaatccagtgagctttgtctcactgagccagagatagatgaagaacccatttatgagcctggacgggagtttgtcccatccaatgcagaactcgattctgaaaacgcaactgtgctgcctccaattggctatcaagcagacataaagggctcctctcagcccgcctctcataaaggttcacctgaaccttctgaaataaacggtgacaacagtacaggtttacaagtatcagaaaaaggagccagcccagatatggcaccaattttggaaccagttgacagaagaatcccaaggattgaaaatgtggcaactagcatttttgtaactcaccaagagccaactccagaaggtgacggttcttggatatcagacagcttttctcctgaaagtcagcctggtgcaagagctttgtttgatggtgatccacatttatccacagagaatcctgccttggttcctgatgctttgctagcctcagacacttgtctggatataagcgaagctgcctttgaccacagtttcagcgatgcctcaggtctcaacacatccacgggaacaatagatgacatgagtaaactgacattatccgaaggccatccggaaacgccagttgatggggacctagggaagcaagatatctgctcatctgaagcctcgtggggtgattttgaatatgatgtaatgggccagaatatcgatgaagatttactgagagagcctgaacacttcctgtatggtggtgaccctcctttggaggaagattctctgaagcagtcgctggcaccgtacacacctccctttgatttgtcttatctcacagaacctgcccagagtgctgaaacaatagaggaagctgggtctccagaggatgaatctctgggatgcagagcagcagagatagtgctttctgcacttcctgatcgaagaagtgagggaaaccaggctgagaccaaaaacagactgcctggatcccagctggctgtgctgcatattcgtgaagaccctgagtccgtttatttgccggtaggagcaggctccaacattttgtctccatcaaacgttgactgggaagtagaaacagataattctgatttaccagcaggtggagacataggaccaccaaatggtgccagcaaggaaatatcagaattggaagaagaaaaaacaattcctaccaaagagcctgagcagataaaatcagaatacaaggaagaaagatgtacagagaagaatgaagatcgtcatgcactacacatggattacatacttgtaaaccgtgaagaaaattcacactcaaagccagagacctgtgaagaaagagaaagcatagctgaattagaattgtatgtaggttccaaagaaacagggctgcagggaactcagttagcaagcttcccagacacatgtcagccagcctccttaaatgaaagaaaaggtctctctgcagagaaaatgtcttctaaaagcgatacgagatcatcttttgaaagccctgcacaagaccagagttggatgttcttgggccatagtgaggttggtgatccatcactggatgccagggactcagggcctgggtggtctggcaagactgtggagccgttctctgaactcggcttgggtgagggtccccagctgcagattctggaagaaatgaagcctctagaatctttggcactagaggaagcctctggtccagtcagccaatcacagaagagtaagagccgaggcagggctggcccggatgcagttacgttgcaggctgtcacccatgacaatgaatgggaaatgctttcaccacagcctgttcagaaaaacatgatccctgacacggaaatggaggaggagacagagttccttgagctcggaaccaggatatcaagaccaaatggactactgtcagaggatgtaggaatggacatcccctttgaagagggcgtgctgagtcccagtgctgcagacatgaggcctgaacctcctaattctctggatcttaatgacactcatcctcggagaatcaagctcacagccccaaatatcaatctttctctggaccaaagtgaaggatctattctctctgatgataacttggacagtccagatgaaattgacatcaatgtggatgaacttgatacccccgatgaagcagattcttttgagtacactggccatgaagatcccacagccaacaaagattctggccaagagtcagagtctattccagaatatacggccgaagaggaacgggaggacaaccggctttggaggacagtggtcattggagaacaagagcagcgcattgacatgaaggtcatcgagccctacaggagagtcatttctcacggaggtagtcgaggatactatggggacggtctaaatgccatcattgtgtttgccgcctgttttctgccagacagcagtcgggcggattaccactatgtcatggaaaatcttttcctatatgtaataagtactttagagttgatggtagctgaagactatatgattgtgtacttgaatggtgcaaccccaagaaggaggatgccagggctaggctggatgaagaaatgctaccagatgattgacagacggttgaggaagaatttgaaatcattcatcattgttcatccatcttggttcatcagaacaatccttgctgtgacacgaccttttataagttcaaaattcagcagtaaaattaaatatgtcaatagcttatcagaactcagtgggctgatcccaatggattgcatccacattccagagagcatcatcaattat

SEQ ID NO: 310045 - DNA, 9165 bp, Artificial Sequence
  derived and/or modified sequence
agaaacctgatgcacagaatgaaggagagcgagaacagaagcaagagactggagaaggtgcacgtggtgatcggccccaagagctgcgacctggacagcctgatcagcaccttcacctacgcctacttcctggacaaggtgagcccccccggcgtgctgtgcctgcccgtgctgaacatccccagaaccgagttcaactacttcaccgagaccagattcatcctggaggagctgaacatcagcgagagcttccacatcttcagagacgagatcaacctgcaccagctgaacgacgagggcaagctgagcatcaccctggtgggcagcagcgtgctggccagcgaggacaagaccctggagagcgccgtggtgaaggtgatcaaccccgtggagcagagcgacgccaacgtggagttcagagagagcagcagcagcctggtgctgaaggagatcctgcaggaggcccccgagctgatcaccgagcagctggcccacagactgagaggcagcatcctgttcaagtggatgaccatggagagcgagaagatcagcgagaagcaggaggagatcctgagcatcctggaggagaagttccccaacctgccccccagagaggacatcatcaacgtgctgcaggagacccagttcagcgcccagggcctgagcatcgagcagaccatgctgaaggacctgaaggagctgagcgacggcgagatcaaggtggccatcagcaccgtgagcatgaacctggagaactgcctgttccacagcaacatcaccagcgacctgaaggccttcaccgacaagttcggcttcgacgtgctgatcctgttcagcagctacctgagcgaggagcagcagcccagaagacagatcgccgtgtacagcgagaacatggagctgtgcagccagatctgctgcgagctggaggagtgccagaacccctgcctggagctggagcccttcgactgcggctgcgacgagatcctggtgtaccagcaggaggaccccagcgtgacctgcgaccaggtggtgctggtggtgaaggaggtgatcaacagaagatgccccgagatggtgagcaacagcagaaccagcagcaccgaggccgtggccggcagcgcccccctgagccagggcagcagcggcatcatggagctgtacggcagcgacatcgagccccagcccagcagcgtgaacttcatcgagaacccccccgacctgaacgacagcaaccaggcccaggtggacgccaacgtggacctggtgagccccgacagcggcctggccaccatcagaagcagcagaagcagcaaggagagcagcgtgttcctgagcgacgacagccccgtgggcgagggcgccggcccccaccacaccctgctgcccggcctggacagctacagccccatccccgagggcgccgtggccgaggagcacgcctggagcggcgagcacggcgagcacttcgacctgttcaacttcgaccccgcccccatggccagcggccagagccagcagagcagccacagcgccgactacagccccgccgacgacttcttccccaacagcgacctgagcgagggccagctgcccgccggccccgagggcctggacggcatgggcaccaacatgagcaactacagcagcagcagcctgctgagcggcgccggcaaggacagcctggtggagcacgacgaggagttcgtgcagagacaggacagccccagagacaacagcgagagaaacctgagcctgaccgacttcgtgggcgacgagagccccagccccgagagactgaagaacaccggcaagagaatcccccccacccccatgaacagcctggtggagagcagccccagcaccgaggagcccgccagcctgtacaccgaggacatgacccagaaggccaccgacaccggccacatgggccccccccagacccacgccagatgcagcagctggtggggcggcctggagatcgacagcaagaacatcgccgacgcctggagcagcagcgagcaggagagcgtgttccagagccccgagagctggaaggagcacaagcccagcagcatcgacagaagagccagcgacagcgtgttccagcccaagagcctggagttcaccaagagcggcccctgggagagcgagttcggccagcccgagctgggcagcaacgacatccaggacaagaacgaggagagcctgcccttccagaacctgcccatggagaagagccccctgcccaacaccagcccccagggcaccaaccacctgatcgaggacttcgccagcctgtggcacagcggcagaagccccaccgccatgcccgagccctggggcaaccccaccgacgacggcgagcccgccgccgtggcccccttccccgcctggagcgccttcggcaaggaggaccacgacgaggccctgaagaacacctggaacctgcaccccaccagcagcaagacccccagcgtgagagaccccaacgagtgggccatggccaagagcggcttcgccttcagcagcagcgagctgctggacaacagccccagcgagatcaacaacgaggccgcccccgagatctggggcaagaagaacaacgacagcagagaccacatcttcgcccccggcaaccccagcagcgacctggaccacacctggaccaacagcaagccccccaaggaggaccagaacggcctggtggaccccaagaccagaggcaaggtgtacgagaaggtggacagctggaacctgttcgaggagaacatgaagaagggcggcagcgacgtgctggtgccctgggaggacagcttcctgagctacaagtgcagcgactacagcgccagcaacctgggcgaggacagcgtgcccagccccctggacaccaactacagcaccagcgacagctacaccagccccaccttcgccggcgacgagaaggagaccgagcacaagcccttcgccaaggaggagggcttcgagagcaaggacggcaacagcaccgccgaggagaccgacatccccccccagagcctgcagcagagcagcagaaacagaatcagcagcggccccggcaacctggacatgtgggccagcccccacaccgacaacagcagcgagatcaacaccacccacaacctggacgagaacgagctgaagaccgagcacaccgacggcaagaacatcagcatggaggacgacgtgggcgagagcagccagagcagctacgacgaccccagcatgatgcagctgtacaacgagaccaacagacagctgaccctgctgcacagcagcaccaacagcagacagaccgcccccgacagcctggacctgtggaacagagtgatcctggaggacacccagagcaccgccaccatcagcgacatggacaacgacctggactgggacgactgcagcggcggcgccgccatccccagcgacggccagaccgagggctacatggccgagggcagcgagcccgagaccagattcaccgtgagacagctggagccctggggcctggagtaccaggaggccaaccaggtggactgggagctgcccgccagcgacgagcacaccaaggacagcgcccccagcgagcaccacaccctgaacgagaagagcggccagctgatcgccaacagcatctgggacagcgtgatgagagacaaggacatgagcagcttcatgctgcccggcagcagccacatcaccgacagcgagcagagagagctgccccccgagatccccagccacagcgccaacgtgaaggacacccacagccccgacgcccccgccgccagcggcaccagcgagagcgaggccctgatcagccacctggacaagcaggacaccgagagagagaccctgcagagcgacgccgccagcctggccaccagactggagaaccccggctacttcccccaccccgacccctggaagggccacggcgacggccagagcgagagcgagaaggaggcccagggcgccaccgacagaggccacctggacgaggaggaggtgatcgccagcggcgtggagaacgccagcggcatcagcgagaagggccagagcgaccaggagctgagcagcctggtggccagcgagcaccaggagatctgcatcaagagcggcaagatcagcagcctggccgtgaccttcagcccccagaccgaggagcccgaggaggtgctggagtacgaggagggcagctacaacctggacagcagagacgtgcagaccggcatgagcgccgacaacctgcagcccaaggacacccacgagaagcacctgatgagccagagaaacagcggcgagaccaccgagaccagcgacggcatgaacttcaccaagtacgtgagcgtgcccgagaaggacctggagaagaccgaggagtgcaacttcctggagcccgagaacgtgggcggcggccccccccacagagtgcccagaagcctggacttcggcgacgtgcccatcgacagcgacgtgcacgtgagcagcacctgcagcgagatcaccaagaacctggacgtgaagggcagcgagaacagcctgcccggcgccggcagcagcggcaacttcgacagagacaccatcagcagcgagtacacccacagcagcgccagcagccccgagctgaacgacagcagcgtggccctgagcagctggggccagcagcccagcagcggctaccaggaggagaaccagggcaactggagcgagcagaaccaccaggagagcgagctgatcaccaccgacggccaggtggagatcgtgaccaaggtgaaggacctggagaagaacagaatcaacgagttcgagaagagcttcgacagaaagacccccaccttcctggagatctggaacgacagcgtggacggcgacagcttcagcagcctgagcagccccgagaccggcaagtacagcgagcacagcggcacccaccaggagagcaacctgatcgccagctaccaggagaagaacgagcacgacatcagcgccaccgtgcagcccgaggacgccagagtgatcagcaccagcagcggcagcgacgacgacagcgtgggcggcgaggagagcatcgaggaggagatccaggtggccaactgccacgtggccgaggacgagagcagagcctgggacagcctgaacgagagcaacaagttcctggtgaccgccgaccccaagagcgagaacatctacgactacctggacagcagcgagcccgccgagaacgagaacaagagcaaccccttctgcgacaaccagcagagcagccccgacccctggaccttcagccccctgaccgagaccgagatgcagatcaccgccgtggagaaggagaagagaagcagccccgagaccggcaccaccggcgacgtggcctggcagatcagccccaaggccagcttccccaagaacgaggacaacagccagctggagatgctgggcttcagcgccgacagcaccgagtggtggaaggccagcccccaggagggcagactgatcgagagccccttcgagagagagctgagcgacagcagcggcgtgctggagatcaacagcagcgtgcaccagaacgccagcccctggggcgtgcccgtgcagggcgacatcgagcccgtggagacccactacaccaaccccttcagcgacaaccaccagagccccttcctggagggcaacggcaagaacagccacgagcagctgtggaacatccagcccagacagcccgaccccgacgccgacaagttcagccagctggtgaagctggaccagatcaaggagaaggacagcagagagcagaccttcgtgagcgccgccggcgacgagctgacccccgagacccccacccaggagcagtgccaggacaccatgctgcccgtgtgcgaccaccccgacaccgccttcacccacgccgaggagaacagctgcgtgaccagcaacgtgagcaccaacgagggccaggagaccaaccagtgggagcaggagaagagctacctgggcgagatgaccaacagcagcatcgccaccgagaacttccccgccgtgagcagccccacccagctgatcatgaagcccggcagcgagtgggacggcagcacccccagcgaggacagcagaggcaccttcgtgcccgacatcctgcacggcaacttccaggagggcggccagctggccagcgccgcccccgacctgtggatcgacgccaagaagcccttcagcctgaaggccgacggcgagaaccccgacatcctgacccactgcgagcacgacagcaacagccaggccagcgacagccccgacatctgccacgacagcgaggccaagcaggagaccgagaagcacctgagcgcctgcatgggccccgaggtggagagcagcgagctgtgcctgaccgagcccgagatcgacgaggagcccatctacgagcccggcagagagttcgtgcccagcaacgccgagctggacagcgagaacgccaccgtgctgccccccatcggctaccaggccgacatcaagggcagcagccagcccgccagccacaagggcagccccgagcccagcgagatcaacggcgacaacagcaccggcctgcaggtgagcgagaagggcgccagccccgacatggcccccatcctggagcccgtggacagaagaatccccagaatcgagaacgtggccaccagcatcttcgtgacccaccaggagcccacccccgagggcgacggcagctggatcagcgacagcttcagccccgagagccagcccggcgccagagccctgttcgacggcgacccccacctgagcaccgagaaccccgccctggtgcccgacgccctgctggccagcgacacctgcctggacatcagcgaggccgccttcgaccacagcttcagcgacgccagcggcctgaacaccagcaccggcaccatcgacgacatgagcaagctgaccctgagcgagggccaccccgagacccccgtggacggcgacctgggcaagcaggacatctgcagcagcgaggccagctggggcgacttcgagtacgacgtgatgggccagaacatcgacgaggacctgctgagagagcccgagcacttcctgtacggcggcgacccccccctggaggaggacagcctgaagcagagcctggccccctacaccccccccttcgacctgagctacctgaccgagcccgcccagagcgccgagaccatcgaggaggccggcagccccgaggacgagagcctgggctgcagagccgccgagatcgtgctgagcgccctgcccgacagaagaagcgagggcaaccaggccgagaccaagaacagactgcccggcagccagctggccgtgctgcacatcagagaggaccccgagagcgtgtacctgcccgtgggcgccggcagcaacatcctgagccccagcaacgtggactgggaggtggagaccgacaacagcgacctgcccgccggcggcgacatcggcccccccaacggcgccagcaaggagatcagcgagctggaggaggagaagaccatccccaccaaggagcccgagcagatcaagagcgagtacaaggaggagagatgcaccgagaagaacgaggacagacacgccctgcacatggactacatcctggtgaacagagaggagaacagccacagcaagcccgagacctgcgaggagagagagagcatcgccgagctggagctgtacgtgggcagcaaggagaccggcctgcagggcacccagctggccagcttccccgacacctgccagcccgccagcctgaacgagagaaagggcctgagcgccgagaagatgagcagcaagagcgacaccagaagcagcttcgagagccccgcccaggaccagagctggatgttcctgggccacagcgaggtgggcgaccccagcctggacgccagagacagcggccccggctggagcggcaagaccgtggagcccttcagcgagctgggcctgggcgagggcccccagctgcagatcctggaggagatgaagcccctggagagcctggccctggaggaggccagcggccccgtgagccagagccagaagagcaagagcagaggcagagccggccccgacgccgtgaccctgcaggccgtgacccacgacaacgagtgggagatgctgagcccccagcccgtgcagaagaacatgatccccgacaccgagatggaggaggagaccgagttcctggagctgggcaccagaatcagcagacccaacggcctgctgagcgaggacgtgggcatggacatccccttcgaggagggcgtgctgagccccagcgccgccgacatgagacccgagccccccaacagcctggacctgaacgacacccaccccagaagaatcaagctgaccgcccccaacatcaacctgagcctggaccagagcgagggcagcatcctgagcgacgacaacctggacagccccgacgagatcgacatcaacgtggacgagctggacacccccgacgaggccgacagcttcgagtacaccggccacgaggaccccaccgccaacaaggacagcggccaggagagcgagagcatccccgagtacaccgccgaggaggagagagaggacaacagactgtggagaaccgtggtgatcggcgagcaggagcagagaatcgacatgaaggtgatcgagccctacagaagagtgatcagccacggcggcagcagaggctactacggcgacggcctgaacgccatcatcgtgttcgccgcctgcttcctgcccgacagcagcagagccgactaccactacgtgatggagaacctgttcctgtacgtgatcagcaccctggagctgatggtggccgaggactacatgatcgtgtacctgaacggcgccacccccagaagaagaatgcccggcctgggctggatgaagaagtgctaccagatgatcgacagaagactgagaaagaacctgaagagcttcatcatcgtgcaccccagctggttcatcagaaccatcctggccgtgaccagacccttcatcagcagcaagttcagcagcaagatcaagtacgtgaacagcctgagcgagctgagcggcctgatccccatggactgcatccacatccccgagagcatcatcaactactag

SEQ ID NO: 310046 - DNA, 852 bp, Artificial Sequence
  derived and/or modified sequence
atgagcggcgccgtgctgctggagagagagagactgaccagcggcaccacctggcacaccgccggcctgctgtggcagctgagacccagcgacgtggaggtggagctgctggcccacaccagaagagtggtgagcagagagctggaggaggagaccggcctgcacaccggctggatccagaacggcggcctgttcatcgccagcaacagacagagactggacgagtacaagagactgatgagcctgggcaaggcctacggcgtggagagccacgtgctgagccccgccgagaccaagaccctgtaccccctgatgaacgtggacgacctgtacggcaccctgtacgtgccccacgacggcaccatggaccccgccggcacctgcaccaccctggccagagccgccagcgccagaggcgcccaggtgatcgagaactgccccgtgaccggcatcagagtgtggaccgacgacttcggcgtgagaagagtggccggcgtggagacccagcacggcagcatccagaccccctgcgtggtgaactgcgccggcgtgtgggccagcgccgtgggcagaatggccggcgtgaaggtgcccctggtggccatgcaccacgcctacgtggtgaccgagagaatcgagggcatccagaacatgcccaacgtgagagaccacgacgccagcgtgtacctgagactgcagggcgacgccctgagcgtgggcggctacgaggccaaccccatcttctgggaggaggccgtgaagtacagacccagagccgccggcggcctgtgcctgaagaccagcaccgagaaggtgtgcgccgtgtggagcgacgacctgagaagagcctag

SEQ ID NO: 310047 - DNA, 1053 bp, Artificial Sequence
  derived and/or modified sequence
atgggcccctgcaacctgagcagcgccgccggccccaccgccgagaagagcgtgccctaccagagaaccctgaaggagggccagggcaccagcgtggtggcccagggccccagcagacccctgcccagcaccgccaacgtggtggtgatcggcggcggcagcctgggctgccagaccctgtaccacctggccaagctgggcatgagcggcgccgtgctgctggagagagagagactgaccagcggcaccacctggcacaccgccggcctgctgtggcagctgagacccagcgacgtggaggtggagctgctggcccacaccagaagagtggtgagcagagagctggaggaggagaccggcctgcacaccggctggatccagaacggcggcctgttcatcgccagcaacagacagagactggacgagtacaagagactgatgagcctgggcaaggcctacggcgtggagagccacgtgctgagccccgccgagaccaagaccctgtaccccctgatgaacgtggacgacctgtacggcaccctgtacgtgccccacgacggcaccatggaccccgccggcacctgcaccaccctggccagagccgccagcgccagaggcgcccaggtgatcgagaactgccccgtgaccggcatcagagtgtggaccgacgacttcggcgtgagaagagtggccggcgtggagacccagcacggcagcatccagaccccctgcgtggtgaactgcgccggcgtgtgggccagcgccgtgggcagaatggccggcgtgaaggtgcccctggtggccatgcaccacgcctacgtggtgaccgagagaatcgagggcatccagaacatgcccaacgtgagagaccacgacgccagcgtgtacctgagactgcagggcgacgccctgagcgtgggcggctacgaggccaaccccatcttctgggaggaggccgtgaagtacagacccagagccgccggcggcctgtgcctgaagaccagcaccgagaaggtgtgcgccgtgtggagcgacgacctgagaagagcctag

SEQ ID NO: 310048 - DNA, 1269 bp, Artificial Sequence
  derived and/or modified sequence
atggccagcctgagcagagccctgagagtggccgccgcccaccccagacagagccccaccagaggcatgggcccctgcaacctgagcagcgccgccggccccaccgccgagaagagcgtgccctaccagagaaccctgaaggagggccagggcaccagcgtggtggcccagggccccagcagacccctgcccagcaccgccaacgtggtggtgatcggcggcggcagcctgggctgccagaccctgtaccacctggccaagctgggcatgagcggcgccgtgctgctggagagagagagactgaccagcggcaccacctggcacaccgccggcctgctgtggcagctgagacccagcgacgtggaggtggagctgctggcccacaccagaagagtggtgagcagagagctggaggaggagaccggcctgcacaccggctggatccagaacggcggcctgttcatcgccagcaacagacagagactggacgagtacaagagactgatgagcctgggcaaggcctacggcgtggagagccacgtgctgagccccgccgagaccaagaccctgtaccccctgatgaacgtggacgacctgtacggcaccctgtacgtgccccacgacggcaccatggaccccgccggcacctgcaccaccctggccagagccgccagcgccagaggcgcccaggtgatcgagaactgccccgtgaccggcatcagagtgtggaccgacgacttcggcgtgagaagagtggccggcgtggagacccagcacggcagcatccagaccccctgcgtggtgaactgcgccggcgtgtgggccagcgccgtgggcagaatggccggcgtgaaggtgcccctggtggccatgcaccacgcctacgtggtgaccgagagaatcgagggcatccagaacatgcccaacgtgagagaccacgacgccagcgtgtacctgagactgcagggcgacgccctgagcgtgggcggctacgaggccaaccccatcttctgggaggaggtgagcgacaagttcgccttcggcctgttcgacctggactgggaggtgttcacccagcacatcgagggcgccatcaacagagtgcccgtgctggagaagaccggcatcaagagcaccgtgtgcggccccgagagcttcacccccgaccacaagcccctgatgggcgaggcccccgagctgagaggcttcttcctgggctgcggcttcaacagcgccggcgagagcggccaggccctgctggccccctag

SEQ ID NO: 310049 - DNA, 1191 bp, Artificial Sequence
  derived and/or modified sequence
atggctagcctctccagagccctacgggtagcagcagcacatccacgtcagagccctacacggggtatgggcccgtgcaatcttagctcagcagccggacctacagccgaaaagtctgtcccctatcaacggactctcaaggaaggccagggtacaagcgtggtggcccagggtccaagtagacctctcccttctacagcaaatgtggtggtcatcggcggcggatcacttggctgtcagacactctatcacttggcaaagctcggaatgtctggcgccgttctgctcgagcgggagagactcacttccggaaccacctggcacaccgctggcctcctctggcagctgcgcccaagtgacgtggaggtggagctgctcgcccacactcgccgagtggtctccagagagttggaggaggaaacaggtttgcatacaggatggattcaaaacggagggttatttatcgcttctaacagacagcggctagatgagtacaaacgcctgatgtcactgggaaaagcttacggtgtggagtcccatgttctgagccccgcagaaaccaagactttatacccattgatgaacgtggacgatctgtacggtaccctgtatgtcccacacgacgggaccatggacccggcaggcacatgtaccacactcgctagggctgcttctgccaggggggcccaagtgattgaaaactgccccgtgacaggcattagggtctggaccgatgatttcggcgtgaggcgcgtcgcgggggtggagacccagcatggttccatacaaactccttgcgttgtcaactgtgcaggcgtgtgggcctcagctgtcgggagaatggcaggcgtcaaggtcccccttgtggctatgcaccacgcctacgttgtgacggagcggatcgagggcatacagagcttcaccctgttgcctacactggaatactccggtactgtctccgcccactgtaacttgagactcccagggagctctaattcaagagcttcagcttcccacgttgcgggaatcaaatgcgctaggcaccacactcgcttaatcttcttctgtatccttgtggagactgagttccaccacgtggccaaggcaggcctggaactcctgtcttccgggaacccacccatcagcgatttccaatcagctaggatcaccggagtgagccaccatgcttag

SEQ ID NO: 310050 - DNA, 852 bp, Artificial Sequence
  derived and/or modified sequence
atgtctggtgcagtgctgttggagagggagcggttgacatcaggcacaacctggcatacagcaggtctgctgtggcaactgcgcccctccgacgtcgaagtagagctgctagctcacacaaggcgcgtggtaagtagggagctggaagaggaaacagggttgcataccggatggatccaaaacggcggcctgttcattgcaagcaatcggcagcggcttgatgagtataagcgtctgatgagcttggggaaagcttatggcgtcgaaagccacgtattgtcccctgccgaaacaaaaaccttgtatcccctgatgaacgtagacgatctgtacggaacattgtatgtgccgcacgatggcaccatggaccccgccgggacctgcacaacgctagccagagcagctagcgcacggggggcccaggtcatcgagaactgtcctgttaccggtattcgggtttggactgacgatttcggggtccgccgtgtggctggagtggagacccagcacgggtccattcagacaccctgtgtcgtaaattgtgctggcgtatgggcctcagccgtggggcgcatggccggcgtgaaagtacctctcgtggcaatgcatcacgcttatgtcgtgactgagcgaatcgaaggaattcagaatatgccaaacgttcgtgaccatgacgcctcagtttatctacggctgcaaggcgatgccctctccgtcggcggatacgaggccaaccccattttttgggaggaggccgtgaaataccgaccacgcgctgcaggaggcctctgtcttaaaacgagcacagagaaggtctgcgcagtctggtcagatgatcttcgtcgggcctag

SEQ ID NO: 310051 - DNA, 1053 bp, Artificial Sequence
  derived and/or modified sequence
atggggccttgcaatctatccagcgctgctggccctaccgctgagaagtctgtcccataccagaggacattgaaagagggacaaggtacttccgttgtagcccagggccccagtcgacccctaccttccactgccaatgtggtggtgattggggggggtagcctggggtgccagactctttaccatctcgccaagcttggaatgtctggcgctgtgctgctggagcgagaacgtctcacaagcggaactacttggcacaccgccggtctactgtggcagcttcggccgtctgatgtcgaagtagagctgctggcgcatacgagaagagtagtttccagagagcttgaggaggagactgggcttcataccgggtggattcagaacggtgggttgtttattgcctccaatagacagcggctcgacgagtacaagcgactaatgagcctggggaaagcttatggggttgaaagtcatgttctgtcccctgccgaaacgaagacactctaccccctcatgaacgtcgacgacctctacggtaccctgtatgtgccgcacgacggcactatggatcccgcgggcacttgcaccaccctggctagagcagcaagcgcaaggggtgcacaggtgattgaaaattgtcctgtgaccggcattcgtgtctggactgacgacttcggggtgcggcgcgtcgctggcgtggaaacgcagcacggatccattcagactccctgtgtggtgaattgtgctggcgtttgggctagtgcagtggggcgaatggccggcgtgaaagtgcctctcgttgccatgcaccacgcctatgtcgtgacagagagaattgaaggcattcagaatatgcccaatgtgcgagatcacgacgcatccgtctatctcagacttcagggggatgcgctgtcagtgggaggttacgaggcaaaccccatcttctgggaggaggccgtgaagtaccgccccagggctgcaggagggttgtgcctaaagacctctacagaaaaagtgtgtgcagtatggtcggacgatctccggcgggcctag

SEQ ID NO: 310052 - DNA, 1269 bp, Artificial Sequence
  derived and/or modified sequence
atggcttcactcagcagggccttaagggttgccgcagcccacccccgccaatcacctacacgcggtatgggcccctgcaacctgagcagcgctgcaggccccaccgccgagaagtctgtgccctaccagagaactctgaaagagggacagggcacctctgtggttgcacagggcccaagtagaccactgccttcaactgccaacgttgttgtcatcggcggtggcagcctggggtgtcagacactttaccacctggccaaattgggcatgtctggtgccgtactgctcgaacgcgagcggctcacctctggcacaacatggcacacggcaggcctgctttggcagctgagaccatcagatgtagaggtggaactgcttgctcatactcgacgagtcgtaagtagggagctggaggaagagaccgggttacataccggctggatacagaatggtggactgtttattgcttccaataggcaacggctcgacgagtataagcgtcttatgtcgttaggaaaggcgtacggagtggagagtcacgtactgagtccagctgaaaccaagaccttgtaccctctaatgaatgtggatgatctgtacggcactctgtacgtccctcacgacggcactatggatcccgctggaacctgcacaactcttgctcgcgctgcatccgcaaggggagcccaggtgattgagaattgcccggtaactggcattcgtgtatggacggacgacttcggagtacgccgggtggccggggtggagacccagcacggcagtattcaaacgccttgcgttgtgaattgtgctggcgtttgggccagcgccgtaggacgtatggctggtgtcaaggtccctctggtggcaatgcaccatgcctacgtggttactgagaggattgagggcattcaaaacatgcctaacgtgcgcgaccacgacgccagcgtgtatttgcggctacagggagatgccctgtccgtgggaggctacgaggcgaacccgatcttctgggaagaagtaagtgacaagttcgcgttcggcctcttcgacctggactgggaggttttcacccagcatatcgaaggtgctataaatcgtgtccccgtgctggagaagaccggcatcaagtcgactgtttgtggccctgagagttttacccctgaccataagccactgatgggtgaagccccagagctgcgagggttcttcctgggttgtggctttaactccgccggtgagtctgggcaggcactacttgccccatag

SEQ ID NO: 310053 - DNA, 1326 bp, Artificial Sequence
  derived and/or modified sequence
ggaccctgaaggagggacagggcacctcggtggtggcccaaggcccaagccggcccctgcccagcacggccaacgtggtggtcattggtggaggcagcttgggctgccagaccctgtaccacctggccaagctgggcatgagtggggcggtgctgctggagcgggagcggctgacctccgggaccacctggcacacggcaggcctgctgtggcagctgcggcccagtgacgtggaggtggagcttctggcccacactcggcgggtggtgagccgggagctggaggaggagacgggactacacacgggctggatccagaatgggggcctcttcatcgcgtccaaccggcagcgcctggacgagtacaagaggctcatgtcgctgggcaaggcgtatggtgtggaatcccatgtgctgagcccggcagagaccaagactctgtacccgctgatgaatgtggacgacctctacgggaccctgtatgtgccgcacgacggtaccatggaccccgctggcacctgtaccaccctcgccagggcagcttctgcccgaggagcacaggtcattgagaactgcccagtgaccggcattcgtgtgtggacggatgattttggggtgcggcgggtcgcgggtgtggagactcagcatggttccatccagacaccctgcgtggtcaactgtgcaggagtgtgggcaagtgctgtgggccggatggctggagtcaaggtcccgctggtggccatgcaccatgcctatgtcgtcaccgagcgcatcgaggggattcagaacatgcccaatgtccgtgatcatgatgcctctgtctacctccgcctccaaggggatgccttgtctgtgggtggctatgaggccaaccccatcttttgggaggaggcagtcaaatacagacccagggcagctggagggctttgcctcaaaacatccacagagaaggtctgcgcagtgtggagtgatgacctcagaagggcatgagagcacacaagtcctacgtccttcagcaaatgacactgccctcccaaccagctgctgcagcggcatttcccctggcctgggctgtttcccgggcagcttctggggttagggcagccctgcagccctgttctatgtgtatatgcatttagtccacacatggaacgactgagtggctactttgggctaaaaactgctttaatttctggagaaagagggaaactaagataaaagtccctgactctgggtgcctatattttggtggagagacatacaataaacaaacaaatggctgggcacggtggctcacacctgtaatcccagcactttgggaggctga

SEQ ID NO: 310054 - DNA, 1191 bp, Artificial Sequence
  derived and/or modified sequence
atggccagcctgagccgggccctgcgggtggccgccgcccacccccggcagagccccacccggggcatgggcccctgcaacctgagcagcgctgctggccccacagctgagaagtctgtgccctaccagaggaccctgaaggagggccagggcacctctgtggtggcccagggccccagccggcccctgcccagcacagccaacgtggtggtgattggaggcggcagcctgggctgccagaccctgtaccacctggccaagctgggcatgtctggagctgtgctgctggagcgggagcggctgaccagcggcaccacctggcacacagctggcctgctgtggcagctgcggcccagtgatgtggaggtggagctgctggcccacacccggcgggtggtgtcccgggagctggaggaggagaccggcctgcacacaggctggatccagaatggaggcctcttcatcgccagcaaccggcagaggctggatgagtacaagaggctgatgagcctgggcaaggcctatggagtggagagccacgtgctgagccctgctgagaccaagaccctgtaccccctgatgaatgtggatgacctgtatggcaccctgtatgtgccccatgatggcaccatggaccctgctggcacctgcaccaccctggcccgggccgccagcgcccggggggcccaggtgattgagaactgccctgtgacaggcatccgggtgtggacagatgactttggagtgcggcgggtggccggcgtggagacccagcacggcagcatccagaccccctgtgtggtgaactgtgccggcgtgtgggccagcgctgtgggccgcatggccggcgtgaaggtgcccctggtggccatgcaccacgcctacgtggtgacagaaagaattgagggcatccagagcttcaccctgctgcccaccctggagtacagcggcaccgtgtctgcccactgcaacctgcggctgcccggcagcagcaacagccgggccagcgccagccacgtggccggcatcaagtgtgcccggcaccacaccaggctcatcttcttctgcatcctggtggagacagagttccaccacgtggccaaggccggcctggagctgctgagcagcggcaacccccccatcagtgacttccagagcgcccgcatcaccggggtgagccaccacgcctag

SEQ ID NO: 310055 - DNA, 852 bp, Artificial Sequence
  derived and/or modified sequence
atgtctggagctgtgctgctggagcgggagcggctgaccagcggcaccacctggcacacagctggcctgctgtggcagctgcggcccagtgatgtggaggtggagctgctggcccacaccaggagagtggtgtcccgggagctggaggaggagaccggcctgcacacaggctggatccagaatggaggcctcttcatcgccagcaaccggcagaggctggatgagtacaagaggctgatgagcctgggcaaggcctacggcgtggagagccacgtgctgagccctgctgagaccaagaccctgtaccccctgatgaatgtggatgacctgtatggcaccctgtatgtgccccatgatggcaccatggaccctgctggcacctgcaccaccctggcccgggccgccagcgcccggggggcccaggtgattgagaactgccctgtgacaggcatccgggtgtggacagatgactttggagtgagaagagtggccggcgtggagacccagcacggcagcatccagaccccctgtgtggtgaactgtgccggcgtgtgggccagcgctgtgggccgcatggccggcgtgaaggtgcccctggtggccatgcaccacgcctacgtggtgacagagcgcatcgagggcatccagaacatgcccaacgtgcgggaccatgatgcctctgtgtacctgcggctgcagggagatgccctgtctgtgggcggctatgaggccaaccccatcttctgggaggaggccgtgaagtaccggcccagggctgctgggggcctgtgcctgaagaccagcacagagaaggtgtgtgctgtgtggagcgatgacctgcggcgggcctag

SEQ ID NO: 310056 - DNA, 1053 bp, Artificial Sequence
  derived and/or modified sequence
atgggcccctgcaacctgagcagcgctgctggccccacagctgagaagtctgtgccctaccagaggaccctgaaggagggccagggcacctctgtggtggcccagggccccagccggcccctgcccagcacagccaacgtggtggtgattggaggcggcagcctgggctgccagaccctgtaccacctggccaagctgggcatgtctggagctgtgctgctggagcgggagcggctgaccagcggcaccacctggcacacagctggcctgctgtggcagctgcggcccagtgatgtggaggtggagctgctggcccacacccggcgggtggtgtcccgggagctggaggaggagaccggcctgcacacaggctggatccagaatggaggcctcttcatcgccagcaaccggcagaggctggatgagtacaagaggctgatgagcctgggcaaggcctatggagtggagagccacgtgctgagccctgctgagaccaagaccctgtaccccctgatgaatgtggatgacctgtatggcaccctgtatgtgccccatgatggcaccatggaccctgctggcacctgcaccaccctggcccgggccgccagcgcccggggggcccaggtgattgagaactgccctgtgacaggcatccgggtgtggacagatgactttggagtgcggcgggtggccggcgtggagacccagcacggcagcatccagaccccctgtgtggtgaactgtgccggcgtgtgggccagcgctgtgggccgcatggccggcgtgaaggtgcccctggtggccatgcaccacgcctacgtggtgacagaaagaattgagggcatccagaacatgcccaacgtgcgggaccatgatgcctctgtgtacctgcggctgcagggagatgccctgtctgtgggcggctatgaggccaaccccatcttctgggaggaggccgtgaagtaccggcccagggctgctgggggcctgtgcctgaagaccagcacagagaaggtgtgtgctgtgtggagcgatgacctgcggcgggcctag

SEQ ID NO: 310057 - DNA, 1269 bp, Artificial Sequence
  derived and/or modified sequence
atggccagcctgagccgggccctgcgggtggccgccgcccacccccggcagagccccacccggggcatgggcccctgcaacctgagcagcgctgctggccccacagctgagaagtctgtgccctaccagaggaccctgaaggagggccagggcacctctgtggtggcccagggccccagccggcccctgcccagcacagccaacgtggtggtgattggaggcggcagcctgggctgccagaccctgtaccacctggccaagctgggcatgtctggagctgtgctgctggagcgggagcggctgaccagcggcaccacctggcacacagctggcctgctgtggcagctgcggcccagtgatgtggaggtggagctgctggcccacacccggcgggtggtgtcccgggagctggaggaggagaccggcctgcacacaggctggatccagaatggaggcctcttcatcgccagcaaccggcagaggctggatgagtacaagaggctgatgagcctgggcaaggcctatggagtggagagccacgtgctgagccctgctgagaccaagaccctgtaccccctgatgaatgtggatgacctgtatggcaccctgtatgtgccccatgatggcaccatggaccctgctggcacctgcaccaccctggcccgggccgccagcgcccggggggcccaggtgattgagaactgccctgtgacaggcatccgggtgtggacagatgactttggagtgcggcgggtggccggcgtggagacccagcacggcagcatccagaccccctgtgtggtgaactgtgccggcgtgtgggccagcgctgtgggccgcatggccggcgtgaaggtgcccctggtggccatgcaccacgcctacgtggtgacagaaagaattgagggcatccagaacatgcccaacgtgcgggaccatgatgcctctgtgtacctgcggctgcagggagatgccctgtctgtgggcggctatgaggccaaccccatcttctgggaggaggtgtctgacaagtttgccttcggcctgtttgacctggactgggaggtgttcacccagcacattgaaggagccatcaacagagtgcctgtgctggagaagacaggcatcaagagcacagtgtgtggccctgagagcttcaccccagaccacaagcccctgatgggagaggcccctgagctgcggggcttcttcctgggctgcggcttcaacagcgctggggagagcggccaggccctgctggccccctag

SEQ ID NO: 310058 - DNA, 1412 bp, Artificial Sequence
  derived and/or modified sequence
agttgcaacttgtctttgagtgcagggacaggagaagtgtgggctacccggccactgccctggagctgtggtgactgctgcgtttttctcccatgcacttgcacgtccaggactcctgggagaacttgggccacactccttccttgccctcttgagctcattcgtcaccctgttgggtgagcacagccctagctcaggccactgggcaagccacaccatccaaagaggaggtcctctgccccaggacccccacaccaccccagctccctgtttcgctgaggcctggagcccccatggcctcactgagccgagccctacgtgtggctgctgcccaccctcgccagagccctacccggggcatggggccatgcaacctgtccagcgcagctggccccacagccgagaagagtgtgccatatcagcggaccctgaaggagggacagggcacctcggtggtggcccaaggcccaagccggcccctgcccagcacggccaacgtggtggtcattggtggaggcagcttgggctgccagaccctgtaccacctggccaagctgggcatgagtggggcggtgctgctggagcgggagcggctgacctccgggaccacctggcacacggcaggcctgctgtggcagctgcggcccagtgacgtggaggtggagcttctggcccacactcggcgggtggtgagccgggagctggaggaggagacgggactacacacgggctggatccagaatgggggcctcttcatcgcgtccaaccggcagcgcctggacgagtacaagaggctcatgtcgctgggcaaggcgtatggtgtggaatcccatgtgctgagcccggcagagaccaagactctgtacccgctgatgaatgtggacgacctctacgggaccctgtatgtgccgcacgacggtaccatggaccccgctggcacctgtaccaccctcgccagggcagcttctgcccgaggagcacaggtcattgagaactgcccagtgaccggcattcgtgtgtggacggatgattttggggtgcggcgggtcgcgggtgtggagactcagcatggttccatccagacaccctgcgtggtcaactgtgcaggagtgtgggcaagtgctgtgggccggatggctggagtcaaggtcccgctggtggccatgcaccatgcctatgtcgtcaccgagcgcatcgaggggattcagaacatgcccaatgtccgtgatcatgatgcctctgtctacctccgcctccaaggggatgccttgtctgtgggtggctatgaggccaaccccatcttttgggaggaggcagtcaaatacagacccagggcagctggagggctttgcctcaaaacatccacagagaaggtctgcgcagtgtggagtgatgacctcagaagggcatga

SEQ ID NO: 310059 - DNA, 1191 bp, Artificial Sequence
  derived and/or modified sequence
atggccagcctgagccgggccctgcgggtggccgccgcccaccccaggcagagcccaactagaggaatgggcccctgtaatctgtcatctgccgccgggccaaccgcggagaagagtgtgccttaccagcgcaccttgaaggaaggacaggggacatctgtcgtggctcagggtccaagtcgacctttaccatctactgctaacgtggttgtaattgggggaggatcccttggatgtcagacactgtatcatctggcgaagctgggtatgtccggcgctgtcctgttggagcgagagcggctgaccagtggtacaacttggcacacagctgggctgctctggcagctgcgacccagcgatgtcgaagtagaattgctggcgcacacccgccgcgtggtgtctcgcgaactggaagaggagactggtttgcacaccggctggatccagaatgggggtctgttcatcgcatcaaataggcagcggctggacgagtacaagagattgatgtccttaggaaaagcttatggtgtggagagtcatgtcctctcaccggccgagacaaagacactatatcctctgatgaatgttgatgacctgtacggcacactttatgtccctcatgacgggaccatggaccccgcaggaacttgcaccactttggcgagagccgcttccgcgaggggcgctcaggtcattgaaaattgccccgtcacaggcatccgggtgtggacggatgacttcggtgtacgacgggtggctggggtggaaacgcagcatggttcaattcagaccccctgtgtcgttaactgtgccggcgtgtgggcttcagcagtgggcagaatggctggcgtgaaggtgccactggtagccatgcaccatgcatatgtggtaactgagagaattgagggaatccagagcttcaccttgttgccgactctcgagtacagtggcaccgtctcagcccactgtaatcttaggcttccgggttcttcaaactcaagggcttctgcaagtcacgttgcaggcatcaaatgtgctaggcatcacacccgcttaatattcttttgtatattggtggagactgaattccaccacgtcgcaaaggctggactcgagctgctcagttccggcaacccaccaatatcggacttccagtccgcccgaattacaggagtaagtcaccatgcctag

SEQ ID NO: 310060 - DNA, 852 bp, Artificial Sequence
  derived and/or modified sequence
atgagcggcgccgtgctgctggagcgggagcggctgaccagcggcacgacttggcacaccgctggattactttggcagctgcggccatcagatgtggaggtggagctccttgctcacacacggagggtagtgagccgggagcttgaggaagaaaccggtctgcacactggatggatccagaacggggggttatttatagcatccaatcggcagcgcttggacgaatacaagaggctcatgtccctgggcaaagcctacggggtggagtcccacgtactaagtcccgccgaaacgaagaccctgtacccactgatgaacgttgatgatctgtatggtaccctgtacgtgccccatgacggcactatggatcccgctggcacctgtaccacactggcaagggccgcgtccgcaagaggggctcaggttatcgagaattgccctgtgacaggcatccgcgtgtggacagacgattttggcgtgcgccgagtcgcaggggtcgaaacgcaacatggatcgattcagactccttgcgtcgtgaactgcgctggagtgtgggccagcgctgtaggtcggatggccggagttaaggtgccattggtcgctatgcaccacgcatacgtggtgactgaaaggatcgagggcatccagaacatgcctaatgtacgtgatcacgacgcttccgtgtacttacggctgcaaggcgatgcgttgagtgttgggggctacgaggcaaaccccatattctgggaggaggctgtgaagtatcggccccgcgcagccggcggcttatgcctgaaaacctccaccgaaaaagtttgcgccgtatggtctgatgatctaaggcgagcttag

SEQ ID NO: 310061 - DNA, 1053 bp, Artificial Sequence
  derived and/or modified sequence
atgggcccctgcaacctgagcagcgccgccggccccaccgccgagaagtctgtgccgtaccagagaacgcttaaggaaggccaggggacctctgtggtagcgcaaggtccctctcggcctctgccgtccacggccaacgtagttgtcatcggcggagggtccttaggctgtcagacgctctatcacctcgcgaagctgggaatgtcgggtgctgtccttctggaacgagaacgcctgacgtctgggacaacttggcatactgcaggtctgctatggcagctacgcccctccgacgtggaggttgaactgttggctcacactaggagggttgtgagcagggaacttgaagaggaaactggactgcacacaggctggatacaaaatggtggtctttttatagcctccaacagacagaggttagatgagtacaaacgcctgatgtccttgggaaaggcctatggagttgagtcgcacgttctgtctcctgccgagactaagaccctgtatcctctcatgaatgtagacgacttgtacgggacactctacgtgccccacgatggtaccatggacccagccggcacatgcactaccctagcccgagcagcatcagcccggggggcccaggtgattgagaattgtcctgtaactggcattcgagtttggaccgatgattttggggtgcgccgcgtcgctggagtggagacccagcacgggagcatacaaaccccatgtgtagtcaattgcgcgggggtctgggcctcagcagtaggaaggatggccggagtcaaggtccccctggttgccatgcaccacgcatacgtggtgactgagcgcatcgaaggtatccagaatatgcccaatgtccgggatcatgatgcctcagtgtatctccggcttcagggtgatgcactgagcgtaggtggatacgaagccaacccaatattctgggaggaagcagttaaatatagaccacgcgcagcagggggcttatgccttaagacaagtactgaaaaagtgtgtgctgtgtggtcagatgacctcagacgtgcatag

SEQ ID NO: 310062 - DNA, 1269 bp, Artificial Sequence
  derived and/or modified sequence
atggccagcctgagccgggccctgcgggtggccgccgcccacccccgtcagtccccaaccagaggaatggggccctgcaatttatctagcgccgcaggaccaaccgctgagaagagtgttccgtaccaacgtactctgaaggaggggcagggtacatcagtcgtcgcccagggcccatcaaggcccttgccctcaactgcaaatgtcgtagtaatcggcgggggctccctgggctgccagactctgtatcacctggccaaactgggaatgagcggcgctgttttactggagcgagaacggctcacatccgggaccacttggcatacagctgggctactttggcaactgaggccctcggatgttgaagtcgaactgctggcccacaccaggagagtggtctctcgggaactggaagaagagaccggactccacacgggatggatccagaatggaggcctgtttatagcaagcaaccgccagaggctggacgagtataaacgtctcatgtcactgggcaaagcatacggcgtggagagccatgtgctctcccccgccgagacaaagaccctgtaccccctcatgaatgttgatgacctgtacggcacactgtacgtccctcacgacggaacaatggatcctgccggcacttgtactactttagcgcgggcagcctcggccaggggagcccaagtgatagagaactgccccgttacaggcatcagagtgtggaccgacgacttcggggtgcggagagtggcaggcgtggagacacagcatggatcaatccaaactccttgtgttgttaattgcgcgggtgtgtgggccagtgccgtaggacgaatggcaggggtgaaggtccctttggtcgccatgcaccacgcatacgttgtgacggagcggatagagggcattcagaacatgcccaacgttagagatcatgatgcctctgtttatttgcgccttcagggggacgctctgtccgtgggagggtatgaggccaatcccattttctgggaagaggtctctgacaaatttgctttcggactcttcgacctcgactgggaggtctttacacagcacatagagggcgctattaatcgagtgccagtgctcgaaaagacaggcattaagtcaacagtgtgcggacctgagtcatttactcccgaccataaacccctgatgggggaggctcccgagttgcggggattcttcctaggctgtggattcaatagcgctggggagagtggtcaggcgctcctcgctccgtag

SEQ ID NO: 310063 - DNA, 1191 bp, Artificial Sequence
  derived and/or modified sequence
atggctagcctgagtcgggcactaagagtcgcagcagcccatccaaggcagtcaccgactagaggcatgggcccttgcaacctgagctccgccgcaggaccaacagccgagaagtccgtgccctaccaacgtaccctcaaggagggacagggaacctctgtcgtggcacaaggtccttcgcggccacttccatcaactgccaacgtggtcgtcatcggcggtggaagcctagggtgtcagaccttatatcatctggccaaactgggcatgagtggtgccgtgctgttagagcgtgagagactgacgtctggcaccacctggcacactgccggtctcctgtggcagcttagacctagcgatgttgaggttgagcttctggcccatacaagaagggtggtgagccgcgagctggaggaagagacaggcctgcatactggatggatccagaacggagggctgtttatcgcctccaaccgtcagcgcctagacgagtataagagactgatgagcctcgggaaagcctacggagtggaatcccacgttctgtctcctgcggagaccaagactctgtaccccttgatgaatgtcgacgatctctatggcaccctatatgtgcctcatgatggcacgatggacccagccggtacctgtaccaccctggcaagagccgcttctgcccgtggagctcaggtgatcgaaaactgccccgtgacgggaattcgggtatggaccgacgatttcggcgtgcggagagttgctggagtcgaaacacagcatgggagcattcaaacaccttgtgttgtaaattgcgctggggtctgggcatctgcagtcggaaggatggcgggagttaaagtgcctctcgtggccatgcaccacgcctatgtcgtcacagaacgaatcgaggggattcagagcttcactctcttacccacactggaatattcaggcaccgtcagcgcccactgcaacttaaggcttcctggatccagtaatagtcgcgctagtgccagccacgtggcaggcattaagtgcgcgaggcaccatacccgcctaattttcttctgcattctggtggaaaccgaattccatcatgtggccaaggccggattggaactgctctcgtcaggaaaccctcctatctctgattttcagtctgctcgcattacaggcgtgtctcaccacgcctag

SEQ ID NO: 310064 - DNA, 852 bp, Artificial Sequence
  derived and/or modified sequence
atgtccggagctgtcctcctcgaaagggaacggttgactagtggcacaacttggcataccgccggacttctctggcaactgcggccatctgacgttgaagttgaattactggctcacactcgtagagtagttagccgggagttggaggaggagacgggcctgcatactggatggattcaaaatggcggattgtttattgcgtccaatagacagcgccttgatgagtataagcgcctgatgtctctagggaaggcctatggggtggagagccacgtcctctctccagctgagaccaagaccttatatccactaatgaacgtggacgacctctatggcacactttacgtgccacatgatggaaccatggatcccgctgggacctgcaccactttggcccgagccgcttccgccaggggggctcaggtgattgaaaactgtcccgtcaccggtattcgcgtctggacggacgattttggcgtgaggagggtagctggagttgagacacagcacggcagcatccagacaccttgtgtcgtgaattgtgctggcgtgtgggcttccgccgtggggcgaatggcaggggttaaggtgcccttagtggccatgcaccacgcttatgtcgtgacagagcggatcgaagggattcagaatatgccgaacgttcgggatcatgacgcctccgtttatctgagactccagggtgatgcgctcagtgtcggaggatacgaggccaatccgatcttttgggaggaagcggtgaagtaccggccacgtgcagctgggggattatgcctgaaaacatctaccgaaaaagtgtgtgctgtgtggagtgacgatctccgacgagcctag

SEQ ID NO: 310065 - DNA, 1053 bp, Artificial Sequence
  derived and/or modified sequence
atggggccttgtaatcttagtagcgcagcgggacccaccgccgaaaagtcagttccttaccaaagaacactaaaagaggggcaaggaacatctgtcgtggcgcagggaccatctaggccccttccttctaccgctaatgtcgtggttatcgggggagggtcccttggatgtcagactctgtatcacttggcgaaactgggaatgtccggagcagtgctgctggagcgggagagactcacaagtgggaccacatggcacactgccggactcttgtggcaactgcgcccttccgacgtcgaggttgaactattagcgcacactcgccgagtagtgtctcgagagcttgaggaggaaaccggattgcacaccgggtggatccagaacggcggactattcatagcctcaaatcggcagaggctcgatgagtataaacggctcatgagtctcggcaaggcgtacggagtagaatctcacgtgctgagccccgctgagaccaaaacattgtaccccttgatgaacgtcgacgacctttatggaactctttacgtgcctcatgacggcaccatggaccccgctggtacttgtacaacactggctcgcgctgccagcgctcgcggagcccaggtgatcgagaattgcccagtgacaggtatacgagtgtggacagatgacttcggtgttcggagggtggcaggagtcgaaacacagcacgggtctatccaaacaccctgcgttgtgaattgcgcaggcgtctgggccagtgccgtggggcgaatggcaggggtgaaggtccccctagttgccatgcaccacgcatacgtggttacagagcggatcgaagggatccagaatatgccgaatgtcagggaccacgatgctagtgtttacctgcggctgcagggggatgccctcagtgtcgggggatacgaggccaaccccattttctgggaggaagcggtgaagtaccgccctagggctgccggaggtctttgtctgaaaaccagcacagagaaggtatgtgctgtgtggtccgacgatctgaggagggcttag

SEQ ID NO: 310066 - DNA, 1269 bp, Artificial Sequence
  derived and/or modified sequence
atggccagtctgtcccgtgcgcttagggtcgctgccgcacatcccaggcagagtccaactagaggaatggggccttgcaatttgagctccgcggctgggcctaccgccgaaaaaagcgtgccgtaccagagaactctcaaggaggggcagggaacaagcgttgtggctcagggaccgtcacgaccactaccctcaacagccaacgtggttgttattggaggcggatcacttggttgccagacgctatatcatttagctaaactggggatgtctggggcagtacttctcgaaagggagcgcctgaccagcggaaccacttggcacactgctggtttgctgtggcagctcaggccctcagatgtcgaggttgagctgcttgcccacacgaggcgcgtggtcagtagggaactagaagaggaaacaggtctccataccggttggattcagaatggcggacttttcatcgcctctaatagacagcgtcttgatgaatacaagagactgatgagtctcggcaaggcctatggtgtggaatctcatgttctgtcaccagctgagactaaaaccctctatccgttgatgaacgtcgacgatctctatgggaccctttatgtgccacatgacggcactatggatccagccggtacatgtacaactttggcacgggcagccagcgccaggggcgctcaggttattgaaaattgccctgtgactggtattcgagtgtggactgatgacttcggcgttagacgggtcgcaggggttgaaacacagcatggaagcatccaaaccccctgcgtggttaactgcgctggtgtttgggcgagcgccgtcgggagaatggctggcgttaaggtgccactggtcgctatgcatcatgcgtatgtcgtgaccgagaggatcgaagggatacaaaacatgccaaacgttcgtgaccacgacgccagcgtttatcttagactccagggagacgccctctccgtgggcggttatgaagccaaccctatcttttgggaagaagtgtcagataagtttgcctttggtttgtttgatttggactgggaggttttcactcagcatatcgagggtgctatcaaccgcgttcccgtcctggaaaagaccggcatcaaatcaacagtgtgtggcccagaatccttcacacctgatcacaaacccctaatgggtgaagcacccgagctgagaggcttcttcctcggctgtgggtttaactccgccggagaatcagggcaagcactactggcaccttag

SEQ ID NO: 310067 - DNA, 1398 bp, Artificial Sequence
  derived and/or modified sequence
cctggagttccggccaggccactgcttgggaagcaagaaggtgaaggcacctctgctgggccaagcactcttagggccgaggggcactgcagctgacaagagctccctgtttcgctgaggcctggagcccccatggcctcactgagccgagccctacgtgtggctgctgcccaccctcgccagagccctacccggggcatggggccatgcaacctgtccagcgcagctggccccacagccgagaagagtgtgccatatcagcggaccctgaaggagggacagggcacctcggtggtggcccaaggcccaagccggcccctgcccagcacggccaacgtggtggtcattggtggaggcagcttgggctgccagaccctgtaccacctggccaagctgggcatgagtggggcggtgctgctggagcgggagcggctgacctccgggaccacctggcacacggcaggcctgctgtggcagctgcggcccagtgacgtggaggtggagcttctggcccacactcggcgggtggtgagccgggagctggaggaggagacgggactacacacgggctggatccagaatgggggcctcttcatcgcgtccaaccggcagcgcctggacgagtacaagaggctcatgtcgctgggcaaggcgtatggtgtggaatcccatgtgctgagcccggcagagaccaagactctgtacccgctgatgaatgtggacgacctctacgggaccctgtatgtgccgcacgacggtaccatggaccccgctggcacctgtaccaccctcgccagggcagcttctgcccgaggagcacaggtcattgagaactgcccagtgaccggcattcgtgtgtggacggatgattttggggtgcggcgggtcgcgggtgtggagactcagcatggttccatccagacaccctgcgtggtcaactgtgcaggagtgtgggcaagtgctgtgggccggatggctggagtcaaggtcccgctggtggccatgcaccatgcctatgtcgtcaccgagcgcatcgaggggattcagaacatgcccaatgtccgtgatcatgatgcctctgtctacctccgcctccaaggggatgccttgtctgtgggtggctatgaggccaaccccatcttttgggaggaggtgtcagacaagtttgccttcggcctctttgacctggactgggaggtgttcacccagcacattgaaggcgccatcaacagggtccccgtgctggagaagacaggaatcaagtccacggtctgcggccctgaatccttcacgcccgaccacaagcccctgatgggggaggcacctgagctccgagggttcttcctgggctgtggcttcaacagcgcaggtgagtccgggcaggccctcctggccccc

SEQ ID NO: 310068 - DNA, 1724 bp, Artificial Sequence
  derived and/or modified sequence
gagaagtgtgggctacccggccactgccctggagctgtggtgactgctgcgtttttctcccatgcacttgcacgtccaggactcctgggagaacttgggccacactccttccttgccctcttgagctcattcgtcaccctgttgggtgagcacagccctagctcaggccactgggcaagccacaccatccaaagaggaggtcctctgccccaggacccccacaccaccccagctccctgtttcgctgaggcctggagcccccatggcctcactgagccgagccctacgtgtggctgctgcccaccctcgccagagccctacccggggcatggggccatgcaacctgtccagcgcagctggccccacagccgagaagagtgtgccatatcagcggaccctgaaggagggacagggcacctcggtggtggcccaaggcccaagccggcccctgcccagcacggccaacgtggtggtcattggtggaggcagcttgggctgccagaccctgtaccacctggccaagctgggcatgagtggggcggtgctgctggagcgggagcggctgacctccgggaccacctggcacacggcaggcctgctgtggcagctgcggcccagtgacgtggaggtggagcttctggcccacactcggcgggtggtgagccgggagctggaggaggagacgggactacacacgggctggatccagaatgggggcctcttcatcgcgtccaaccggcagcgcctggacgagtacaagaggctcatgtcgctgggcaaggcgtatggtgtggaatcccatgtgctgagcccggcagagaccaagactctgtacccgctgatgaatgtggacgacctctacgggaccctgtatgtgccgcacgacggtaccatggaccccgctggcacctgtaccaccctcgccagggcagcttctgcccgaggagcacaggtcattgagaactgcccagtgaccggcattcgtgtgtggacggatgattttggggtgcggcgggtcgcgggtgtggagactcagcatggttccatccagacaccctgcgtggtcaactgtgcaggagtgtgggcaagtgctgtgggccggatggctggagtcaaggtcccgctggtggccatgcaccatgcctatgtcgtcaccgagcgcatcgaggggattcagagtttcactttgttgcccacactggagtacagtggcacagtgtcagctcactgcaacctccgcctcccgggttcaagcaattctcgtgcctcagcctcccatgtagctgggattaaatgtgcccgtcaccacacccggctgatttttttttgtattttagtagagacggagtttcaccatgttgccaaggctggtctcgaactcctgagctcaggcaatccacccatctcggacttccaaagtgctaggattacaggcgtgagccaccatgcttagctgattatgtaaacattgttaatacctgagcaagtagtgtccaactttttgtgtttcttggagttattaacagtttttgtcccagctgctcagtttcttttgtaactgttatgtgtgtgtgtgtaacattatcttcatgccccaaaacccatacccgttatcaatcactccccatttcccaccctgtccccagacttaggcaatcccaaatctgatttctgcctcgatggagtttcctattctggacgtttagtataaatggaatcacatg

SEQ ID NO: 310069 - DNA, 1191 bp, Artificial Sequence
  derived and/or modified sequence
atggccagcctgagcagagccctgagagtggccgccgcccaccccagacagagccccaccagaggcatgggcccctgcaacctgagcagcgccgccggccccaccgccgagaagagcgtgccctaccagagaaccctgaaggagggccagggcaccagcgtggtggcccagggccccagcagacccctgcccagcaccgccaacgtggtggtgatcggcggcggcagcctgggctgccagaccctgtaccacctggccaagctgggcatgagcggcgccgtgctgctggagagagagagactgaccagcggcaccacctggcacaccgccggcctgctgtggcagctgagacccagcgacgtggaggtggagctgctggcccacaccagaagagtggtgagcagagagctggaggaggagaccggcctgcacaccggctggatccagaacggcggcctgttcatcgccagcaacagacagagactggacgagtacaagagactgatgagcctgggcaaggcctacggcgtggagagccacgtgctgagccccgccgagaccaagaccctgtaccccctgatgaacgtggacgacctgtacggcaccctgtacgtgccccacgacggcaccatggaccccgccggcacctgcaccaccctggccagagccgccagcgccagaggcgcccaggtgatcgagaactgccccgtgaccggcatcagagtgtggaccgacgacttcggcgtgagaagagtggccggcgtggagacccagcacggcagcatccagaccccctgcgtggtgaactgcgccggcgtgtgggccagcgccgtgggcagaatggccggcgtgaaggtgcccctggtggccatgcaccacgcctacgtggtgaccgagagaatcgagggcatccagagcttcaccctgctgcccaccctggagtacagcggcaccgtgagcgcccactgcaacctgagactgcccggcagcagcaacagcagagccagcgccagccacgtggccggcatcaagtgcgccagacaccacaccagactgatcttcttctgcatcctggtggagaccgagttccaccacgtggccaaggccggcctggagctgctgagcagcggcaacccccccatcagcgacttccagagcgccagaatcaccggcgtgagccaccacgcctag

SEQ ID NO: 310070 - DNA, 372 bp, Artificial Sequence
  derived and/or modified sequence
atgccttctgccggaaccctaccatgggtccaggggatcatctgcaatgccaacaatccttgcttccggtacccgactccaggagaggcacctggcgtggttggaaacttcaataagtccattgttgcacggttgttctcagacgcacggcggctgctgctatacagtcagaaggacacatcaatgaaagatatgagaaaagtcttgagaactctgcagcagattaaaaagagctcgtctaatctgaagttacaagatttccttgtggacaatgagacattcagcggctttttgtaccacaatctttccctgccgaagagtacagtggataaaatgctccgagccgatgtcattctgcacaaggtatcttag

SEQ ID NO: 310071 - DNA, 372 bp, Artificial Sequence
  derived and/or modified sequence
atgcccagcgctggcaccctgccctgggtgcagggcatcatctgcaatgccaacaacccctgcttccgctaccccaccccaggagaggcccctggggtggtgggcaacttcaacaagagcatcgtggcccggctcttcagtgatgcccggcggctgctgctgtacagccagaaggacacctccatgaaggacatgaggaaggtgctgcggaccctgcagcagatcaagaagagcagcagcaacctgaagctgcaggacttcctggtggacaatgagaccttcagcggcttcctgtaccacaacctgagcctgcccaagagcacagtggacaagatgctgcgggcagatgtgatcctgcacaaggtgtcctag

SEQ ID NO: 310072 - DNA, 372 bp, Artificial Sequence
  derived and/or modified sequence
atgcccagcgccggcaccctgccctgggtgcagggcatcatctgcaacgcaaacaacccatgctttagatatcctaccccaggtgaagcccccggggtggtgggcaatttcaataagtccattgttgctcggttgttcagtgatgccaggcgccttttactgtatagtcagaaggacacctcaatgaaggatatgagaaaggtgctcagaacactccaacagattaagaaaagctcaagcaacttgaagttgcaagatttcctggtggacaacgaaacattctcaggattcctgtaccataatctctcattaccgaagtccacggtcgataagatgcttagagccgatgtgattctgcataaggtgtcttag

SEQ ID NO: 310073 - DNA, 372 bp, Artificial Sequence
  derived and/or modified sequence
atgccttccgcaggaacgctgccctgggtccagggcatcatctgtaatgctaataacccctgcttccgttaccctactccaggcgaggcccctggcgtcgtgggtaatttcaacaagtcgatcgtcgccagactttttagtgacgccagacggctcctcctttactctcaaaaggacacttccatgaaggacatgcgcaaggtgctgaggaccttgcagcagatcaagaagagctcgtcaaatttaaagctgcaggattttctggtggataacgaaacattcagcgggtttctctaccacaacctctctctcccaaagtccaccgtggataagatgttgagggccgatgttatcctgcacaaggttagttag

SEQ ID NO: 310074 - DNA, 372 bp, Artificial Sequence
  derived and/or modified sequence
atgcccagcgccggcaccctgccctgggtgcagggcatcatctgcaacgccaacaacccctgcttcagataccccacccccggcgaggcccccggcgtggtgggcaacttcaacaagagcatcgtggccagactgttcagcgacgccagaagactgctgctgtacagccagaaggacaccagcatgaaggacatgagaaaggtgctgagaaccctgcagcagatcaagaagagcagcagcaacctgaagctgcaggacttcctggtggacaacgagaccttcagcggcttcctgtaccacaacctgagcctgcccaagagcaccgtggacaagatgctgagagccgacgtgatcctgcacaaggtgagctag

SEQ ID NO: 310075 - DNA, 923 bp, Artificial Sequence
  derived and/or modified sequence
gtgagtggggccgggacccgcagagccgagccgacccttctctcccgggctgcggcagggcagggcggggagctccgcgcaccaacagagccggttctcagggcgctttgctccttgttttttccccggttctgttttctccccttctccggaaggcttgtcaaggggtaggagaaagagacgcaaacacaaaagtggaaaacagtgtcagctgctgctggaagtggcctggcctctatttatcttcctgatcctgatctctgttcggctgagctacccaccctatgaacaacatgaatgccattttccaaataaagccatgccctctgcaggaacacttccttgggttcaggggattatctgtaatgccaacaacccctgtttccgttacccgactcctggggaggctcccggagttgttggaaactttaacaaatccattgtggctcgcctgttctcagatgctcggaggcttcttttatacagccagaaagacaccagcatgaaggacatgcgcaaagttctgagaacattacagcagatcaagaaatccagctcaaacttgaagcttcaagatttcctggtggacaatgaaaccttctctgggttcctgtatcacaacctctctctcccaaagtctactgtggacaagatgctgagggctgatgtcattctccacaaggtaagctgatgcctccagcttcctcagtagggctgatggcaattacgttgtgcagctactggaaagaaatgaataaacccttgtccttgtaatggtggtgaaggggagggaggtagtttgaatacaacttcacttaattttacttccctattcaggcaggaattgccaaaccatccaggagtggaatatgcaacctggcgtcatgggccagctggttaaaataaaattgatttctggctta

SEQ ID NO: 310076 - DNA, 45 bp, Artificial Sequence
  derived and/or modified sequence
atgcccctgtgccctttagcccacgcgatgcaaccacagagctag

SEQ ID NO: 310077 - DNA, 3173 bp, Artificial Sequence
  derived and/or modified sequence
gggggcggaccgtggggaagctgcttccgggtgagccccccccgctcttacgcggtctgtgggagaccggagcgggagacagcggtgacaggagcagcggccgggagcccttagggaggcagacagagcctgcagccaatgccccaggagccctcggttccaaccaactgatgcccctgtgcccactggcccacgccatgcagccccagtccgttctgcacagcggctacttccacccactacttcgggcctggcagacagccaccaccaccctcaatgcctccaacctcatctaccccatctttgtcacggatgttcctgatgacatacagcctatcaccagcctcccaggagtggccaggtatggtgtgaagcggctggaagagatgctgaggcccttggtggaagagggcctacgctgtgtcttgatctttggcgtccccagcagagttcccaaggacgagcggggttccgcagctgactccgaggagtccccagctattgaggcaatccatctgttgaggaagaccttccccaacctcctggtggcctgtgatgtctgcctgtgtccctacacctcccatggtcactgcgggctcctgagtgaaaacggagcattccgggctgaggagagccgccagcggctggctgaggtggcattggcgtatgccaaggcaggatgtcaggtggtagccccgtcggacatgatggatggacgcgtggaagccatcaaagaggccctgatggcacatggacttggcaacagggtatcggtgatgagctacagtgccaaatttgcttcctgtttctatggccctttccgggatgcagctaagtcaagcccagcttttggggaccgccgctgctaccagctgccccctggagcacgaggcctggctctccgagctgtggaccgggatgtacgggaaggagctgacatgctcatggtgaagccgggaatgccctacctggacatcgtgcgggaggtaaaggacaagcaccctgacctccctctcgccgtgtaccacgtctctggagagtttgccatgctgtggcatggagcccaggccggggcatttgatctcaaggctgccgtactggaggccatgactgccttccgcagagcaggtgctgacatcatcatcacctactacacaccgcagctgctgcagtggctgaaggaggaatgatggagacagtgccaggcccaagaactagaactttaaaacgttcccggggcctcagacaagtgaaaaccaaagtaaatgctgcttttagaactgtgccctcatgccctcttcctgctcacatgctagcggggcccagcagccctgggtggttttgccagcatgctaactcttgtaactcgcagctgcatcctatgagctctcccaagcttccccgcccctcccctgggtcagccgtgaggcccacctttgccaccctcagctctttcctctggtgtggcttcagcttgaaagcaacctggagtcgggggcacagcctttggggcctggctgggagagggtcttggagcattaggggaagaagagagcagtgggatcttggggcctgagaagccttggaacgcttctggcagcagagctgggtgtgggaatgaggcctagatcgatatccctgggttagagttgaaatttgccgcaattccactggaaggcatttcccacgaggccagaggttgccaggctgcctgaggtctcctattctactctgaaccataaacccagagaagaattactcattaaccagcataaatactgcctgaggatcaaaactcagaggcaaagagggagttcctgactgctagaggtgccaccaccacaaacactttttattcaggagatactttttgagaatctctgctctgttcctaggttcagtgctgggtcctgggaatacagcaggacagacctcagcttatctcttcatagaaattatacaaagagaattggggagacagctaagaagaaaacaaagaaataaagcagttacaaattgtgataagtgctttgaaggaaagaaggggtctgagacaacaacagggaaggggcctctcttgaaacagtagttgggaaggaggcagacatgcaccagtgatgtggtgacaggtgctctgaaggaggtcaccaggacctgacctctttgaaggatcagaaaatacttccctgaaggactgacatttgagcctagacctgaagggtgagccatcaagctaagacaattggggaagagcattccagggagagggaggagttgtgcaaaggccctggggctccttctagctggaggaatgcaaggctagcttgtctggagcactgagaggatggcctgaactgagtggagagagacagaccaggaccaaaccatgcagaggtcaagggccacattcaccttttcagagtgactcaatcaaatttgtagtttgtaaaagtattttaacagctctgcggcaaagtgcaaatgaaaagtcttgatggcatggactggagcggggacagtggggatggagaaaggggaatggattgtggatgtgtttagaaggtagattcgatgtgaaggatgaatctggcttgaccttctgggtggctgatgggccatttactgagatggggcagcctggaagaggaacagaagcagggtcggggtggagggagaatactaaacttagcttgagacattttgcaataaggaagctatatctagagtgcttatgtgactcacctaaggccactcaacaagtttgtggcagaactggattagaactgcacagaaaacagccaagctgggatttgaacccatgtagtccaactccaaggcctctgcccctaaccactgtgccataccacctcccaataatcaacagcaaaattataggtctaacaatgttttatagacacccctccatttatgtgatgggtttgcatcctgataaacccatcataagttgaaaatatgatcataagttgaaaatatgatcataagtcaaaaatgtatttaatatacctaacctaccaaacatcatagcttagcctagcctgccttaaacatgctcagaacacttacattagcctacagtgggcaaaactatccaacacaaaatctatattgtaataaagttgtaaagaattttgaataaaaattcaatatttgaa

SEQ ID NO: 310078 - DNA, 703 bp, Artificial Sequence
  derived and/or modified sequence
acctcctctccaagcccagctccccactgccctcttcctgccctgtccctgtctccgctgccctttagatcaggcaggcaggcaggcctagagcatccgccctgagacactgcctgttggctgccttaagacgccccttccttctctgcccgcagcctccccagcctctgcattcctctgcttcctgtctgctctgctcagcctgcaggattgatcttcccaaagccaggtgtcaaccaggccactaaccctacccactgctcagaaatcttcccacagcctcagcctggccccctcttatccatcccctccatacacacttgcctcagctcctcaaaacagtccacagccatcctccttccccacctttgcccctttcttcccttcctaaggaaatattggcccccttctctccaccaggctgaacccactcatcctgcaaaaccaagttcaacgccctgtcattttcttttttttttttttttttgagatggagtctcacactgtcgcccaggctagagtgcaatgggtgcactctcggctcactgcaacctctgcctcctaggttcaatcgattcttctgcctcagcctccagaggaactctgactacagacagagcctgcagccaatgccccaggagccctcggttccaaccaactgatgcccctgtgcccactggcccacgccatgcagccccagtcc

SEQ ID NO: 310079 - DNA, 536 bp, Artificial Sequence
  derived and/or modified sequence
gctcttacgcggtctgtgggagaccggagcgggagacagcggtgacaggagcagcggccgggagcccttagggaggcagcacccaaagcagaaacagtatgggcagagagacgcctactgaatcagacagagcctgcagccaatgccccaggagccctcggttccaaccaactgatgcccctgtgcccactggcccacgccatgcagccccagtccgttctgcacagcggctacttccacccactacttcgggcctggcagacagccaccaccaccctcaatgcctccaacctcatctaccccatctttgtcacggatgttcctgatgacatacagcctatcaccagcctcccaggagtggccaggtatggtgtgaagcggctggaagagatgctgaggcccttggtggaagagggcctacgctgtgtcttgatctttggcgtccccagcagagttcccaaggacgagcggggttccgcagctgactccgaggagtccccagctattgaggcaatccatctgttgaggaagacctt

SEQ ID NO: 310080 - DNA, 583 bp, Artificial Sequence
  derived and/or modified sequence
aggaagactggataaaatgggcccctgagatggctgaaggcagctaaaggggcctaagagactatggggagaagggcagccagttcctaggcagccctgccccactgtttctgataagcaggaggcagttgttccctcagcctcctgaaagcaatgaggagttgaggccacgggaatgcagctttggattccagaagccaaggacctgttacaaaggtggttttctgggaagcaaattagagggattagacctggcttcgacatctgacttgactccaacctaccaaaggatctcccagttcacctgggagttaacacaccagggttctagtccttttgctcgctgtgtggctttggacagagcctgcagccaatgccccaggagccctcggttccaaccaactgatgcccctgtgcccactggcccacgccatgcagccccagtccgttctgcacagcggctacttccacccactacttcgggcctggcagacagccaccaccaccctcaatgcctccaacctcatctaccccatctttgtcacggatgttcctgatgacatacagcctatcaccagcctcc

SEQ ID NO: 310081 - DNA, 45 bp, Artificial Sequence
  derived and/or modified sequence
atgccactgtgtccgttggcccacgccatgcagccacagtcctag

SEQ ID NO: 310082 - DNA, 45 bp, Artificial Sequence
  derived and/or modified sequence
atgcccctgtgccccctggcccacgccatgcagccccagagctag

SEQ ID NO: 310083 - protein, 120 aa, Artificial Sequence
  derived and/or modified sequence
MPLCPLAHAMQPQSVLHSGYFHPLLRAWQTATTTLNASNLIYPIFVTDVPDDIQPITSLPGVARYGVKRLEEMLRPLVEEGLRCVLIFGVPSRVPKDERGSAADSEESPAIEAIHLLRKT

SEQ ID NO: 310084 - protein, 59 aa, Artificial Sequence
  derived and/or modified sequence
MPLCPLAHAMQPQSVLHSGYFHPLLRAWQTATTTLNASNLIYPIFVTDVPDDIQPITSL

SEQ ID NO: 310085 - DNA, 363 bp, Artificial Sequence
  derived and/or modified sequence
atgcccctgtgtcccctcgctcatgcaatgcagccccagagtgtgttgcattctggatactttcatccccttttaagagcctggcagaccgctacaacaaccctcaacgcctctaacctcatctatcccatcttcgtaacggatgttcccgatgatattcagcctatcaccagcctgcctggagtggctcggtatggagtgaaaaggctggaggaaatgttgagacctttagtggaggagggacttcggtgcgttttgattttcggcgtgccttcaagggttccgaaagacgagcggggaagcgccgcagattcagaggagtcacccgcaattgaagctatacatctcctgcgtaaaacgtag

SEQ ID NO: 310086 - DNA, 180 bp, Artificial Sequence
  derived and/or modified sequence
atgcctctgtgtcctcttgcgcacgccatgcaaccccaatctgttcttcatagcggttatttccatcctctcttaagggcctggcagactgccactacgaccctgaatgccagcaacctgatataccccattttcgtgacggatgtaccggacgatattcaaccaataacatccctatag

SEQ ID NO: 310087 - DNA, 363 bp, Artificial Sequence
  derived and/or modified sequence
atgcccctgtgccccctggcccacgccatgcagccccagagcgtgctgcacagcggctacttccaccccctgctgcgggcctggcagacagccaccaccaccctgaatgccagcaacctgatctaccccatctttgtgacagatgtgcctgatgacatccagcccatcaccagcctgcccggggtggcccgctatggagtgaagaggctggaggagatgctgcggcccctggtggaggagggcctgcgctgtgtgctgatcttcggcgtgcccagccgggtgcccaaggatgagcggggcagcgctgctgacagcgaggagagccctgccatcgaggccatccacctgctgaggaagacctag

SEQ ID NO: 310088 - DNA, 180 bp, Artificial Sequence
  derived and/or modified sequence
atgcccctgtgccccctggcccacgccatgcagccccagagcgtgctgcacagcggctacttccaccccctgctgcgggcctggcagacagccaccaccaccctgaatgccagcaacctgatctaccccatctttgtgacagatgtgcctgatgacatccagcccatcaccagcctgtag

SEQ ID NO: 310089 - DNA, 363 bp, Artificial Sequence
  derived and/or modified sequence
atgcccctgtgccccctggcccacgccatgcagccccagagcgtgctccactccggctattttcacccacttctcagagcttggcaaacagcaacaactacactgaacgcctccaatttgatttaccctatctttgtgactgatgtgcctgatgacattcaaccaattacttctttgccaggtgtagccagatacggtgtgaaacgtctagaagagatgctcaggcccctagtggaagaaggtctccgatgtgtactgatcttcggggtcccctcccgagtaccaaaagacgaacggggcagcgccgccgattccgaggagtcgcccgccatagaagccattcatttactcagaaagacgtag

SEQ ID NO: 310090 - DNA, 180 bp, Artificial Sequence
  derived and/or modified sequence
atgcccctgtgccccctggcccacgccatgcagccccagagcgtgctgcattctggctacttccatcctctgctgcgcgcctggcagaccgctaccaccaccttgaacgcttccaatctcatctaccctatttttgttaccgacgtacctgatgatattcaacccataaccagtctctag

SEQ ID NO: 310091 - DNA, 363 bp, Artificial Sequence
  derived and/or modified sequence
atgcccctctgtcctctggcacatgctatgcaaccccaatcagtgcttcatagtggttacttccatcccctgctgagggcctggcaaacagctacaaccactctaaatgccagcaatctcatctaccccattttcgttactgatgtaccagatgatatacaacccattacaagcctgcctggagttgccagatacggggttaagcgccttgaggagatgctgcgccctttagtcgaagagggcctgagatgcgtcttaatcttcggagttccaagcagagttcccaaagatgaaagggggagtgccgcagacagcgaggagagccctgccatcgaagcaatacacctcttgcgaaaaacctag

SEQ ID NO: 310092 - DNA, 180 bp, Artificial Sequence
  derived and/or modified sequence
atgccactatgccctctcgcgcacgctatgcaacctcagtcggtcctccactccggctattttcaccccctgctgagagcgtggcaaactgccactaccaccctgaatgcatccaatctaatttatcctatcttcgtgacagatgtacccgacgacatacagcctataacttccctgtag

SEQ ID NO: 310093 - DNA, 363 bp, Artificial Sequence
  derived and/or modified sequence
atgcccctgtgccccctggcccacgccatgcagccccagagcgtgctgcacagcggctacttccaccccctgctgagagcctggcagaccgccaccaccaccctgaacgccagcaacctgatctaccccatcttcgtgaccgacgtgcccgacgacatccagcccatcaccagcctgcccggcgtggccagatacggcgtgaagagactggaggagatgctgagacccctggtggaggagggcctgagatgcgtgctgatcttcggcgtgcccagcagagtgcccaaggacgagagaggcagcgccgccgacagcgaggagagccccgccatcgaggccatccacctgctgagaaagacctag

SEQ ID NO: 310094 - DNA, 180 bp, Artificial Sequence
  derived and/or modified sequence
atgcccctgtgccccctggcccacgccatgcagccccagagcgtgctgcacagcggctacttccaccccctgctgagagcctggcagaccgccaccaccaccctgaacgccagcaacctgatctaccccatcttcgtgaccgacgtgcccgacgacatccagcccatcaccagcctgtag

SEQ ID NO: 310095 - protein, 235 aa, Artificial Sequence
  derived and/or modified sequence
MILEVGENNGFFSKSLLPRYASKKLKSSLPHSRAVKKFIMLTSNQNVPVFLIDPLILELINKNFEQVKNTSHGSTSQCKFFCVPRDFTAFALQYHLWKNEEGWFRIAENMGFQCLKIESKDPRLDGIDSLSGTEIPLHYICKLATHAIHLVVFHERSGNYLWHGHLRLKEHIDRKFVPFRKLQFGRYPGAFDRPELQQVTVDGLEVLIPKDPMHFVEEVPHSRFIECRYKEARAF

SEQ ID NO: 310096 - DNA, 786 bp, Artificial Sequence
  derived and/or modified sequence
cactatttatcaacaaagaatggagctggtttgtcaaaatccaaaggaagccgaattggatttgatagcacacagtggaaatgatccttgaggtgggagaaaataatggatttttttcaaagtctttacttccacggtacgcaagcaaaaagttgaagagcagcttaccacattcacgtgcagttaaaaaatttattatgttaacatccaaccaaaatgtaccagtgtttcttattgatcctttgatactggaattgattaataagaactttgaacaagtcaaaaatacttctcatggctctacttcacaatgcaagtttttctgtgttccaagagactttactgcatttgcactgcagtatcacctatggaagaatgaggaaggctggtttcggatagctgagaatatgggatttcagtgcctaaagattgagagtaaagatccccggctagacgggatagactcactctctggaactgaaatccccctgcactatatctgcaaactggccactcatgcgatccacttggtagtctttcatgagaggagtggcaactacctctggcacggccacttgagacttaaagaacacattgacaggaaatttgttcccttccgaaagttacagtttggtcgttatccaggagcttttgacaggccagagttacagcaagttactgttgatggactggaagttctcattccaaaggatccaatgcactttgtagaagaagtaccacactctaggtttattgagtgtaggtataaagaagctcgagcattct

SEQ ID NO: 310097 - DNA, 708 bp, Artificial Sequence
  derived and/or modified sequence
atgatcctcgaggtgggcgagaataacgggttctttagcaagtccctgctgccaagatacgcgagcaaaaagctaaagtcttcactcccacatagcagggcagtgaagaagttcataatgttgaccagcaatcaaaatgtacctgtgtttcttatcgatccgttgattctggagcttattaataagaactttgagcaggtgaagaacacctcacatgggtccacaagccagtgcaagtttttttgcgtgcccagagactttacagcgtttgcactccaataccacttatggaagaacgaggaggggtggttccggatcgccgaaaatatgggcttccagtgccttaagatagagagcaaagatccacggctggacggaatcgatagcctgagtggaacagaaattcccctgcactacatctgcaagctggctacccacgctattcacctcgtagtctttcacgaacggagcggcaattacctctggcacggccacttgagattaaaagaacatatcgataggaaatttgtgcccttcagaaaattgcagttcggcagatatccaggcgcgtttgacaggcctgaactgcagcaagttaccgtcgacgggctggaggtcttaatccccaaggatcccatgcatttcgtcgaggaagtcccccactcgagatttatcgaatgccggtataaagaggcccgggctttctag

SEQ ID NO: 310098 - DNA, 708 bp, Artificial Sequence
  derived and/or modified sequence
atgatcctggaggtgggagaaaataatggcttcttcagcaagagcctgctgcccaggtatgccagcaagaagctgaagagcagcctgccccacagcagagctgtgaagaagttcatcatgctgaccagcaaccagaatgtgcctgtgttcctgattgaccccctcatcctggagctgatcaacaagaactttgagcaggtgaagaacaccagccacggcagcaccagccagtgcaagttcttctgtgtgccccgggacttcaccgcctttgccctgcagtaccacctgtggaagaatgaggagggctggttcagaattgctgagaacatgggcttccagtgcctgaagattgagagcaaggacccccggctggatggcatcgacagcctgtctggaacagagatccccctgcactacatctgcaagctggccacccacgccatccacctggtggtgttccacgagaggagcggcaactacctgtggcacggccacctgcggctgaaggagcacatcgacaggaagtttgtgcccttcaggaagctgcagtttggccgctacccaggggcctttgacaggcctgagctgcagcaggtgacagtggatggcctggaggtgctgatccccaaggaccccatgcactttgtggaggaggtgccccacagccgcttcatcgagtgccgctacaaggaggcccgggccttctag

SEQ ID NO: 310099 - DNA, 708 bp, Artificial Sequence
  derived and/or modified sequence
atgatcctggaggtgggcgagaacaacggcttcttcagcaagagcctgctgccaaggtacgcaagtaaaaagttgaaatcctcactcccccactctagggcagtaaagaagttcataatgttaacaagcaaccagaatgttccagtgttcttaatcgacccactaatcctcgaactgatcaataagaatttcgagcaggtcaaaaacacctcgcatgggagcacctctcagtgcaaattcttctgtgtcccaagggacttcaccgccttcgctctccaataccacttatggaagaatgaggagggttggtttcgcatagcggagaatatggggtttcaatgtctgaaaattgagtccaaggacccacgactggatggcatagatagcttatctggaacggagattcccctgcactacatctgcaaactcgccactcacgcaatacacctggtggtatttcacgagaggtccgggaactatctgtggcatggccatttacgcctgaaggagcacatcgataggaagtttgttcctttccgcaaactgcagttcgggaggtacccaggagcattcgaccgccctgagctgcagcaggtaaccgtcgacggcctggaggtgctcattccaaaagatccgatgcatttcgtggaagaggtcccgcacagcaggttcatcgaatgtcgttacaaagaagcaagggctttctag

SEQ ID NO: 310100 - DNA, 708 bp, Artificial Sequence
  derived and/or modified sequence
atgatcctggaggtgggcgagaataacggattttttagtaagagcctgctcccccgatatgcatccaagaagttgaaatcttcgctccctcatagccgtgccgtcaagaaattcatcatgttgacaagtaaccaaaacgtgcctgtgttcctgatcgaccctctcatcctggagctgatcaataaaaatttcgaacaggtcaaaaatacatcgcatggctcgacctcacagtgtaaattcttttgtgtgcctcgtgattttacagcctttgcattgcagtatcacctatggaagaacgaggaagggtggtttcgcatcgctgagaatatgggattccaatgcttgaaaattgagtcaaaggatccgagactggatgggatcgatagcctgtccggcactgaaataccactgcattatatctgcaaactcgcaacacacgctatccacctagtggttttccatgagcgttctggtaattacctctggcacggtcacctccgccttaaggaacacattgataggaagttcgtgccatttcgcaaacttcagttcgggagatacccgggagcatttgaccggccagaactccaacaggtgaccgtcgatgggctagaggtcctgatacccaaagacccgatgcacttcgtggaggaggtgccccactcaagattcatcgagtgtcggtataaagaagctcgcgcattctag

SEQ ID NO: 310101 - DNA, 705 bp, Artificial Sequence
  derived and/or modified sequence
atgatcctggaggtgggcgagaacaacggcttcttcagcaagagcctgctgccccgctacgccagcaagaagctgaagagcagcctgccccacagccgcgccgtgaagaagttcatcatgctgaccagcaaccagaacgtgcccgtgttcctgatcgaccccctgatcctggagctgatcaacaagaacttcgagcaggtgaagaacaccagccacggcagcaccagccagtgcaagttcttctgcgtgccccgcgacttcaccgccttcgccctgcagtaccacctgtggaagaacgaggagggctggttccgcatcgccgagaacatgggcttccagtgcctgaagatcgagagcaaggacccccgcctggacggcatcgacagcctgagcggcaccgagatccccctgcactacatctgcaagctggccacccacgccatccacctggtggtgttccacgagcgcagcggcaactacctgtggcacggccacctgcgcctgaaggagcacatcgaccgcaagttcgtgcccttccgcaagctgcagttcggccgctaccccggcgccttcgaccgccccgagctgcagcaggtgaccgtggacggcctggaggtgctgatccccaaggaccccatgcacttcgtggaggaggtgccccacagccgcttcatcgagtgccgctacaaggaggcccgcgccttc

SEQ ID NO: 310102 - DNA, 708 bp, Artificial Sequence
  derived and/or modified sequence
atgatcctggaggtgggcgagaacaacggcttcttcagcaagagcctgctgcccagatacgccagcaagaagctgaagagcagcctgccccacagcagagccgtgaagaagttcatcatgctgaccagcaaccagaacgtgcccgtgttcctgatcgaccccctgatcctggagctgatcaacaagaacttcgagcaggtgaagaacaccagccacggcagcaccagccagtgcaagttcttctgcgtgcccagagacttcaccgccttcgccctgcagtaccacctgtggaagaacgaggagggctggttcagaatcgccgagaacatgggcttccagtgcctgaagatcgagagcaaggaccccagactggacggcatcgacagcctgagcggcaccgagatccccctgcactacatctgcaagctggccacccacgccatccacctggtggtgttccacgagagaagcggcaactacctgtggcacggccacctgagactgaaggagcacatcgacagaaagttcgtgcccttcagaaagctgcagttcggcagataccccggcgccttcgacagacccgagctgcagcaggtgaccgtggacggcctggaggtgctgatccccaaggaccccatgcacttcgtggaggaggtgccccacagcagattcatcgagtgcagatacaaggaggccagagccttctag

SEQ ID NO: 310103 - protein, 70 aa, Artificial Sequence
  derived and/or modified sequence
MVRTKTWTLKKHFVGYPTNSDFELKTAELPPLKNGEVLLEALFLTVDPYMRVAAKRLKEGDTMMGQQVAK

SEQ ID NO: 310104 - DNA, 360 bp, Artificial Sequence
  derived and/or modified sequence
atggtgagaaccaagacctggaccctgaagaagcacttcgtgggctaccccaccaacagcgacttcgagctgaagaccgccgagctgccccccctgaagaacggcgaggtgctgctggaggccctgttcctgaccgtggacccctacatgagagtggtggagagcaagaacgtggccctgcccaagggcaccatcgtgctggccagccccggctggaccacccacagcatcagcgacggcaaggacctggagaagctgctgaccgagtggcccgacaccatccccctgagcctggccctgggcaccgtgggcatgcccggcctgaccgcctacttcggcctgctggagatctgcggctag

SEQ ID NO: 310105 - DNA, 213 bp, Artificial Sequence
  derived and/or modified sequence
atggtgagaaccaagacctggaccctgaagaagcacttcgtgggctaccccaccaacagcgacttcgagctgaagaccgccgagctgccccccctgaagaacggcgaggtgctgctggaggccctgttcctgaccgtggacccctacatgagagtggccgccaagagactgaaggagggcgacaccatgatgggccagcaggtggccaagtag

SEQ ID NO: 310106 - DNA, 360 bp, Artificial Sequence
  derived and/or modified sequence
atggtaaggaccaagacttggacgctgaagaagcactttgttggttaccctaccaattcagattttgagttgaagaccgctgagctcccaccccttaagaatggcgaagtgttattggaggcactattcttgacagtcgatccttacatgagagtggttgagtccaagaacgtcgctctgcccaaaggcaccatagtcctggcttctccaggctggactacccactctatcagtgatggtaaagatctcgagaaactgctcactgaatggcccgacacaatcccactcagcttggcacttggcacagttgggatgccagggttgacagcatacttcgggctgttggaaatctgcggctag

SEQ ID NO: 310107 - DNA, 213 bp, Artificial Sequence
  derived and/or modified sequence
atggtgaggaccaaaacttggactctcaaaaaacactttgtggggtaccccactaattctgattttgagttaaagacagccgagttaccacccttgaagaacggtgaagtgcttttagaagcgctgttcttaactgtagatccctacatgcgtgtcgctgccaaaagattgaaggaaggggatacaatgatgggccaacaggtggcgaaatag

SEQ ID NO: 310108 - DNA, 213 bp, Artificial Sequence
  derived and/or modified sequence
atggtccgtaccaagacctggaccctcaaaaaacactttgtgggttaccccactaactccgacttcgaactgaagaccgccgagctgccgccactcaagaatggtgaggtactcctggaagcgctttttctcactgtcgacccatatatgcgagtcgcggctaagcgactgaaggaaggcgacaccatgatgggacaacaagtggccaagtag

SEQ ID NO: 310109 - DNA, 360 bp, Artificial Sequence
  derived and/or modified sequence
atggtacggacaaaaacatggactctgaagaagcattttgtaggctaccctaccaattcagatttcgagctgaaaaccgccgagctccctcctctgaagaatggcgaggtgctgttggaggccttgtttctaacggttgatccctacatgcgggtcgtcgaatccaagaatgtggccctgccaaagggcaccatcgtgcttgcctcgccagggtggacaacccactcaatatctgatgggaaggacctagagaagctgctgactgagtggccagacaccatccccctgtcgctagcacttgggaccgtggggatgccaggcctgacagcttattttggattgttagagatctgtggatag

SEQ ID NO: 310110 - DNA, 847 bp, Artificial Sequence
  derived and/or modified sequence
gttccttggagagcttggagccgcgcgccggagggaataggaaagcttggttacaacccgggacacccggagcttcaggatggttcgtactaagacatggaccctgaagaagcactttgttggctatcctactaatagtgactttgagttgaagacagctgagctcccacccttaaaaaatggagaggtcctgcttgaagctttgttcctcaccgtggatccctacatgagagtggcagccaaaagattgaaggaaggtgatacaatgatggggcagcaagtggccaagtaattatttccatttgtcccagtgcttggaaaatatgtctcctctttacctcctgctgggtcctgtctctgtccattgctcctacaatttcttcagcctatgttgttgactcactgtgtgatcttggaatcaacttgggaaattctgtctccttcctaactagctggaaaggagggaaggatgtgaaattgtcattttttcagcttcactttgccatccttacttttaattactaaaaaaaaaaaagtatttgtccaggtcatgatttattgcgggatctggccagcagcccacaatgcaacagggttctctctttgttcccaggtggatcggcaggttgagaaataatagacacacacaagatagtgaaagctgggtccaggggcgtcaccgccttctggttccgtggtgccaccaaagcactgaatatacccgcatttattattaagtttagtgagggcgggggtaggttagtgagggatttagggtcatttgattatgaggtgagatggtcacatggggatgaagtaattctttaacatacatctgtatgcagaa

SEQ ID NO: 310111 - DNA, 1061 bp, Artificial Sequence
  derived and/or modified sequence
gagatacgcgcacacacacacacaaacgcactcagatttcccggaccctggttttcctcctgtgaccctttcggggccgggctctcaccctaaagaagcagccccgccctggggtggccccaccctctcttgggacctgtcataagtcggaccccgggcgcccggctgcgcagtcccagccgccttccccaggcagtggaaccttcgggctcctgagcttcaggatggttcgtactaagacatggaccctgaagaagcactttgttggctatcctactaatagtgactttgagttgaagacagctgagctcccacccttaaaaaatggagaggtcctgcttgaagctttgttcctcaccgtggatccctacatgagagtggcagccaaaagattgaaggaaggtgatacaatgatggggcagcaagtggccaagtaattatttccatttgtcccagtgcttggaaaatatgtctcctctttacctcctgctgggtcctgtctctgtccattgctcctacaatttcttcagcctatgttgttgactcactgtgtgatcttggaatcaacttgggaaattctgtctccttcctaactagctggaaaggagggaaggatgtgaaattgtcattttttcagcttcactttgccatccttacttttaattactaaaaaaaaaaaagtatttgtccaggtcatgatttattgcgggatctggccagcagcccacaatgcaacagggttctctctttgttcccaggtggatcggcaggttgagaaataatagacacacacaagatagtgaaagctgggtccaggggcgtcaccgccttctggttccgtggtgccaccaaagcactgaatatacccgcatttattattaagtttagtgagggcgggggtaggttagtgagggatttagggtcatttgattatgaggtgagatggtcacatggggatgaagtaattctttaacatacatctgtatgcagaagtacagtatacagagataagaatttacaatatagtgtgtgcatcagtaatttctaacagagccttaaaa

SEQ ID NO: 310112 - DNA, 360 bp, Artificial Sequence
  derived and/or modified sequence
atggtgaggaccaagacctggaccctgaagaagcactttgtgggctaccccaccaacagcgactttgagctgaagacagctgagctgccccccctgaagaatggagaggtgctgctggaggccctcttcctgactgtggacccctacatgagggtggtggagagcaagaatgtggccctgcccaagggcaccatcgtgctggccagccctggctggaccacccacagcatcagtgatggcaaggacctggagaagctgctgacagagtggccagacaccatccccctgagcctggccctgggcaccgtgggcatgcctggcctgacagcctacttcggcctgctggagatctgtggctag

SEQ ID NO: 310113 - DNA, 213 bp, Artificial Sequence
  derived and/or modified sequence
atggtgaggaccaagacctggaccctgaagaagcactttgtgggctaccccaccaacagcgactttgagctgaagacagctgagctgccccccctgaagaatggagaggtgctgctggaggccctcttcctgactgtggacccctacatgagggtggccgccaagaggctgaaggagggggacaccatgatgggccagcaggtggccaagtag

SEQ ID NO: 310114 - DNA, 360 bp, Artificial Sequence
  derived and/or modified sequence
atggtgcggaccaagacctggaccctgaagaagcacttcgtgggctaccctaccaactctgactttgagttgaaaacagcagagctgccgccactgaagaatggagaggtcctacttgaggcactgttcttaacggtggatccctacatgagagtggttgagagcaagaatgttgctcttcccaaggggacaatagtgcttgcgagccctggatggactacgcattcaattagcgatggaaaagacttggagaagctgctgaccgagtggcctgacacaattccgttatctctggccctgggaactgtgggaatgccagggctgacggcctattttggactgctggagatttgcgggtag

SEQ ID NO: 310115 - DNA, 213 bp, Artificial Sequence
  derived and/or modified sequence
atggtgcggaccaagacctggaccctgaagaagcacttcgtgggctaccctaccaattccgatttcgagcttaagacggccgaactgccccctctaaaaaacggagaagtcctgttagaggcactcttcctgactgtagacccttacatgcgggtcgctgccaagaggttgaaagagggtgacacgatgatgggtcagcaggtggcaaaatag

SEQ ID NO: 310116 - DNA, 213 bp, Artificial Sequence
  derived and/or modified sequence
atggtgcggaccaagacctggaccctgaagaagcacttcgtgggctatcctacaaattccgacttcgagctgaaaacagctgaactgccccctttaaagaacggtgaggtgttactggaagcactgtttcttaccgttgatccatacatgagggtggctgccaaaagactcaaggaaggcgacacaatgatggggcagcaggtcgccaagtag

SEQ ID NO: 310117 - DNA, 360 bp, Artificial Sequence
  derived and/or modified sequence
atggtgcggaccaagacctggaccctgaagaagcacttcgtgggctatcctactaatagcgatttcgagctcaagacagccgagctgccgcccctcaaaaacggtgaagtgctgctcgaggccctcttcctcacagtggacccgtacatgcgggtggtcgaatctaaaaatgtcgctctcccgaaagggaccattgttcttgctagccccggctggacaacgcattccatcagcgatggtaaggatcttgaaaaattgttgacggagtggccagatactattccccttagtttggcactgggtactgtcgggatgccgggcctcaccgcttatttcggactgctagagatctgtgggtag

SEQ ID NO: 310118 - DNA, 360 bp, Artificial Sequence
  derived and/or modified sequence
atggttaggacaaaaacctggactttgaaaaagcatttcgtaggatatccaacaaattccgactttgagctaaagaccgccgaacttcccccacttaagaacggcgaagtgctcctagaggctctctttctgacagttgacccttacatgagggtggtggagagtaagaatgtcgctctgcccaaaggtaccatcgtactggccagtccgggatggacgacgcactccatctccgacggcaaggacctcgagaagctactgactgaatggcctgatacaattccgttgtccttagccctcggaaccgtgggaatgcctgggctgactgcctattttgggcttctcgagatctgcggatag

SEQ ID NO: 310119 - DNA, 213 bp, Artificial Sequence
  derived and/or modified sequence
atggtcagaacgaaaacctggacactgaagaagcacttcgtgggctatccaaccaacagtgactttgagctgaagacagcggagctgccaccattgaagaatggagaagtacttctggaagcattgttcttgactgtcgacccatacatgcgggtcgccgctaaaaggctgaaggagggcgacacgatgatgggccagcaggtggctaaatag

SEQ ID NO: 310120 - DNA, 213 bp, Artificial Sequence
  derived and/or modified sequence
atggtccggactaaaacttggaccctgaaaaaacatttcgttggatatcctaccaattcagactttgaactgaagactgcagagctgcctcccctcaaaaacggagaggttcttttagaggccttattccttaccgtggatccgtatatgagagtggcggctaaacgacttaaagaaggggacactatgatggggcagcaggtggctaaatag

SEQ ID NO: 310121 - DNA, 461 bp, Artificial Sequence
  derived and/or modified sequence
accctctcttgggacctgtcataagtcggaccccgggcgcccggctgcgcagtcccagccgccttccccaggcagtggaaccttcgggctcctgagcttcaggatggttcgtactaagacatggaccctgaagaagcactttgttggctatcctactaatagtgactttgagttgaagacagctgagctcccacccttaaaaaatggagaggtcctgcttgaagctttgttcctcaccgtggatccctacatgagagttgtggaaagtaaaaatgtagccctaccaaaaggaactattgtactggcttctccaggctggacaacgcactccatttctgatgggaaagatctggaaaagctgctgacagagtggccagacacaataccactgtctttggctctggggacagttggcatgccaggcctgactgcctactttggcctacttgaaatctgtggtg

SEQ ID NO: 310122 - DNA, 360 bp, Artificial Sequence
  derived and/or modified sequence
atggtccgcacaaaaacatggacactaaaaaaacactttgtggggtaccccactaattcagatttcgagctgaagacagctgagctgcccccactgaaaaacggggaagtgttgttagaggcactgtttctgactgtggacccttacatgcgggtggtcgagagtaaaaatgtcgcactccccaaaggaacaattgtgctcgcaagccctgggtggacaacgcatagtatcagtgacggtaaggatctagagaaactgcttacagagtggcctgataccatacccctttcacttgctctcggaactgtcggaatgcctggcctgaccgcctacttcggactgcttgaaatctgtgggtag

SEQ ID NO: 310123 - DNA, 534 bp, Artificial Sequence
  derived and/or modified sequence
atgcccggtttaacagcctacttcggattgctggaaatctgcggggtaaagggaggagagaccgtaatggtaaatgctgctgccggagccgtgggatctgtcgtgggccagattgccaagctcaaaggatgtaaggtggtaggtgccgtaggatccgacgaaaaagtcgcctacctgcagaagctggggtttgacgtggttttcaactataagactgtggaatccctggaggaaacattgaaaaaggcgtctcccgatggctacgattgttatttcgacaacgttggcggggagtttagtaataccgtgattggccaaatgaaaaagtttggacgcattgccatctgcggtgcaatcagcacttacaaccggactggtccacttcccccgggtccaccgcctgaaattgtgatctatcaggagctgcgcatggaagcctttgtagtataccgttggcaaggggatgcacggcagaaggcgctcaaagacctgctgaaatgggtactcgaattaccctactttgtcatcgattag

SEQ ID NO: 310124 - DNA, 534 bp, Artificial Sequence
  derived and/or modified sequence
atgcccggccttacagcctactttggcctcctggagatctgcggcgtgaagggcggagaaactgtgatggtaaacgcagctgcgggcgcagtgggaagcgttgtgggccagattgcaaagctgaagggctgtaaggtggttggagcagtcgggagcgacgagaaagttgcttacctgcaaaaactcggcttcgacgtagtgtttaactataagacagtggagtcccttgaggaaacacttaagaaggcatccccggacggctatgactgctactttgataatgtcggtggcgagttctctaacacagtcattggacaaatgaagaagtttggcagaatcgctatatgtggtgccatctcgacctacaatcggacaggcccactgccgccagggcccccccctgagatcgtcatctaccaagagctccgtatggaagcctttgtggtctatcgctggcagggagacgcacgccaaaaggcactgaaggacctattgaagtgggtgctcgagctgccatacttcgtgattgactag

SEQ ID NO: 310125 - DNA, 534 bp, Artificial Sequence
  derived and/or modified sequence
atgcctggcctgacagcctacttcggcctgctggagatctgtggggtgaagggcggggagaccgtgatggtgaatgctgctgctggagctgtgggctctgtggtgggccagatcgccaagctgaagggctgcaaggtggtgggcgctgtgggcagtgatgagaaggtggcctacctgcagaagctgggctttgatgtggtgttcaactacaagacagtggagagcctggaggagaccctgaagaaggccagcccagatggctatgactgctactttgacaacgtgggcggggagttcagcaacacagtcatcggccagatgaagaagtttggaagaattgccatctgtggggccatcagcacctacaacagaacaggccccctgcccccaggccccccacctgagatcgtcatctaccaggagctgaggatggaggcctttgtggtgtaccgctggcagggagatgcccggcagaaggccctgaaggacctgctgaagtgggtgctggagctgccctacttcgtcatcgactag

SEQ ID NO: 310126 - DNA, 534 bp, Artificial Sequence
  derived and/or modified sequence
atgcccggcctgaccgcctacttcggcctgctggagatctgcggcgtaaaggggggcgagaccgtcatggtgaacgccgcagcaggggcggtcggctcagtcgtcgggcagatcgccaagctgaaagggtgtaaggttgtcggcgctgtcggtagcgacgagaaggtagcttatttgcagaagctcgggttcgatgtggtctttaactacaagaccgtggaaagcctcgaggagactctgaagaaggcctcccccgacgggtacgattgttacttcgacaacgtcggcggagaatttagcaatacggttattggacagatgaagaagtttggaagaattgcaatttgcggtgcaatctcgacatacaacaggactggaccgctacccccagggcctccacccgagattgtcatatatcaggagttgagaatggaggcatttgtggtgtaccggtggcagggagatgcacggcagaaagcactgaaggatctgctcaagtgggtcctcgagcttccgtacttcgtgatcgactag

SEQ ID NO: 310127 - DNA, 534 bp, Artificial Sequence
  derived and/or modified sequence
atgcccggcctgaccgcctacttcggcctgctggagatctgcggcgtgaaggggggcgaaacagtcatggtcaacgcagccgcgggagcggtcgggtcagtcgtaggccaaatagctaagctgaaggggtgcaaggttgtgggggctgtaggctcagacgaaaaagtggcttacctccagaagcttggctttgacgtggtttttaactataagactgtcgagagtcttgaggaaacactcaagaaagcatcgccagatggatatgattgttattttgacaatgtgggaggagagttctcgaatacagtgattggacagatgaagaagtttggaaggatcgccatctgcggcgccattagtacttacaataggacggggccactaccccctgggccccctcctgagattgtcatctatcaagaactgcgaatggaagcctttgtggtgtaccggtggcagggtgatgcccgacaaaaagctctcaaggatctcctcaaatgggtcttggagttgccatacttcgtgatcgattag

SEQ ID NO: 310128 - DNA, 534 bp, Artificial Sequence
  derived and/or modified sequence
atgcccggactcaccgcctattttgggctcctggaaatttgtggagtcaaaggaggggagacagttatggtaaacgccgctgcaggagcagttggctctgtggtcggacagattgctaagctcaagggttgtaaggtggtgggagcagtgggctctgatgagaaggtggcatatttacagaaattaggcttcgacgtggtctttaattataagactgttgaaagtctggaggaaaccctgaagaaggccagccctgatggctatgactgctatttcgacaatgtaggcggagagttctcaaatacagtcataggccagatgaagaagttcggccgaattgctatttgtggagctatatctacatacaaccgcaccggtccactgccccctgggccacctcccgagattgttatttatcaagaactgagaatggaagcattcgtggtctaccggtggcagggcgacgccaggcagaaggccctgaaggatctgctcaagtgggttttagagctgccatactttgtgatcgactag

SEQ ID NO: 310129 - DNA, 534 bp, Artificial Sequence
  derived and/or modified sequence
atgcctggccttacagcgtacttcgggctcttggaaatctgcggcgtgaaaggcggagaaactgttatggtaaatgccgctgcaggagccgtgggcagcgtagtagggcaaatcgccaaactgaagggatgcaaggttgttggagcggtgggatccgatgagaaggtggcctatctccaaaagctgggtttcgacgttgtttttaactacaaaacggtcgagtcccttgaggaaacactaaaaaaagcgagccccgatggctatgactgctacttcgacaacgtcggtggtgaatttagcaatacagtgatcgggcagatgaaaaagttcggccgaatagcaatatgtggagccatctctacttacaaccgcaccggccctcttccacctgggccacccccagaaattgtcatttatcaggagcttcgaatggaagctttcgtagtgtaccggtggcagggggacgctagacagaaagcattgaaggacctgttaaaatgggtgctggagctgccatatttcgtaattgattag

SEQ ID NO: 310130 - DNA, 534 bp, Artificial Sequence
  derived and/or modified sequence
atgcccggcctgaccgcctacttcggcctgctggagatctgcggcgtgaagggcggcgagaccgtgatggtgaacgccgccgccggcgccgtgggcagcgtggtgggccagatcgccaagctgaagggctgcaaggtggtgggcgccgtgggcagcgacgagaaggtggcctacctgcagaagctgggcttcgacgtggtgttcaactacaagaccgtggagagcctggaggagaccctgaagaaggccagccccgacggctacgactgctacttcgacaacgtgggcggcgagttcagcaacaccgtgatcggccagatgaagaagttcggcagaatcgccatctgcggcgccatcagcacctacaacagaaccggccccctgccccccggccccccccccgagatcgtgatctaccaggagctgagaatggaggccttcgtggtgtacagatggcagggcgacgccagacagaaggccctgaaggacctgctgaagtgggtgctggagctgccctacttcgtgatcgactag

SEQ ID NO: 310131 - protein, 653 aa, Artificial Sequence
  derived and/or modified sequence
MAAAAASHLNLDALREVLECPICMESFTEEQLRPKLLHCGHTICRQCLEKLLASSINGVRCPFCSKITRITSLTQLTDNLTVLKIIDTAGLSEAVGLLMCRSCGRRLPRQFCRSCGLVLCEPCREADHQPPGHCTLPVKEAAEERRRDFGEKLTRLRELMGELQRRKAALEGVSKDLQARYKAVLQEYGHEERRVQDELARSRKFFTGSLAEVEKSNSQVVEEQSYLLNIAEVQAVSRCDYFLAKIKQADVALLEETADEEEPELTASLPRELTLQDVELLKVGHVGPLQIGQAVKKPRTVNVEDSWAMEATASAASTSVTFREMDMSPEEVVASPRASPAKQRGPEAASNIQQCLFLKKMGAKGSTPGMFNLPVSLYVTSQGEVLVADRGNYRIQVFTRKGFLKEIRRSPSGIDSFVLSFLGADLPNLTPLSVAMNCQGLIGVTDSYDNSLKVYTLDGHCVACHRSQLSKPWGITALPSGQFVVTDVEGGKLWCFTVDRGSGVVKYSCLCSAVRPKFVTCDAEGTVYFTQGLGLNLENRQNEHHLEGGFSIGSVGPDGQLGRQISHFFSENEDFRCIAGMCVDARGDLIVADSSRKEILHFPKGGGYSVLIREGLTCPVGIALTPKGQLLVLDCWDHCIKIYSYHLRRYSTP

SEQ ID NO: 310132 - protein, 173 aa, Artificial Sequence
  derived and/or modified sequence
MAAAAASHLNLDALREVLECPICMESFTEEQLRPKLLHCGHTICRQCLEKLLASSINGVRCPFCSKITRITSLTQLTDNLTVLKIIDTAGLSEAVGLLMCRSCGRRLPRQFCRSCGLVLCEPCREADHQPPGHCTLPVKEAAEERRRDFGEKLTRLRELMGELQRRKAALEGV

SEQ ID NO: 310133 - DNA, 1962 bp, Artificial Sequence
  derived and/or modified sequence
atggccgccgccgccgccagccacctgaacctggacgccctgagagaggtgctggagtgccccatctgcatggagagcttcaccgaggagcagctgagacccaagctgctgcactgcggccacaccatctgcagacagtgcctggagaagctgctggccagcagcatcaacggcgtgagatgccccttctgcagcaagatcaccagaatcaccagcctgacccagctgaccgacaacctgaccgtgctgaagatcatcgacaccgccggcctgagcgaggccgtgggcctgctgatgtgcagaagctgcggcagaagactgcccagacagttctgcagaagctgcggcctggtgctgtgcgagccctgcagagaggccgaccaccagccccccggccactgcaccctgcccgtgaaggaggccgccgaggagagaagaagagacttcggcgagaagctgaccagactgagagagctgatgggcgagctgcagagaagaaaggccgccctggagggcgtgagcaaggacctgcaggccagatacaaggccgtgctgcaggagtacggccacgaggagagaagagtgcaggacgagctggccagaagcagaaagttcttcaccggcagcctggccgaggtggagaagagcaacagccaggtggtggaggagcagagctacctgctgaacatcgccgaggtgcaggccgtgagcagatgcgactacttcctggccaagatcaagcaggccgacgtggccctgctggaggagaccgccgacgaggaggagcccgagctgaccgccagcctgcccagagagctgaccctgcaggacgtggagctgctgaaggtgggccacgtgggccccctgcagatcggccaggccgtgaagaagcccagaaccgtgaacgtggaggacagctgggccatggaggccaccgccagcgccgccagcaccagcgtgaccttcagagagatggacatgagccccgaggaggtggtggccagccccagagccagccccgccaagcagagaggccccgaggccgccagcaacatccagcagtgcctgttcctgaagaagatgggcgccaagggcagcacccccggcatgttcaacctgcccgtgagcctgtacgtgaccagccagggcgaggtgctggtggccgacagaggcaactacagaatccaggtgttcaccagaaagggcttcctgaaggagatcagaagaagccccagcggcatcgacagcttcgtgctgagcttcctgggcgccgacctgcccaacctgacccccctgagcgtggccatgaactgccagggcctgatcggcgtgaccgacagctacgacaacagcctgaaggtgtacaccctggacggccactgcgtggcctgccacagaagccagctgagcaagccctggggcatcaccgccctgcccagcggccagttcgtggtgaccgacgtggagggcggcaagctgtggtgcttcaccgtggacagaggcagcggcgtggtgaagtacagctgcctgtgcagcgccgtgagacccaagttcgtgacctgcgacgccgagggcaccgtgtacttcacccagggcctgggcctgaacctggagaacagacagaacgagcaccacctggagggcggcttcagcatcggcagcgtgggccccgacggccagctgggcagacagatcagccacttcttcagcgagaacgaggacttcagatgcatcgccggcatgtgcgtggacgccagaggcgacctgatcgtggccgacagcagcagaaaggagatcctgcacttccccaagggcggcggctacagcgtgctgatcagagagggcctgacctgccccgtgggcatcgccctgacccccaagggccagctgctggtgctggactgctgggaccactgcatcaagatctacagctaccacctgagaagatacagcaccccctag

SEQ ID NO: 310134 - DNA, 522 bp, Artificial Sequence
  derived and/or modified sequence
atggccgccgccgccgccagccacctgaacctggacgccctgagagaggtgctggagtgccccatctgcatggagagcttcaccgaggagcagctgagacccaagctgctgcactgcggccacaccatctgcagacagtgcctggagaagctgctggccagcagcatcaacggcgtgagatgccccttctgcagcaagatcaccagaatcaccagcctgacccagctgaccgacaacctgaccgtgctgaagatcatcgacaccgccggcctgagcgaggccgtgggcctgctgatgtgcagaagctgcggcagaagactgcccagacagttctgcagaagctgcggcctggtgctgtgcgagccctgcagagaggccgaccaccagccccccggccactgcaccctgcccgtgaaggaggccgccgaggagagaagaagagacttcggcgagaagctgaccagactgagagagctgatgggcgagctgcagagaagaaaggccgccctggagggcgtgtag

SEQ ID NO: 310135 - DNA, 1962 bp, Artificial Sequence
  derived and/or modified sequence
atggctgctgctgcggctagccatctcaacttagatgccctaagagaagtactggagtgcccaatttgcatggaatcctttaccgaggagcaactccgcccgaaattgctgcattgtgggcatactatctgtcgccaatgcctcgagaagcttctcgcatcttctatcaacggcgttaggtgccctttttgcagtaagattacaagaattaccagtctaacacaactgactgacaatctaaccgttctcaagatcattgataccgccggcctgtcagaagcagtcggattgctaatgtgcagatcctgcggcagacgactcccaagacaattttgcagatcatgtgggctggtcttatgcgagccctgccgagaagccgaccaccagcctcctggacactgcactctgccagttaaggaagcggcagaggaacgtagaagagatttcggagagaaacttacacggctccgagagctcatgggagagcttcagcgacgcaaggccgctctcgaaggcgtatcaaaggacctccaagcccgatacaaggccgttctccaggagtatggacatgaggagcggcgggtgcaggacgaactggcgagaagtaggaaattttttactggttccctcgctgaagtcgaaaaaagcaattctcaggtggtagaagaacaatcttacttgctcaatatagccgaagtgcaggctgtctctcggtgtgattacttcctcgcgaaaatcaaacaggcagacgtcgccttactggaagaaacagctgacgaagaggaacctgaattgaccgcaagccttccccgcgaacttacgcttcaagacgttgagttactcaaagtgggtcatgtcggtcctctccagatcggacaggccgttaagaagccacggacagttaacgtagaggatagctgggcaatggaagccacagcctccgctgcaagtacaagtgtgacctttcgcgagatggacatgtctcccgaggaggtggtggcatccccacgagcgagtccagccaaacagagaggtcctgaggcagcgtctaacatccagcagtgcttgtttttaaagaagatgggagcgaagggctccactcccggaatgtttaatctgcccgtaagcttatatgtgacctctcagggcgaagtcctggttgctgatcgtggaaactacagaatccaggtgttcactcgcaaaggctttttgaaggaaatcaggcgttccccaagcggtattgactcctttgtgctttctttcctcggggccgacctacccaaccttactcccttgagtgttgcaatgaactgtcaaggtttgataggtgtgacagactcctatgataactctctgaaggtctacaccctggatggtcattgcgttgcctgtcatcgcagccagctttccaaaccctggggaattactgctctgcccagcgggcagttcgtcgtgaccgatgtggaggggggcaaactgtggtgttttaccgttgaccgcggtagcggcgtggttaagtactcatgcctgtgctctgcagtgaggccaaagtttgtgacctgtgacgcagaagggacggtgtactttactcaggggcttggtttgaatctggagaaccgccaaaacgaacatcatctcgaaggcggcttctccattggaagcgtgggtcccgacggccagctggggaggcagataagccacttttttagcgagaatgaagactttcgctgcattgccggtatgtgcgtcgatgcacgcggcgacctgattgttgctgattcatcaaggaaggagattctacattttcctaaggggggcgggtactcggtgctaatcagggaaggcttaacctgccctgtcggcatcgctcttacacccaaaggccagctgcttgtcctcgactgctgggatcattgtatcaagatctacagctaccacttaagaaggtactcgacaccctag

SEQ ID NO: 310136 - DNA, 522 bp, Artificial Sequence
  derived and/or modified sequence
atggccgcagccgctgcctcgcaccttaacttggacgccctgcgagaagtgctcgagtgtccaatttgtatggaaagcttcactgaggaacagctgcgccccaagttgctgcactgcggccacacaatctgtcgccaatgccttgaaaaactccttgcctcttctattaacggcgtccgctgtcccttctgctcgaaaataacccgcatcacctccctcactcaattaaccgacaacttgaccgtgctgaagatcattgacacagcaggcctgtcagaagccgttggccttctaatgtgccggtcgtgcggtagacgtttgccccgccaattctgtcgcagctgcggtcttgttctgtgtgagccgtgcagggaagctgaccaccagccccccggtcattgcacactgcccgtcaaggaggccgccgaggagcgcagaagggatttcggggagaagttaactcgcttacgagaattaatgggcgaactacagcgccgaaaggccgcattggagggagtctag

SEQ ID NO: 310137 - DNA, 1962 bp, Artificial Sequence
  derived and/or modified sequence
atggctgctgccgccgcatcccatctcaatctagatgccttgagggaggtcctagagtgccctatctgtatggaatcttttaccgaagagcagcttcgccctaagctgctgcactgcgggcacacgatctgtagacagtgcttggaaaaactgttggccagcagcattaacggcgtgaggtgcccgttttgctccaagatcacaagaataacctcactcacccagcttactgataatttgactgtcctaaaaataatcgacaccgcaggcctcagtgaggctgtggggttgcttatgtgccggagctgcggccggagactgcctaggcaattctgcaggtcctgtggtttagttctgtgtgaaccgtgtcgagaggccgatcaccaaccaccgggccactgtaccttgcctgtcaaagaggcagccgaagagaggaggcgtgatttcggagaaaagttaacacggctaagggaactgatgggcgagctccagaggcggaaggcagccctggagggggtttcgaaggacctgcaggcgaggtataaagctgttctgcaagaatacggacacgaagaacggagggttcaggacgaattggcgcgctcgagaaaattttttaccgggagtctggcagaggtggagaaatctaactctcaggtagtcgaggagcagagttacttgctgaatatcgccgaggttcaggcagtaagccgttgtgactacttccttgcaaaaattaagcaggccgacgttgcgcttttggaggagaccgcagacgaggaagaacctgaactgaccgcctctttgcctagggagttgacccttcaggacgtagagttgctcaaggttggacacgtcggtcctcttcagatcggccaggcagtgaagaagcctcgtacagtgaatgtcgaagactcctgggctatggaggctacagcctccgcagccagtacgtcagtgacctttagggagatggacatgtcacctgaggaagttgtggcctcgcctcgagcttcacccgccaagcagagaggcccagaagctgcttctaacatacaacagtgcctgttcttgaagaagatgggggccaagggaagcacccctgggatgttcaacttacccgtgtctctgtatgtgacctcccagggggaggtcctggtcgccgacagggggaattatcgcatccaggtgtttacaaggaaagggtttctgaaagagataaggaggtcaccttctgggatcgactcctttgtcttgtcctttctgggggcggatttaccaaatcttaccccccttagtgttgctatgaattgtcagggcctgatcggtgtgacagatagctatgataattcgctgaaggtgtatacattggacgggcactgtgtggcctgccatagatctcagcttagcaaaccctggggcattacagccctgccctcaggccagtttgtggtcactgatgtggagggcggcaagctgtggtgtttcaccgtggatagaggaagcggcgtcgtgaagtattcttgcctttgcagcgccgtgcggcctaaattcgtaacctgcgacgccgagggaactgtgtacttcactcaaggcttggggctcaacctggagaatcggcagaacgagcaccatttggaggggggcttttccatcggttccgtcggtccagacggacagcttggccggcagataagccattttttctctgaaaatgaagatttcaggtgtattgcaggtatgtgtgtggacgccagaggagatctgattgtggccgacagtagccgcaaagagatcctacattttcccaagggcggcggttacagtgtgctcatcagggagggactgacatgccccgtcggcattgccctgaccccaaaaggacagctgcttgtgttggattgctgggatcactgtatcaaaatttactcttatcatcttagaaggtacagcaccccatag

SEQ ID NO: 310138 - DNA, 1962 bp, Artificial Sequence
  derived and/or modified sequence
atggctgctgctgctgccagccacctgaacctggatgccctgcgggaggtgctggagtgccccatctgcatggagagcttcacagaggagcagctgcggcccaagctgctgcactgcggccacaccatctgccggcagtgcctggagaagctgctggccagcagcatcaatggagtgcgctgccccttctgcagcaagatcacccgcatcaccagcctgacccagctgacagacaacctgactgtgctgaagatcatcgacacagctggcctgtctgaggccgtgggcctgctgatgtgccgcagctgtggccgccgcctgccccggcagttctgccgcagctgtggcctggtgctgtgtgagccctgccgggaggccgaccaccagcccccaggccactgcaccctgcctgtgaaggaggccgctgaggagcggcggcgggactttggagagaagctgacccggctgcgggagctgatgggagagctgcagaggaggaaggccgccctggagggcgtgtccaaggacctgcaggcccgctacaaggctgtgctgcaggagtatggccacgaggagaggagagtgcaggatgagctggcccggagcaggaagttcttcaccggcagcctggccgaggtggagaagagcaacagccaggtggtggaggagcagagctacctgctgaacattgctgaggtgcaggccgtgagccgctgtgactacttcctggccaagatcaagcaggctgatgtggccctgctggaggagacagcagatgaggaggagcctgagctgacagccagcctgccccgggagctgaccctgcaggatgtggagctgctgaaggtgggccacgtgggccccctgcagatcggccaggccgtgaagaagcccaggacagtgaatgtggaggacagctgggccatggaggccacagccagcgctgccagcacctctgtgaccttccgggagatggacatgagccctgaggaggtggtggccagcccccgggccagccctgccaagcagaggggccctgaggccgccagcaacatccagcagtgcctcttcctgaagaagatgggcgccaagggcagcaccccaggcatgttcaacctgcctgtgtccctgtatgtgaccagccagggcgaggtgctggtggccgaccggggcaactaccgcatccaggtgttcaccaggaagggcttcctgaaggagatccgccgcagccccagcggcatcgacagctttgtgctgtccttcctgggcgctgacctgcccaacctgacccccctgtctgtggccatgaactgccagggcctcatcggcgtgacagacagctatgacaacagcctgaaggtgtacaccctggatggccactgtgtggcctgccacaggagccagctgagcaagccctggggcatcacagccctgcccagcggccagtttgtggtgacagatgtggagggcggcaagctgtggtgcttcaccgtggaccggggcagcggcgtggtgaagtacagctgcctgtgcagcgctgtgcggcccaagtttgtgacctgtgatgctgagggcaccgtgtacttcacccagggcctgggcctgaacctggagaaccggcagaatgagcaccacctggagggcggcttcagcatcggctctgtgggcccagatggccagctgggccggcagatcagccacttcttctctgaaaatgaagacttccgctgcatcgccggcatgtgtgtggatgcccggggggacctgattgtggccgacagcagcaggaaggagatcctgcacttccccaagggcggcggctacagcgtgctgatccgggagggcctgacctgccctgtgggcatcgccctgacccccaagggccagctgctggtgctggactgctgggaccactgcatcaagatctacagctaccacctgcggcgctacagcaccccctag

SEQ ID NO: 310139 - DNA, 522 bp, Artificial Sequence
  derived and/or modified sequence
atggctgctgctgctgccagccacctgaacctggatgccctgcgggaggtgctggagtgccccatctgcatggagagcttcacagaggagcagctgcggcccaagctgctgcactgcggccacaccatctgccggcagtgcctggagaagctgctggccagcagcatcaatggagtgcgctgccccttctgcagcaagatcacccgcatcaccagcctgacccagctgacagacaacctgactgtgctgaagatcatcgacacagctggcctgtctgaggccgtgggcctgctgatgtgccgcagctgtggccgccgcctgccccggcagttctgccgcagctgtggcctggtgctgtgtgagccctgccgggaggccgaccaccagcccccaggccactgcaccctgcctgtgaaggaggccgctgaggagcggcggcgggactttggagagaagctgacccggctgcgggagctgatgggagagctgcagaggaggaaggccgccctggagggcgtgtag

SEQ ID NO: 310140 - DNA, 1962 bp, Artificial Sequence
  derived and/or modified sequence
atggccgccgccgccgccagccacctgaacctggacgccctgcgggaggtactggaatgtccaatttgtatggaatcctttaccgaagagcagctgaggccaaagctgctgcactgcggccacacgatttgtcgacagtgcttggagaagctgcttgccagcagtatcaacggggtgaggtgccccttttgtagtaaaattacccgcatcacatccctaacccagctcacagataacctcactgtgttgaagatcatcgatacagcgggcttgagtgaagccgtggggctgctgatgtgccgatcttgtggaagaagactgcctcgacagttttgtcgcagctgcggactggtactctgtgaaccgtgtagagaagcagaccatcagccgcctgggcactgcacactgcccgtgaaggaagctgcagaggaaagacgaagagattttggggagaaattgacgagactgagggaactaatgggcgagctgcagcgtcggaaggccgctctggagggggtgtcaaaggaccttcaagcgagatacaaggcagttctgcaagagtatggtcatgaagagcgacgggtccaggacgagctagctcggagtagaaagttttttacggggagcctggcggaagtcgagaaatccaattcacaagttgtggaggagcagagctatctattaaatatagctgaggtgcaggctgtttcaagatgtgattacttcttagcaaagatcaaacaggccgacgtggctctcttggaagagactgcggatgaggaagaacccgaattgaccgcttcactgcctagggaattaacattgcaggacgttgaattgctcaaggtgggacacgttggccctttgcagatagggcaggctgttaagaagcctagaaccgtcaacgtggaggactcttgggctatggaagccacagcctccgcggctagcactagcgtgacctttagagagatggatatgagtcctgaggaagtcgtggcttccccgcgggcatccccagcaaagcagaggggccctgaggctgcgtctaatatacagcaatgcctcttcctaaagaaaatgggggcaaagggttctacgccaggtatgtttaatttgccggtgagcctgtacgtgacttctcagggcgaggtcctggtcgccgaccgaggaaattacagaatacaagtgttcacacgaaagggcttcctgaaggagattaggcggtctccgtctgggatcgattctttcgtgcttagttttctcggagccgacctgcccaatctgactcccctttccgtcgctatgaactgccagggcctgattggggtgacagacagttacgataatagccttaaagtgtatacactcgatggacactgcgtggcctgtcatcggagccaactcagcaaaccatggggtataacggccctacctagtggccagttcgtagtgaccgacgtcgaaggtggcaaactgtggtgctttaccgtcgaccgagggtccggggtggtgaaatactcgtgtctttgcagtgccgttcgtcctaagtttgtcacctgcgacgctgaggggacagtgtacttcactcagggactagggctgaatttggaaaatcgccagaacgagcatcatcttgaggggggtttcagtatcggttctgtgggaccagatgggcagctggggagacagatttcacacttcttttcggagaacgaagatttcagatgcattgcaggcatgtgtgtggacgcccggggcgacttgatcgtggccgacagttcaagaaaggagatcctgcactttcccaagggaggcggatactctgttctgatccgcgagggcctgacctgtcctgtaggaattgcattgacaccaaagggtcaacttcttgttttggactgttgggatcactgcataaagatctattcctaccacctccggcggtacagcacaccttag

SEQ ID NO: 310141 - DNA, 522 bp, Artificial Sequence
  derived and/or modified sequence
atggccgccgccgccgccagccacctgaacctggacgccctgcgggaggtgctcgagtgtccaatttgtatggagtccttcaccgaagagcaactacgtcctaagctgctccactgcggccacaccatctgccgccaatgtctggagaagctcctggcctcatctattaatggggtgcgatgtcctttttgctcaaagatcacccgcattacatcattgacgcagctgactgacaatctcactgtcttgaaaataattgacactgccggattatccgaagcagtgggtctgctgatgtgcagatcgtgtgggcgtagactgcctagacagttttgccggtcttgtgggctagtcctatgtgagccatgtagggaagcggatcaccagccccccgggcactgtacattacctgtcaaagaagccgctgaagagaggcgaagagacttcggcgagaagttaacaagactgagggaactaatgggcgaacttcaacgaagaaaggccgcactggaaggggtgtag

SEQ ID NO: 310142 - DNA, 1962 bp, Artificial Sequence
  derived and/or modified sequence
atggccgccgccgccgccagccacctgaacctggacgccctgcgggaggttctggagtgccccatttgtatggaatcttttaccgaagagcagttaagacccaagttactgcactgtggccataccatttgccggcagtgcttggaaaaattgctggcgagctcaatcaatggcgtcagatgtccattctgcagcaaaataacaaggatcacatcccttactcagcttacagacaacttaacggtgctcaagatcatcgacaccgcggggctaagcgaggctgttgggctgctgatgtgtcgcagttgtggccggagactgccacggcaattctgccggagctgcgggcttgttctctgtgagccctgtagagaagccgatcatcagccacctgggcactgcacacttcccgtaaaggaggccgcagaggaaaggcgccgcgacttcggcgagaagctgacaaggctgcgagaattaatgggggagctacagagacgcaaggctgcactcgagggcgtgagcaaggatcttcaggctcgctacaaggcagtgttacaggagtatggccatgaggaacgtcgggtacaagacgaattggctcgaagtcgcaagttttttacaggctccttagccgaagtcgagaagtctaattcacaagtggtggaagagcagtcttatcttctgaacatcgcggaggtacaggctgtgagccggtgcgactacttcttagccaagatcaagcaggcagatgttgcactcctggaagaaactgctgatgaggaggaacctgagctgacagctagtttgccacgagagctcacactgcaggacgtcgaattgctgaaggtaggtcacgtcggcccattacaaattggtcaggctgttaagaagccccggaccgtgaacgtagaagattcatgggccatggaagcaaccgccagcgctgccagcaccagcgtcacttttagggagatggatatgtctccagaggaagtagtcgcaagccctcgtgcatccccggccaagcagaggggacccgaggctgcctccaatatccagcagtgcctgtttctcaagaaaatgggagccaagggaagtacaccaggcatgttcaacctgcccgtaagtctctatgtgacttcgcagggcgaagtgctcgtggctgatcgaggcaactatcgaattcaggtcttcactcgcaagggatttcttaaggagatccgtagaagccccagtgggattgactcatttgttctttcatttcttggcgccgatttacccaaccttacccctttgtccgttgccatgaactgccagggccttatcggcgtgaccgattcgtatgacaattcactcaaagtttacaccttggatggccactgcgttgcctgtcacagatctcagttgagtaagccttggggaataacagctcttccatccggccagtttgtggtgacagatgtggaaggcggcaaactctggtgtttcacggtggatcgcgggtctggcgtggtgaagtactcctgcctgtgttctgcggtgaggccaaagtttgtgacctgcgacgcagaaggcactgtttactttacacagggactggggttgaatttggaaaaccgccagaatgaacaccatttagaggggggtttcagcattggttctgtcggcccggatgggcaactcggacggcagattagccacttttttagcgaaaacgaggactttaggtgtattgcaggtatgtgcgtggatgccagaggcgaccttattgttgctgacagctcaagaaaggagatcctgcacttccccaagggggggggctattcagtgcttatcagagagggcctgacctgtcctgtgggtatcgccttgacccctaagggtcagctcctggtgctggattgttgggatcactgcattaagatctacagctatcatctacgtcgctattcaactccatag

SEQ ID NO: 310143 - DNA, 1962 bp, Artificial Sequence
  derived and/or modified sequence
atggcagccgcagctgcttcacacctgaatctagacgccctccgtgaggttctcgaatgcccaatttgtatggaatcatttactgaagaacagctccgccctaagctcttgcattgtgggcacaccatctgtcggcagtgcctggaaaaactgctcgctagttcaataaacggggtcaggtgtccgttttgctcgaagattacgaggataacatctctgacccagctaaccgataatctgactgtactgaagattattgatacagcagggctgtctgaggcggtgggtctgctcatgtgcaggtcttgcggccgacgcctgcctcggcagttttgtcggagttgtggccttgtgttgtgtgagccatgcagagaggcagatcatcagccaccaggccattgcactttacccgtcaaagaagcagctgaggagagaaggcgggatttcggggaaaagttgactaggcttcgggaactgatgggcgaactccagcgccgaaaggctgctcttgaaggagtgtcgaaagacctgcaggctcgttacaaagcagtattgcaggagtatgggcatgaggagcgccgagttcaggatgaactggctaggtcccgcaaattctttaccgggtcccttgccgaggtcgagaaatctaacagccaggtggtggaagagcaatcttacctgctcaacatcgctgaggtccaagcggtttctcgatgtgactattttcttgccaagattaaacaggcagacgtggccctcctggaagaaacggccgatgaagaagaaccagaacttaccgcctcactaccgagagagctcactctccaggatgttgaactactgaaggtgggccatgtcgggcctcttcagatcggtcaagcagtcaagaagccaaggaccgttaacgtcgaggactcctgggctatggaggccaccgcaagtgccgcttccacctcagtcacattccgcgagatggatatgtcacctgaagaagtggtggctagtccaagggctagcccagccaagcagagaggccctgaagccgcttcaaacattcagcaatgtctcttcctgaagaaaatgggggcaaaaggctcaacccccggaatgtttaatttgccagtcagtctatacgtcactagccagggcgaggtgctggtcgcagaccgcggaaactacagaatccaagtgtttacaagaaaggggttcctcaaagagattcgaaggagcccgagcggcattgactcgttcgttctttccttcttgggcgctgatctcccaaatctgacccccctgagtgttgctatgaattgccagggtctgattggcgtgactgactcatacgataattctcttaaggtttatacactggacggtcactgtgtggcttgccacagatcacaactgtcgaaaccctggggaataaccgcactgccttctggacagttcgtggtgacagatgtagagggcggaaaattgtggtgcttcacagtcgaccggggttccggcgtggttaaatactcatgcctctgtagcgccgtccggccaaaatttgtaacctgcgacgctgaaggtaccgtctattttactcagggactgggtctcaaccttgagaatcggcagaatgagcaccacctcgaggggggattctctatcggctcagtgggccctgatggccaactggggaggcagatttcacatttcttctcagagaacgaagattttcgatgcatagctggcatgtgcgtggacgcccgtggagatctgatagttgcggatagttcgcgtaaggaaatcctgcactttccaaagggcggaggctattcagtgctcatcagagaaggtctcacatgtcctgtaggaatcgcgctcactcccaagggtcagctgctggtgcttgattgctgggaccactgtattaagatctactcataccacctgaggcgctactccaccccttag

SEQ ID NO: 310144 - DNA, 522 bp, Artificial Sequence
  derived and/or modified sequence
atggctgccgctgccgctagccacttgaacctggacgcgctaagagaagttcttgaatgccctatttgcatggaatcatttacagaggagcaactgcggcctaagctgttgcattgcggccataccatttgccgtcagtgtttggaaaagctcctcgcaagtagcatcaatggggtccgatgtccattctgttctaagattactcggattacgtcactgactcagcttacagacaacctgaccgttctgaaaataatcgacaccgctggattatccgaagctgtgggcctgctcatgtgtcggtcctgcggacgaaggttgccacgccaattttgcaggtcgtgtgggctcgtcctctgcgaaccttgtcgagaggcagaccatcagcctccaggacattgcaccctgccagttaaggaagcggctgaggagaggagaagagacttcggagagaagctcactcggctgcgagagctgatgggcgagctgcaaaggagaaaggccgctctggagggggtctag

SEQ ID NO: 310145 - DNA, 1962 bp, Artificial Sequence
  derived and/or modified sequence
atggctgcagccgcagcatctcatctcaacctcgatgccctgcgcgaggtcctggagtgtccgatctgtatggagtcctttactgaggagcaactcaggcctaagcttttgcactgcgggcacactatctgtaggcagtgcctcgaaaagcttcttgccagttctatcaatggagtaaggtgtcccttctgttccaaaattacgaggattacctctttgacccaactcaccgataatctgactgtgttgaagatcatcgatacggccggactgtcggaagccgtgggcctgctgatgtgtaggtcctgtggaagaaggctaccacgacagttctgtcgttcatgcggattagtcctctgcgaaccatgccgggaggccgatcatcagccaccaggccattgtacgctcccggtaaaggaggcagctgaggagcggaggcgcgacttcggcgagaaattgacgaggttgcgtgagctcatgggcgaactgcagcgccgtaaggcagccctggagggagtgagcaaggatctgcaggctaggtataaggctgttcttcaggaatatggccacgaagagaggcgtgtacaggatgagctagctagaagccgcaagttctttaccgggtcgctcgctgaggttgagaagtcgaattcccaagtagtggaggaacagtcctacctgctgaacatcgccgaagtccaagccgtatctcgttgtgattattttctcgccaagatcaaacaggcggacgtggccctgctcgaggagacggctgatgaagaagaaccggagctcaccgctagtctgcccagggaactgaccctgcaggacgttgagctgctgaaggttggacacgtagggccactccagatcggacaggcagtgaagaaaccccgtaccgttaatgttgaagacagctgggccatggaagcaaccgcttctgcagcaagcacctcagtgacctttcgagagatggatatgagcccagaagaagtcgtcgccagtccacgggcatcacctgccaagcagcgcggaccagaggctgctagcaatatacaacaatgccttttcctgaaaaagatgggggcaaaaggatccacacctggtatgtttaacctaccagtgagtctgtacgtgacctcacaaggtgaagtactggttgccgaccggggaaattacagaatccaggtgtttacaagaaaaggcttcttaaaggagataaggagatcgccaagtggtatcgattcttttgtgctcagcttcctcggggctgatctccctaacctgacaccgctgtccgtcgccatgaattgtcagggactgattggcgtgactgactcttacgacaactcgttaaaagtttacacactcgatggccactgtgttgcatgtcaccgaagtcagctgtctaaaccctggggtattacagccttgccctccggacagttcgtagtcacagatgtagagggagggaaactgtggtgctttaccgtggatcggggttctggcgtggtgaagtactcatgtctgtgctccgcggtgcggccaaaattcgtgacttgtgatgcagagggtacagtctactttacgcaggggctgggtttgaatctggagaacaggcagaatgaacaccacttagaggggggattctccattgggtcggtgggtccagatggccagctgggtcgccagatcagccatttcttttctgaaaacgaggactttcgttgcattgcgggaatgtgcgtggacgctaggggtgacctcatcgtcgccgattccagcaggaaggagatcctgcacttcccgaagggtggcggatactccgtgctgatccgagagggtttaacttgcccggttggcatcgcccttacccccaagggccagcttctggttcttgactgctgggaccactgcatcaagatctactcttatcacctgaggagatacagcacaccttag

SEQ ID NO: 310146 - DNA, 3697 bp, Artificial Sequence
  derived and/or modified sequence
ggcaggcgggtgggctgccggcggtggactcgtcggagccgcgggcggtcagctttagcaggaatttgaccctctagggcatgaatactgtgctgttcagttctgagctgtgctagcaatacccttcaaaggaagagcaatggctgcagcagcagcttctcacctgaacctggatgccctccgggaagtgctagaatgccccatctgcatggagtccttcacagaagagcagctgcgtcccaagcttctgcactgtggccataccatctgccgccagtgcctggagaagctattggccagtagcatcaatggtgtccgctgtcccttttgcagcaagattacccgcataaccagcttgacccagctgacagacaatctgacagtgctaaagatcattgatacagctgggctcagcgaggctgtggggctgctcatgtgtcggtcctgtgggcggcgtctgccccggcaattctgccggagctgtggtttggtgttatgtgagccctgccgggaggcagaccatcagcctcctggccactgtacactccctgtcaaagaagcagctgaggagcggcgtcgggactttggagagaagttaactcgtctgcgggaacttatgggggagctgcagcggcggaaggcagccttggaaggtgtctccaaggaccttcaggcaaggtataaagcagttctccaggagtatgggcatgaggagcgcagggtccaggatgagctggctcgctctcggaagttcttcacaggctctttggctgaagttgagaagtccaatagtcaagtggtagaggagcagagttacctgcttaacattgcagaggtgcaggctgtgtctcgctgtgactacttcctggccaagatcaagcaggcagatgtagcactactggaggagacagctgatgaggaggagccagagctcactgccagcttgcctcgggagctcaccctgcaagatgtggagctccttaaggtaggtcatgttggccccctccaaattggacaagctgttaagaagccccggacagttaacgtggaagattcctgggccatggaggccacagcgtctgctgcctctacctctgttacttttagagagatggacatgagcccggaggaagtggttgccagccctagggcctcacctgctaaacagcggggtcctgaggcagcctccaatatccagcagtgcctctttctcaagaagatgggggccaaaggcagcactccaggaatgttcaatcttccagtcagtctctacgtgaccagtcaaggtgaagtactagtcgctgaccgtggtaactatcgtatacaagtctttacccgcaaaggctttttgaaggaaatccgccgcagccccagtggcattgatagctttgtgctaagcttccttggggcagatctacccaacctcactcctctctcagtggcaatgaactgccaggggctgattggtgtgactgacagctatgataactccctcaaggtatataccttggatggccactgcgtggcctgtcacaggagccagctgagcaaaccatggggtatcacagccttgccatctggccagtttgtagtaaccgatgtggaaggtggaaagctttggtgtttcacagttgatcgaggatcaggggtggtcaaatacagctgcctatgtagtgctgtgcggcccaaatttgtcacctgtgatgctgagggcaccgtctacttcacccagggcttaggcctcaatctggagaatcggcagaatgagcaccacctggagggtggcttttccattggctctgtaggccctgatgggcagctgggtcgccagattagccacttcttctcggagaatgaggatttccgctgcattgctggcatgtgtgtggatgctcgtggtgatctcatcgtggctgacagtagtcgcaaggaaattctccattttcctaagggtgggggctatagtgtccttattcgagagggacttacctgtccggtgggcatagccctaactcctaaggggcagctgctggtcttggactgttgggatcattgcatcaagatctacagctaccatctgagaagatattccaccccataggggatgagaaattatcagtttcttctgctcccaagccaacttcccttcccttagttcttggttgttagtggcacatgcagaatagactcagcctatgtcctgattccagctgggtagttctagaacttcagaagctccatcttttaatgtttttatttgttatgtccccctccccgcttcccacctaaatttagagctttaaaagatgcactgcccaaataggacacacgatggtgttagctgaagtttgattagcaattaggcacttccaaggctttagtagagagagccactttagccctttgtgccatgtttgaaatttgcccttgtattaaatccttgattttttcccatttggctttgatgcccttgatccattgtttccttcctactataatgtgcttcatctgtgacactttctcttgaactctgattggattcactgtgcatgcttcagtgggatctgctccacctttcagtgacatttaagacatcatattcccgtaacattatgtctcagtctgatcgtctttaccagtatgaaagtcattcatttagtgctaccaaaggggatacacaagccctttaggaagcagtacctctcgcctggaggatctgtgccatcttggattgagaattgcagatgtgacagaatggattgaccctagttggttggtattgatgacttcagcctggaaattgcttgccttttaaagaagcatatatgggttggaattatgccaaagcataggaagctgggaataagcaaacaaatgctgatatagtcagcaaatttggatagtctctagggctcatcatttttcatactacctctctcttctggcctgtgtctaaggaattgtacaacataggccagggccaacaaagtggagaggtggacacattttcatgttcattactaaaacaaacagcaaaactattggtttgttattctgtgttttcctcaagtcagtacatactatttggtttcaggatttctttccatttctctatcaagcattaaataattgagaactgtttcttcatctctggtgttcatgtcttttaattaaatacggaattttggagatgataagagggataacctgcgctatgccattttgcttccttatctcactgtgttctttcagagtgtagatatctacccaggtcaaaattcagccaaaagcactattatgtaaagataataatccaaatctttctcccaaatacatgtgtacagaatcatcccccaaggtttagagtcaccaataccctattctgagcttctgctgtatgttttatgtttataattacagttcacaaaaaggaagttagtcttgtttttaagatcagaagtgggtgagaggacctgtgatgaggttcctgagggtttggtgtttactaagtaatatatcttactctaggtgcagggctgatggcaagccaaagagcaactgccttactttgatgtaaacaaaatttgctaaactgagctgctcaaaattgtttttatggtagtagtgtttctttggattgtatcataatagctgccaaaggataggtaaagaggtcattaaaatgatgttgaactag

SEQ ID NO: 310147 - DNA, 699 bp, Artificial Sequence
  derived and/or modified sequence
gctgccggcggtggactcgtcggagccgcgggcggtcagatgagtgatggggaaagagcttttggaagtttgagttaattccttatggtcatgcagctaacaggaatttgaccctctagggcatgaatactgtgctgttcagttctgagctgtgctagcaatacccttcaaaggaagagcaatggctgcagcagcagcttctcacctgaacctggatgccctccgggaagtgctagaatgccccatctgcatggagtccttcacagaagagcagctgcgtcccaagcttctgcactgtggccataccatctgccgccagtgcctggagaagctattggccagtagcatcaatggtgtccgctgtcccttttgcagcaagattacccgcataaccagcttgacccagctgacagacaatctgacagtgctaaagatcattgatacagctgggctcagcgaggctgtggggctgctcatgtgtcggtcctgtgggcggcgtctgccccggcaattctgccggagctgtggtttggtgttatgtgagccctgccgggaggcagaccatcagcctcctggccactgtacactccctgtcaaagaagcagctgaggagcggcgtcgggactttggagagaagttaactcgtctgcgggaacttatgggggagctgcagcggcggaaggcagccttggaaggtgt

SEQ ID NO: 310148 - DNA, 3717 bp, Artificial Sequence
  derived and/or modified sequence
ggtgctcaacggcgcgtgcgcagagggaggcaggcgggtgggctgccggcggtggactcgtcggagccgcgggcggtcagcaggaatttgaccctctagggcatgaatactgtgctgttcagttctgagctgtgctagcaatacccttcaaaggaagagcaatggctgcagcagcagcttctcacctgaacctggatgccctccgggaagtgctagaatgccccatctgcatggagtccttcacagaagagcagctgcgtcccaagcttctgcactgtggccataccatctgccgccagtgcctggagaagctattggccagtagcatcaatggtgtccgctgtcccttttgcagcaagattacccgcataaccagcttgacccagctgacagacaatctgacagtgctaaagatcattgatacagctgggctcagcgaggctgtggggctgctcatgtgtcggtcctgtgggcggcgtctgccccggcaattctgccggagctgtggtttggtgttatgtgagccctgccgggaggcagaccatcagcctcctggccactgtacactccctgtcaaagaagcagctgaggagcggcgtcgggactttggagagaagttaactcgtctgcgggaacttatgggggagctgcagcggcggaaggcagccttggaaggtgtctccaaggaccttcaggcaaggtataaagcagttctccaggagtatgggcatgaggagcgcagggtccaggatgagctggctcgctctcggaagttcttcacaggctctttggctgaagttgagaagtccaatagtcaagtggtagaggagcagagttacctgcttaacattgcagaggtgcaggctgtgtctcgctgtgactacttcctggccaagatcaagcaggcagatgtagcactactggaggagacagctgatgaggaggagccagagctcactgccagcttgcctcgggagctcaccctgcaagatgtggagctccttaaggtaggtcatgttggccccctccaaattggacaagctgttaagaagccccggacagttaacgtggaagattcctgggccatggaggccacagcgtctgctgcctctacctctgttacttttagagagatggacatgagcccggaggaagtggttgccagccctagggcctcacctgctaaacagcggggtcctgaggcagcctccaatatccagcagtgcctctttctcaagaagatgggggccaaaggcagcactccaggaatgttcaatcttccagtcagtctctacgtgaccagtcaaggtgaagtactagtcgctgaccgtggtaactatcgtatacaagtctttacccgcaaaggctttttgaaggaaatccgccgcagccccagtggcattgatagctttgtgctaagcttccttggggcagatctacccaacctcactcctctctcagtggcaatgaactgccaggggctgattggtgtgactgacagctatgataactccctcaaggtatataccttggatggccactgcgtggcctgtcacaggagccagctgagcaaaccatggggtatcacagccttgccatctggccagtttgtagtaaccgatgtggaaggtggaaagctttggtgtttcacagttgatcgaggatcaggggtggtcaaatacagctgcctatgtagtgctgtgcggcccaaatttgtcacctgtgatgctgagggcaccgtctacttcacccagggcttaggcctcaatctggagaatcggcagaatgagcaccacctggagggtggcttttccattggctctgtaggccctgatgggcagctgggtcgccagattagccacttcttctcggagaatgaggatttccgctgcattgctggcatgtgtgtggatgctcgtggtgatctcatcgtggctgacagtagtcgcaaggaaattctccattttcctaagggtgggggctatagtgtccttattcgagagggacttacctgtccggtgggcatagccctaactcctaaggggcagctgctggtcttggactgttgggatcattgcatcaagatctacagctaccatctgagaagatattccaccccataggggatgagaaattatcagtttcttctgctcccaagccaacttcccttcccttagttcttggttgttagtggcacatgcagaatagactcagcctatgtcctgattccagctgggtagttctagaacttcagaagctccatcttttaatgtttttatttgttatgtccccctccccgcttcccacctaaatttagagctttaaaagatgcactgcccaaataggacacacgatggtgttagctgaagtttgattagcaattaggcacttccaaggctttagtagagagagccactttagccctttgtgccatgtttgaaatttgcccttgtattaaatccttgattttttcccatttggctttgatgcccttgatccattgtttccttcctactataatgtgcttcatctgtgacactttctcttgaactctgattggattcactgtgcatgcttcagtgggatctgctccacctttcagtgacatttaagacatcatattcccgtaacattatgtctcagtctgatcgtctttaccagtatgaaagtcattcatttagtgctaccaaaggggatacacaagccctttaggaagcagtacctctcgcctggaggatctgtgccatcttggattgagaattgcagatgtgacagaatggattgaccctagttggttggtattgatgacttcagcctggaaattgcttgccttttaaagaagcatatatgggttggaattatgccaaagcataggaagctgggaataagcaaacaaatgctgatatagtcagcaaatttggatagtctctagggctcatcatttttcatactacctctctcttctggcctgtgtctaaggaattgtacaacataggccagggccaacaaagtggagaggtggacacattttcatgttcattactaaaacaaacagcaaaactattggtttgttattctgtgttttcctcaagtcagtacatactatttggtttcaggatttctttccatttctctatcaagcattaaataattgagaactgtttcttcatctctggtgttcatgtcttttaattaaatacggaattttggagatgataagagggataacctgcgctatgccattttgcttccttatctcactgtgttctttcagagtgtagatatctacccaggtcaaaattcagccaaaagcactattatgtaaagataataatccaaatctttctcccaaatacatgtgtacagaatcatcccccaaggtttagagtcaccaataccctattctgagcttctgctgtatgttttatgtttataattacagttcacaaaaaggaagttagtcttgtttttaagatcagaagtgggtgagaggacctgtgatgaggttcctgagggtttggtgtttactaagtaatatatcttactctaggtgcagggctgatggcaagccaaagagcaactgccttactttgatgtaaacaaaatttgctaaactgagctgctcaaaattgtttttatggtagtagtgtttctttggattgtatcataatagctgccaaaggataggtaaagaggtcattaaaatgatgttgaact

SEQ ID NO: 310149 - DNA, 1959 bp, Artificial Sequence
  derived and/or modified sequence
atggccgccgccgccgccagccacctgaacctggacgccctgcgcgaggtgctggagtgccccatctgcatggagagcttcaccgaggagcagctgcgccccaagctgctgcactgcggccacaccatctgccgccagtgcctggagaagctgctggccagcagcatcaacggcgtgcgctgccccttctgcagcaagatcacccgcatcaccagcctgacccagctgaccgacaacctgaccgtgctgaagatcatcgacaccgccggcctgagcgaggccgtgggcctgctgatgtgccgcagctgcggccgccgcctgccccgccagttctgccgcagctgcggcctggtgctgtgcgagccctgccgcgaggccgaccaccagccccccggccactgcaccctgcccgtgaaggaggccgccgaggagcgccgccgcgacttcggcgagaagctgacccgcctgcgcgagctgatgggcgagctgcagcgccgcaaggccgccctggagggcgtgagcaaggacctgcaggcccgctacaaggccgtgctgcaggagtacggccacgaggagcgccgcgtgcaggacgagctggcccgcagccgcaagttcttcaccggcagcctggccgaggtggagaagagcaacagccaggtggtggaggagcagagctacctgctgaacatcgccgaggtgcaggccgtgagccgctgcgactacttcctggccaagatcaagcaggccgacgtggccctgctggaggagaccgccgacgaggaggagcccgagctgaccgccagcctgccccgcgagctgaccctgcaggacgtggagctgctgaaggtgggccacgtgggccccctgcagatcggccaggccgtgaagaagccccgcaccgtgaacgtggaggacagctgggccatggaggccaccgccagcgccgccagcaccagcgtgaccttccgcgagatggacatgagccccgaggaggtggtggccagcccccgcgccagccccgccaagcagcgcggccccgaggccgccagcaacatccagcagtgcctgttcctgaagaagatgggcgccaagggcagcacccccggcatgttcaacctgcccgtgagcctgtacgtgaccagccagggcgaggtgctggtggccgaccgcggcaactaccgcatccaggtgttcacccgcaagggcttcctgaaggagatccgccgcagccccagcggcatcgacagcttcgtgctgagcttcctgggcgccgacctgcccaacctgacccccctgagcgtggccatgaactgccagggcctgatcggcgtgaccgacagctacgacaacagcctgaaggtgtacaccctggacggccactgcgtggcctgccaccgcagccagctgagcaagccctggggcatcaccgccctgcccagcggccagttcgtggtgaccgacgtggagggcggcaagctgtggtgcttcaccgtggaccgcggcagcggcgtggtgaagtacagctgcctgtgcagcgccgtgcgccccaagttcgtgacctgcgacgccgagggcaccgtgtacttcacccagggcctgggcctgaacctggagaaccgccagaacgagcaccacctggagggcggcttcagcatcggcagcgtgggccccgacggccagctgggccgccagatcagccacttcttcagcgagaacgaggacttccgctgcatcgccggcatgtgcgtggacgcccgcggcgacctgatcgtggccgacagcagccgcaaggagatcctgcacttccccaagggcggcggctacagcgtgctgatccgcgagggcctgacctgccccgtgggcatcgccctgacccccaagggccagctgctggtgctggactgctgggaccactgcatcaagatctacagctaccacctgcgccgctacagcaccccc

SEQ ID NO: 310150 - DNA, 519 bp, Artificial Sequence
  derived and/or modified sequence
atggccgccgccgccgccagccacctgaacctggacgccctgcgcgaggtgctggagtgccccatctgcatggagagcttcaccgaggagcagctgcgccccaagctgctgcactgcggccacaccatctgccgccagtgcctggagaagctgctggccagcagcatcaacggcgtgcgctgccccttctgcagcaagatcacccgcatcaccagcctgacccagctgaccgacaacctgaccgtgctgaagatcatcgacaccgccggcctgagcgaggccgtgggcctgctgatgtgccgcagctgcggccgccgcctgccccgccagttctgccgcagctgcggcctggtgctgtgcgagccctgccgcgaggccgaccaccagccccccggccactgcaccctgcccgtgaaggaggccgccgaggagcgccgccgcgacttcggcgagaagctgacccgcctgcgcgagctgatgggcgagctgcagcgccgcaaggccgccctggagggcgtg

SEQ ID NO: 310151 - protein, 245 aa, Artificial Sequence
  derived and/or modified sequence
MKRTIGKPTYAFEARDYVLSLKLGATPEDFSNLPPEQRRKKLQQKVDELNKEIQKEMDQRDAITKMKDVYLKNPQMGDPASLDHKLAEVSQNIEKLRVETQKFEAWLAEVEGRLPARSEQARRQSGLYDSQNPPTVNNCAQDRESPDGSYTEEQSQESEMKVLATDFDDEFDDEEPLPAIGTCKALYTFEGQNEGTISVVEGETLYVIEEDKGDGWTRIRRNEDEEGYVPTSYVEVCLDKNAKDS

SEQ ID NO: 310152 - DNA, 990 bp, Artificial Sequence
  derived and/or modified sequence
tgtcatatgttaaagtcttatggttaattttatttattttatcttgttctcttgctggttattggcagactcagtctttctgttttcacaaagaactcatgaagaggacgatagggaaacccacgtatgcctttgaggctagggactatgttctttctctcaagctgggtgcaacaccggaggatttcagcaacctcccacctgaacaaagaaggaaaaagctgcagcagaaagtcgatgagttaaataaagaaattcagaaggagatggatcaaagagatgccataacaaaaatgaaagatgtctacctaaagaatcctcagatgggagacccagccagtttggatcacaaattagcagaagtcagccaaaatatagagaaactgcgagtagagacccagaaatttgaggcctggctggctgaggttgaaggccggctcccagcacgcagcgagcaggcgcgccggcagagcggactgtacgacagccagaacccacccacagtcaacaactgcgcccaggaccgtgagagcccagatggcagttacacagaggagcagagtcaggagagtgagatgaaggtgctggccacggattttgacgacgagtttgatgatgaggagcccctccctgccatagggacgtgcaaagctctctacacatttgaaggtcagaatgaaggaacgatttccgtagttgaaggagaaacattgtatgtcatagaggaagacaaaggcgatggctggacccgcattcggagaaatgaagatgaagagggttatgtccccacttcatatgtcgaagtctgtttggacaaaaatgccaaagattcctagaggggagtgcctgcgagcctcgggtgagccttcctggaggagcctccgtctgcttgttcccacaggcctccagcgccctgccctgtggacagcccacccctccgcagccccatccctgcggggcggtctctctctctctccagcatgctccctg

SEQ ID NO: 310153 - DNA, 738 bp, Artificial Sequence
  derived and/or modified sequence
atgaagcgcactatcgggaagccaacttatgcatttgaggccagagattatgtgcttagcctgaaactgggagcgacccccgaggatttcagcaatcttccacccgagcagcgacgcaagaagcttcagcagaaagtagacgagctgaataaggaaattcaaaaggagatggaccagcgggacgccataactaagatgaaagatgtttaccttaagaacccgcaaatgggcgatcctgcatcactggaccataagctggctgaagtctcacagaacatcgagaagctgagggtcgaaacacagaagttcgaggcgtggctcgcggaagttgaagggcggctgcccgccagatcggagcaggcgcgacggcagtcaggactttacgacagccaaaatcctccaacagtgaataactgtgcacaggacagggaatcaccagacggaagctatacggaagagcagtctcaggagagcgagatgaaggtgttggccacggattttgacgacgagttcgacgacgaggagcccctgccagcaatcggcacctgtaaggccttgtacacattcgaagggcagaacgaaggcactatcagtgtcgtggagggcgaaaccctgtatgtgatcgaggaggacaaaggggacggttggacgcggatccgacgaaatgaagatgaggaaggctacgtgcctacctcgtacgtggaggtctgtcttgataaaaacgctaaggactcttag

SEQ ID NO: 310154 - DNA, 738 bp, Artificial Sequence
  derived and/or modified sequence
atgaagaggaccatcggcaagcccacctacgcctttgaggcccgggactatgtgctgagcctgaagctgggcgccaccccagaggacttcagcaacctgcccccagagcagaggaggaagaagctgcagcagaaggtggatgagctgaacaaggagatccagaaggagatggaccagagagatgccatcaccaagatgaaggatgtgtacctgaagaacccccagatgggagaccctgccagcctggaccacaagctggccgaggtgtcccagaacatcgagaagctgcgggtggagacccagaagtttgaggcctggctggccgaggtggagggccgcctgcctgcccggtctgagcaggcccggcggcagagcggcctgtatgacagccagaaccccccaacagtgaacaactgtgcccaggaccgggagagcccagatggcagctacacagaggagcagagccaggagagcgagatgaaggtgctggccacagactttgatgatgaatttgatgatgaggagcccctgcctgccatcggcacctgcaaggccctgtacacctttgagggccagaatgaaggcaccatctctgtggtggagggggagaccctgtatgtgattgaggaggacaagggagatggctggacccgcatcagaagaaatgaagatgaggagggctacgtgcccaccagctatgtggaggtgtgcctggacaagaatgccaaggacagctag

SEQ ID NO: 310155 - DNA, 738 bp, Artificial Sequence
  derived and/or modified sequence
atgaagcggaccatcggcaagcccacctacgccttcgaggcccgggactatgtgctgtcattgaaactcggagcaacccctgaggatttctccaacctgcctcccgaacagcgccgcaaaaagctccagcagaaggtcgatgagcttaataaggaaatccagaaggaaatggaccagcgtgacgccatcacgaagatgaaggacgtgtacctgaaaaaccctcagatgggggaccctgccagcctggaccataagctagccgaggtttctcagaatattgaaaaattgcgagtcgaaactcagaaattcgaagcctggctggcagaggtggaggggcggctgccagcgaggagcgagcaagcgcgacgtcagtctggcctgtacgactctcaaaacccccccacagtaaacaactgtgctcaggaccgagagtcacccgacggctcttatacagaggagcaatcccaggagagcgagatgaaggtgttggctacagatttcgatgatgagttcgacgacgaggaacctctgcctgccatcggaacatgcaaagccttatatactttcgagggtcagaacgaagggacaatttccgtggtggaaggggagaccctgtatgtgattgaagaagataagggagatggctggactcggattcggcggaatgaagacgaagagggttacgtccccacaagttatgtagaggtctgtctggataaaaatgctaaggactcgtag

SEQ ID NO: 310156 - DNA, 738 bp, Artificial Sequence
  derived and/or modified sequence
atgaagcgcaccatagggaaacccacctatgcattcgaggctagggattacgtgctgtccctcaagctgggagcgaccccggaggattttagcaacctgcccccagaacagcgcagaaagaagttgcagcagaaagtggatgagcttaacaaagagattcagaaggaaatggatcagcgtgatgccatcactaagatgaaggatgtgtacctgaaaaacccccagatgggggatccggcatcccttgatcacaaactggcggaagtgagccagaatatagaaaaacttcgtgtcgagactcagaaattcgaagcatggttagccgaggtggaggggcgactgccagctaggtccgagcaagcgcgtagacagtctgggctgtatgacagccaaaaccctccaaccgtcaataactgtgcccaagacagggagagccctgatggcagctacaccgaggaacagtcccaggagtctgagatgaaggtgctggctaccgactttgacgacgagttcgatgacgaggaaccactacctgccatcgggacctgcaaggcactgtacacttttgaaggccaaaatgaaggcacaatcagcgtggtggaaggtgagacattgtatgttatcgaggaggacaaaggtgatggctggactcgaataagacggaatgaagatgaagagggatacgtgcccaccagctatgtggaagtctgtttggacaaaaatgccaaggactcctag

SEQ ID NO: 310157 - DNA, 738 bp, Artificial Sequence
  derived and/or modified sequence
atgaagagaaccatcggcaagcccacctacgccttcgaggccagagactacgtgctgagcctgaagctgggcgccacccccgaggacttcagcaacctgccccccgagcagagaagaaagaagctgcagcagaaggtggacgagctgaacaaggagatccagaaggagatggaccagagagacgccatcaccaagatgaaggacgtgtacctgaagaacccccagatgggcgaccccgccagcctggaccacaagctggccgaggtgagccagaacatcgagaagctgagagtggagacccagaagttcgaggcctggctggccgaggtggagggcagactgcccgccagaagcgagcaggccagaagacagagcggcctgtacgacagccagaacccccccaccgtgaacaactgcgcccaggacagagagagccccgacggcagctacaccgaggagcagagccaggagagcgagatgaaggtgctggccaccgacttcgacgacgagttcgacgacgaggagcccctgcccgccatcggcacctgcaaggccctgtacaccttcgagggccagaacgagggcaccatcagcgtggtggagggcgagaccctgtacgtgatcgaggaggacaagggcgacggctggaccagaatcagaagaaacgaggacgaggagggctacgtgcccaccagctacgtggaggtgtgcctggacaagaacgccaaggacagctag

SEQ ID NO: 310158 - protein, 2706 aa, Artificial Sequence
  derived and/or modified sequence
MSTCCWCTPGGASTIDFLKRYASNTPSGEFQTADEDLCYCLECVAEYHKARDELPFLHEVLWELETLRLINHFEKSMKAEIGDDDELYIVDNNGEMPLFDITGQDFENKLRVPLLEILKYPYLLLHERVNELCVEALCRMEQANCSFQVFDKHPGIYLFLVHPNEMVRRWAILTARNLGKVDRDDYYDLQEVLLCLFKVIELGLLESPDIYTSSVLEKGKLILLPSHMYDTTNYKSYWLGICMLLTILEEQAMDSLLLGSDKQNDFMQSILHTMEREADDDSVDPFWPALHCFMVILDRLGSKVWGQLMDPIVAFQTIINNASYNREIRHIRNSSVRTKLEPESYLDDMVTCSQIVYNYNPEKTKKDSGWRTAICPDYCPNMYEEMETLASVLQSDIGQDMRVHNSTFLWFIPFVQSLMDLKDLGVAYIAQVVNHLYSEVKEVLNQTDAVCDKVTEFFLLILVSVIELHRNKKCLHLLWVSSQQWVEAVVKCAKLPTTAFTRSSEKSSGNCSKGTAMISSLSLHSMPSNSVQLAYVQLIRSLLKEGYQLGQQSLCKRFWDKLNLFLRGNLSLGWQLTSQETHELQSCLKQIIRNIKFKAPPCNTFVDLTSACKISPASYNKEESEQMGKTSRKDMHCLEASSPTFSKEPMKVQDSVLIKADNTIEGDNNEQNYIKDVKLEDHLLAGSCLKQSSKNIFTERAEDQIKISTRKQKSVKEISSYTPKDCTSRNGPERGCDRGIIVSTRLLTDSSTDALEKVSTSNEDFSLKDDALAKTSKRKTKVQKDEICAKLSHVIKKQHRKSTLVDNTINLDENLTVSNIESFYSRKDTGVQKGDGFIHNLSLDPSGVLDDKNGEQKSQNNVLPKEKQLKNEELVIFSFHENNCKIQEFHVDGKELIPFTEMTNASEKKSSPFKDLMTVPESRDEEMSNSTSVIYSNLTREQAPDISPKSDTLTDSQIDRDLHKLSLLAQASVITFPSDSPQNSSQLQRKVKEDKRCFTANQNNVGDTSRGQVIIISDSDDDDDERILSLEKLTKQDKICLEREHPEQHVSTVNSKEEKNPVKEEKTETLFQFEESDSQCFEFESSSEVFSVWQDHPDDNNSVQDGEKKCLAPIANTTNGQGCTDYVSEVVKKGAEGIEEHTRPRSISVEEFCEIEVKKPKRKRSEKPMAEDPVRPSSSVRNEGQSDTNKRDLVGNDFKSIDRRTSTPNSRIQRATTVSQKKSSKLCTCTEPIRKVPVSKTPKKTHSDAKKGQNRSSNYLSCRTTPAIVPPKKFRQCPEPTSTAEKLGLKKGPRKAYELSQRSLDYVAQLRDHGKTVGVVDTRKKTKLISPQNLSVRNNKKLLTSQELQMQRQIRPKSQKNRRRLSDCESTDVKRAGSHTAQNSDIFVPESDRSDYNCTGGTEVLANSNRKQLIKCMPSEPETIKAKHGSPATDDACPLNQCDSVVLNGTVPTNEVIVSTSEDPLGGGDPTARHIEMAALKEGEPDSSSDAEEDNLFLTQNDPEDMDLCSQMENDNYKLIELIHGKDTVEVEEDSVSRPQLESLSGTKCKYKDCLETTKNQGEYCPKHSEVKAADEDVFRKPGLPPPASKPLRPTTKIFSSKSTSRIAGLSKSLETSSALSPSLKNKSKGIQSILKVPQPVPLIAQKPVGEMKNSCNVLHPQSPNNSNRQGCKVPFGESKYFPSSSPVNILLSSQSVSDTFVKEVLKWKYEMFLNFGQCGPPASLCQSISRPVPVRFHNYGDYFNVFFPLMVLNTFETVAQEWLNSPNRENFYQLQVRKFPADYIKYWEFAVYLEECELAKQLYPKENDLVFLAPERINEEKKDTERNDIQDLHEYHSGYVHKFRRTSVMRNGKTECYLSIQTQENFPANLNELVNCIVISSLVTTQRKLKAMSLLGSRNQLARAVLNPNPMDFCTKDLLTTTSERIIAYLRDFNEDQKKAIETAYAMVKHSPSVAKICLIHGPPGTGKSKTIVGLLYRLLTENQRKGHSDENSNAKIKQNRVLVCAPSNAAVDELMKKIILEFKEKCKDKKNPLGNCGDINLVRLGPEKSINSEVLKFSLDSQVNHRMKKELPSHVQAMHKRKEFLDYQLDELSRQRALCRGGREIQRQELDENISKVSKERQELASKIKEVQGRPQKTQSIIILESHIICCTLSTSGGLLLESAFRGQGGVPFSCVIVDEAGQSCEIETLTPLIHRCNKLILVGDPKQLPPTVISMKAQEYGYDQSMMARFCRLLEENVEHNMISRLPILQLTVQYRMHPDICLFPSNYVYNRNLKTNRQTEAIRCSSDWPFQPYLVFDVGDGSERRDNDSYINVQEIKLVMEIIKLIKDKRKDVSFRNIGIITHYKAQKTMIQKDLDKEFDRKGPAEVDTVDAFQGRQKDCVIVTCVRANSIQGSIGFLASLQRLNVTITRAKYSLFILGHLRTLMQLLPRSFCVHVNHSPFFSPEPKYLHWALKENQHWNQLIQDAQKRGAIIKTCDKNYRHDAVKILKLKPVLQRSLTHPPTIAPEGSRPQGGLPSSKLDSGFAKTSVAASLYHTPSDSKEITLTVTSKDPERPPVHDQLQDPRLLKRMGIEVKGGIFLWDPQPSSPQHPGATPPTGEPGFPVVHQDLSHIQQPAAVVAALSSHKPPVRGEPPAASPEASTCQSKCDDPEEELCHRREARAFSEGEQEKCGSETHHTRRNSRWDKRTLEQEDSSSKKRKLL

SEQ ID NO: 310159 - protein, 948 aa, Artificial Sequence
  derived and/or modified sequence
VAQEWLNSPNRENFYQLQVRKFPADYIKYWEFAVYLEECELAKQLYPKENDLVFLAPERINEEKKDTERNDIQDLHEYHSGYVHKFRRTSVMRNGKTECYLSIQTQENFPANLNELVNCIVISSLVTTQRKLKAMSLLGSRNQLARAVLNPNPMDFCTKDLLTTTSERIIAYLRDFNEDQKKAIETAYAMVKHSPSVAKICLIHGPPGTGKSKTIVGLLYRLLTENQRKGHSDENSNAKIKQNRVLVCAPSNAAVDELMKKIILEFKEKCKDKKNPLGNCGDINLVRLGPEKSINSEVLKFSLDSQVNHRMKKELPSHVQAMHKRKEFLDYQLDELSRQRALCRGGREIQRQELDENISKVSKERQELASKIKEVQGRPQKTQSIIILESHIICCTLSTSGGLLLESAFRGQGGVPFSCVIVDEAGQSCEIETLTPLIHRCNKLILVGDPKQLPPTVISMKAQEYGYDQSMMARFCRLLEENVEHNMISRLPILQLTVQYRMHPDICLFPSNYVYNRNLKTNRQTEAIRCSSDWPFQPYLVFDVGDGSERRDNDSYINVQEIKLVMEIIKLIKDKRKDVSFRNIGIITHYKAQKTMIQKDLDKEFDRKGPAEVDTVDAFQGRQKDCVIVTCVRANSIQGSIGFLASLQRLNVTITRAKYSLFILGHLRTLMQLLPRSFCVHVNHSPFFSPEPKYLHWALKENQHWNQLIQDAQKRGAIIKTCDKNYRHDAVKILKLKPVLQRSLTHPPTIAPEGSRPQGGLPSSKLDSGFAKTSVAASLYHTPSDSKEITLTVTSKDPERPPVHDQLQDPRLLKRMGIEVKGGIFLWDPQPSSPQHPGATPPTGEPGFPVVHQDLSHIQQPAAVVAALSSHKPPVRGEPPAASPEASTCQSKCDDPEEELCHRREARAFSEGEQEKCGSETHHTRRNSRWDKRTLEQEDSSSKKRKLL

SEQ ID NO: 310160 - DNA, 8121 bp, Artificial Sequence
  derived and/or modified sequence
atgagtacatgttgctggtgtacgccagggggtgcatctaccattgattttctgaaaagatacgcgagtaacacccccagtggtgagtttcagacagccgatgaggacctctgctattgcctggagtgtgtggctgagtatcataaggcccgtgacgagctgccctttctccacgaggtactgtgggagctcgaaactctacgcctaatcaatcacttcgagaaatccatgaaagcggagattggcgatgacgatgagctgtacatcgtagacaataatggcgagatgcctctgtttgacatcactggccaggatttcgagaataagctacgcgtcccattgcttgagattctgaagtatccatatcttctgctacatgaacgcgtaaatgagctatgcgttgaggctctctgccggatggaacaagccaactgtagctttcaagttttcgacaagcaccccgggatttacctgtttttggtgcacccaaacgagatggtccgacgctgggcaattctcactgcgcgcaacctagggaaggtggatcgcgacgactactatgacctacaagaagttctgctgtgcttattcaaggtcattgaactgggccttctggagagtcctgacatttacacctctagtgtgctcgagaagggcaagcttatcttgctgccttcccatatgtacgacactacaaactacaagtcctattggctaggaatctgtatgttgctcaccatcctggaggagcaagctatggactccctcctgctaggcagtgataagcagaacgacttcatgcaatctatcctccatactatggaacgtgaagcggatgatgactcagttgaccccttctggcccgcgctgcattgttttatggtgattctcgatcggttgggctcaaaagtgtgggggcaactcatggaccccatagtcgctttccagaccatcatcaataatgcttcttacaatagagagattcggcacatcagaaatagcagtgttcggacgaaactagagccggagtcttatttggatgacatggtgacatgtagtcagatagtctacaattataaccctgaaaagaccaaaaaggatagcgggtggcggaccgcaatttgtcccgactactgtcccaatatgtatgaagagatggagaccctggctagtgtcctccagtcagatattggccaggacatgagagtccataattctacatttctgtggttcattcccttcgtgcagagcttgatggacctcaaagatctgggtgttgcgtacatcgcccaggtcgttaaccacttgtatagtgaggtcaaggaggttctgaaccaaacagacgcagtgtgtgacaaagttacggagttcttcctacttattcttgtctccgtgattgaacttcacagaaataagaaatgcctccacctgctgtgggtctctagtcagcagtgggtcgaagcagttgtgaaatgtgctaaactcccaacgaccgcgttcaccaggtcaagtgaaaagtcttctggaaattgtagcaaggggacagccatgatatcaagtctgtcgcttcacagtatgccaagtaactccgtgcaactcgcttacgtccagctgattcgtagcctgcttaaagagggctaccagctggggcaacagagtttgtgcaaaaggttttgggacaaactgaacctcttcctgagaggaaacctgtccctcgggtggcagcttacaagccaggagactcacgaactgcagagctgcttgaagcagatcattcggaatatcaagtttaaggcaccgccatgtaacacattcgtcgacctcacctcggcatgcaaaatatctcctgcctcttacaacaaagaggagtccgagcagatggggaaaaccagccggaaagacatgcattgtctggaagcgtccagtcccactttctcaaaagagcctatgaaagtgcaggactcagtgttaattaaggccgacaatactatagagggggacaacaacgagcagaattatatcaaggatgtcaaattagaggatcatctgctggctggaagttgtctcaagcaatcctcgaagaatatttttactgaaagagccgaggaccaaattaagatcagcacaagaaaacagaaatctgtcaaggagatttcgtcgtacacgccgaaagactgcaccagtcgaaatggcccagagcggggatgtgaccgcggtatcatcgtctcaacgcgtctgctaactgactcttctaccgacgccttggagaaagtctctacgtccaacgaggacttttccctgaaggacgacgccttggccaaaacgtccaaaagaaagactaaagttcaaaaagacgaaatctgcgcaaaactcagccacgtaatcaagaaacagcatcgaaagagcacgctcgtggataacacgatcaacctggatgaaaacctgacggtgagtaatatcgagagcttttactctcgaaaggacaccggggtgcagaagggggatgggtttatccacaacttgagccttgaccccagtggggtcttggatgataaaaacggcgaacaaaagagtcagaataatgtgcttcctaaagagaaacagctcaaaaacgaagagctggtgattttttcattccatgaaaacaactgcaagatccaagaatttcacgtggacgggaaagagctgataccatttacagaaatgaccaatgcttctgaaaagaaaagctctccttttaaagacctgatgactgttcctgaatcccgcgatgaggaaatgtccaacagtacttctgtgatctattccaatcttacccgggaacaggctcctgatatcagtcctaagtccgataccctgaccgacagtcagatcgacagggacctgcacaaactgtccctgttagcacaggccagtgtgattacatttcctagcgactctccccagaactccagccagctgcagcggaaagtgaaagaggacaagcgctgttttaccgccaaccaaaacaatgtaggggacacttctaggggccaggtcattatcatatccgattccgacgacgacgacgatgaacgcatactctctctggaaaagttgactaagcaagataaaatttgcttggaacgggagcacccagaacagcacgtctctacagtaaattctaaggaagaaaaaaacccagttaaagaggagaagacggaaactctctttcaatttgaggaatcagatagtcaatgtttcgagttcgagagctctagtgaggttttttctgtgtggcaagatcaccctgatgataataactccgttcaagacggggagaagaagtgtctcgcgccaatagctaataccacgaatggccaggggtgcactgattacgtgtcagaggtggttaaaaagggagccgaaggcattgaggaacacactagaccacggtccatttccgtggaagagttctgcgaaatcgaagtcaagaagccaaagaggaagcggtcagaaaagccgatggccgaagacccagttcggccgagctcttcagtgcgtaacgaagggcagagcgataccaacaagagagatcttgtcgggaatgatttcaaatctattgatagaagaacctctacacccaattctcgaatccagagagcaactactgtgagtcagaaaaagagcagcaaactttgcacttgtacagaaccaattcgcaaagtccccgtgtccaagacacccaagaagacacacagcgacgccaaaaaggggcagaataggtcgagcaactacctgtcatgtcgaaccactccagctattgtccctcctaagaagtttcgccagtgtccggagccaacctctaccgccgaaaagctgggtctgaagaagggtcctcgaaaggcctatgagctttcccaacgctcactggattatgtggcacaattacgggatcacggtaaaacagtgggggtagttgatacgagaaaaaaaacaaagctgatctccccacagaatctgtcagttcgaaacaacaaaaagctgcttacatcccaggagctgcagatgcagagacagatccgacctaaaagccaaaaaaacaggcggagactgtctgactgcgagtccactgacgttaagcgggcaggtagtcacaccgcccagaactcagacatttttgtccctgagagtgacaggtctgactacaactgtactggcggcactgaggtgctggccaacagcaaccgcaagcagctgatcaagtgtatgcccagtgagccagagacgatcaaggcaaaacacggctctcctgctacagatgacgcatgtccactaaaccaatgcgattcagtggttcttaatgggactgtcccgactaatgaggtgattgtatccacgagcgaagaccccctggggggaggagatcccacagcacgacacatcgagatggcagcacttaaagaaggcgagcccgactcctcctccgatgccgaggaagacaatctgttcttgacacagaatgacccagaggacatggatctgtgtagtcagatggaaaacgataattataagttgattgaactaatacatggcaaagacacagttgaagtggaggaggattccgtctccagaccccagttggagtccttgagcggcaccaagtgtaagtacaaagactgcctggaaactacaaaaaatcagggcgagtactgtccaaaacatagcgaggtgaaggccgcagacgaggatgtgttccgcaaaccgggcctcccacctcccgcaagcaagccgctgcgtcctacgacgaagatattctcctcaaagagtacatctcgaattgccggattgagcaaatcacttgaaacttctagtgccctgagtccatctctgaaaaacaagagtaagggcatacagtccatcctaaaagtcccgcagcctgtgcccctgatcgcccaaaaaccagttggagagatgaagaactcttgcaatgtgcttcaccctcaaagccctaacaactctaacagacagggctgtaaggtaccatttggtgagtctaagtactttccatcctcaagtcccgtgaatatcctgttgagttctcaaagcgtctctgacacattcgtaaaagaggtcctgaagtggaaatatgagatgttcttaaacttcggccagtgcggccctcccgcctctctctgtcagagcattagccggccagttccggtacgatttcataactacggggactactttaacgtgttttttcctctaatggtcctgaatacgttcgagacggttgcccaggaatggctgaatagccctaaccgagaaaacttctaccagctgcaggttagaaagttcccggctgattacattaaatattgggagttcgctgtctacctcgaagagtgtgagctggccaagcagctgtatcctaaggagaatgatcttgtgtttttagcaccagagagaatcaatgaggagaaaaaggatacagagcgaaacgacattcaagacctccatgaatatcattccgggtacgtacataagttcaggcggacaagtgtgatgcggaatggaaaaaccgagtgttatctgtctattcagactcaagagaatttccccgccaatctcaacgaactggtgaactgtatagtcatctcaagtctcgtaactacccaaaggaaattaaaagcaatgtctttgttgggatccagaaatcagttggcaagagccgtactgaatcctaacccgatggacttctgcacaaaagatctgctcactacaacgtccgagagaatcatagcttacctgcgagatttcaatgaggatcaaaaaaaggcgattgaaactgcttacgctatggtcaagcatagccccagtgtggccaaaatttgccttatccatggcccaccgggcacagggaagtcaaaaactatcgtgggcttgctgtacagactgcttaccgagaaccagaggaaaggccactccgatgagaattccaacgcaaagatcaagcagaatagggtactcgtttgtgcaccttccaacgccgcagtagacgaactgatgaagaaaattattcttgaattcaaggaaaagtgcaaggataagaagaaccctctcgggaattgcggcgacattaacctcgtgaggttaggacccgaaaaaagcataaactccgaggttttgaaattttctctggattctcaggtaaatcacaggatgaagaaagaactgcccagccatgtccaggcaatgcacaagaggaaagaatttctggattatcagctggacgaattgtcacgacaacgcgcactgtgcaggggtggccgagagatacaaagacaggaactcgatgagaatatctctaaggtctccaaggagaggcaggagctcgcttctaaaatcaaagaggttcaaggaaggcctcagaagacccagagcataatcatcctggagtcacatataatctgttgcacattaagcacgagtggaggcctgctactcgagagcgcctttcgtggacaggggggcgtaccattttcctgtgtcatcgtcgatgaagcagggcagagctgtgaaattgaaaccctcacccccttgattcataggtgcaataagctaattctcgtcggcgatccaaagcagctgccccccacagtgatctccatgaaagcccaggagtacggctatgatcagtctatgatggctcgcttttgccgcctgttagaagaaaatgtcgagcataacatgatctcaaggctgccaattctgcagcttaccgtccaataccggatgcaccctgatatatgtctgtttccatcaaactatgtgtataaccgaaacctgaaaacgaatagacagactgaagcgattaggtgttcctctgactggccatttcaaccatacctggtgtttgacgtgggcgatggtagtgaaaggagagataatgactcatacataaatgtccaggaaattaaattagtgatggagatcattaaacttatcaaggataagaggaaggatgtctccttccggaatattgggatcattacacattataaggcacagaaaactatgattcaaaaggatctcgacaaggaattcgaccgcaagggcccggctgaagtggacacagtggatgcatttcaggggagacagaaagattgcgtgatcgtgacttgtgtcagagctaactcaattcagggctccatcggatttctagcctccctgcagagattgaacgttacaattactcgcgctaagtattcactcttcatacttgggcatcttcggacattaatgcagctgctcccaaggtccttttgcgttcacgttaaccattcaccattttttagtcctgagcccaagtaccttcattgggccctaaaagagaaccagcattggaatcagctgattcaagatgcccagaagcgcggtgcaattataaaaacctgtgataaaaactacaggcatgacgcagtgaaaatcctcaagttgaagccggttcttcaaagatctctcactcatccaccgaccatcgcaccagagggctcgagaccccagggcggcctgccttccagcaagctcgactccggattcgccaagaccagcgttgcggcttctttgtaccatacaccgagcgacagcaaagaaattacgctgactgtcacaagcaaggacccagaaaggccgcctgtccatgaccagctgcaagaccctaggttgctcaaaagaatggggatcgaagtgaaaggaggcatatttctctgggatcctcaacccagctcgccacagcatccaggggctacgcccccgacaggcgaaccaggcttcccagtggtgcatcaggacctgagccacattcagcaacccgctgctgtggtggcggctctgtcctctcacaagcctccggtgaggggtgagccacctgccgcatcaccagaggcatcaacatgccaaagcaagtgcgacgatcccgaagaggagctgtgccatcggcgggaggcacgcgccttctctgaaggggagcaggaaaagtgcggatctgagacccatcataccaggagaaatagtaggtgggacaaacgtactctggaacaggaggacagctcctccaaaaagaggaagctcctctag

SEQ ID NO: 310161 - DNA, 2847 bp, Artificial Sequence
  derived and/or modified sequence
gtcgcacaggaatggctgaactcccccaacagggaaaacttctatcaactgcaggtgagaaagtttccggcggattatataaagtattgggagttcgccgtctacctggaggagtgtgaattggccaagcagctataccctaaggaaaacgacctcgtgttcctggcccctgaacggatcaatgaagagaaaaaggatactgaaaggaacgacatccaggatcttcatgagtaccactctgggtatgttcataaattcaggaggaccagcgtcatgcgcaacggaaagaccgagtgctatttatctatccaaacacaggaaaacttccccgcaaacctgaacgaactagtaaactgtatcgtgatcagctctctggtgactacacagcgcaagctgaaagccatgagtctcctgggcagccgcaaccagctcgcccgggccgttctgaatccaaatccaatggacttttgtactaaggacctcctaaccaccacctcggagcgaatcatcgcatacctaagggattttaatgaggatcagaagaaggcgattgaaacggcttatgctatggttaagcactctccctctgtcgctaagatctgcctcatccacgggccaccaggcactggcaaaagtaagaccatcgttggactcctgtacaggctcttaacggagaaccagcgtaaaggccacagcgacgagaatagtaatgccaagatcaaacagaatcgtgtgctagtctgtgctcctagtaacgccgccgtcgacgaactcatgaaaaagatcatactcgaattcaaagagaagtgcaaggataagaagaacccactgggtaattgcggcgatatcaacctcgtgcgtttaggcccagaaaagtccattaacagcgaggtcctcaaattctcattagacagtcaggttaatcatcggatgaagaaggagctgccttcgcacgtacaagccatgcataaacgcaaggagtttctcgactatcagttggatgagctcagtaggcagcgagctctgtgccgtggcgggagagaaattcagaggcaggaattggacgagaacatttctaaggtgtccaaagaacggcaggagctcgcatcaaaaattaaggaagtgcagggtcggcctcagaaaacgcagagtattattatcctagaatcacatatcatttgttgcacactttctacatcgggtggtcttctgcttgagtccgcctttaggggacagggaggcgtcccgttctcttgtgtgatcgtggacgaggccgggcagagttgtgaaatagaaacactaacccccctgatccaccgatgtaataagcttatccttgtcggcgatcctaaacagctgcctccaaccgtcatttctatgaaggcacaggaatacggatatgatcaaagcatgatggctcgattctgccgcctgttggaggaaaacgtcgagcataacatgattagtaggttaccgattctgcagctgacggtgcaataccggatgcatcccgacatatgcttatttccgagtaactacgtgtacaaccgaaatctcaaaactaatcgacaaacagaggcaatacgatgcagcagcgattggccgttccagccatatttagtgttcgacgtgggggatggctccgaacgcagggataatgattcttatatcaatgtgcaggagattaagctggtcatggagatcattaaattgatcaaagataagcgcaaggacgtgagcttcaggaatattgggataataacccactataaggcccagaagacgatgatccagaaagaccttgataaggaatttgaccgcaaggggccagccgaggttgatactgtagacgcctttcaaggtcggcagaaggactgcgttatcgttacatgcgtcagagccaactctatacagggcagcattgggtttctggcctctcttcagagactaaatgtgaccattacaagggccaaatattccttattcattctgggacatcttcgcactttgatgcagttactccccagaagtttctgtgtgcatgtgaatcattctccatttttctcgcccgagccaaaatacctccactgggctctaaaggaaaaccagcactggaatcagctcatccaggacgctcagaaacgaggcgccatcattaagacatgtgataaaaactaccgtcatgacgccgtcaaaatactgaaactgaaacctgtacttcaacgcagtcttacacatccgcccacaattgcaccagaaggcagtaggccccaggggggacttccatcctctaagctggatagcgggttcgctaagacctccgtggcggcttccctatatcacactccatccgattcaaaggaaataactcttacagtgaccagcaaagatcccgaacgaccccctgtccacgaccaactgcaagaccctcggctgctcaagcggatgggcatcgaggtcaaaggaggcatattcctttgggatccgcaacctagttcccctcagcaccccggcgctacaccaccaactggggagcccggatttcctgtcgtgcatcaggatctctctcatattcagcagcccgcagccgtggttgctgcgctgtctagccacaagcctccggtcaggggcgagcctcctgctgctagccccgaagcgagcacttgccagtccaaatgtgacgatcctgaagaggagttgtgtcacaggcgcgaagctcgcgccttctcagagggagaacaagaaaagtgcgggtctgaaacacaccacactcgccgcaactctcgatgggacaagaggactctggagcaggaagacagcagcagcaaaaagcggaagctcctatag

SEQ ID NO: 310162 - DNA, 8121 bp, Artificial Sequence
  derived and/or modified sequence
atgagcacctgctgctggtgcaccccaggaggagccagcaccatcgacttcctgaagagatatgccagcaacaccccatctggagagttccagacagcagatgaggacctgtgctactgcctggagtgtgtggccgagtaccacaaggccagagatgagctgcccttcctgcacgaggtgctgtgggagctggagaccctgcggctcatcaaccactttgagaagtccatgaaggccgagattggagatgatgatgagctgtacatcgtggacaacaatggagagatgcccctgtttgacatcaccggccaggactttgagaacaagctgcgggtgcccctgctggagatcctgaagtacccctacctgctgctgcacgagcgggtgaatgagctgtgtgtggaggccctgtgcaggatggagcaggccaactgcagcttccaggtgtttgacaagcaccctggcatctacctgttcctggtgcaccccaatgagatggtgcggcgctgggccatcctgacagccaggaacctgggcaaggtggacagagatgactactatgacctgcaggaggtgctgctgtgcctcttcaaggtgattgagctgggcctgctggagagcccagacatctacaccagctctgtgctggagaagggcaagctgatcctgctgcccagccacatgtatgacaccaccaactacaagagctactggctgggcatctgcatgctgctgaccatcctggaggagcaggccatggacagcctgctgctgggcagtgacaagcagaatgacttcatgcagagcatcctgcacaccatggagcgggaggctgatgatgacagcgtggaccccttctggccagccctgcactgcttcatggtgatcctggaccggctgggcagcaaggtgtggggccagctgatggaccccatcgtggccttccagaccatcatcaacaatgccagctacaaccgggagatccgccacatccggaacagctctgtgaggaccaagctggagcctgagagctacctggatgacatggtgacctgcagccagatcgtgtacaactacaaccctgagaagaccaagaaggacagcggctggaggacagccatctgcccagactactgccccaacatgtatgaggagatggagaccctggcctctgtgctgcagagcgacatcggccaggacatgagggtgcacaacagcaccttcctgtggttcatcccctttgtgcagagcctgatggacctgaaggacctgggcgtggcctacatcgcccaggtggtgaaccacctgtacagcgaggtgaaggaggtgctgaaccagacagatgctgtgtgtgacaaggtgacagagttcttcctgctgatcctggtgtctgtcatcgagctgcacaggaacaagaagtgcctgcacctgctgtgggtgagcagccagcagtgggtggaggccgtggtgaagtgtgccaagctgcccaccacagccttcaccaggagcagcgagaagagcagcggcaactgcagcaaaggaacagccatgatcagcagcctgagcctgcacagcatgcccagcaacagcgtgcagctggcctacgtgcagctgatccgcagcctgctgaaggagggctaccagctgggccagcagagcctgtgcaagcgcttctgggacaagctgaacctcttcctgcggggcaacctgagcctgggctggcagctgaccagccaggagacccatgagctgcagagctgcctgaagcagatcatccggaacatcaagttcaaggccccaccctgcaacacctttgtggacctgaccagcgcctgcaagatcagccctgccagctacaacaaggaggagagcgagcagatgggcaagaccagcaggaaggacatgcactgcctggaggccagcagccccaccttcagcaaggagcccatgaaggtgcaggacagcgtgctgatcaaggctgacaacaccatcgagggggacaacaatgagcagaactacatcaaggatgtgaagctggaggaccacctgctggccggcagctgcctgaagcagagcagcaagaacatcttcacagaaagagctgaggaccagatcaagatcagcaccaggaagcagaagtctgtgaaggagatcagcagctacacccccaaggactgcaccagcagaaatggacctgagcggggctgtgaccggggcatcatcgtgtccacccggctgctgacagacagcagcacagatgccctggagaaggtgtccaccagcaatgaagacttcagcctgaaggatgatgccctggccaagaccagcaagaggaagaccaaggtgcagaaggatgagatctgtgccaagctgagccacgtgatcaagaagcagcacaggaagagcaccctggtggacaacaccatcaacctggatgagaacctgactgtgagcaacatcgagagcttctacagcaggaaggacacaggagtgcagaagggagatggcttcatccacaacctgagcctggaccccagcggcgtgctggatgacaagaatggagagcagaagagccagaacaacgtgctgcccaaggagaagcagctgaagaatgaggagctggtgatcttctccttccacgagaacaactgcaagatccaggagttccacgtggatggcaaggagctgatccccttcacagagatgaccaatgccagcgagaagaagagcagccccttcaaggacctgatgacagtgcctgagagcagagatgaggagatgagcaacagcaccagcgtcatctacagcaacctgacccgggagcaggccccagacatcagccccaagagtgacaccctgacagacagccagattgaccgggacctgcacaagctgagcctgctggcccaggccagcgtcatcaccttccccagcgacagcccccagaacagcagccagctgcagaggaaggtgaaggaggacaagcgctgcttcaccgccaaccagaacaacgtgggggacaccagccggggccaggtgatcatcatcagtgacagtgatgatgatgatgatgagcgcatcctgagcctggagaagctgaccaagcaggacaagatctgcctggagcgggagcaccctgagcagcacgtgtccacagtgaacagcaaggaggagaagaaccctgtgaaggaggagaagacagagaccctcttccagtttgaggagagtgacagccagtgctttgaatttgagagcagcagcgaggtgttttctgtgtggcaggaccacccagatgacaacaacagcgtgcaggatggagagaagaagtgcctggcccccatcgccaacaccaccaacggccagggctgcacagattatgtgtctgaggtggtgaagaagggagctgagggcatcgaggagcacacccggcccaggagcatctctgtggaggagttctgtgaaattgaggtgaagaagcccaagaggaagaggtctgagaagcccatggctgaagatcctgtgcggcccagcagctctgtgagaaatgaaggccagagcgacaccaacaagagggacctggtgggcaatgacttcaagagcattgacaggaggaccagcacccccaacagccgcatccagagggccaccaccgtgtcccagaagaagagcagcaagctgtgcacctgcacagagcccatcaggaaggtgcctgtgtccaagacccccaagaagacccacagtgatgccaagaagggccagaacagaagcagcaactacctgagctgcaggaccaccccagccatcgtgccccccaagaagttccggcagtgcccagagcccaccagcacagctgagaagctgggcctgaagaagggccccaggaaggcctatgagctgagccagaggagcctggactatgtggcccagctgcgggaccacggcaagacagtgggcgtggtggacaccaggaagaagaccaagctgatcagcccccagaacctgtctgtgaggaacaacaagaagctgctgaccagccaggagctgcagatgcagaggcagatccggcccaagagccagaagaacagaagaaggctgagtgactgtgagagcacagatgtgaagagagctggcagccacacagcccagaacagcgacatctttgtgcctgagagtgacagaagtgactacaactgcacaggaggaacagaggtgctggccaacagcaacaggaagcagctgatcaagtgcatgcccagcgagcctgagaccatcaaggccaagcacggcagccctgccacagatgatgcctgccccctgaaccagtgtgacagcgtggtgctgaatggcaccgtgcccaccaatgaggtgattgtgtccaccagcgaggaccccctgggcggcggggaccccacagcccggcacatcgagatggccgccctgaaggagggggagccagacagcagcagtgatgctgaggaggacaacctcttcctgacccagaatgaccctgaggacatggacctgtgcagccagatggagaatgacaactacaagctgattgagctgatccacggcaaggacacagtggaggtggaggaggacagcgtgtcccggccccagctggagagcctgagcggcaccaagtgcaagtacaaggactgcctggagaccaccaagaaccagggcgagtactgccccaagcacagcgaggtgaaggccgcagatgaagatgtgttcaggaagccaggcctgcccccaccagccagcaagcccctgcggcccaccaccaagatcttcagcagcaagagcaccagcagaattgctggcctgagcaagagcctggagaccagcagcgccctgagccccagcctgaagaacaagagcaagggcatccagagcatcctgaaggtgccccagcctgtgcccctcatcgcccagaagcctgtgggggagatgaagaacagctgcaatgtgctgcacccccagagccccaacaacagcaaccggcagggctgcaaggtgccctttggagagagcaagtacttccccagcagcagccctgtgaacatcctgctgagcagccagagcgtgtctgacacctttgtgaaggaggtgctgaagtggaagtatgagatgttcctgaactttggccagtgtggccccccagccagcctgtgccagagcatcagcaggcctgtgcctgtgcgcttccacaactacggggactacttcaacgtgttcttccccctgatggtgctgaacacctttgagaccgtggcccaggagtggctgaacagccccaaccgggagaacttctaccagctgcaggtgaggaagtttcctgctgactacatcaagtactgggagtttgctgtgtacctggaggagtgtgagctggccaagcagctgtaccccaaggaaaatgacctggtgttcctggcccctgagcgcatcaatgaggagaagaaggacacagaaagaaatgacatccaggacctgcacgagtaccacagcggctacgtgcacaagttccggaggacctctgtgatgagaaatggcaagacagagtgctacctgagcatccagacccaggagaacttccctgccaacctgaatgagctggtgaactgcatcgtcatcagcagcctggtgaccacccagaggaagctgaaggccatgagcctgctgggcagcaggaaccagctggcccgggctgtgctgaaccccaaccccatggacttctgcaccaaggacctgctgaccaccaccagcgagcgcatcatcgcctacctgcgggacttcaatgaagaccagaagaaggccatcgagacagcctatgccatggtgaagcacagccccagcgtggccaagatctgcctgatccacggccccccaggcaccgggaagagcaagaccatcgtgggcctgctgtaccgcctgctgacagagaaccagaggaagggccacagtgatgagaacagcaatgccaagatcaagcagaacagagtgctggtgtgtgcccccagcaatgctgctgtggatgagctgatgaagaagatcatcctggagttcaaggagaagtgcaaggacaagaagaaccccctgggcaactgtggggacatcaacctggtgcggctgggccctgagaagagcatcaacagcgaggtgctgaagttcagcctggacagccaggtgaaccacaggatgaagaaggagctgcccagccacgtgcaggccatgcacaagaggaaggagttcctggactaccagctggatgagctgagccggcagagggccctgtgccggggcggccgggagatccagaggcaggagctggatgagaacatcagcaaggtgtccaaggagcggcaggagctggccagcaagatcaaggaggtgcagggccggccccagaagacccagagcatcatcatcctggagagccacatcatctgctgcaccctgagcaccagcggcggcctgctgctggagagcgccttccggggccagggcggcgtgcccttcagctgtgtgattgtggatgaagctggccagagctgtgaaattgagaccctgacccccctcatccaccgctgcaacaagctgatcctggtgggggaccccaagcagctgccccccaccgtcatctccatgaaggcccaggagtatggctatgaccagagcatgatggcccgcttctgccgcctgctggaggagaatgtggagcacaacatgatcagccggctgcccatcctgcagctgactgtgcagtacaggatgcacccagacatctgcctcttccccagcaactacgtgtacaacagaaacctgaagaccaaccggcagacagaggccatccgctgcagcagtgactggcccttccagccctacctggtgtttgatgtgggagatggcagcgagcggcgggacaatgacagctacatcaacgtgcaggagatcaagctggtgatggagatcatcaagctgatcaaggacaagaggaaggatgtgtccttcaggaacatcggcatcatcacccactacaaggcccagaagaccatgatccagaaggacctggacaaggagtttgacaggaagggccctgctgaggtggacacagtggatgccttccagggccggcagaaggactgtgtgattgtgacctgtgtgcgggccaacagcatccagggcagcatcggcttcctggccagcctgcagaggctgaatgtgaccatcacccgggccaagtacagcctcttcatcctgggccacctgcggaccctgatgcagctgctgcccaggagcttctgtgtgcacgtgaaccacagccccttcttcagccctgagcccaagtacctgcactgggccctgaaggagaaccagcactggaaccagctgatccaggatgcccagaagagaggagccatcatcaagacctgtgacaagaactacagacatgatgctgtgaagatcctgaagctgaagcctgtgctgcagaggagcctgacccacccccccaccatcgcccctgagggcagccggccccagggcggcctgcccagcagcaagctggacagcggctttgccaagacctctgtggccgccagcctgtaccacacccccagcgacagcaaggagatcaccctgactgtgaccagcaaggaccctgagaggcctcctgtgcatgaccagctgcaggacccccggctgctgaagaggatgggcatcgaggtgaagggcggcatcttcctgtgggacccccagcccagcagcccccagcaccctggggccaccccacccactggagagcccggcttccctgtggtgcaccaggacctgagccacatccagcagcctgctgctgtggtggccgccctgagcagccacaagccccctgtgcggggggagcccccagctgccagccctgaggccagcacctgccagagcaaatgtgatgatcctgaggaggagctgtgccacagaagagaggcccgggccttcagcgagggggagcaggagaagtgtggcagcgagacccaccacaccaggaggaacagccgctgggacaagaggaccctggagcaggaggacagcagcagcaagaagaggaagctgctgtag

SEQ ID NO: 310163 - DNA, 2847 bp, Artificial Sequence
  derived and/or modified sequence
gtggcccaggagtggctgaacagccccaaccgggagaacttctaccagctgcaggtgaggaagtttcctgctgactacatcaagtactgggagtttgctgtgtacctggaggagtgtgagctggccaagcagctgtaccccaaggaaaatgacctggtgttcctggcccctgagcgcatcaatgaggagaagaaggacacagaaagaaatgacatccaggacctgcacgagtaccacagcggctacgtgcacaagttccggaggacctctgtgatgagaaatggcaagacagagtgctacctgagcatccagacccaggagaacttccctgccaacctgaatgagctggtgaactgcatcgtcatcagcagcctggtgaccacccagaggaagctgaaggccatgagcctgctgggcagcaggaaccagctggcccgggctgtgctgaaccccaaccccatggacttctgcaccaaggacctgctgaccaccaccagcgagcgcatcatcgcctacctgcgggacttcaatgaagaccagaagaaggccatcgagacagcctatgccatggtgaagcacagccccagcgtggccaagatctgcctgatccacggccccccaggcaccgggaagagcaagaccatcgtgggcctgctgtaccgcctgctgacagagaaccagaggaagggccacagtgatgagaacagcaatgccaagatcaagcagaacagagtgctggtgtgtgcccccagcaatgctgctgtggatgagctgatgaagaagatcatcctggagttcaaggagaagtgcaaggacaagaagaaccccctgggcaactgtggggacatcaacctggtgcggctgggccctgagaagagcatcaacagcgaggtgctgaagttcagcctggacagccaggtgaaccacaggatgaagaaggagctgcccagccacgtgcaggccatgcacaagaggaaggagttcctggactaccagctggatgagctgagccggcagagggccctgtgccggggcggccgggagatccagaggcaggagctggatgagaacatcagcaaggtgtccaaggagcggcaggagctggccagcaagatcaaggaggtgcagggccggccccagaagacccagagcatcatcatcctggagagccacatcatctgctgcaccctgagcaccagcggcggcctgctgctggagagcgccttccggggccagggcggcgtgcccttcagctgtgtgattgtggatgaagctggccagagctgtgaaattgagaccctgacccccctcatccaccgctgcaacaagctgatcctggtgggggaccccaagcagctgccccccaccgtcatctccatgaaggcccaggagtatggctatgaccagagcatgatggcccgcttctgccgcctgctggaggagaatgtggagcacaacatgatcagccggctgcccatcctgcagctgactgtgcagtacaggatgcacccagacatctgcctcttccccagcaactacgtgtacaacagaaacctgaagaccaaccggcagacagaggccatccgctgcagcagtgactggcccttccagccctacctggtgtttgatgtgggagatggcagcgagcggcgggacaatgacagctacatcaacgtgcaggagatcaagctggtgatggagatcatcaagctgatcaaggacaagaggaaggatgtgtccttcaggaacatcggcatcatcacccactacaaggcccagaagaccatgatccagaaggacctggacaaggagtttgacaggaagggccctgctgaggtggacacagtggatgccttccagggccggcagaaggactgtgtgattgtgacctgtgtgcgggccaacagcatccagggcagcatcggcttcctggccagcctgcagaggctgaatgtgaccatcacccgggccaagtacagcctcttcatcctgggccacctgcggaccctgatgcagctgctgcccaggagcttctgtgtgcacgtgaaccacagccccttcttcagccctgagcccaagtacctgcactgggccctgaaggagaaccagcactggaaccagctgatccaggatgcccagaagagaggagccatcatcaagacctgtgacaagaactacagacatgatgctgtgaagatcctgaagctgaagcctgtgctgcagaggagcctgacccacccccccaccatcgcccctgagggcagccggccccagggcggcctgcccagcagcaagctggacagcggctttgccaagacctctgtggccgccagcctgtaccacacccccagcgacagcaaggagatcaccctgactgtgaccagcaaggaccctgagaggcctcctgtgcatgaccagctgcaggacccccggctgctgaagaggatgggcatcgaggtgaagggcggcatcttcctgtgggacccccagcccagcagcccccagcaccctggggccaccccacccactggagagcccggcttccctgtggtgcaccaggacctgagccacatccagcagcctgctgctgtggtggccgccctgagcagccacaagccccctgtgcggggggagcccccagctgccagccctgaggccagcacctgccagagcaaatgtgatgatcctgaggaggagctgtgccacagaagagaggcccgggccttcagcgagggggagcaggagaagtgtggcagcgagacccaccacaccaggaggaacagccgctgggacaagaggaccctggagcaggaggacagcagcagcaagaagaggaagctgctgtag

SEQ ID NO: 310164 - DNA, 8121 bp, Artificial Sequence
  derived and/or modified sequence
atgagcacctgctgctggtgcacccccggcggcgccagcaccatcgattttctgaaaagatatgcttctaacaccccctccggtgaatttcagactgctgatgaagacctgtgttactgcctggagtgcgtcgccgaatatcacaaagcgcgggatgagcttccttttctgcatgaagtgttatgggagctcgagactctgcgactgattaatcacttcgagaaatcaatgaaagccgagataggcgatgacgacgaactgtatatagtcgacaataatggcgaaatgccactcttcgatatcaccgggcaggatttcgagaacaagctgagggtcccccttctggagatcctgaagtacccatatctcttgctgcatgagcgcgtgaacgagctttgcgttgaagccctgtgcagaatggaacaagccaattgcagttttcaggtgttcgataaacaccctgggatctacctgtttttagtccatccgaacgaaatggttcggaggtgggctattcttactgcgcggaatctgggtaaagtggatagggatgactattatgacctccaggaggtactgctttgtctcttcaaggtcatcgagctcggattgctggaaagtccagatatctatacgtctagcgtgctggagaaggggaaactaatactactgccctcccacatgtacgacacgaccaattacaaaagctactggctaggcatttgcatgctgctgactatcctggaagaacaggccatggactctctgctcctcgggtcagacaagcagaatgacttcatgcagtccattctccatactatggagagagaagctgatgatgattctgtagaccctttctggccagcgctgcactgctttatggtgatacttgaccgccttgggagtaaggtctggggccagctcatggacccaatagtagccttccaaaccattatcaacaatgcatcatacaaccgggaaattcgacacatccgaaattcctctgtccgtaccaagctggagccagagtcctacctggatgatatggtgacttgttcccagatcgtgtacaattataacccagagaagacaaagaaggattctggttggaggaccgcgatctgcccagactactgcccaaatatgtatgaggagatggagacactcgcttccgtactccagagtgacatcggccaagatatgagggtgcacaacagtacatttttatggtttatcccatttgtgcagtcgctgatggatctgaaagatttgggggtggcctacatcgctcaggtagttaatcacctgtactcggaagttaaggaggttctgaatcagacagacgcagtgtgcgataaagtgaccgaattttttctgctcatacttgtaagtgtcatcgagttgcaccggaacaagaagtgcttgcacctcctgtgggtgagcagtcagcagtgggtggaagcagtggtgaagtgtgcaaagctgccgaccaccgcctttacacgctcatccgaaaagtcatcagggaactgctctaagggaaccgccatgatcagctctctgtcgttgcactcaatgccctcaaactctgttcaattagcatacgtgcagctgattcgctccttgcttaaagagggataccagcttggacaacagtcactctgcaagcgcttctgggacaagcttaacctgttcttgagaggcaacctgagcctcggatggcaattaaccagccaagaaactcacgagctgcagtcctgtctaaagcagatcatccgcaacatcaaattcaaggccccaccctgtaataccttcgtggacctcacctcagcctgcaaaattagccccgcgagttataataaggaagagagcgagcagatgggcaaaacaagccgaaaagatatgcactgtcttgaggccagcagtcctactttttctaaagagccgatgaaggtccaagactcagtactgattaaggctgataacacaattgaaggggacaacaacgagcaaaattacatcaaagacgtaaaactggaggaccacctgctggctgggagttgcctgaagcaatcttctaaaaatatttttaccgagagagcagaggaccagattaaaatcagcacaagaaaacagaaatccgtcaaggaaatcagttcgtacactcccaaagattgtacatctaggaatggtcccgagcgcggctgtgaccggggcatcatcgtcagtacacgcctcttaactgactccagtaccgacgccttggagaaagtgagcacatcaaacgaggacttttccctaaaggacgatgcgctcgctaagacatctaagcgcaaaacaaaggtacagaaggatgaaatttgtgctaaactgtcacacgtgattaagaaacaacacagaaaatctaccctggtggataatacaataaacctggacgagaacctgacggtgagtaacatagaatccttctactcacgcaaagacactggagtacagaagggggatggattcattcacaacctttctctggacccttcaggggtgctcgatgataaaaatggagagcagaaatctcagaacaacgtgctccccaaggaaaagcagctgaagaatgaggagctggttattttttcttttcatgagaataattgcaagattcaggagtttcacgtggacggaaaagaactgatcccgtttaccgaaatgacaaacgcatccgagaaaaagtccagtccatttaaagacctcatgacagtccccgagagcagggatgaggagatgagcaattccacttcagtgatatattcaaatctaacgcgtgagcaggcccccgatatctcacccaagtccgataccttgactgactcccagatagatcgcgatctgcacaaactgagcctgcttgctcaagcatcagtgataacattcccttctgatagcccccagaacagtagtcagctccaacgcaaagtgaaggaagacaaaaggtgcttcacggcgaaccagaacaatgtgggcgatacatcccgagggcaggttatcattatatccgactccgacgatgatgacgatgagaggatcctgagcctagaaaagcttacaaaacaggataaaatctgcctcgagagagagcatcctgaacaacacgtgtccactgtcaactctaaagaggaaaaaaatccggtgaaggaagagaaaaccgagacacttttccagtttgaggagagcgattcccaatgtttcgagtttgaaagctcatcagaagtgttctctgtttggcaggatcaccccgacgacaacaattccgtgcaggacggcgagaagaaatgcctagctcctatcgcaaatacaaccaatggacagggttgcactgattacgtttctgaggtcgttaagaagggagccgagggcattgaagagcacacacggcccagatctatatccgtggaggagttctgtgaaattgaagttaagaaaccaaagcgcaagcgctccgaaaaacccatggccgaagacccggtgaggcccagcagctcggtgcgaaacgaaggacagagcgatactaacaaacgcgatctggtaggcaatgactttaaaagcatcgacagaaggacctcgacaccaaacagccgcatccaaagagccactaccgtttcccagaagaaaagctccaagctttgtacatgtacagagcctataaggaaggtcccagtgagtaaaacaccaaagaagacccattcagacgccaagaaaggccagaaccgcagttctaactacctgtcttgtcgaaccacacctgccatcgtgccacctaaaaagtttcgccagtgtcccgaacctacaagcactgctgagaaactggggctgaagaaaggccctcgaaaggcctatgagctgagccagaggagtctcgactatgtggcgcaactcagggaccacgggaagaccgtgggcgttgtggacacacgtaaaaagactaagctcatctctccccagaatctgtctgttcggaacaacaagaagttgctcacttcccaggagctgcagatgcagcggcaaatacgacccaaatcccagaaaaataggagaagactgtccgactgtgagtcgacagatgtcaaaagagctggttcacacactgcacagaacagtgacatctttgtcccagagagcgaccgaagcgattacaactgtaccggcgggaccgaggtgctagctaactctaacagaaagcagctgatcaaatgcatgccttcggagccagagactataaaggccaaacatggatcacctgcaaccgatgacgcttgcccactgaaccaatgcgattcagtagtactcaatggtacagtcccaaccaacgaggttatagtgagtacaagcgaggatcccctgggcggaggcgacccgacagcccgtcatatcgagatggcggccttaaaggagggcgagcccgacagttcatctgatgccgaagaggataatttgttcttgacccagaacgatcctgaagacatggacctgtgctcacagatggagaacgacaattacaaactgattgaactaatccatggcaaggatactgtggaagtggaggaggatagcgtaagtcgcccacagctggagtctttaagcggtactaaatgtaaatacaaggattgtctggaaactaccaaaaaccaaggagaatactgtccaaaacattccgaggtcaaagctgctgacgaggacgtctttaggaaacccggcctgccccctcccgccagtaagccacttagaccgaccaccaaaatcttttccagcaaatcaacttctaggattgctggcctttctaagtccctagaaacctcttccgccctgagcccatcccttaagaacaaaagtaaaggtattcagtcaatcttgaaggtgccacaacctgttcctctcattgcccagaagcctgttggagagatgaaaaattcctgcaatgtgctgcatcctcaaagccctaataactctaaccgacagggctgtaaggtgcctttcggggagagcaaatactttcccagcagctcacccgtcaacatcctcctgagttcacagtcagtgtccgatacgttcgtcaaagaggtcctcaagtggaaatacgaaatgttcctgaatttcggccagtgtggaccaccagccagcctctgtcagagtatctctcgcccagtgccagtacggtttcataattacggggattattttaacgtcttcttcccattgatggtgctgaacaccttcgagaccgtcgcacaggagtggttgaactcacccaaccgagagaacttttaccaactccaagtgcgtaagttcccagccgattacatcaagtattgggaattcgccgtctatctcgaagaatgcgagctggccaaacagttataccctaaggaaaacgatctggtctttctggcacccgagcgaataaacgaagaaaaaaaagacacagaacggaacgacatccaggatctgcatgaatatcacagcggctatgtgcataagttccggagaacttccgtgatgcgcaacggcaagactgagtgctatctctccatccaaacacaggagaattttcccgctaaccttaatgaactggtgaattgcatagtgatatcatccttggtcacaacacagcgaaagctgaaggcaatgagcctgctgggaagtaggaatcagttagcaagggcagtcttaaacccgaatcctatggatttctgcacaaaagacctgctgactacaacatctgagcgaattatcgcttacctccgcgattttaacgaggatcagaagaaggccatcgaaacggcttacgctatggtcaagcactcgccaagcgttgccaaaatttgtcttatccacggcccgcctgggaccggaaagtcgaagaccatcgttgggttgctgtacagactgcttaccgaaaatcagcggaaaggacattctgatgagaatagtaatgctaagatcaaacagaacagggtgcttgtgtgtgccccctctaacgctgccgtggacgaactgatgaagaagatcattctggagttcaaggaaaaatgcaaggacaagaaaaatcctctagggaactgcggagacattaatttagtgcgcttaggcccagaaaaaagtatcaactccgaggtgttaaaattttcactcgattcccaggttaatcaccgcatgaagaaggaattaccctcccacgtccaggcaatgcataaacgcaaggagtttctggattaccagctcgacgagctctcaagacaacgggctctgtgtagaggcggaagagaaatccagcgtcaggaacttgacgagaatatctccaaggtgagcaaagaacggcaggagctggctagcaagatcaaggaggtgcaggggcgaccccagaaaactcagagcattatcatactggagtcacacatcatctgctgcactctgagcaccagcgggggactactactggaaagcgctttccgcggccaggggggggtgccattctcctgtgtgatagtcgatgaggctggacagagttgcgagatagagacactgaccccactcatccaccgctgcaataagctaatactggtgggtgatcctaagcagctccctccaactgtgatcagcatgaaagcccaggaatatggttatgaccagagcatgatggctcgattttgcagattgctagaggagaatgtggaacataacatgatctcccggcttccgatactacagctgacagtgcagtaccggatgcatcctgatatttgcctgttcccgtccaactatgtgtataaccggaaccttaagaccaaccggcagactgaagctatcagatgctcatctgactggccctttcagccgtacttggtgttcgacgtgggcgacgggtcagaaagacgagataatgattcctacatcaacgtacaggagatcaagttggtcatggaaataataaaactgattaaggacaagaggaaggacgtatcattccgcaacatcgggatcatcactcactataaggctcagaaaaccatgatccagaaggatttggacaaggagttcgacaggaaagggcccgcggaagtcgacaccgttgacgctttccaaggtcggcagaaggattgtgtcattgtgacttgcgtgcgtgcaaacagtattcaggggtcgatcgggttcttggcgagcctacagaggctgaacgtcacaatcactagggcaaaatatagtctgttcatcttgggccacctcaggaccctgatgcagctgctgcctcgcagtttctgcgtgcacgtgaaccactccccttttttttcccctgaaccgaagtacctgcattgggcactcaaggaaaatcaacattggaaccagttaattcaggacgctcaaaaacggggcgccattatcaagacctgcgataagaattatagacatgatgccgtgaaaattttgaagctcaaacccgtcttgcagagaagtctgacgcaccccccaactattgccccagaaggatctcgccctcagggggggctcccatcaagtaagctagattcaggattcgctaaaacctccgtggccgctagtctgtatcataccccgagtgactccaaagagataactctcacggtgacgtctaaggatcccgaacgcccgccagtccacgatcagctccaagatcccaggttgctcaaacgcatgggcatagaagtcaaaggtgggatcttcctctgggatcctcagccttctagcccccaacatcctggggctacacccccaacaggcgaacccggtttccctgttgtgcaccaggacctgagccacatccagcagccagctgcagtagtggctgctctgtcttctcacaagccaccagtgcgtggggagcccccggcagccagtcccgaggcaagtacctgccagagcaagtgcgacgatcccgaagaggagctctgtcaccgccgtgaagccagagccttcagtgaaggggagcaggagaagtgtggatctgaaacccaccatacacggcgcaacagtagatgggataaacggaccttagagcaagaggactcatcttccaagaaaaggaagttgctgtag

SEQ ID NO: 310165 - DNA, 2847 bp, Artificial Sequence
  derived and/or modified sequence
gtggcccaggagtggctgaacagccccaaccgggagaacttctaccagctgcaggtacggaaattccctgcggattatattaagtactgggagtttgcagtgtatctggaagaatgtgagcttgccaagcaactgtatcccaaggaaaatgatcttgtgttcctggcccccgagagaattaatgaggaaaagaaagacaccgaaagaaacgacatccaggacctccacgaatatcattctggttacgtgcataagtttaggcggacaagtgtcatgagaaacggcaagactgagtgctatctgagtattcagacacaggaaaacttccccgcaaaccttaatgagctggtgaattgcatcgtcattagtagcctggtaacgacccagagaaaattgaaggctatgtcccttctgggctcccgaaaccaattggcgagagcagttctgaaccctaaccccatggatttctgcactaaagacctactcactaccacttctgaaaggataatcgcctacttgagggacttcaatgaagaccaaaagaaagccattgagacagcatacgctatggtgaagcactcaccctccgttgcaaagatctgccttatacacggacccccgggaacaggcaaatccaagaccattgtggggcttctttacaggctgcttacagagaatcagcggaagggacattctgacgagaacagcaacgcaaagattaaacaaaacagggttctcgtctgcgccccgtccaatgcagccgtcgacgaattgatgaagaaaattatcctggagtttaaggaaaagtgcaaagacaaaaaaaacccgctgggcaactgtggcgacatcaatctagttaggctcggtcccgagaagagcattaatagcgaagtcttaaagttttctctggattcgcaggtgaatcataggatgaaaaaggaactcccctctcacgtgcaggcaatgcacaagagaaaagaatttctggattatcagctggatgagttgagtaggcagcgcgcactctgtcgaggtggccgcgagattcagcgccaggaactggatgaaaatatcagtaaggtatccaaggaacgacaggagctggcaagcaagataaaggaggtgcagggcaggccccagaagacgcaaagcattatcattctggagagccacatcatttgttgcaccttgtcgacgagcggtggactgttactggaatccgccttcagggggcagggaggcgtgccattttcatgtgtgattgtagatgaagccggccagtcatgtgagattgaaacgttgacccccttaatccacaggtgtaataaactcatcttagtcggcgatccgaagcagttgcctccaactgtgatttcaatgaaagcacaggaatacggatatgatcagagcatgatggccaggttctgccgcctgctcgaggaaaatgtcgagcacaacatgatttccaggctgccaatcctgcagctgacggtgcagtacaggatgcacccagacatctgcttgttccccagcaactacgtgtataaccggaatctaaagacgaaccgacagactgaggctattagatgctcgtccgactggcctttccagccctatctggtgtttgacgtgggtgatggcagcgaaaggcgagacaacgacagctatattaatgtacaggaaataaagttggtgatggagatcataaaactcattaaggacaaaaggaaagatgtctcctttcgcaacatcggcatcatcacgcactacaaggcgcagaagacgatgatccaaaaggacttagacaaggaattcgaccgaaaaggtccagctgaggttgataccgtcgacgctttccaggggcggcaaaaagattgcgtgatagtcacgtgtgtgagggcaaatagcatacagggctctatcggatttctcgcctcgctgcagcgcttgaacgtcaccatcaccagagctaagtattccctttttattcttgggcatctgcgcacgctgatgcagcttctcccaagatcattctgcgtgcatgtcaatcacagtccctttttctcgcctgaacccaagtatctgcactgggctttgaaggaaaatcagcattggaaccagctcatccaagacgctcagaagcggggagccatcatcaaaacctgtgacaaaaactatcggcacgacgccgtgaagattctcaagttaaaacctgtgttgcagcggagcctgacgcacccccctacgatcgcccccgagggaagcaggccacaggggggtctgcccagtagcaagctggatagtggttttgccaagacatctgtcgcggcgagtctgtaccatactccttccgactccaaagaaatcactcttaccgtgacatccaaggatcccgagcgccctccagtgcacgaccagcttcaggatcctagattactgaagcggatgggaatcgaggtcaagggcggaatctttttgtgggacccgcaacccagtagcccccaacatcccggagcgacacccccaaccggcgagccaggctttccggtggtccatcaggatctaagccatatccagcagcccgcggcagttgtggctgcactttcctctcataaaccaccagttaggggtgagcctcctgccgctagcccagaggcgtctacctgtcaaagtaaatgcgacgacccggaggaggagttgtgccatagaagagaagcccgggccttctccgaaggagagcaagaaaaatgtggctctgagacgcatcataccaggcgcaattccagatgggacaagaggactctggaacaggaggacagcagcagtaagaagaggaagctcctctag

SEQ ID NO: 310166 - DNA, 8120 bp, Artificial Sequence
  derived and/or modified sequence
atgagtacctgctgctggtgtacacccggaggagctagcacaattgatttcctaaaacggtacgcgtcaaacactccttcaggtgagttccagaccgccgatgaagatttatgttactgtctggaatgcgtggccgaatatcacaaggcaagggacgaactgcccttcctacatgaagtactctgggagttagagactctgcgcctcattaatcactttgagaagtccatgaaagcagaaatcggtgacgacgacgagctatatattgtggacaacaacggggaaatgccactgtttgacattacaggtcaagacttcgagaataagctgagagtccccctgcttgaaatcctgaagtatccttaccttctcttacacgagagagttaatgaattgtgcgtagaggctctatgtcgaatggagcaagcgaactgctcttttcaggttttcgacaagcatcctgggatatacctgtttcttgtccacccaaacgagatggtgaggcggtgggccatcctcacagccaggaatctgggcaaggtggaccgcgatgattactatgatctgcaggaggtgctactatgcctctttaaggtgatagagctggggctgctggagagtccggacatttacacatccagtgtgcttgagaagggcaaattaatacttctgccatcccatatgtacgatactacaaactacaaatcctattggctcgggatttgtatgcttctgacaattctggaggagcaggctatggacagtttgctgctggggtccgacaaacagaacgactttatgcagagcattctgcatacgatggaacgggaggccgatgacgactcagtagacccgttctggcccgctctgcactgttttatggttatcctggaccgactaggctcaaaagtgtggggccagctgatggacccaattgtggccttccagacgatcatcaataatgcctcctataaccgggagatcagacatatccggaatagctcagtgagaacaaaactcgagcccgaatcatacttagacgatatggtgacctgctcacaaatcgtgtacaactacaacccagagaaaaccaaaaaagactctggctggaggacagccatctgtcccgattattgtcccaacatgtacgaggaaatggagacacttgctagtgtgttacagagcgacattggacaggacatgcgcgtccacaatagcacattcctgtggtttattccgttcgtccagtcccttatggacctcaaggacctgggagtggcttacattgcccaggtggtgaaccacctctacagtgaggtgaaggaggtgctgaatcagactgacgccgtttgcgacaaagtgacagaatttttcctcctgattctggtcagcgttatagagctccacaggaataagaagtgcctccacctgctttgggtctcctctcaacagtgggtggaggccgtcgtcaagtgcgccaagctccccacgactgcgttcacgagatcctcggaaaaaagctcagggaactgcagtaagggcaccgccatgatttcatcactctctctgcattctatgcctagtaactccgtgcagttggcatacgtgcagctgatcagaagtctcctgaaggagggttaccagcttggtcaacaatcactctgcaagagattctgggataagttaaacctcttcctacgcggtaacctgtcactgggctggcagcttacctcgcaggaaacacatgagttgcagtcctgcctgaaacaaataattcggaacattaagttcaaagccccaccctgcaatacctttgtggatctgacatccgcatgcaaaatcagtccggcaagttacaataaggaggagagcgaacaaatgggaaagacttccagaaaagacatgcactgcttggaggccagctcgccaacctttagtaaggagccaatgaaggtccaggattcagtgctgattaaagccgataacacaatcgaaggcgacaacaacgagcagaattacattaaggatgttaagttggaagaccaccttctggcaggcagttgcctgaagcagtcttctaaaaacatttttacggagcgcgctgaggaccaaattaagatctccactcgtaaacagaagtcagtgaaggaaattagtagctatacccctaaggactgtacctcccggaatggtccggagcgaggttgcgacaggggaataatagttagcacacgtctccttacggattcgtctacagacgctctggagaaagtatcgacttctaatgaagatttttccttaaaagacgacgcactggcaaaaacctctaaacgtaagaccaaagtgcagaaagacgagatctgcgccaaactttcccacgtcatcaagaaacagcatcgcaaaagtactcttgtcgacaacactataaatctggacgaaaacctaacagtgagcaacattgagtcattctacagccggaaggacacaggcgttcagaagggcgatgggttcattcacaatctgagtctggacccatccggtgtgcttgacgataagaatggtgagcaaaaatcccagaataatgtcctccctaaggagaagcagttaaaaaacgaggaacttgtaatcttctctttccacgagaacaattgtaaaattcaggagttccacgtggacggcaaggaactgataccctttacagagatgaccaatgcttctgagaaaaaatccagccctttcaaagacctcatgaccgttcctgagtctcgggatgaggaaatgagtaactctacctcagtgatttattctaacctgactcgggagcaggcgcctgacattagtcccaaatccgatacactaaccgacagccagattgatcgcgacttgcataagttgtccctactggcccaggcttcggtcataacttttccctccgatagtccccaaaactcaagtcagctccagcggaaggtcaaagaggataaaagatgtttcacggcaaaccagaacaacgttggtgacacctctcgcggacaggtgatcattattagtgatagtgatgatgatgatgacgaaaggatactctcacttgagaaactgacaaagcaggacaaaatctgcttagaacgagaacaccccgaacaacacgtgtcaaccgtcaacagcaaagaagagaaaaacccggtcaaggaggaaaagaccgaaaccttatttcagttcgaggaaagtgattcccagtgcttcgagttcgaaagctcttcagaggtattctcggtgtggcaggaccacccggatgataataacagtgtccaggacggtgagaagaagtgtttggctccgatcgcaaataccacaaacggtcagggatgtacagactacgtgtcggaagtcgtaaaaaagggggctgagggtattgaagagcatacacgtccgagatccatctcagtcgaggaattctgcgagattgaggtgaagaagccgaaaaggaagcggtcagagaagcccatggccgaggatcccgttaggccaagtagcagcgttagaaatgaggggcagagtgacacaaataagagggacttagttggaaacgatttcaagagcattgacaggcgaacatcaactccgaatagcagaatacagcgggctacaacagtgtcccagaaaaagtccagtaagctgtgtacatgtaccgagccaatcaggaaggtcccggtgagtaagacaccaaagaaaacccactcagacgctaagaagggccagaatcgcagcagcaattatttgagctgtcgtaccaccccggctatcgttcctcctaagaaattcaggcagtgtccagagcccaccagcactgctgagaaactgggcctgaagaaaggaccaagaaaggcctacgaactgtcccaacgcagcctggactacgtggctcagctgagggatcacgggaagaccgtcggggtagtcgacactcggaaaaaaacaaagctgatctcaccccagaacctgtcagtaaggaacaacaaaaaacttcttactagccaggagttgcaaatgcaaagacagattaggcccaaatcccagaagaatcgcaggagactgagtgactgcgaaagcaccgacgtaaaaagagccggatcacacacagcccagaactccgacatctttgttcccgagtccgatcgctctgactataattgtacagggggaaccgaggtgctcgccaacagtaaccgtaaacagctcattaagtgcatgccatcggagccggaaacaatcaaagcaaaacatggctcccctgccactgacgacgcatgtccattgaatcaatgcgactcagtggttcttaacgggacagtgccaaccaatgaagtaattgtttcaacctccgaggacccactgggcggaggtgaccccaccgcgagacacattgagatggccgctctgaaagagggcgaacctgacagtagcagcgacgctgaagaggacaacctgttcctgacgcaaaatgaccccgaggacatggatctttgtagtcagatggagaacgataactacaagctgatcgagctgatccacggtaaagacactgtggaggtggaggaggattcagtgtcccgtccgcagctggagagtctgagtggtactaaatgtaagtataaagactgcttagaaaccactaaaaatcagggggaatactgtccaaagcacagtgaagtgaaggcagcagacgaagatgtctttaggaagcccggactgccccctcctgctagcaagccattgagacccactaccaaaatattttcatccaagagcacgagcagaattgcagggctgagcaaaagccttgaaacgtcaagcgctctgtccccctcactcaagaataagagtaaaggtattcagtcaatcctgaaggtgccacagccagtgccacttattgctcagaagcccgtgggcgaaatgaaaaattcgtgtaacgtcctgcatccacagtccccaaataacagcaacaggcaaggctgtaaggtcccatttggcgaatcaaaatacttcccaagttcctcccctgtgaacattttgctgtccagtcagtccgtcagtgacacattcgtgaaagaagtgctcaaatggaaatacgagatgtttttaaactttggccagtgcggacctcccgcaagcttatgccagtctatttcccggcctgttcccgtgcgattccataactatggtgattacttcaacgtgtttttcccgttgatggtgctgaataccttcgaaaccgttgcccaagagtggctcaatagccccaaccgagaaaacttctaccaactccaggtgaggaaatttcccgcagactatatcaaatattgggagttcgcagtgtacctggaagaatgtgagctagccaagcaactgtatcccaaagagaatgacctggtgttcttggctcctgagcggattaatgaagaaaagaaagacaccgagcgaaacgatatccaggacttacacgagtaccattccggttatgtgcataagttccggaggacaagtgtcatgcggaacggaaagaccgaatgttacctaagtatccagactcaagaaaacttcccagccaatctcaatgagctagtcaactgcatcgtgatctcatctttggttacaacacagcgcaaactcaaagctatgtctcttctcggttcccggaatcagctggcgagagcagtactgaatccaaatccaatggacttctgtaccaaggaccttttaacgacaactagcgaacgcattatcgcgtacttgagagacttcaatgaagaccagaagaaggctattgagacagcgtacgccatggtaaagcatagcccctctgtcgcaaaaatctgcctcatccacgggccacccggtacgggaaaaagtaagactatcgtgggcctactgtatcgtttgttgacagaaaaccaacggaaaggccattctgacgagaactcaaatgctaagatcaagcagaatcgcgtcctagtgtgtgcaccctcgaatgccgcagtcgacgaattgatgaagaagatcatcctggaatttaaagaaaagtgtaaagataagaaaaatcccttggggaactgcggtgatataaatctagtgaggctagggccagagaagagtatcaactctgaggtcttgaagttcagtctcgactctcaggttaaccaccggatgaagaaggaacttccgtcccacgtgcaggcgatgcacaagaggaaggagtttttggattatcagctggatgaacttagtcggcagagagccctgtgtagagggggtagggagatccaacgccaggaactcgacgaaaacatcagcaaagtctcaaaagagaggcaggagctggcgagcaagattaaagaggtccaagggagaccccagaagacccagtcaattatcattctggagtcccatattatatgctgtacactctcaacatctggcggtctcctgctggagtccgcctttcgtggccaggggggagttccatttagctgcgtaattgttgatgaggctggtcagtcctgtgagatagagacccttacccctctaatccacaggtgcaataagcttatcctggtgggtgaccccaaacagttgccaccaaccgtgatctccatgaaagcacaggagtatggctacgatcaaagtatgatggcgaggttttgcaggctgctcgaggaaaacgtggagcataacatgattagccgcctgcccatcctgcagctgactgtacagtataggatgcatcccgacatttgcctttttccttccaattatgtgtacaatcgaaatcttaagacaaatagacagacggaggctattcggtgttccagtgactggcctttccagccctatttggtcttcgatgttggggatggcagcgagaggcgtgataacgacagctatattaacgttcaggagattaaactagtgatggaaattatcaaactaattaaggacaagcgcaaagacgttagcttccggaatatcggcatcattactcattacaaggcccagaagaccatgatccagaaagatctggataaagaattcgaccgcaagggcccagccgaagtggacacagtcgatgcctttcaaggtaggcaaaaggactgcgtgattgtcacttgcgtaagagccaattctatacagggcagcatcggcttcctggcttccctgcaaagactgaatgtgactattacacgggctaaatattccttgtttattctaggacacctcaggacacttatgcagctcctcccacgcagcttctgcgtgcatgtgaaccactctccctttttttcccccgagcctaagtacttgcactgggcattgaaggaaaaccagcactggaaccagctgatacaggatgcccagaagaggggagcaataatcaagacttgtgacaaaaactatcgacacgatgcggttaaaatcctcaaacttaaacccgttctgcaaaggagcctgactcacccccctacgatcgccccagaaggcagtagaccccagggaggtctcccctcgtctaagttggacagcggattcgcaaagacttccgtcgcggcatccctctaccataccccgtctgactccaaggaaattactttaaccgtaacaagtaaggacccagagcgaccgccagtccatgatcagcttcaggatccaaggctcttgaaaaggatgggaatcgaggtgaaagggggaatctttctctgggacccacagccttcttccccccagcacccgggtgccacccctcctacaggtgaacctgggttccctgtcgtgcaccaagacctgtcccacatccagcagccagccgctgtggtggccgcactctcatctcacaaacctcctgtacgaggcgaaccgccagccgcaagtcctgaggccagcacatgtcagtctaaatgtgacgaccccgaagaggagctgtgccatagaagagaagccagagctttcagcgagggtgagcaagaaaaatgtgggtcggagacacaccacacccggaggaactctagatgggacaaaaggaccctggaacaagaggactctagctctaagaaaaggaagctgttata

SEQ ID NO: 310167 - DNA, 2847 bp, Artificial Sequence
  derived and/or modified sequence
gtagcacaggaatggctgaattcccctaatagagaaaacttttatcagttgcaggttagaaagttcccggcagattacatcaagtactgggaattcgcagtttacttggaagaatgtgagctcgcgaaacagctttatcccaaggaaaatgacctcgtcttcttagctcccgaacgcattaacgaggagaaaaaggataccgaacgcaatgacatacaggatctacacgaatatcacagcggatacgtccataagttcaggaggacgtcagtaatgagaaatggtaaaaccgagtgctatttatccattcagacccaggaaaattttcctgccaatcttaatgaacttgtcaactgtatcgtgatctctagcctcgtaactacccagcggaagcttaaggctatgtcactgctgggatctaggaatcaactcgcgagagccgtcctaaaccctaaccctatggatttttgcacaaaggatctgttgaccaccacatcagaacgcattattgcctatctgagagattttaatgaggatcagaagaaggccattgagaccgcctatgcaatggttaaacactcgccaagcgtcgccaagatttgcttgattcacggcccacctggcactgggaagagtaagacaatcgtcggcctactttacagactgctcactgagaatcaacgaaaaggccattcagatgaaaatagcaatgctaaaatcaagcaaaatagagttctggtctgcgctcctagcaatgcagcagtggatgaacttatgaaaaaaatcatattggagttcaaggaaaagtgtaaagataagaaaaatcccttggggaactgcggggatatcaatctcgttcggctgggtcccgaaaaatccattaacagcgaagtactcaaattctctctcgacagccaagtcaatcacaggatgaagaaagagctgcccagccatgtccaggccatgcataaaagaaaagagtttctggactaccagctggacgagctaagcagacaaagggcgttatgccggggagggagagaaatacagaggcaggaactggacgagaacatctcaaaggtctctaaggaacgccaggagctggcctctaaaattaaggaggttcaggggaggcctcaaaaaacacagtccataataatcctggaatcacacattatctgctgcaccctgtccaccagcggcggactcctacttgagtcagccttccggggacaggggggagttcccttctcctgcgtaattgtggacgaggctgggcagtcttgtgagatcgagaccctgacgcccctcatccacaggtgcaacaagctcattctcgttggggaccccaagcaattacccccaacagtgatctccatgaaggctcaagagtacgggtatgaccagagcatgatggcgagattttgtcgcctcctggaggagaatgtggagcataacatgatctctcgccttcccatattgcagcttactgtacaatatcgaatgcacccagacatatgtctgtttccttctaattatgtctacaaccgtaacttgaaaaccaatcgacagaccgaggccatccgctgttctagcgactggccttttcagccttatctggtgttcgacgtgggtgatgggtcagaacgacgtgacaacgactcttacatcaatgtccaggaaatcaagctcgtaatggagatcatcaaactcattaaggataagcgaaaagatgtgagtttcaggaatatcgggatcatcacgcattacaaagcgcagaaaactatgattcagaaagatctggataaagagttcgacaggaaaggaccagcagaggtggacacagtcgacgcctttcagggcaggcagaaagactgcgtcatcgtgacatgtgtgagagcgaacagcatacaaggcagtataggttttttggctagtttgcagaggttgaacgttaccatcacacgcgctaaatacagcctgttcattctgggtcatttgcggacactgatgcagctgctcccgcgaagtttttgtgtgcatgttaaccatagccctttcttctcaccagagccgaagtacctccactgggcactgaaagagaaccaacactggaaccagctgatccaggacgcccagaaaaggggggctatcataaagacatgcgataaaaactacaggcacgatgcagtaaagattttgaaattgaaaccagtcctgcagagatccctcacacacccccctactatcgctcctgaaggcagcaggccgcagggcggtctcccctcctcgaagctggattcaggttttgccaagacaagcgttgccgcatctctttatcatactccgtcagactccaaggagatcacgctaacagtgaccagcaaagatccggagcggcctccagtccacgatcagctccaggacccacgtctgctgaagcgcatgggcatagaggtcaagggtgggattttcctgtgggatccccaacctagctcacctcagcaccccggtgcaactcctcccacgggcgagccaggattcccagtggtgcaccaggacctgagtcacatccagcagccggctgccgttgtcgccgctctgtcttcccataagcctccagttcggggtgaaccaccagccgctagcccggaggcctcaacatgtcagagcaaatgtgacgatcctgaagaagagctctgccataggcgtgaggcgcgtgcatttagcgaaggcgaacaggagaagtgtggctctgagacacatcatacaaggagaaactctcgatgggataagaggacactggaacaggaggattcatcatccaagaaacgaaagctgctgtag

SEQ ID NO: 310168 - DNA, 11103 bp, Artificial Sequence
  derived and/or modified sequence
cttccgctggtggcctagagcggggcccggtatggaggtgggctagaggccgacgccagccagagagcgaaatgttcttttggggccagagtctgggcatatatgaatgcaaatccgtgtttgttcacaactaagcccagctgagacgatcacttttctgtaggccatttgtccaggtacagaatgagcacatgttgttggtgtacgccaggtggtgcttccaccattgacttcctaaagcgctatgcttccaacactccgtccggtgaatttcaaacagccgacgaagacctctgctactgcttggagtgtgtggctgagtaccacaaagcaagagatgaattgccattcttgcatgaggttttatgggaattagaaaccttacgtctcataaatcactttgaaaaatccatgaaggcagaaattggagatgatgatgagttatatatagtagacaataatggagagatgccactgtttgacatcactgggcaagactttgaaaataagcttcgagttcctcttcttgaaatactgaaatatccttacttgcttctacatgaacgtgttaacgagttatgtgttgaagcactttgtcggatggaacaagccaattgctcctttcaggtgtttgataaacatccagggatctatttgtttttagtccatcccaatgaaatggttcggcgttgggctatcttgactgcaagaaacttggggaaagtggacagagatgattattatgacttacaagaagttttactttgcctttttaaagtcattgagttggggcttttagagagtccagacatttatacttcttctgtcctagagaagggtaaactgattcttctgccctcacacatgtatgatactaccaactacaaaagctattggttaggtatttgcatgttgctgaccattcttgaggaacaagccatggattccctgttgttgggctcagacaaacaaaatgattttatgcaatcgatacttcacactatggagagggaagcagatgatgatagtgtggatcctttctggccagcgttacactgttttatggtgattctggatcgccttggatctaaggtctggggtcaacttatggatcctattgtggcatttcaaaccattatcaacaacgcaagctacaatagagagatccgacatatacggaacagctctgtaaggaccaagttagaaccggagtcctatttggatgatatggtgacttgcagccagatcgtatacaattataatcctgaaaagaccaaaaaggattctggatggagaacagccatttgcccagattattgtcctaacatgtatgaagaaatggaaacattagccagtgtacttcagtcagatattggtcaagacatgcgtgttcataacagcacatttctatggttcatcccttttgtccagtccctcatggatcttaaggatttgggtgtggcttacatagcacaggttgttaatcatctgtactctgaagtcaaagaagtcctcaaccaaacagatgctgtgtgtgacaaagtcactgaattttttcttctaattttggtatcagtgattgaactgcatagaaataaaaaatgtttgcatttgctgtgggtaagttcccagcaatgggtggaagccgtcgtcaaatgtgccaagcttcctaccactgcgtttacacggagttctgagaaatcatctggaaattgctccaaaggaacagcaatgatatcttcactgtcattgcattccatgccatctaactctgtacaacttgcttatgtgcagctgattagaagtctccttaaagaaggttatcagcttgggcagcagtctctttgcaagcgattctgggataagctcaacttattccttagaggaaatttatctctaggttggcagttgactagtcaggaaacccatgagctacaaagttgcttaaagcaaattattagaaacataaaattcaaagcacctccatgtaacacttttgtggatctgacttctgcatgtaaaatctctcctgcatcttataataaagaagaaagtgaacaaatggggaagacgtctagaaaagatatgcattgtttggaagcttccagcccaacattttctaaagaaccaatgaaagtgcaagacagtgtattgatcaaagcagataacactatagaaggtgacaataatgagcaaaattatataaaggatgtgaaactagaggaccatctcttagctgggtcatgcttaaagcagagtagtaaaaacatttttactgaaagagctgaagatcaaattaaaataagtacaaggaagcagaagtctgtaaaagagatctcttcatatacaccaaaggactgtacttcaagaaatggtccagaaaggggatgtgacagaggaataatagtatcaacacgtttgttgactgattctagcactgatgctttggaaaaagtgtccacatcgaatgaagatttctctttaaaggatgatgctcttgctaaaacctcaaaacgaaaaactaaggtacagaaagatgaaatctgtgcaaagttatcacatgtaataaagaagcaacacaggaagagtactttggtcgataatactatcaatttagatgaaaatttgactgtatctaacattgagagtttctattcaaggaaagatacaggagttcagaaaggagatggtttcatacacaatctttctttagaccctagtggtgttctggatgataagaatggagaacaaaaatctcaaaacaatgtattgccaaaagagaaacaattaaagaatgaagaattagttattttctctttccatgaaaacaattgtaaaatacaggaatttcatgttgatggtaaagaattgatcccttttacagaaatgaccaatgcttcagagaagaaatcatctccctttaaagatcttatgactgtacctgaatcaagagatgaggagatgagtaatagtaccagtgtgatttattctaacttgacaagagaacaggcccctgacatcagtcctaaatctgacaccttaacggattctcagatagacagagaccttcacaaattatctttactagctcaagccagtgttattacgttcccatccgattcacctcagaactcatcgcagctgcaaaggaaagtaaaagaagataaaagatgtttcacagctaaccaaaataatgttggagatacctcccgtggacaggttattattatttcagattctgatgatgatgatgatgaaagaatcctgagtcttgagaaactcactaaacaggacaaaatatgccttgagagggaacatccagagcagcacgtttcaacagttaatagtaaggaggaaaagaatccagtaaaggaagaaaagacagagactctttttcagtttgaggaatctgattctcagtgttttgagtttgaaagttcatctgaagtgttttcagtttggcaagatcatccagacgataataattcagttcaagatggtgagaaaaaatgtttggctcctatagccaatactacaaatggtcagggttgtacagattatgtatctgaagttgttaaaaaaggagcagagggcattgaagaacacacaagaccacggagtatttctgttgaagaattttgtgaaattgaagtaaaaaagcctaagagaaaacgatctgaaaaaccaatggctgaagatcctgtgaggccttcatcttctgtcagaaatgagggccagtctgatactaataagagagatcttgtgggaaatgattttaaaagtattgatagaaggacttcaactcccaattcacgtattcagagagccactacggtttcacaaaagaagtcttcaaagctttgtacttgtacagaacccatcaggaaagttccagtttctaagacccctaagaaaactcattcagatgccaaaaaaggacagaatagaagttcaaattacctaagttgtagaacaactcctgctatagtgccgccaaagaaatttcgtcagtgtcctgagccaacttcaacagctgagaaacttggcctgaaaaagggtcctcgtaaggcatatgagttgtcccagcggtctttggattatgtagctcaattacgtgatcatggcaaaactgttggagtagttgatacccgaaaaaagactaaattaatttctcctcagaacctgtctgtcagaaataataagaaacttctgactagtcaagaacttcagatgcaaaggcagatcagacccaaatcacaaaaaaatagacgaagactttctgattgtgaaagtacagatgttaaaagagcagggtcacatacagcacagaattctgacatatttgtaccagaatctgataggtcagattataattgtacaggaggaactgaggtacttgccaacagtaacagaaaacagttaataaaatgcatgccttctgaaccagaaaccataaaagcaaaacatgggtctccagcaactgatgatgcttgccctttgaaccagtgtgattctgtagtgttaaatggaacagtaccaacaaatgaagtaattgtctccacttcagaagaccctctgggtggaggtgatccaacagcacgtcatatagagatggcagctttgaaagaaggagagcctgactccagcagtgatgcagaggaagataacttatttttaacccaaaatgatcctgaagatatggatttatgttcacaaatggagaatgacaattataaactcattgaactaattcatggaaaagatacagttgaggttgaagaagattctgtaagtcggcctcagttggaatctttgagtggcacaaagtgtaagtacaaagattgtcttgaaaccacaaaaaaccagggtgaatactgcccaaaacactctgaagtgaaagcagcagatgaagatgtatttcgtaaacctggcttgcctcctcctgcatctaaacctttgagacctaccactaagatttttagctcaaagagtacttcacgaattgctggtctttctaaatctttggaaacttcttcagcactttcaccgtctctaaaaaataagtcaaaggggatacagtcgattttgaaagtaccacagccagttcccctcatagctcagaagccagttggtgaaatgaagaattcgtgcaatgttcttcatcctcagtctccgaataattccaacaggcaaggttgcaaagttccatttggtgaaagcaaatattttccatcttcctctccagtaaacattcttttgtcatcacagtctgtctctgacaccttcgttaaagaggtcttaaaatggaaatatgaaatgtttttgaactttggtcagtgtgggccccctgcaagtctttgtcagtccatctcaagacctgtgcctgtcagatttcacaattatggagattattttaatgtttttttccctttgatggtattgaatacttttgaaacagtggcacaagaatggctcaactctccaaatagagagaatttctatcagttgcaagtacgaaaatttcctgccgattatataaaatactgggagtttgcagtttatctggaagaatgtgaactggctaaacagctttatccaaaggaaaacgatttggtgtttttagctcctgagagaataaatgaagagaagaaagatacagagagaaatgacatacaagatctccacgaatatcattctggttatgttcataaatttcgccgcacgtcagtcatgcgtaatgggaaaactgagtgttacctttccatccagactcaagagaactttccggccaatttaaacgaacttgtgaattgtattgtaatcagttctctggtaactacacaaaggaagttgaaagccatgtctctgttgggtagtcggaaccaactggctagagctgttctgaatccaaaccctatggacttctgtacaaaagatttactgactacaacatctgagagaattattgcgtacttaagagatttcaatgaagatcaaaagaaagcaatagaaactgcatatgctatggtgaaacactcaccatcagttgccaaaatctgcttgattcatggaccacctggaacaggaaaatcaaaaactattgttggcctcctctatcgtctactgacagagaaccagaggaaggggcattcagacgaaaactccaatgccaaaatcaaacaaaaccgtgtcctcgtgtgtgcaccttccaatgcagctgttgatgaactcatgaaaaaaattatccttgaattcaaagaaaaatgtaaagacaagaagaatcctttaggaaactgtggagatataaatttagtacgactgggtccagaaaagtctattaatagtgaggttctaaagttcagtttggacagccaagtaaaccacagaatgaaaaaagagttaccttctcatgttcaggcgatgcataaaagaaaggaatttctagattatcagctggatgagctttcccggcagcgagctctatgccgaggtggacgggaaatacagaggcaagaattagatgaaaacatttccaaagtttctaaggaaaggcaggaacttgcttctaaaattaaagaggttcaaggacgcccacagaaaacacagagtatcatcatcttagagtcccatatcatctgctgcacgttgagcacaagtggtggtttactacttgagtctgctttccgtgggcaagggggtgtccccttcagctgtgtcattgttgatgaggctggacagtcttgtgaaattgagactcttactccactcatccatcgctgcaataagctcatcctagtaggagatcctaagcagctccctccgacagtcatctctatgaaagcacaggagtatggctacgaccagtcaatgatggctcgcttctgcagactgctggaagagaatgtagaacacaacatgatcagcaggctgcccattctacagctcactgttcagtacaggatgcatccagacatatgcctcttcccttctaattatgtttataacagaaacttaaaaacaaatagacagacagaagccattcgatgttcatcagattggccatttcagccataccttgtgtttgatgttggagatggttcagaaagacgggataatgactcatatataaatgttcaagaaataaaactggtgatggaaataattaagcttattaaagacaaaagaaaggatgttagttttcgaaacattggcataataactcattacaaggcccagaagacgatgattcagaaggatttggacaaagagttcgatagaaaaggaccagcagaagtagacactgtggatgcattccagggtcggcagaaggattgtgttattgttacgtgtgtcagagcaaatagcatccaaggttcaattggattcctggcaagtttgcagagattgaatgtcaccatcacacgagccaagtacagcctcttcatcctcggacatttgaggaccctgatgcaacttcttcctaggagcttttgtgtacacgtgaaccattcgccttttttcagcccagaacccaagtatctacactgggctctcaaggaaaaccagcattggaatcagctgattcaggatgctcagaagcgtggtgccattattaagacctgtgacaaaaactatagacatgatgcagtgaagattctgaaactcaagcctgtgctgcagagaagtctcactcaccctcctaccatagccccagaggggtccagaccccagggtggtttgcccagcagcaagctagacagtggatttgccaagacatctgttgctgcttctctataccacacaccctctgactccaaggaaattactcttactgttacttcaaaggaccctgaaagacctcctgttcatgaccaacttcaggacccacgactgctgaagaggatgggcattgaggtcaaaggaggaatattcctttgggatccacaaccctcgagcccccagcatcctggagcaacacctcctacgggcgagccgggcttccctgtcgttcaccaggacctgagccatatacagcagcccgctgctgtagtggctgctctgagcagccacaaacctcccgtgcggggcgaacctccagctgccagtcccgaggcttccacgtgtcagagcaaatgtgatgacccggaagaggagctctgtcacaggagagaggccagggctttcagtgaaggggagcaggagaagtgtggttccgagacccatcacaccaggaggaactctaggtgggacaagaggacactggagcaggaggacagcagttccaagaaaagaaagcttttataggaaagcccagtgacatgggccagcagccacagcatattgtaaactgaagatgaccagctcgtgggaccatctagataagcttgttttttgtaaggagtttgtgtgctgttggaaaacatggaaaatgcatccttaacacctgagcctctggtcatcttcagtattttctgtcatttgcaaaagctttcagagggcattgtgtatccgtaataatgtccttgaagtcagagactggaaatgttgatctcttagtcttctatagacaaggaggtcagactggagtgaatgttgtaaaagttgaaatgtatatttgtatagcaaataacaaaatccttttaaaatttaatctagtagaccgcttttctttccccctgtttaaaatgttaatcagttttcaacagaacaaactttatattaccaaaaaaaaaaagatgggaggagggcgggtcctttcaaccattgttagagcaagacagataattatttaacagcctagcttggaataagctgagttagtgctggtgggtcaggtgtctctggctctattaaaaaaagcaaaaacccccccaaaaacctggagtctcctaggggacactttgggcagcacggttatgttaggtaaagtcttgctgacatggtgcatttttagatagagtgcattggcccagggtattatatttctgtgatgagttcatttacctgtttcagtatgcacatagttccctagctaaaattcctaatcttcttgagagagaagaatatggagtgaaagaataattcttgagctatcattcaaatgctcccagcatattgtgagccttgtgtgactggtgaggtacagacatttggttgccaaatgctagattagcgctgggtcagctgtggaagaatcgcctcagcttacagattgtcagacagatctaactagttttccagaaagcctgggaagctgtgtgttcaacatttcccaagggattctgatcaccaggcagcttgggaaccactggggcaggccaaatagaatattttgggcgggaaagaagcacccgatttaaaatgaagcgtaaccagaggagttcagaactgggaagagagtggtagacttcctgtgatcttcagaaatcatctacctggtaaaaatacatgctgtttagaatatctgataggtgtttccagctactattagaggtgatagtgcttttgtgggggaaaaaattggtcatggtgaatggagatcgaggaagctcgggacaagggaggggtgggctgcctgattttgtccagttttccaaatatccacgcagtgaactggagtatcctaaacatgagaatgtacagttgacagttgtaaaaactagggatctgtagtgaatgctgtgcagccccatatctcatttgggggtaggaaaatagctgaagattcatgtgcattatttgacatttcctttgtcatctgctttttaagcaaaaaagggttttgtgttagaaattctacttgagcagattataaagagctttaaaaaacaactttcggttgccaaaagtttgagcatttgatttcattacctgtgtctccctcactggtgtccagacggtcaactgaatactcctgaaacccagggagcaggtgacttcctggagtgctttgtccccagagtcagccactgcttcctctgtgggggtggagagtttgtctttggccatgcagtgtgcgacagttcaggacgggtagggatgggtcccattctgtctgggtcaagggctctatcagcttcttccatgtgcctttgggaagaaatctcgttactttaagtttgctttcctgttatcttgatgaagtgcccattttagcagacacttgtagtgctgaccacttagggaatgtacaaactcctaagcttctaaagggaggcatggcaaaaacgttggggtcaggatgtctctcacgctgctcatgttaatactattaacacatgatttgagaaataagttttctctaaaatgcatattttgccgccacacactgaacaatattatttccagtgaagtttgatgcctgttcttacgttgtgttcacctgttggttcaccactcagcagatctgattctgcaagaattaatggtagaactagatcatcctttctaacagacgagcctgtgtcctgtgacggcctttcacagcggaatgcagttgtacctcacattacttttgaaacttcactcgttccagttggtacaagtatttgccaaagccatttcctatgttcaccgtggcccctcctgatgtggctgtcagcgcagcgttgttgaacagggctattctttttacaaggtgtgaagtgtggctcttcgcttcgtctttgccatggcattaaaagaaagttccctgtcttctttcaatattagttatttcaaatgaatatgtgctacttaaaagcttgttttgtttctttgtatataatttgccttggatttattgtgcacagtttgttgagttgtatgtttttgtgaattatcaggagtaaatttgacaagtacatgtgaataacctcctgtaaatgaattttataacaaaaatgtactgaactattttttaaagttgtgcagattagcaattttttgctatagctttgacttttctatgctgtgaattaatagctgcgatttggcaaacagccctgttgtctttgttaaaccctaaattttaagaggaaatggcagaattaaaagcagaaacaagaagatggacatggattagaggttatgtattatgaagtaaactacaaggtactaacatca

SEQ ID NO: 310169 - DNA, 5730 bp, Artificial Sequence
  derived and/or modified sequence
gtggcacaagaatggctcaactctccaaatagagagaatttctatcagttgcaagtacgaaaatttcctgccgattatataaaatactgggagtttgcagtttatctggaagaatgtgaactggctaaacagctttatccaaaggaaaacgatttggtgtttttagctcctgagagaataaatgaagagaagaaagatacagagagaaatgacatacaagatctccacgaatatcattctggttatgttcataaatttcgccgcacgtcagtcatgcgtaatgggaaaactgagtgttacctttccatccagactcaagagaactttccggccaatttaaacgaacttgtgaattgtattgtaatcagttctctggtaactacacaaaggaagttgaaagccatgtctctgttgggtagtcggaaccaactggctagagctgttctgaatccaaaccctatggacttctgtacaaaagatttactgactacaacatctgagagaattattgcgtacttaagagatttcaatgaagatcaaaagaaagcaatagaaactgcatatgctatggtgaaacactcaccatcagttgccaaaatctgcttgattcatggaccacctggaacaggaaaatcaaaaactattgttggcctcctctatcgtctactgacagagaaccagaggaaggggcattcagacgaaaactccaatgccaaaatcaaacaaaaccgtgtcctcgtgtgtgcaccttccaatgcagctgttgatgaactcatgaaaaaaattatccttgaattcaaagaaaaatgtaaagacaagaagaatcctttaggaaactgtggagatataaatttagtacgactgggtccagaaaagtctattaatagtgaggttctaaagttcagtttggacagccaagtaaaccacagaatgaaaaaagagttaccttctcatgttcaggcgatgcataaaagaaaggaatttctagattatcagctggatgagctttcccggcagcgagctctatgccgaggtggacgggaaatacagaggcaagaattagatgaaaacatttccaaagtttctaaggaaaggcaggaacttgcttctaaaattaaagaggttcaaggacgcccacagaaaacacagagtatcatcatcttagagtcccatatcatctgctgcacgttgagcacaagtggtggtttactacttgagtctgctttccgtgggcaagggggtgtccccttcagctgtgtcattgttgatgaggctggacagtcttgtgaaattgagactcttactccactcatccatcgctgcaataagctcatcctagtaggagatcctaagcagctccctccgacagtcatctctatgaaagcacaggagtatggctacgaccagtcaatgatggctcgcttctgcagactgctggaagagaatgtagaacacaacatgatcagcaggctgcccattctacagctcactgttcagtacaggatgcatccagacatatgcctcttcccttctaattatgtttataacagaaacttaaaaacaaatagacagacagaagccattcgatgttcatcagattggccatttcagccataccttgtgtttgatgttggagatggttcagaaagacgggataatgactcatatataaatgttcaagaaataaaactggtgatggaaataattaagcttattaaagacaaaagaaaggatgttagttttcgaaacattggcataataactcattacaaggcccagaagacgatgattcagaaggatttggacaaagagttcgatagaaaaggaccagcagaagtagacactgtggatgcattccagggtcggcagaaggattgtgttattgttacgtgtgtcagagcaaatagcatccaaggttcaattggattcctggcaagtttgcagagattgaatgtcaccatcacacgagccaagtacagcctcttcatcctcggacatttgaggaccctgatgcaacttcttcctaggagcttttgtgtacacgtgaaccattcgccttttttcagcccagaacccaagtatctacactgggctctcaaggaaaaccagcattggaatcagctgattcaggatgctcagaagcgtggtgccattattaagacctgtgacaaaaactatagacatgatgcagtgaagattctgaaactcaagcctgtgctgcagagaagtctcactcaccctcctaccatagccccagaggggtccagaccccagggtggtttgcccagcagcaagctagacagtggatttgccaagacatctgttgctgcttctctataccacacaccctctgactccaaggaaattactcttactgttacttcaaaggaccctgaaagacctcctgttcatgaccaacttcaggacccacgactgctgaagaggatgggcattgaggtcaaaggaggaatattcctttgggatccacaaccctcgagcccccagcatcctggagcaacacctcctacgggcgagccgggcttccctgtcgttcaccaggacctgagccatatacagcagcccgctgctgtagtggctgctctgagcagccacaaacctcccgtgcggggcgaacctccagctgccagtcccgaggcttccacgtgtcagagcaaatgtgatgacccggaagaggagctctgtcacaggagagaggccagggctttcagtgaaggggagcaggagaagtgtggttccgagacccatcacaccaggaggaactctaggtgggacaagaggacactggagcaggaggacagcagttccaagaaaagaaagcttttataggaaagcccagtgacatgggccagcagccacagcatattgtaaactgaagatgaccagctcgtgggaccatctagataagcttgttttttgtaaggagtttgtgtgctgttggaaaacatggaaaatgcatccttaacacctgagcctctggtcatcttcagtattttctgtcatttgcaaaagctttcagagggcattgtgtatccgtaataatgtccttgaagtcagagactggaaatgttgatctcttagtcttctatagacaaggaggtcagactggagtgaatgttgtaaaagttgaaatgtatatttgtatagcaaataacaaaatccttttaaaatttaatctagtagaccgcttttctttccccctgtttaaaatgttaatcagttttcaacagaacaaactttatattaccaaaaaaaaaaagatgggaggagggcgggtcctttcaaccattgttagagcaagacagataattatttaacagcctagcttggaataagctgagttagtgctggtgggtcaggtgtctctggctctattaaaaaaagcaaaaacccccccaaaaacctggagtctcctaggggacactttgggcagcacggttatgttaggtaaagtcttgctgacatggtgcatttttagatagagtgcattggcccagggtattatatttctgtgatgagttcatttacctgtttcagtatgcacatagttccctagctaaaattcctaatcttcttgagagagaagaatatggagtgaaagaataattcttgagctatcattcaaatgctcccagcatattgtgagccttgtgtgactggtgaggtacagacatttggttgccaaatgctagattagcgctgggtcagctgtggaagaatcgcctcagcttacagattgtcagacagatctaactagttttccagaaagcctgggaagctgtgtgttcaacatttcccaagggattctgatcaccaggcagcttgggaaccactggggcaggccaaatagaatattttgggcgggaaagaagcacccgatttaaaatgaagcgtaaccagaggagttcagaactgggaagagagtggtagacttcctgtgatcttcagaaatcatctacctggtaaaaatacatgctgtttagaatatctgataggtgtttccagctactattagaggtgatagtgcttttgtgggggaaaaaattggtcatggtgaatggagatcgaggaagctcgggacaagggaggggtgggctgcctgattttgtccagttttccaaatatccacgcagtgaactggagtatcctaaacatgagaatgtacagttgacagttgtaaaaactagggatctgtagtgaatgctgtgcagccccatatctcatttgggggtaggaaaatagctgaagattcatgtgcattatttgacatttcctttgtcatctgctttttaagcaaaaaagggttttgtgttagaaattctacttgagcagattataaagagctttaaaaaacaactttcggttgccaaaagtttgagcatttgatttcattacctgtgtctccctcactggtgtccagacggtcaactgaatactcctgaaacccagggagcaggtgacttcctggagtgctttgtccccagagtcagccactgcttcctctgtgggggtggagagtttgtctttggccatgcagtgtgcgacagttcaggacgggtagggatgggtcccattctgtctgggtcaagggctctatcagcttcttccatgtgcctttgggaagaaatctcgttactttaagtttgctttcctgttatcttgatgaagtgcccattttagcagacacttgtagtgctgaccacttagggaatgtacaaactcctaagcttctaaagggaggcatggcaaaaacgttggggtcaggatgtctctcacgctgctcatgttaatactattaacacatgatttgagaaataagttttctctaaaatgcatattttgccgccacacactgaacaatattatttccagtgaagtttgatgcctgttcttacgttgtgttcacctgttggttcaccactcagcagatctgattctgcaagaattaatggtagaactagatcatcctttctaacagacgagcctgtgtcctgtgacggcctttcacagcggaatgcagttgtacctcacattacttttgaaacttcactcgttccagttggtacaagtatttgccaaagccatttcctatgttcaccgtggcccctcctgatgtggctgtcagcgcagcgttgttgaacagggctattctttttacaaggtgtgaagtgtggctcttcgcttcgtctttgccatggcattaaaagaaagttccctgtcttctttcaatattagttatttcaaatgaatatgtgctacttaaaagcttgttttgtttctttgtatataatttgccttggatttattgtgcacagtttgttgagttgtatgtttttgtgaattatcaggagtaaatttgacaagtacatgtgaataacctcctgtaaatgaattttataacaaaaatgtactgaactattttttaaagttgtgcagattagcaattttttgctatagctttgacttttctatgctgtgaattaatagctgcgatttggcaaacagccctgttgtctttgttaaaccctaaattttaagaggaaatggcagaattaaaagcagaaacaagaagatggacatggattagaggttatgtattatgaagtaaactacaaggtactaacatcatttcgtctgccatttggtttgctttatgctgaaattacttggtggggatttgtgcaattcagatataaaaagtttcattatcca

SEQ ID NO: 310170 - DNA, 8121 bp, Artificial Sequence
  derived and/or modified sequence
atgagcacctgctgctggtgcacccccggcggcgccagcaccatcgacttcctgaagagatacgccagcaacacccccagcggcgagttccagaccgccgacgaggacctgtgctactgcctggagtgcgtggccgagtaccacaaggccagagacgagctgcccttcctgcacgaggtgctgtgggagctggagaccctgagactgatcaaccacttcgagaagagcatgaaggccgagatcggcgacgacgacgagctgtacatcgtggacaacaacggcgagatgcccctgttcgacatcaccggccaggacttcgagaacaagctgagagtgcccctgctggagatcctgaagtacccctacctgctgctgcacgagagagtgaacgagctgtgcgtggaggccctgtgcagaatggagcaggccaactgcagcttccaggtgttcgacaagcaccccggcatctacctgttcctggtgcaccccaacgagatggtgagaagatgggccatcctgaccgccagaaacctgggcaaggtggacagagacgactactacgacctgcaggaggtgctgctgtgcctgttcaaggtgatcgagctgggcctgctggagagccccgacatctacaccagcagcgtgctggagaagggcaagctgatcctgctgcccagccacatgtacgacaccaccaactacaagagctactggctgggcatctgcatgctgctgaccatcctggaggagcaggccatggacagcctgctgctgggcagcgacaagcagaacgacttcatgcagagcatcctgcacaccatggagagagaggccgacgacgacagcgtggaccccttctggcccgccctgcactgcttcatggtgatcctggacagactgggcagcaaggtgtggggccagctgatggaccccatcgtggccttccagaccatcatcaacaacgccagctacaacagagagatcagacacatcagaaacagcagcgtgagaaccaagctggagcccgagagctacctggacgacatggtgacctgcagccagatcgtgtacaactacaaccccgagaagaccaagaaggacagcggctggagaaccgccatctgccccgactactgccccaacatgtacgaggagatggagaccctggccagcgtgctgcagagcgacatcggccaggacatgagagtgcacaacagcaccttcctgtggttcatccccttcgtgcagagcctgatggacctgaaggacctgggcgtggcctacatcgcccaggtggtgaaccacctgtacagcgaggtgaaggaggtgctgaaccagaccgacgccgtgtgcgacaaggtgaccgagttcttcctgctgatcctggtgagcgtgatcgagctgcacagaaacaagaagtgcctgcacctgctgtgggtgagcagccagcagtgggtggaggccgtggtgaagtgcgccaagctgcccaccaccgccttcaccagaagcagcgagaagagcagcggcaactgcagcaagggcaccgccatgatcagcagcctgagcctgcacagcatgcccagcaacagcgtgcagctggcctacgtgcagctgatcagaagcctgctgaaggagggctaccagctgggccagcagagcctgtgcaagagattctgggacaagctgaacctgttcctgagaggcaacctgagcctgggctggcagctgaccagccaggagacccacgagctgcagagctgcctgaagcagatcatcagaaacatcaagttcaaggcccccccctgcaacaccttcgtggacctgaccagcgcctgcaagatcagccccgccagctacaacaaggaggagagcgagcagatgggcaagaccagcagaaaggacatgcactgcctggaggccagcagccccaccttcagcaaggagcccatgaaggtgcaggacagcgtgctgatcaaggccgacaacaccatcgagggcgacaacaacgagcagaactacatcaaggacgtgaagctggaggaccacctgctggccggcagctgcctgaagcagagcagcaagaacatcttcaccgagagagccgaggaccagatcaagatcagcaccagaaagcagaagagcgtgaaggagatcagcagctacacccccaaggactgcaccagcagaaacggccccgagagaggctgcgacagaggcatcatcgtgagcaccagactgctgaccgacagcagcaccgacgccctggagaaggtgagcaccagcaacgaggacttcagcctgaaggacgacgccctggccaagaccagcaagagaaagaccaaggtgcagaaggacgagatctgcgccaagctgagccacgtgatcaagaagcagcacagaaagagcaccctggtggacaacaccatcaacctggacgagaacctgaccgtgagcaacatcgagagcttctacagcagaaaggacaccggcgtgcagaagggcgacggcttcatccacaacctgagcctggaccccagcggcgtgctggacgacaagaacggcgagcagaagagccagaacaacgtgctgcccaaggagaagcagctgaagaacgaggagctggtgatcttcagcttccacgagaacaactgcaagatccaggagttccacgtggacggcaaggagctgatccccttcaccgagatgaccaacgccagcgagaagaagagcagccccttcaaggacctgatgaccgtgcccgagagcagagacgaggagatgagcaacagcaccagcgtgatctacagcaacctgaccagagagcaggcccccgacatcagccccaagagcgacaccctgaccgacagccagatcgacagagacctgcacaagctgagcctgctggcccaggccagcgtgatcaccttccccagcgacagcccccagaacagcagccagctgcagagaaaggtgaaggaggacaagagatgcttcaccgccaaccagaacaacgtgggcgacaccagcagaggccaggtgatcatcatcagcgacagcgacgacgacgacgacgagagaatcctgagcctggagaagctgaccaagcaggacaagatctgcctggagagagagcaccccgagcagcacgtgagcaccgtgaacagcaaggaggagaagaaccccgtgaaggaggagaagaccgagaccctgttccagttcgaggagagcgacagccagtgcttcgagttcgagagcagcagcgaggtgttcagcgtgtggcaggaccaccccgacgacaacaacagcgtgcaggacggcgagaagaagtgcctggcccccatcgccaacaccaccaacggccagggctgcaccgactacgtgagcgaggtggtgaagaagggcgccgagggcatcgaggagcacaccagacccagaagcatcagcgtggaggagttctgcgagatcgaggtgaagaagcccaagagaaagagaagcgagaagcccatggccgaggaccccgtgagacccagcagcagcgtgagaaacgagggccagagcgacaccaacaagagagacctggtgggcaacgacttcaagagcatcgacagaagaaccagcacccccaacagcagaatccagagagccaccaccgtgagccagaagaagagcagcaagctgtgcacctgcaccgagcccatcagaaaggtgcccgtgagcaagacccccaagaagacccacagcgacgccaagaagggccagaacagaagcagcaactacctgagctgcagaaccacccccgccatcgtgccccccaagaagttcagacagtgccccgagcccaccagcaccgccgagaagctgggcctgaagaagggccccagaaaggcctacgagctgagccagagaagcctggactacgtggcccagctgagagaccacggcaagaccgtgggcgtggtggacaccagaaagaagaccaagctgatcagcccccagaacctgagcgtgagaaacaacaagaagctgctgaccagccaggagctgcagatgcagagacagatcagacccaagagccagaagaacagaagaagactgagcgactgcgagagcaccgacgtgaagagagccggcagccacaccgcccagaacagcgacatcttcgtgcccgagagcgacagaagcgactacaactgcaccggcggcaccgaggtgctggccaacagcaacagaaagcagctgatcaagtgcatgcccagcgagcccgagaccatcaaggccaagcacggcagccccgccaccgacgacgcctgccccctgaaccagtgcgacagcgtggtgctgaacggcaccgtgcccaccaacgaggtgatcgtgagcaccagcgaggaccccctgggcggcggcgaccccaccgccagacacatcgagatggccgccctgaaggagggcgagcccgacagcagcagcgacgccgaggaggacaacctgttcctgacccagaacgaccccgaggacatggacctgtgcagccagatggagaacgacaactacaagctgatcgagctgatccacggcaaggacaccgtggaggtggaggaggacagcgtgagcagaccccagctggagagcctgagcggcaccaagtgcaagtacaaggactgcctggagaccaccaagaaccagggcgagtactgccccaagcacagcgaggtgaaggccgccgacgaggacgtgttcagaaagcccggcctgcccccccccgccagcaagcccctgagacccaccaccaagatcttcagcagcaagagcaccagcagaatcgccggcctgagcaagagcctggagaccagcagcgccctgagccccagcctgaagaacaagagcaagggcatccagagcatcctgaaggtgccccagcccgtgcccctgatcgcccagaagcccgtgggcgagatgaagaacagctgcaacgtgctgcacccccagagccccaacaacagcaacagacagggctgcaaggtgcccttcggcgagagcaagtacttccccagcagcagccccgtgaacatcctgctgagcagccagagcgtgagcgacaccttcgtgaaggaggtgctgaagtggaagtacgagatgttcctgaacttcggccagtgcggcccccccgccagcctgtgccagagcatcagcagacccgtgcccgtgagattccacaactacggcgactacttcaacgtgttcttccccctgatggtgctgaacaccttcgagaccgtggcccaggagtggctgaacagccccaacagagagaacttctaccagctgcaggtgagaaagttccccgccgactacatcaagtactgggagttcgccgtgtacctggaggagtgcgagctggccaagcagctgtaccccaaggagaacgacctggtgttcctggcccccgagagaatcaacgaggagaagaaggacaccgagagaaacgacatccaggacctgcacgagtaccacagcggctacgtgcacaagttcagaagaaccagcgtgatgagaaacggcaagaccgagtgctacctgagcatccagacccaggagaacttccccgccaacctgaacgagctggtgaactgcatcgtgatcagcagcctggtgaccacccagagaaagctgaaggccatgagcctgctgggcagcagaaaccagctggccagagccgtgctgaaccccaaccccatggacttctgcaccaaggacctgctgaccaccaccagcgagagaatcatcgcctacctgagagacttcaacgaggaccagaagaaggccatcgagaccgcctacgccatggtgaagcacagccccagcgtggccaagatctgcctgatccacggcccccccggcaccggcaagagcaagaccatcgtgggcctgctgtacagactgctgaccgagaaccagagaaagggccacagcgacgagaacagcaacgccaagatcaagcagaacagagtgctggtgtgcgcccccagcaacgccgccgtggacgagctgatgaagaagatcatcctggagttcaaggagaagtgcaaggacaagaagaaccccctgggcaactgcggcgacatcaacctggtgagactgggccccgagaagagcatcaacagcgaggtgctgaagttcagcctggacagccaggtgaaccacagaatgaagaaggagctgcccagccacgtgcaggccatgcacaagagaaaggagttcctggactaccagctggacgagctgagcagacagagagccctgtgcagaggcggcagagagatccagagacaggagctggacgagaacatcagcaaggtgagcaaggagagacaggagctggccagcaagatcaaggaggtgcagggcagaccccagaagacccagagcatcatcatcctggagagccacatcatctgctgcaccctgagcaccagcggcggcctgctgctggagagcgccttcagaggccagggcggcgtgcccttcagctgcgtgatcgtggacgaggccggccagagctgcgagatcgagaccctgacccccctgatccacagatgcaacaagctgatcctggtgggcgaccccaagcagctgccccccaccgtgatcagcatgaaggcccaggagtacggctacgaccagagcatgatggccagattctgcagactgctggaggagaacgtggagcacaacatgatcagcagactgcccatcctgcagctgaccgtgcagtacagaatgcaccccgacatctgcctgttccccagcaactacgtgtacaacagaaacctgaagaccaacagacagaccgaggccatcagatgcagcagcgactggcccttccagccctacctggtgttcgacgtgggcgacggcagcgagagaagagacaacgacagctacatcaacgtgcaggagatcaagctggtgatggagatcatcaagctgatcaaggacaagagaaaggacgtgagcttcagaaacatcggcatcatcacccactacaaggcccagaagaccatgatccagaaggacctggacaaggagttcgacagaaagggccccgccgaggtggacaccgtggacgccttccagggcagacagaaggactgcgtgatcgtgacctgcgtgagagccaacagcatccagggcagcatcggcttcctggccagcctgcagagactgaacgtgaccatcaccagagccaagtacagcctgttcatcctgggccacctgagaaccctgatgcagctgctgcccagaagcttctgcgtgcacgtgaaccacagccccttcttcagccccgagcccaagtacctgcactgggccctgaaggagaaccagcactggaaccagctgatccaggacgcccagaagagaggcgccatcatcaagacctgcgacaagaactacagacacgacgccgtgaagatcctgaagctgaagcccgtgctgcagagaagcctgacccacccccccaccatcgcccccgagggcagcagaccccagggcggcctgcccagcagcaagctggacagcggcttcgccaagaccagcgtggccgccagcctgtaccacacccccagcgacagcaaggagatcaccctgaccgtgaccagcaaggaccccgagagaccccccgtgcacgaccagctgcaggaccccagactgctgaagagaatgggcatcgaggtgaagggcggcatcttcctgtgggacccccagcccagcagcccccagcaccccggcgccaccccccccaccggcgagcccggcttccccgtggtgcaccaggacctgagccacatccagcagcccgccgccgtggtggccgccctgagcagccacaagccccccgtgagaggcgagccccccgccgccagccccgaggccagcacctgccagagcaagtgcgacgaccccgaggaggagctgtgccacagaagagaggccagagccttcagcgagggcgagcaggagaagtgcggcagcgagacccaccacaccagaagaaacagcagatgggacaagagaaccctggagcaggaggacagcagcagcaagaagagaaagctgctgtag

SEQ ID NO: 310171 - DNA, 2847 bp, Artificial Sequence
  derived and/or modified sequence
gtggcccaggagtggctgaacagccccaacagagagaacttctaccagctgcaggtgagaaagttccccgccgactacatcaagtactgggagttcgccgtgtacctggaggagtgcgagctggccaagcagctgtaccccaaggagaacgacctggtgttcctggcccccgagagaatcaacgaggagaagaaggacaccgagagaaacgacatccaggacctgcacgagtaccacagcggctacgtgcacaagttcagaagaaccagcgtgatgagaaacggcaagaccgagtgctacctgagcatccagacccaggagaacttccccgccaacctgaacgagctggtgaactgcatcgtgatcagcagcctggtgaccacccagagaaagctgaaggccatgagcctgctgggcagcagaaaccagctggccagagccgtgctgaaccccaaccccatggacttctgcaccaaggacctgctgaccaccaccagcgagagaatcatcgcctacctgagagacttcaacgaggaccagaagaaggccatcgagaccgcctacgccatggtgaagcacagccccagcgtggccaagatctgcctgatccacggcccccccggcaccggcaagagcaagaccatcgtgggcctgctgtacagactgctgaccgagaaccagagaaagggccacagcgacgagaacagcaacgccaagatcaagcagaacagagtgctggtgtgcgcccccagcaacgccgccgtggacgagctgatgaagaagatcatcctggagttcaaggagaagtgcaaggacaagaagaaccccctgggcaactgcggcgacatcaacctggtgagactgggccccgagaagagcatcaacagcgaggtgctgaagttcagcctggacagccaggtgaaccacagaatgaagaaggagctgcccagccacgtgcaggccatgcacaagagaaaggagttcctggactaccagctggacgagctgagcagacagagagccctgtgcagaggcggcagagagatccagagacaggagctggacgagaacatcagcaaggtgagcaaggagagacaggagctggccagcaagatcaaggaggtgcagggcagaccccagaagacccagagcatcatcatcctggagagccacatcatctgctgcaccctgagcaccagcggcggcctgctgctggagagcgccttcagaggccagggcggcgtgcccttcagctgcgtgatcgtggacgaggccggccagagctgcgagatcgagaccctgacccccctgatccacagatgcaacaagctgatcctggtgggcgaccccaagcagctgccccccaccgtgatcagcatgaaggcccaggagtacggctacgaccagagcatgatggccagattctgcagactgctggaggagaacgtggagcacaacatgatcagcagactgcccatcctgcagctgaccgtgcagtacagaatgcaccccgacatctgcctgttccccagcaactacgtgtacaacagaaacctgaagaccaacagacagaccgaggccatcagatgcagcagcgactggcccttccagccctacctggtgttcgacgtgggcgacggcagcgagagaagagacaacgacagctacatcaacgtgcaggagatcaagctggtgatggagatcatcaagctgatcaaggacaagagaaaggacgtgagcttcagaaacatcggcatcatcacccactacaaggcccagaagaccatgatccagaaggacctggacaaggagttcgacagaaagggccccgccgaggtggacaccgtggacgccttccagggcagacagaaggactgcgtgatcgtgacctgcgtgagagccaacagcatccagggcagcatcggcttcctggccagcctgcagagactgaacgtgaccatcaccagagccaagtacagcctgttcatcctgggccacctgagaaccctgatgcagctgctgcccagaagcttctgcgtgcacgtgaaccacagccccttcttcagccccgagcccaagtacctgcactgggccctgaaggagaaccagcactggaaccagctgatccaggacgcccagaagagaggcgccatcatcaagacctgcgacaagaactacagacacgacgccgtgaagatcctgaagctgaagcccgtgctgcagagaagcctgacccacccccccaccatcgcccccgagggcagcagaccccagggcggcctgcccagcagcaagctggacagcggcttcgccaagaccagcgtggccgccagcctgtaccacacccccagcgacagcaaggagatcaccctgaccgtgaccagcaaggaccccgagagaccccccgtgcacgaccagctgcaggaccccagactgctgaagagaatgggcatcgaggtgaagggcggcatcttcctgtgggacccccagcccagcagcccccagcaccccggcgccaccccccccaccggcgagcccggcttccccgtggtgcaccaggacctgagccacatccagcagcccgccgccgtggtggccgccctgagcagccacaagccccccgtgagaggcgagccccccgccgccagccccgaggccagcacctgccagagcaagtgcgacgaccccgaggaggagctgtgccacagaagagaggccagagccttcagcgagggcgagcaggagaagtgcggcagcgagacccaccacaccagaagaaacagcagatgggacaagagaaccctggagcaggaggacagcagcagcaagaagagaaagctgctgtag

SEQ ID NO: 310172 - DNA, 192 bp, Artificial Sequence
  derived and/or modified sequence
cagcagcaggagaccaacctgctggccaacctgaccaccaacgacgcaagagacaattctaaggactttcagaattccaaggttggcgccgccgccacaagccgcgacgagggctgtaactgccctattatcggcgagatcgttatctcgtgttattggctatttgaaatcccaccacttattagcgaatag

SEQ ID NO: 310173 - DNA, 816 bp, Artificial Sequence
  derived and/or modified sequence
tacaccgggggcattgccaagctggagcgtgacatgtccaatgtgtcccttgggccgacaccaataccagaacttacccatatcatggtcggcttggagagctgttcctttttagaggaggatttcataccattcgcagtgctgaatatgatgatgggcggcggtggcagtttctcagcaggaggccctggaaagggcatgttttctaggctgtacttaaacgtattgaatagacatcactggatgtacaacgcaacctcctaccaccattcgtatgaggataccgggcttctatgcatccatgcaagcgctgatccaaggcaggttagggaaatggtggaaattattacaaaagaattcatactgatgggggggaccgttgataccgtggaactcgagcgtgcaaaaacacagctgacgagtatgttgatgatgaacctcgagtctagacctgtgatttttgaggacgtcgggaggcaggtactggcaacccggagccgcaagctgccccacgagctatgcacactcatccgcgagtatcggaggggcagcgagggcctgcctcaagcttcggcacgactccgtggtggccggttagctctcccacaagcagtggtcggcctgtggtatgttcatcatacccaaaatctcggaccttctcccgtcgtactcagcagggggggacagggacagggccgcggcgtggctgacctggtgtccctacccgggccaacaatgcatctgcttccaccttggcaggtcaccccaccgtctgcccctctcggtggtgccgtgaccactgctcagtcttgttag

SEQ ID NO: 310174 - DNA, 816 bp, Artificial Sequence
  derived and/or modified sequence
tacacaggaggcatcgccaagctggagcgggacatgagcaatgtgtccctgggccccacccccatccctgagctgacccacatcatggtgggcctggagagctgcagcttcctggaggaggacttcatcccctttgctgtgctgaacatgatgatgggcggcggcggcagcttctctgctgggggccctgggaagggcatgttcagccggctgtacctgaatgtgctgaacagacaccactggatgtacaatgccaccagctaccaccacagctatgaggacaccggcctgctgtgcatccacgccagcgctgacccccggcaggtgcgggagatggtggagatcatcaccaaggagttcatcctgatgggcggcaccgtggacacagtggagctggagcgggccaagacccagctgacctccatgctgatgatgaacctggagagcaggcctgtgatctttgaagatgtgggccggcaggtgctggccaccaggagcaggaagctgccccatgagctgtgcaccctcatccgggagtacagaagaggcagcgagggcctgccccaggccagcgcccggctgcggggcggccgcctggccctgccccaggccgtggtgggcctgtggtacgtgcaccacacccagaacctgggccccagccctgtggtgctgagcagaggaggccagggccagggccggggcgtggccgacctggtgtccctgcccggccccaccatgcacctgctgcccccctggcaggtgaccccacccagcgcccccctgggcggcgctgtgaccacagcccagagctgctag

SEQ ID NO: 310175 - DNA, 816 bp, Artificial Sequence
  derived and/or modified sequence
tacaccggcggcatcgccaagctggagcgggacatgagcaacgtgtctctaggaccaactccgatcccagaactgacacacatcatggtgggcctggaatcgtgcagctttctggaggaggattttatcccttttgccgtacttaatatgatgatgggaggcggagggagcttctcggccggaggaccaggtaagggaatgttttctagactgtacctcaatgtgcttaaccgacatcactggatgtataacgccacatcctatcaccacagctatgaagatacggggttgctttgcatccacgcatctgctgatcctcggcaggtacgtgaaatggttgagataattactaaagagtttatattgatgggaggtacagtcgatacggtggagcttgagagggctaaaactcagctcacctctatgctaatgatgaacctcgagagcagacccgtgatcttcgaagacgtgggcaggcaagttctagccacgagaagtcgcaagctgccccacgaattgtgcaccttgatcagagagtatcggaggggatccgagggattgccccaggccagcgcaagactgcgaggcggcagactggcgcttccccaggctgttgtggggttatggtacgtgcatcacacccagaatttggggccgagccctgtcgtcttatccagaggcgggcaggggcaggggcgtggggtggctgatctcgtttccttaccaggcccaaccatgcaccttcttccaccctggcaggtcacgccgccctctgcaccattaggcggggccgtcacaactgcccagtcctgctag

SEQ ID NO: 310176 - DNA, 1029 bp, Artificial Sequence
  derived and/or modified sequence
tacactggggggattgccaagctagaaagagacatgtccaatgtcagcctgggcccgacccccatccccgagctcacgcacatcatggttggactggagagctgctccttcctggaggaggacttcatcccctttgcagtgttgaacatgatgatgggcggaggtggctccttctcggctggtgggcccggcaagggcatgttctccaggctctacctcaacgtgctcaacaggcaccactggatgtataacgcgacctcctaccaccacagctacgaggacactggcctcctttgcatccatgccagcgccgacccaagacaggttcgagaaatggtagaaatcatcacaaaggagtttattttaatgggcggaaccgtggacacggtggagctggaacgagccaagacgcagctgacatcaatgctcatgatgaacctggaatccaggcctgtgatcttcgaggatgtggggaggcaggtgctggccactcgctccagaaagctgccgcacgagctgtgcacgctcatccgtgagtaccgcaggggtagtgaggggctgccgcaggcctcggccaggctcagaggaggccgtctcgccctcccgcaggccgtggtgggcctgtggtatgtccatcacacccagaatctggggccttcaccagttgtcctcagcaggggcggccaagggcagggtcgtggggtcgcagacctggtctcacttcccggccccaccatgcacctgctgcctccttggcaggtgaccccaccctctgcacccctgggaggggctgtcactactgcccagagttgttaaagagcactcaagttagtaggcgagaagggctcagtagaggactgctacattgtacgtggagtagcagtggctcggaatgccgctgtaccgttgctggctctcgggcaggagtctcagccccaggtttccggggcccccatgagtgaccttaggaggtctgaatttcctgaaactgccaagttgtatgtgcatcggactcttctgggggacagg

SEQ ID NO: 310177 - DNA, 816 bp, Artificial Sequence
  derived and/or modified sequence
tacaccggcggaatcgcgaaactggaaagagacatgagtaacgtgagcctaggcccaacgcccatccctgaactgacccacattatggtcgggctcgagagctgcagcttccttgaggaagatttcatcccttttgcagtcctgaatatgatgatgggcggaggtggctcctttagcgcagggggaccaggtaaaggtatgttctcccggttgtatctaaatgtgctgaataggcatcactggatgtacaacgccacttcctaccaccattcttatgaggacacgggcctgctctgtatacatgcctctgcagacccaagacaagttagagaaatggttgagattataacgaaggagttcattctaatgggagggacagtggacactgtggaactcgaaagagctaagacccagctaacttccatgctgatgatgaacctggaatctaggcctgtgattttcgaagacgttggcagacaggtattggcaactcgatcacgcaaattgccacatgagttatgcactctcatccgcgaatatagacggggtagtgagggtctgccacaggcaagtgcccgactgcgcggagggagactggccctgccgcaggccgtggtaggactgtggtatgtgcaccacactcagaacctggggcctagcccagtggtgctttcgaggggtgggcagggacagggccgaggggtcgcagatctcgtgtctttgcccggacccaccatgcacctattgccaccttggcaggtaaccccgccaagcgcaccccttggtggggcagtcacgacagcccagtcatgttag

SEQ ID NO: 310178 - DNA, 816 bp, Artificial Sequence
  derived and/or modified sequence
tacaccggcggcatcgccaagctggagagagacatgagcaacgtgagcctgggccccacccccatccccgagctgacccacatcatggtgggcctggagagctgcagcttcctggaggaggacttcatccccttcgccgtgctgaacatgatgatgggcggcggcggcagcttcagcgccggcggccccggcaagggcatgttcagcagactgtacctgaacgtgctgaacagacaccactggatgtacaacgccaccagctaccaccacagctacgaggacaccggcctgctgtgcatccacgccagcgccgaccccagacaggtgagagagatggtggagatcatcaccaaggagttcatcctgatgggcggcaccgtggacaccgtggagctggagagagccaagacccagctgaccagcatgctgatgatgaacctggagagcagacccgtgatcttcgaggacgtgggcagacaggtgctggccaccagaagcagaaagctgccccacgagctgtgcaccctgatcagagagtacagaagaggcagcgagggcctgccccaggccagcgccagactgagaggcggcagactggccctgccccaggccgtggtgggcctgtggtacgtgcaccacacccagaacctgggccccagccccgtggtgctgagcagaggcggccagggccagggcagaggcgtggccgacctggtgagcctgcccggccccaccatgcacctgctgcccccctggcaggtgaccccccccagcgcccccctgggcggcgccgtgaccaccgcccagagctgctag

SEQ ID NO: 310179 - protein, 643 aa, Artificial Sequence
  derived and/or modified sequence
MNASKESPPHEDLMVQIHSILAKIGPKAVNSVSLGKNGVVELMFKIIGPFSKKNSSLIKVALDTLAALLKSKTNARRAVDRGYVQVLLTIYVDWHRHDNRHRNMLIRKGILQSLKSVTNIKLGRKAFIDANGMKILYNTSQECLAVRTLDPLVNTSSLIMRKCFPKNRLPLPTIKSSFHFQLPVIPVTGPVAQLYSLPPEVDDVVDESDDNDDIDVEAENETENEDDLDQNFKNDDIETDINKLKPQQEPGRTIEDLKMYEHLFPELVDDFQDYDLISKEPKPFVFEGKVRGPIVVPTAGEETSGNSGNLRKVVMKENISSKGDEGEKKSTFMDLAKEDIKDNDRTLQQQPGDQNRTISSVHGLNNDIVKALDRITLQNIPSQTAPGFTAEMKKDCSLPLTVLTCAKACPHMATCGNVLFEGRTVQLGKLCCTGVETEDDEDTESNSSVEQASVEVPDGPTLHDPDLYIEIVKNTKSVPEYSEVAYPDYFGHIPPPFKEPILERPYGVQRTKIAQDIERLIHQSDIIDRVVYDLDNPNYTIPEEGDILKFNSKFESGNLRKVIQIRKNEYDLILNSDINSNHYHQWFYFEVSGMRPGVAYRFNIINCEKSNSQFNYALPLMSWMKMNLDSLKKLITVQKVMMS

SEQ ID NO: 310180 - protein, 237 aa, Artificial Sequence
  derived and/or modified sequence
MSKLKVIPEKSLTNNSRIVGLLAQLEKINAEPSESDTARYVTSKILHLAQSQEKTRREMTAKGSTGMEILLSTLENTKDLQTTLNILSILVELVSAGGGRRVSFLVTKGGSQILLQLLMNASKESPPHEDLMVQIHSILAKIGPKDKKFGVKARINGALNITLNLVKQNLQNHRLVLPCLQLLRVYSANSVNSVSLGKNGVVELMFKIIGPFSKKNSSLIKNVWQSGLWILLSIPPV

SEQ ID NO: 310181 - DNA, 567 bp, Artificial Sequence
  derived and/or modified sequence
atgaccgccaagggaagtaccggcatggagattctcctgtccacccttgagaatacaaaagacctccagaccactctgaacatcctgagcattttggtggaactcgtatcagccgggggcgggcggagagtatcctttctcgtgaccaaaggtggaagtcagatcttgctgcagctgctgatgaatgctagcaaggagagcccgccacatgaggacctgatggtgcagatccacagtatccttgccaagatcgggccgaaagataaaaagttcggggtcaaagcacgtatcaacggcgctctgaacatcacacttaacctcgtaaagcagaatctgcagaaccatcgattagtgctgccttgcctccagttactgagagtgtattcggctaacagcgtgaacagcgtgagtttgggaaaaaacggagtggtcgagttaatgttcaagataatcgggccatttagcaagaagaatagttcattgataaaaaataagtgtcaggagagttgtcggcagagaatctgcccaagcgccttcaataatctgtgcagactggcacccccttag

SEQ ID NO: 310182 - DNA, 567 bp, Artificial Sequence
  derived and/or modified sequence
atgactgcaaagggaagtaccgggatggagatcctgctgtctaccctggaaaacactaaagatctccagacgaccctgaatatcttgtcaattcttgtggaactggtaagtgctggagggggcagacgagtgtctttcctggtgaccaaagggggatcgcaaatcctactccagcttctgatgaatgcgtccaaggaatccccgcctcatgaggatctgatggtgcagatccatagtattctcgccaagatcggaccgaaggacaagaagttcggcgtcaaagctcggataaatggggcacttaatattactctcaacctggtgaaacaaaacctgcagaaccataggttagtgctcccttgcttgcagctgctgcgcgtgtattctgccaacagtgtgaatagtgtgagcctgggcaaaaatggcgtcgtggaactcatgtttaaaatcattggcccgttctcgaagaaaaactcaagccttataaaaaataaatgccaagagagctgtaggcagcgcatctgtccatctgcttttaataacctgtgccgactggcgcctccttag

SEQ ID NO: 310183 - DNA, 714 bp, Artificial Sequence
  derived and/or modified sequence
atgtccaagctcaaagtaatccctgaaaagtctctgactaataactcaagaatcgtgggcctcctagctcagctcgagaagatcaacgcagagccttctgagagtgacacagctcgctatgtcacatccaaaatcttacacttagcccagtcccaagagaagacccggcgcgaaatgacagcgaaaggatctaccggaatggaaatcctcttaagtacgttggaaaacactaaggatctgcagacaactcttaacatcctgagcatccttgtggagctggtcagtgccggcggcggaagacgtgtgagctttctggtcacaaaaggggggtctcagatcctgcttcagcttctcatgaatgcttccaaggaatctccacctcatgaggacctcatggtgcagattcacagtatcctggcaaaaatcggcccaaaggataaaaagttcggcgttaaggcccgaatcaacggtgcattgaacattacccttaacctggtaaagcagaacctgcagaaccaccggctggttctcccctgcttacagttgttacgcgtatactctgctaatagtgtgaactccgtcagcctaggaaaaaacggggttgtggaactcatgttcaagatcatcggccctttctctaagaagaacagctcccttattaagaacgtatggcagtctgggctgtggatactactgtccatcccgccggtttag

SEQ ID NO: 310184 - DNA, 567 bp, Artificial Sequence
  derived and/or modified sequence
atgacagccaagggcagcacaggcatggagatcctgctgagcaccctggagaacaccaaggacctgcagaccaccctgaacatcctgagcatcctggtggagctggtgtctgctgggggcggccggcgggtgtccttcctggtgaccaagggcggcagccagatcctgctgcagctgctgatgaatgccagcaaggagagcccccctcatgaggacctgatggtgcagatccacagcatcctggccaagattggccccaaggacaagaagtttggagtgaaggcccgcatcaacggggccctgaacatcaccctgaacctggtgaagcagaacctgcagaaccaccggctggtgctgccctgcctgcagctgctgcgggtgtacagcgccaacagcgtgaacagcgtgtccctgggcaagaatggagtggtggagctgatgttcaagatcatcggccccttcagcaagaagaacagcagcctcatcaagaacaagtgccaggagagctgccggcagaggatctgccccagcgccttcaacaacctgtgccgcctggcccctccttag

SEQ ID NO: 310185 - DNA, 714 bp, Artificial Sequence
  derived and/or modified sequence
atgagcaagctgaaggtgattcctgagaagagcctgaccaacaacagccgcatcgtgggcctgctggcccagctggagaagatcaatgctgagcccagcgagagtgacacagcccgctacgtgaccagcaagatcctgcacctggcccagagccaggagaagacccggcgggagatgacagccaagggcagcacaggcatggagatcctgctgagcaccctggagaacaccaaggacctgcagaccaccctgaacatcctgagcatcctggtggagctggtgtctgctgggggcggccggcgggtgtccttcctggtgaccaagggcggcagccagatcctgctgcagctgctgatgaatgccagcaaggagagcccccctcatgaggacctgatggtgcagatccacagcatcctggccaagattggccccaaggacaagaagtttggagtgaaggcccgcatcaacggggccctgaacatcaccctgaacctggtgaagcagaacctgcagaaccaccggctggtgctgccctgcctgcagctgctgcgggtgtacagcgccaacagcgtgaacagcgtgtccctgggcaagaatggagtggtggagctgatgttcaagatcatcggccccttcagcaagaagaacagcagcctcatcaagaatgtgtggcagagcggcctgtggatcctgctgagcatcccccctgtgtag

SEQ ID NO: 310186 - DNA, 567 bp, Artificial Sequence
  derived and/or modified sequence
atgaccgccaagggcagcaccggcatggagatcctgctgagcaccttagagaacaccaaagacctgcagaccacactgaacattctgtccattctggttgagctggtgtctgcagggggcgggcgaagggtgtcttttcttgttaccaaaggcggatcgcagatcttgctgcaactactgatgaacgccagcaaggagtccccccctcacgaggacctgatggttcagattcactccatacttgcaaaaattggcccaaaggacaaaaaattcggcgttaaagccagaattaacggagctttaaacatcacattaaaccttgtgaagcagaacctgcagaaccatagactggtcctcccctgtcttcaactgctgagggtttatagcgctaatagtgtcaattcggtgagtcttggaaaaaacggagtcgtcgaactgatgtttaagatcatcggaccgttctctaagaagaactcctctctaattaagaacaagtgccaggagagttgcaggcaaaggatctgtccttcagcctttaataacctttgtaggctggcacccccttag

SEQ ID NO: 310187 - DNA, 567 bp, Artificial Sequence
  derived and/or modified sequence
atgaccgccaagggcagcaccggcatggagatcctgctgagcaccctcgaaaacacaaaggatttgcagactaccctgaatatactctcgattcttgtagagctcgtgtcggcgggaggtgggaggagagtaagttttctggttaccaaaggtgggtcccaaatcctgcttcagctcttgatgaacgctagtaaagagtccccgccgcatgaggacctcatggtccagatccactctattttggcaaagattggacccaaagacaaaaagtttggagtgaaggctcggatcaacggggcactaaacatcacgttaaatctggtcaagcagaaccttcagaaccacaggctggttttaccctgtctgcagctacttcgtgtgtattcagccaacagcgtgaacagtgtgtccctggggaaaaatggtgtcgtggaactgatgttcaagattattggcccattcagtaaaaagaactcctctttgataaagaacaaatgccaagagtcatgcaggcagaggatctgcccatcagcattcaataacctctgcaggctggctcctccatag

SEQ ID NO: 310188 - DNA, 714 bp, Artificial Sequence
  derived and/or modified sequence
atgagcaagctgaaggtgatccccgagaagagcctgaccaacaacagccgaatcgtgggcttgttggcgcagttagaaaaaataaatgccgaacccagtgagtctgacacagcacgttatgtgacttctaagatactccacctggcccagtcgcaggagaagacgaggcgtgagatgacagcaaagggttctacgggaatggaaattttattgagtaccctagagaataccaaagatctccaaacaactcttaacatattgtccatcctggtggaacttgttagcgccgggggggggcggcgcgtttcctttctcgttaccaaagggggctcccagatcctactccagttgctcatgaacgcaagtaaggaaagtccacctcatgaagatctgatggtgcagatccattctatactcgctaagattggccccaaggacaagaaatttggagtgaaagcacgcattaatggagcactgaatattacattgaacctggtgaagcagaacctccagaaccaccgccttgtgctgccctgtctccagctcctgcgtgtttatagcgccaattcagtcaattcggtctctctaggcaagaacggcgtagtcgagctgatgttcaagatcataggaccgttctctaagaagaactcctctttgatcaagaacgtttggcagagcggactgtggatcctcctctctataccacctgtgtag

SEQ ID NO: 310189 - DNA, 567 bp, Artificial Sequence
  derived and/or modified sequence
atgacagcaaaaggttcaacagggatggagatcctcctatctaccctggaaaacactaaggacctgcagacaaccctaaacatactgagcatactggtcgaactggtatccgctggcggtgggaggcgggttagcttcctagttacaaagggtggatcacagatcctcttgcagctcctcatgaatgccagcaaggaaagtcctccacacgaggacctgatggttcagatccatagcatcttagcaaaaataggaccaaaagacaagaagtttggagtcaaggctcgtataaacggtgcactcaatattacgctgaaccttgtcaagcagaatctgcaaaaccacaggttagtactcccctgtctgcagctgcttcgcgtgtattccgccaattccgtaaactcggtatcgctcggaaagaacggagtagtcgaattgatgttcaaaattattggtcctttctccaagaagaattcgagtctaatcaagaacaaatgtcaagagtcttgccgtcagcgtatctgcccctctgctttcaataacctgtgcaggttagccccaccctag

SEQ ID NO: 310190 - DNA, 567 bp, Artificial Sequence
  derived and/or modified sequence
atgacagctaagggaagtactggcatggagatcctcttgagtacactcgaaaatacgaaggaccttcagactactttaaacattctgtctattcttgttgagctggtctccgccggaggaggcaggcgggtgtcatttttggtgaccaaagggggtagtcagatcttactacagcttctcatgaatgccagcaaggagtcaccaccacatgaagacctgatggtccaaatacactccatcctagctaagatcggaccaaaggacaagaagtttggggtcaaggccagaattaatggggctctgaatatcaccctcaatctggtcaagcaaaatttacagaatcaccgtctggtgctaccatgtctgcagctcttgcgagtatatagcgccaattccgtgaattccgtttctttgggaaagaacggagttgtggaattaatgttcaaaataataggcccattttctaaaaagaatagctctcttattaaaaacaaatgtcaggagtcatgtcgacagcgcatctgtccttcggcctttaataacctctgcagacttgccccaccctag

SEQ ID NO: 310191 - DNA, 714 bp, Artificial Sequence
  derived and/or modified sequence
atgagcaagctcaaagtcattcctgaaaagtctctgaccaataacagccggattgtgggtctgctggcgcagctggagaagatcaatgccgagccgtccgagtccgatacggcaaggtacgtcacttctaagatcctccatttagcccagagccaggaaaaaacccgccgagagatgacagcaaagggcagcactgggatggagattctcctgagcacactggaaaatacaaaggatctccaaaccactctcaatatcctgtcaattctggtggaactcgtgtctgctgggggtgggcgtagggtgtccttcttagtgacgaaaggcggatctcagattctgttacaactgctcatgaatgcgtcaaaagagtccccacctcacgaggacctcatggtgcagattcactcaatactagcaaagatcggacccaaggacaaaaaatttggcgtcaaagcacggatcaacggcgcattaaatattactttgaatctggtaaagcagaatctgcagaatcatagactggtcctcccttgtctgcagcttctgcgagtctattcagcgaattccgtgaattccgtgtctctgggaaagaacggcgtcgtggagctaatgtttaagatcattgggcctttcagcaagaagaatagtagtctaataaagaatgtctggcagagcggactctggatccttttaagtatccccccagtatag

SEQ ID NO: 310192 - DNA, 914 bp, Artificial Sequence
  derived and/or modified sequence
cggggtttgtatgaaaacaccgggcggcgggcggcgagggatccgccgtgatccaggtgctgagccgggtgctgcggctctgcgcggtccccgccagcgccccatcctgagccgattatctgcaattatgaaatgaagtaactcaagatgagcaagttaaaagtgataccagaaaaaagccttaccaataattctaggatcgtaggactcctggctcaactggagaagatcaatgctgagccttcagaatcagacactgcccgatatgttacatcaaaaattcttcatctggctcagagtcaagaaaaaacaaggagagaaatgacagccaaaggttctacaggaatggaaattctgctgtcaacattagagaacacaaaagatcttcaaactacacttaatatcttaagcattcttgttgagctggtgtcagctggtggaggtcgaagagtgagtttcttagtcaccaaaggtggttcacaaatattgttgcagttacttatgaatgccagcaaagaatctcccccacatgaggacttaatggtacagattcattctattcttgcaaagattggaccaaaagataaaaaatttggagtaaaggctagaattaatggggctctgaatataaccctgaatttggtcaagcagaatttgcagaatcatcgcttggttctaccttgccttcagcttttacgagtatattctgccaactctgtgaattcagtatccttagggaaaaatggagttgtggaactgatgtttaaaatcattggaccatttagtaagaagaattccagtcttataaagaatgtctggcagtcaggactctggatcctcttgtcaatacctccagtctgataatgaggaagtgtttcccaaaaaatcgactgccactcccaacaattaaaagt

SEQ ID NO: 310193 - DNA, 567 bp, Artificial Sequence
  derived and/or modified sequence
atgaccgccaagggcagcaccggcatggagatcctgctgagcaccctggagaacaccaaggacctgcagaccaccctgaacatcctgagcatcctggtggagctggtgagcgccggcggcggcagaagagtgagcttcctggtgaccaagggcggcagccagatcctgctgcagctgctgatgaacgccagcaaggagagccccccccacgaggacctgatggtgcagatccacagcatcctggccaagatcggccccaaggacaagaagttcggcgtgaaggccagaatcaacggcgccctgaacatcaccctgaacctggtgaagcagaacctgcagaaccacagactggtgctgccctgcctgcagctgctgagagtgtacagcgccaacagcgtgaacagcgtgagcctgggcaagaacggcgtggtggagctgatgttcaagatcatcggccccttcagcaagaagaacagcagcctgatcaagaacaagtgccaggagagctgcagacagagaatctgccccagcgccttcaacaacctgtgcagactggcccccccctag

SEQ ID NO: 310194 - DNA, 714 bp, Artificial Sequence
  derived and/or modified sequence
atgagcaagctgaaggtgatccccgagaagagcctgaccaacaacagcagaatcgtgggcctgctggcccagctggagaagatcaacgccgagcccagcgagagcgacaccgccagatacgtgaccagcaagatcctgcacctggcccagagccaggagaagaccagaagagagatgaccgccaagggcagcaccggcatggagatcctgctgagcaccctggagaacaccaaggacctgcagaccaccctgaacatcctgagcatcctggtggagctggtgagcgccggcggcggcagaagagtgagcttcctggtgaccaagggcggcagccagatcctgctgcagctgctgatgaacgccagcaaggagagccccccccacgaggacctgatggtgcagatccacagcatcctggccaagatcggccccaaggacaagaagttcggcgtgaaggccagaatcaacggcgccctgaacatcaccctgaacctggtgaagcagaacctgcagaaccacagactggtgctgccctgcctgcagctgctgagagtgtacagcgccaacagcgtgaacagcgtgagcctgggcaagaacggcgtggtggagctgatgttcaagatcatcggccccttcagcaagaagaacagcagcctgatcaagaacgtgtggcagagcggcctgtggatcctgctgagcatcccccccgtgtag

SEQ ID NO: 310195 - DNA, 1257 bp, Artificial Sequence
  derived and/or modified sequence
atgtacaccaacgtgaaggtgaccaacatctgcagcgacggcaccctgtactgccaggtgccctgcaagggcctgaacaagctgagcgacctgctgagaaagatcgaggactacttccactgcaagatcaccaacgtgcacagcagcagagccctggacgtgcagttcctggacagcggcaccgtgaccagcgtgaaggtgagcgagctgagagagatcccccccagattcctgcaggagatgatcgccatccccccccaggccatcaagtgctgcctggccgacctgccccagagcatcggcatgtggacccccgacgccgtgctgtggctgagagacagcgtgctgaactgcagcgactgcagcatcaaggtgaccaaggtggacgagaccagaggcatcgcccacgtgtacctgttcacccccaagaacttccccgacccccacagaagcatcaacagacagatcaccaacgccgacctgtggaagcaccagaaggacgtgttcctgagcgccatcagcagcggcgccgacagccccaacagcaagaacggcaacatgcccatgagcggcaacaccggcgagaacttcagaaagaacctgaccgacgtgatcaagaagagcatggtggaccacaccagcgccttcagcaccgaggagctgcccccccccgtgcacctgagcaagcccggcgagcacatggacgtgtacgtgcccgtggcctgccaccccggctacttcgtgatccagccctggcaggagatccacaagctggaggtgctgatggaggagatgatcctgtactacagcgtgagcgaggagagacacatcgccgtggagaaggaccaggtgtacgccgccaaggtggagaacaagtggcacagagtgctgctgaagggcatcctgaccaacggcctggtgagcgtgtacgagctggactacggcaagcacgagctggtgaacatcagaaaggtgcagcccctggtggacatgttcagaaagctgcccttccaggccgtgaccgcccagctggccggcgtgaagtgcaaccagtggagcgaggaggccagcatggtgttcagaaaccacgtggagaagaagcccctggtggccctggtgcagaccgtgatcgagaacgccaacccctgggacagaaaggtggtggtgtacctggtggacaccagcctgcccgacaccgacacctggatccacgacttcatgagcgagtacctgatcgagctgagcaaggtgaactag

SEQ ID NO: 310196 - DNA, 1257 bp, Artificial Sequence
  derived and/or modified sequence
atgtatacaaacgtcaaggttactaatatttgttccgacggtactctgtactgccaggtaccttgtaagggtctgaataagctcagtgatctgctgcgtaaaatcgaggattactttcactgtaagataacaaatgtgcactccagccgtgccttggatgtgcagtttctggactctgggactgtcacatccgttaaggtaagcgaacttcgcgagatccctcctcgctttttacaggagatgattgccatacccccgcaggccataaagtgttgtctggctgacctgccgcagagtatcggcatgtggacccccgatgcagtgctgtggctgagagactccgtcctaaactgcagtgattgcagtatcaaggtcaccaaggtggacgagacccggggcattgcccacgtttacttattcacccctaaaaactttcctgatccccaccgatcaatcaataggcaaatcaccaacgctgacctgtggaagcatcagaaagatgttttcctgagcgctatttcgagtggagcagacagccctaactctaagaacggtaatatgccaatgtccggaaacaccggggaaaattttcgcaagaatctcactgatgtcattaagaaaagcatggtggaccatacaagcgccttctcgacggaggaacttcccccacccgtgcacctttcaaaacccggggaacatatggacgtctatgtgccagtggcctgccaccccggatacttcgttattcagccatggcaggagatccacaagctcgaggtcctcatggaagaaatgattctatactactccgtgtccgaggagaggcatatcgccgtggaaaaagatcaagtgtatgccgccaaagtggagaataaatggcacagagttctgctgaaaggcattcttacgaacggacttgtgtccgtttacgaacttgactatgggaaacacgaacttgtgaacatacgtaaggtgcaaccccttgtagacatgttcaggaagttgccgttccaggccgtcacagctcagctggcgggcgtcaagtgtaaccaatggagcgaagaagcatccatggtcttcagaaaccatgtcgagaaaaagcctctggtggctctcgtgcagaccgtgattgaaaacgccaacccctgggaccgcaaggtcgtggtatacctggtagatacgtccttaccggacaccgacacctggatccatgacttcatgtccgagtacctgattgagttgagtaaggtgaactag

SEQ ID NO: 310197 - DNA, 1257 bp, Artificial Sequence
  derived and/or modified sequence
atgtacaccaacgtgaaggtgaccaacatctgcagtgatggcaccctgtactgccaggtgccctgcaagggcctgaacaagctgagtgacctgctgaggaagattgaggactacttccactgcaagatcaccaacgtgcacagcagccgggccctggatgtgcagttcctggacagcggcaccgtgacctctgtgaaggtgtctgagctgcgggagatccccccacgcttcctgcaggagatgattgccatccccccccaggccatcaagtgctgcctggccgacctgccccagagcatcggcatgtggaccccagatgctgtgctgtggctgcgggacagcgtgctgaactgcagcgactgcagcatcaaggtgaccaaggtggatgagacccggggcatcgcccacgtgtacctgttcacccccaagaacttcccagacccccacaggagcatcaaccggcagatcaccaatgctgacctgtggaagcaccagaaggatgtgttcctgagcgccatcagcagtggagctgacagccccaacagcaagaatggaaacatgcccatgagcggcaacacaggagagaacttcaggaagaacctgacagatgtgatcaagaagtccatggtggaccacaccagcgccttcagcacagaggagctgcccccacctgtgcacctgagcaagccaggagagcacatggatgtgtatgtgcctgtggcctgccaccctggctactttgtgatccagccctggcaggagatccacaagctggaggtgctgatggaggagatgatcctgtactacagcgtgtctgaggagcggcacatcgctgtggagaaggaccaggtgtatgctgccaaggtggagaacaagtggcaccgggtgctgctgaagggcatcctgaccaacggcctggtgtctgtgtatgagctggactatggcaagcatgagctggtgaacatcaggaaggtgcagcccctggtggacatgttcaggaagctgcccttccaggccgtgacagcccagctggccggcgtgaagtgcaaccagtggagcgaggaggcctccatggtgttcagaaatcatgtggagaagaagcccctggtggccctggtgcagacagtgattgaaaatgccaacccctgggacaggaaggtggtggtgtacctggtggacaccagcctgcctgacacagacacctggattcatgacttcatgtctgagtacctgattgagctgagcaaggtgaactag

SEQ ID NO: 310198 - DNA, 1257 bp, Artificial Sequence
  derived and/or modified sequence
atgtacaccaacgtgaaggtgaccaacatctgcagcgacggcaccttgtattgccaagtgccgtgtaaaggattgaacaagctgagcgaccttctgaggaaaatcgaggactactttcactgtaaaatcaccaacgtacatagctcccgggctctggacgtgcagttcctggattccggcactgtaacaagtgttaaggtttcagagctgcgcgagatcccaccacgcttcctacaggaaatgattgcaatccctccgcaagctatcaaatgctgcttagctgatttacctcaaagcataggcatgtggacccccgacgctgttttgtggctgagagactcggtgttaaattgctcggattgttctataaaagtcactaaggtggacgaaacacgaggtatcgcccacgtttatttgttcacacctaaaaacttccctgacccacacagaagtatcaacagacaaattaccaacgccgacctttggaaacatcagaaggacgtgttcctgagcgctattagctctggggccgacagtccgaacagcaagaatgggaacatgccgatgagcggtaatactggagagaactttagaaaaaacctgacagacgtgattaagaaatccatggttgaccatactagtgcctttagcaccgaggagctgcctccgcctgtccatttgagcaagcccggggaacatatggacgtttacgtaccagtggcatgccaccccggatactttgtcattcaaccttggcaggagattcataagctggaggttctcatggaggagatgattctatactattcggtgtctgaggaaagacatattgctgtagaaaaggatcaggtctacgccgccaaagtggaaaataaatggcacagggtgcttctgaagggaatcctcaccaatggactggtttccgtctacgagctcgactacggtaagcacgagctggttaacattaggaaggttcagcctcttgtggacatgtttcggaagctcccctttcaagccgtgacagcccaactggcgggggtgaaatgtaaccaatggagtgaggaagccagcatggtctttagaaaccatgttgagaagaagccactggtggccctggttcagaccgtcattgaaaatgccaacccttgggatcggaaggttgtcgtctatctcgtggacacctcattgcccgacactgatacatggatccatgacttcatgtccgagtatctgatagagctgtctaaagtgaactag

SEQ ID NO: 310199 - DNA, 1257 bp, Artificial Sequence
  derived and/or modified sequence
atgtatacgaatgttaaagtaaccaacatctgctccgatggaacactctattgtcaggtgccctgtaaaggcttgaacaagctgtccgaccttctgcgaaaaattgaggactacttccactgtaagataactaatgtgcacagtagccgagctttggatgtccagttcctggattcaggcaccgtgacctctgtgaaggttagtgaactgagggagatacctcctaggtttttgcaggagatgatagctatcccacctcaagcaattaaatgttgtctggctgacttgcctcagtctatcggcatgtggacgccagatgcagtgctgtggttgagagattctgtgctaaattgctccgattgctccatcaaggtgaccaaagtggatgaaactagagggatcgcccatgtatatctgtttacacctaaaaacttcccagaccctcaccgctccatcaaccgtcaaattacaaacgctgatttgtggaagcatcagaaagatgtcttcctcagcgccattagctcaggagcagattcacccaattctaaaaacgggaacatgccaatgtctggtaataccggtgaaaacttcaggaagaacctaacagatgtgattaaaaaaagtatggtggaccatacaagcgctttctccacggaggagttaccccctcctgttcatctctctaagcctggagagcacatggatgtctatgtgcccgttgcttgtcacccgggttacttcgtcattcagccttggcaggagattcataagctagaggtgttgatggaggaaatgattttgtactactcggtctccgaagaaagacatatcgccgtggaaaaagaccaggtgtatgccgcaaaagttgagaacaagtggcaccgagttctactgaaagggatcctgacaaatgggctggtgtccgtgtacgagctcgattacggcaagcacgaactcgtgaacatcaggaaagtgcagcccctggttgacatgtttaggaagcttcccttccaggccgtgactgctcaactggccggagtcaaatgcaatcagtggtctgaggaggcttctatggttttcaggaatcatgtcgaaaagaagcctctggtggcgcttgtgcagactgttatcgagaatgccaatccttgggacaggaaagtggttgtttacctggttgacaccagcctgccagatacggatacttggatccatgacttcatgtcagaatacctgatcgagcttagtaaggtcaactag

SEQ ID NO: 310200 - DNA, 1614 bp, Artificial Sequence
  derived and/or modified sequence
atgctgaacaccttgcaaacaaatgccggctacctagaacaagttaagagacagcggggcgacccacagacccagctggaggcgatggagctttatctggcccggagcggcctacaggtggaagacttggacagactgaatataattcacgtcactgggaccaaaggcaaagggagcacctgtgcattcacagaatgcatcctcagatcctacggtctcaaaactggattcttctcctcaccacacctggtgcaggtgagagagcggatcaggattaacggtcagcctatctcccccgagcttttcacaaaatatttctggcgcctgtaccatagattagaggagacaaaggacgggagctgtgtgagtatgcccccttatttcagattcttgaccctgatggctttccacgtattcctgcaggagaaggtggatctcgcagtcgtggaggttggcattggcggcgcgtacgactgcacgaatattatcaggaaacccgtggtttgtggcgtcagctccttgggaattgaccatacaagcctcttgggagatacagtggagaaaattgcttggcagaagggcgggatttttaagcagggggttcctgcattcaccgtgctgcagcctgagggacccctggccgtcctacgagatcgggcgcaacagatcagctgccccctttacttgtgtccgatgctggaggcacttgaagagggggggccaccactgaccctgggcctcgaaggcgagcatcagcgaagcaatgcagctttggccttgcagttggcgcactgctggcttcagcggcaagaccggcacggcgcaggtgaacctaaagccagccggccgggattgctctggcagctgccactagcacccgtattccagcccacgagccacatgaggctaggtctgagaaacaccgaatggcctggccggactcaagtgctgcgccgcgggcccctgacttggtacctcgatggagcgcacaccgcaagctctgcccaggcatgcgtgaggtggttccgacaagcattgcaaggcagggagcgaccctcaggaggccctgaagtgcgcgtgcttctattcaacgccactggtgatagagacccagctgccctgttgaagctgctgcagccttgccaattcgattatgccgttttctgcccgaacttaacagaggtatcatctacagggaatgccgaccagcagaactttaccgtgactctcgaccaggtgctcttgaggtgtttagagcatcagcaacactggaaccatctggacgaggagcaggcctcccccgatttatggagtgctcctagtccagaacccgggggctccgccagcctgctcctggcgcctcacccccctcacacctgctccgcctcctctttagtcttctcatgcatttcccacgcattacaatggatttcccaaggccgggatcctatctttcagcccccgagccctcccaaagggctcctgacacaccccgtcgcccactctggcgcatctatacttcgcgaagccgctgccattcatgtcctggtgaccggctccctgcacctcgttggcggcgtgctcaaactgcttgaaccagctctgagccaatag

SEQ ID NO: 310201 - DNA, 1614 bp, Artificial Sequence
  derived and/or modified sequence
atgctgaacaccctgcagaccaatgccggctacctggagcaggtgaagaggcagagaggagacccccagacccagctggaggccatggagctgtacctggcccggagcggcctgcaggtggaggacctggaccggctgaacatcatccacgtgacaggcaccaagggcaagggcagcacctgtgccttcacagagtgcatcctgcggagctatggcctgaagacaggcttcttcagcagcccccacctggtgcaggtgcgggagcgcatccgcatcaatggccagcccatcagccctgagctgttcaccaagtacttctggaggctgtaccaccggctggaggagaccaaggatggcagctgtgtgtccatgccaccctacttccgcttcctgaccctgatggccttccacgtgttcctgcaggagaaggtggacctggccgtggtggaggtgggcattggaggagcctatgactgcaccaacatcatcaggaagcctgtggtgtgtggggtgagcagcctgggcatcgaccacaccagcctgctgggggacacagtggagaagatcgcctggcagaagggcggcatcttcaagcagggcgtgcctgccttcaccgtgctgcagcctgagggccccctggccgtgctgcgggaccgggcccagcagatcagctgccccctgtacctgtgccccatgctggaggccctggaggagggcggcccccccctgaccctgggcctggagggggagcaccagaggagcaatgctgccctggccctgcagctggcccactgctggctgcagaggcaggacagacatggagctggggagcccaaggccagcaggcctggcctgctgtggcagctgcccctggcccctgtgttccagcccaccagccacatgaggctgggcctgaggaacacagagtggccaggccgcacccaggtgctgcggcggggccccctgacctggtacctggatggagcccacacagccagcagcgcccaggcctgtgtgcgctggttccggcaggccctgcagggccgggagcggcccagcggcggccctgaggtgcgggtgctgctcttcaatgccaccggggaccgggaccctgctgccctgctgaagctgctgcagccctgccagtttgattatgctgtgttctgccccaacctgacagaggtgagcagcactggaaatgctgaccagcagaacttcaccgtgaccctggaccaggtgctgctgcgctgcctggagcaccagcagcactggaaccacctggatgaggagcaggccagcccagacctgtggagcgcccccagccctgagcccggcggcagcgccagcctgctgctggccccccaccccccccacacctgcagcgccagcagcctggtgttcagctgcatcagccacgccctgcagtggatcagccagggccgggaccccatcttccagccccccagcccccccaagggcctgctgacccaccctgtggcccacagcggggccagcatcctgcgggaggccgccgccatccacgtgctggtgacaggcagcctgcacctggtgggcggcgtgctgaagctgctggagcccgccctgagccagtag

SEQ ID NO: 310202 - DNA, 1614 bp, Artificial Sequence
  derived and/or modified sequence
atgctgaacaccctgcagaccaacgccggctacctggagcaggtgaagcggcagaggggagacccccaaactcagctcgaggctatggaactgtacctcgcccgatctggactccaggttgaagatctggatcgactgaatatcattcacgtcacagggacaaaaggtaagggctcgacctgcgcctttaccgagtgcatcttaagaagctatggattgaaaactggctttttttcaagtccacacctggttcaggttagggaaagaattcgaatcaacggccaacccatcagtcctgagttgttcaccaaatacttctggagactttaccacaggctcgaggagaccaaagacggatcgtgtgtgagcatgcctccctattttcgctttctcactctgatggcattccacgttttcctccaggaaaaagtggatctcgcagtcgtcgaagtaggaatcggaggcgcctatgactgtactaacataatccgaaaacccgtggtctgtggcgtatctagccttggtatcgaccataccagtctgctcggagacaccgtggagaagatagcctggcagaaaggcggcattttcaaacagggtgtgcccgcattcaccgtgttgcaaccagaagggccccttgccgttcttcgggatcgggcccagcagattagctgtccactgtatttgtgtccaatgctagaggcattggaagaaggaggaccaccgctgacactcggactggaaggcgagcaccagcgcagcaacgctgcactagccctccagctggcgcactgctggttgcaaagacaggatcgacacggagccggcgagccgaaagcctcccgccccggcctcttgtggcaacttcccctagccccagtatttcaacccacgagtcatatgagactgggattaagaaacaccgaatggcctggcaggactcaggtgctaaggcgcggacctctgacctggtatctggatggagcccacacggcgagctcagctcaggcttgtgtgcggtggtttcgtcaggcccttcagggcagagaaagaccttcagggggccccgaggtgcgagtgctcctcttcaacgccacaggcgatcgtgaccccgctgcattgctgaagctgttgcaaccctgccaatttgattacgccgtcttctgtccgaacctcaccgaagtgagttctacgggcaacgctgatcaacagaattttaccgtcacacttgaccaggtcctgttgagatgcctggaacatcaacagcactggaatcacctggacgaggagcaggcatccccagacttgtggtccgccccatcaccggagcccggaggaagcgccagccttctactggcaccacatccacctcacacttgttccgcatctagcctcgtgttctcctgtatctcccatgccttgcaatggatcagccaagggcgggaccctatcttccaacctccctccccccctaagggacttcttacgcaccctgtggcccacagcggggcttcgatcttgcgagaagccgctgccatccacgtacttgttactggatctctacatctggtagggggagtattgaaacttctggagccagccttgtcgcaatag

SEQ ID NO: 310203 - DNA, 1614 bp, Artificial Sequence
  derived and/or modified sequence
atgctgaacacattgcagacgaacgcgggttacctggagcaggtcaaacggcagcgcggagacccacagacccagttggaagcgatggaactctacctggccaggagtggcctccaggttgaagacctggataggctgaacatcatccacgtgaccggcactaaaggcaagggtagcacctgtgcatttacagagtgcattctgagaagttacgggctgaaaaccggattcttcagtagcccccacctggtccaagtacgcgaacgaattcgaataaacggacagcccattagtcccgagctgttcacgaagtacttctggcgtctgtatcacagacttgaggaaactaaggacggtagctgcgtgagcatgcctccttacttccgctttctcacacttatggccttccacgtgtttcttcaggaaaaggtggatctggcggtggttgaggtcgggattggaggagcctatgattgcactaatatcatcaggaagccagtcgtgtgcggcgtctcttctttaggcatcgaccatacctctctcctaggtgatacagttgaaaagatcgcatggcaaaagggtggaatatttaaacagggcgttcccgctttcaccgttctgcaaccggaggggccactcgctgtgttacgggaccgcgctcaacagatttcttgtccgctgtacctttgccccatgcttgaggcactggaagaaggcggacctccgctgacactgggattagaaggggagcaccagaggtccaacgctgcactcgcactgcaattagcccactgttggctccaaaggcaggacaggcatggagctggcgagcctaaggccagcagaccaggtctgctgtggcagcttccgttggcgccagtttttcagcctacctcccatatgcgcctcggactccggaacacggagtggccgggaagaacacaagttctcagacggggacccctgacatggtacctggatggcgcacacactgctagcagcgctcaggcttgtgttcggtggtttaggcaggcacttcagggaagggaacgtccatccgggggaccagaagtcagagtgctgttgtttaacgcaactggggaccgggatcctgcagcattgctgaagctgttacagccctgccagttcgattatgcagtcttttgcccaaacctcaccgaggtgtcgtcgaccggcaatgctgatcagcagaacttcaccgttaccctggatcaggtcctgctcagatgtctcgagcaccagcagcattggaaccatctggatgaagagcaggcctcacccgacctctggagtgctccatccccagagccaggtggtagcgcttctctcctgcttgccccacacccccctcacacatgttctgcaagctctttggttttctcttgcatttctcatgcactgcagtggatctcccagggcagggaccctatttttcagcctcccagtcctccaaaggggctgctgacgcatcccgtcgctcacagtggcgcaagtattctcagggaggccgctgcaattcacgtgcttgtgactggctcactgcatttggtgggtggggttctcaaactgctggagcccgcactgtcccagtag

SEQ ID NO: 310204 - DNA, 1614 bp, Artificial Sequence
  derived and/or modified sequence
atgctgaacaccctgcagaccaacgccggctacctggagcaggtgaagagacagagaggcgacccccagacccagctggaggccatggagctgtacctggccagaagcggcctgcaggtggaggacctggacagactgaacatcatccacgtgaccggcaccaagggcaagggcagcacctgcgccttcaccgagtgcatcctgagaagctacggcctgaagaccggcttcttcagcagcccccacctggtgcaggtgagagagagaatcagaatcaacggccagcccatcagccccgagctgttcaccaagtacttctggagactgtaccacagactggaggagaccaaggacggcagctgcgtgagcatgcccccctacttcagattcctgaccctgatggccttccacgtgttcctgcaggagaaggtggacctggccgtggtggaggtgggcatcggcggcgcctacgactgcaccaacatcatcagaaagcccgtggtgtgcggcgtgagcagcctgggcatcgaccacaccagcctgctgggcgacaccgtggagaagatcgcctggcagaagggcggcatcttcaagcagggcgtgcccgccttcaccgtgctgcagcccgagggccccctggccgtgctgagagacagagcccagcagatcagctgccccctgtacctgtgccccatgctggaggccctggaggagggcggcccccccctgaccctgggcctggagggcgagcaccagagaagcaacgccgccctggccctgcagctggcccactgctggctgcagagacaggacagacacggcgccggcgagcccaaggccagcagacccggcctgctgtggcagctgcccctggcccccgtgttccagcccaccagccacatgagactgggcctgagaaacaccgagtggcccggcagaacccaggtgctgagaagaggccccctgacctggtacctggacggcgcccacaccgccagcagcgcccaggcctgcgtgagatggttcagacaggccctgcagggcagagagagacccagcggcggccccgaggtgagagtgctgctgttcaacgccaccggcgacagagaccccgccgccctgctgaagctgctgcagccctgccagttcgactacgccgtgttctgccccaacctgaccgaggtgagcagcaccggcaacgccgaccagcagaacttcaccgtgaccctggaccaggtgctgctgagatgcctggagcaccagcagcactggaaccacctggacgaggagcaggccagccccgacctgtggagcgcccccagccccgagcccggcggcagcgccagcctgctgctggccccccaccccccccacacctgcagcgccagcagcctggtgttcagctgcatcagccacgccctgcagtggatcagccagggcagagaccccatcttccagccccccagcccccccaagggcctgctgacccaccccgtggcccacagcggcgccagcatcctgagagaggccgccgccatccacgtgctggtgaccggcagcctgcacctggtgggcggcgtgctgaagctgctggagcccgccctgagccagtag

SEQ ID NO: 310205 - DNA, 2339 bp, Artificial Sequence
  derived and/or modified sequence
gcggggcgtctcccgcccgggcctagagcgctgccgggggcgccgggactatgtcgcgggcgcggagccacctgcgcgccgctctattcctggcagcggcgtctgcgcgcggcataacgacccaggtcgcggcgcggcggggcttgagcgcgtggccggtgccgcaggagccgagcatggagtaccaggatgccgtgcgcatgctcaataccctgcagaccaatgccggctacctggagcaggtgaagcgccagcggggtgaccctcagacacagttggaagccatggaactgtacctggcacggagtgggctgcaggtggaggacttggaccggctgaacatcatccacgtcactgggacgaaggggaagggctccacctgtgccttcacggaatgtatcctccgaagctatggcctgaagacgggattctttagctctccccacctggtgcaggttcgggagcggatccgcatcaatgggcagcccatcagtcctgagctcttcaccaagtacttctggcgcctctaccaccggctggaggagaccaaggatggcagctgtgtctccatgcccccctacttccgcttcctgacactcatggccttccacgtcttcctccaagagaaggtggacctggcagtggtggaggtgggcattggcggggcttatgactgcaccaacatcatcaggaagcctgtggtgtgcggagtctcctctcttggcatcgaccacaccagcctcctgggggatacggtggagaagatcgcatggcagaaagggggcatctttaagcaaggtgtccctgccttcactgtgctccaacctgaaggtcccctggcagtgctgagggaccgagcccagcagatctcagtgctggggagccaaaggcatccaggccagggctcctgtggcagctgcccctggcacctgtgttccagcccacatcccacatgcggctcgggcttcggaacacggagtggccgggccggacgcaggtgctgcggcgcgggcccctcacctggtacctggacggtgcgcacaccgccagcagcgcgcaggcctgcgtgcgctggttccgccaggcgctgcagggccgcgagaggccgagcggtggccccgaggttcgagtcttgctcttcaatgctaccggggaccgggacccggcggccctgctgaagctgctgcagccctgccagtttgactatgccgtcttctgccctaacctgacagaggtgtcatccacaggcaacgcagaccaacagaacttcacagtgacactggaccaggtcctgctccgctgcctggaacaccagcagcactggaaccacctggacgaagagcaggccagcccggacctctggagtgcccccagcccagagcccggtgggtccgcatccctgcttctggcgccccacccaccccacacctgcagtgccagctccctcgtcttcagctgcatttcacatgccttgcaatggatcagccaaggccgagaccccatcttccagccacctagtcccccaaagggcctcctcacccaccctgtggctcacagtggggccagcatactccgtgaggctgctgccatccatgtgctagtcactggcagcctgcacctggtgggtggtgtcctgaagctgctggagcccgcactgtcccagtagccaaggcccggggttggaggtgggagcttcccacacctgcctgcgttctccccatgaacttacatactaggtgccttttgtttttggctttcctggttctgtctagactggcctaggggccagggctttgggatgggaggccgggagaggatgtcttttttaaggctctgtgccttggtctctccttcctcttggctgagatagcagaggggctccccgggtctctcactgttgcagtggcctggccgttcagcctgtctcccccaacaccccgcctgcctcctggctcaggcccagcttattgtgtgcgctgcctggccaggccctgggtcttgccatgtgctgggtggtagatttcctcctcccagtgccttctgggaagggagagggcctctgcctgggacactgcgggacagagggtggctggagtgaattaaagcctttgttttttaaagaaatggcaaagccttcgactgacccttgaccccctgctccctcagcagagacggagggaggggctgctggtggtcagggacctgcactgtgtagagggagcctggctgtgtggcctggaacaagtccctccctccctgtgcgcctcaggtggcctgtctgtgagatgagaagaagaccagactgaagcctgttcaccatatgccaggcagtgctttct

SEQ ID NO: 310206 - protein, 502 aa, Artificial Sequence
  derived and/or modified sequence
MADGGGPKDAPSLRSSPGPAPRVPRAVGPSGGGGETPRTAALALRFDKPIKQAFYNTGAVLFVCLCCGAAVLVYFILEAFLRPLLWAVLCGTFLHPFKSSLTRLGRHWLQRLHRAHTPIVLAALLLPLCFVDYGVEALGEQALRRRRLLLLLGAGGPLLYGLYCLGSYLGVQVLLVHAATLICRGLDYFSSLWIWTLVVGYVLTVSFKWNASTERYLRAVSIPVWIILLFHLASLAGSWRIPVFLVIVFLMSVGTLYEKQNGKESSGAELPGQVISMAASTLANLAISITGYESSSEDQPSTQPAEAVDRGESAPTLSTSPSPSSPSPTSPSPTLGRRRPEIGTFLRKKKTSDIYFVSLVWAIVVMQIWLNLWIVQLLPVPIAVWILKKLVIHFGVVDFLEKRYHVWWGIIESFLKERQGALAPWPIVGLGKFLLKVDSKMIIWLEKMLDKIISIFIIFLLVIGTLLLALLLTAKVHQESVHMIEVTSNLINETLANHPEWA

SEQ ID NO: 310207 - DNA, 1509 bp, Artificial Sequence
  derived and/or modified sequence
atggccgacggcggcggccccaaggacgcccccagcctgagaagcagccccggccccgcccccagagtgcccagagccgtgggccccagcggcggcggcggcgagacccccagaaccgccgccctggccctgagattcgacaagcccatcaagcaggccttctacaacaccggcgccgtgctgttcgtgtgcctgtgctgcggcgccgccgtgctggtgtacttcatcctggaggccttcctgagacccctgctgtgggccgtgctgtgcggcaccttcctgcaccccttcaagagcagcctgaccagactgggcagacactggctgcagagactgcacagagcccacacccccatcgtgctggccgccctgctgctgcccctgtgcttcgtggactacggcgtggaggccctgggcgagcaggccctgagaagaagaagactgctgctgctgctgggcgccggcggccccctgctgtacggcctgtactgcctgggcagctacctgggcgtgcaggtgctgctggtgcacgccgccaccctgatctgcagaggcctggactacttcagcagcctgtggatctggaccctggtggtgggctacgtgctgaccgtgagcttcaagtggaacgccagcaccgagagatacctgagagccgtgagcatccccgtgtggatcatcctgctgttccacctggccagcctggccggcagctggagaatccccgtgttcctggtgatcgtgttcctgatgagcgtgggcaccctgtacgagaagcagaacggcaaggagagcagcggcgccgagctgcccggccaggtgatcagcatggccgccagcaccctggccaacctggccatcagcatcaccggctacgagagcagcagcgaggaccagcccagcacccagcccgccgaggccgtggacagaggcgagagcgcccccaccctgagcaccagccccagccccagcagccccagccccaccagccccagccccaccctgggcagaagaagacccgagatcggcaccttcctgagaaagaagaagaccagcgacatctacttcgtgagcctggtgtgggccatcgtggtgatgcagatctggctgaacctgtggatcgtgcagctgctgcccgtgcccatcgccgtgtggatcctgaagaagctggtgatccacttcggcgtggtggacttcctggagaagagataccacgtgtggtggggcatcatcgagagcttcctgaaggagagacagggcgccctggccccctggcccatcgtgggcctgggcaagttcctgctgaaggtggacagcaagatgatcatctggctggagaagatgctggacaagatcatcagcatcttcatcatcttcctgctggtgatcggcaccctgctgctggccctgctgctgaccgccaaggtgcaccaggagagcgtgcacatgatcgaggtgaccagcaacctgatcaacgagaccctggccaaccaccccgagtgggcctag

SEQ ID NO: 310208 - DNA, 7971 bp, Artificial Sequence
  derived and/or modified sequence
cgcccctcgggggcggctgtggcggaggaacgatggccgacggcggcggccctaaggacgcgccaagcctgcggagctctcccgggccggcgccgcgggtcccgcgcgcggtcgggccgagtggcggtggcggggagaccccgcggaccgcggcgctggcgctgcgcttcgacaagcccattaagcaggccttctacaacaccggggccgtgctgttcgtgtgcctgtgctgcggcgccgcggtgctggtctacttcatcctggaggccttcctgcggccgctgctctgggccgtgctatgcggcacttttctgcaccccttcaagagctcgctgacgcgcctgggccgccactggctgcagcgcctgcaccgcgcgcacacgcccatcgtcctggccgcgctgctcctgccgctctgcttcgtcgactacggcgtcgaggccctgggcgagcaggcgctgcgccgccgccgcctgctcctgctgctcggcgccggcggcccgctcctgtacggcctctactgcctcggcagctacttgggcgtgcaggtgctgctggtgcacgctgccacgctcatctgccgcgggctggactacttcagcagcctgtggatctggacgttggtggttggctatgtgttgactgtttcattcaagtggaatgcaagcactgaacgctacttgagagcagtttcaattcctgtctggattatattgctttttcatttagcatccctggctggctcatggagaattccagtattcctggttattgttttcctgatgtctgtgggtaccctctatgaaaaacagaatggaaaagagtcttctggggcagagttaccagggcaggttatctccatggcagcttctactctggcaaacttggccatctctatcacagggtatgaatcaagcagtgaagaccagccctccactcagcctgcagaagcagtggacaggggagaatccgctccaacgttgtccacctccccttcaccctcctccccttcacccacttccccttcacctactctgggcagacgaaggcctgaaataggaacgtttcttagaaagaagaaaactagtgacatctactttgtgtctctagtttgggccattgtcgtcatgcagatctggttgaacctgtggattgtgcagttgctgccagtgccgattgcagtctggatactcaaaaagcttgtcattcactttggagttgtggatttcctagagaaacgctaccatgtgtggtggggcattatagaaagcttcctgaaggagcggcagggagctctcgcgccttggcccattgtcgggcttggaaaattcttgttaaaagttgatagcaagatgatcatctggttggagaagatgttagataaaataattagcattttcatcatatttttgttagtgataggaactcttcttttagccctactcctgactgcaaaggtacatcaagagagtgtacacatgattgaagtcacaagtaatttgattaatgaaactctagcaaatcaccctgagtgggcaaattggcttcctgaggctcaggtagtccaaagagccctgaattctgcggctaacaacgtgtatcagtatggacgagaatggataactcacaagctccataaaattctaggagataaggtgaacaatactgctgtaattgaaaagcaagtactagaactttgggacagactgtatcactcttggtttgtaaagaatgtaacacactctggaaggcacaaaggacagaagttgcatgtcagtcgtcagaatagctggctgggagacattctggactggcaggatattgtttcctttgttcacgagaacattgagacatttctttcgatcttggagtctctgtggatcgttatgagccggaatgtgagcctgctgttcaccactgtcactacactcttgaccatcctcttctacagcgggacagcccttctcaattttgtactctctctgataattttcctgaccacactattttatctattaagttccagtgatgagtactacaagccagtgaagtgggtgataagcctgactccactatctcagccaggtccttcttctaatattattggccagtctgtggaagaagctatcagaggggtgtttgatgcttccctcaaaatggctggcttctatggattgtatacctggctgactcatactatgtttggcatcaatattgtcttcataccatcagcattagcagcaatccttggagcagtgccattcctggggacatactgggcagcagtacctgcagttcttgacctgtggctgacacaagggttaggatgcaaggccattttactgttgatttttcatctcttgccaacatactttgtagatactgcaatctactctgacatatcaggaggtggccatccttacctgacaggcttggcagtggccggtggagcatactacctaggcctggaaggagcaatcatcggtcctattcttctctgcatacttgtggttgcttccaatatctatagtgccatgctagtgagtcccacgaattcagttcccacgccaaaccagaccccatggcctgctcagcctcagcggactttccgtgacatttctgaagatctgaaatcttcagtaggttgatgtggtttcctctgcagtgatttttctaggaagttcaaatttgacagcgagttcagctcagctgtggccctctgcccttccagctgtgcctagcaagcaaaacccaggaaagaagcagaagcctcctggccttacatacagaatgcctggacaagagagaacttgctgcgggctgctttgtattttaaaacacagcttgagagttcagagttggtggtttgctcacttaactgttgttaagatggcttgaaaagtttcattttatacactggtaccctggcttgaaatttttccactttggttatctatgttactatattatatatttataaagttattttaagaactctaaactacctgctgttaaaagaatagatggtgtaattttttcctggtttaagaaatgtattgttaaacttttctaagacagtcacttttcaaggaagagggctttcacttttgagtgtgtagttgagtgagcaggaaaaatgaatcttctacccttctcccacaatgtattatacgctctttaagaaataataaatcataagtataagggtggggtggcttatttgatgttcagttttatattataaccctgggagatacaaagactgaagctcttcctcctcttccttttctcttcacgcttctttacactattgccaaattataaaacttggctgaccacgttgaagtgaaatacttattaagctgctatgaatggtaacagtatgataaaattcatgctgttattaggttttctccttccaggtggttgaagtgaaaaatctcaggtgtagcaatactctgatttgttaaatgtatccgtttcattatttggaactctgccaataagttagttttcagcagaattttgtatttatgtagtattttcccatctcttagcacagtgccttgcacatgactctaaatgaatgcttgttgaattgaattgcaactttaaaaatatctcagatatcacaataaccagcatagtgctttacattttacaaagtccttttgcacatactatttcacaagtacatcacatcagctttcatatagctttatattattttacatcagttttacactgatggagaagctaaggttcagaaaagtgaccaactcaaagtcgtaaagtgtagtaggatttggcctcagatctttgactccgttgtgtgcagattctgctgtattagtgttccttctaaatattgtatgcagttttcccagtgttacgagattggtgttgctatccatttgttgtgaatgaagacttgtcctatagtacatgacagggctgagagtggactgtagttcttagctgaaccctttctactgtttaaaacaatcatcaggcctatcctctgctcccaggggaatgtgggagagaaaagggttcttggccaggctgtaggtggtggctcacatctgtaatcccagcactttggaaggctgaggtgggtggattgcttgagcccagggatttgagatcagcctaggcaacatggcaaaaccccatctctacaaaaaaaaaaaaaaaaaaaaaaaaattagctgggcacggtggtgtggctatagtctgagctactcaggaggctgatgtatgaggatcacctgagtccaggaggtcgaggctgcagtgagccaagatggcgccactgcactccagcctgggtgagagagtgagacactgtcccaaggaaaaaaaaaagtgttggggggtagttcttaagcgttgaagatttcctttttggaaagtatttaaaggtagaaatattaataatttttcctaaaacatctccctaagaagtcactgataattataattagtttaaatttattcttacactacttaagaaaaatttcatttagaaaaggctaccatgagatcttttgactatatggagtagactgcatacagatctctttatttctattatgaatattttagcgattataatcagctattccactgagtattagatttggtcactaagtaactcatgtttttctttagtcaatcattcattcattcactaaaacatttgttgagagttggctaaactctagattctgtgccaggcactgtacagggtgatggagatcactcataagaaggcctcttgctcttagccagatcatatgtaatactaaatttaaattttttgcattaaaaggctaaaaaatcatttgtttttgttaattatatactggttgatttatagatgtaattagcacatattcataagagacaaatatatacaatgagttactatacatatacaaagtgattttagctgtataaagtgatattgcaaaaaactacagctaatgtttcttgctgggtaattattagcataaatatcaggttcttagaggtctttaagagaatactttagagctaccaaaattagcagcagtgatgtaatatcaccctgaaataccaggagcagaggtgccccagagtgcttcacagctatgatcaggaaacttgacctgccccattgctacagcaacggcataaggactaggaaggtccactagctggggaggtcttggaaccctccgagccagaaagaagcattccagcatgattcctcagatgcaatgaggaaggtttacagaattttcacagggcaacagagatcaagtggtatgaaaaggtaggagttttaagctcaagtctcaaagataacctacctttacattctcagtcagaatttgacccagaaagaggaagtttcttcaggaacagaccgtacgttgatgaagtagaagtcatttcagtaaaaacggagtacagaacttggtcataatatcttgcattttatagatttattaaagattagtttcaagttcacattcgctattcagttgtaaaccgaatggatgggaggggagaaaatacaagctctccacacaggtatgctcctctcttttctgagagagaaggcatgggattttcagcataaattccatgttatgtgagtgctgtttgagttctgaagttcctatcaatatctgttcctgcaagtgatctctgtaagaccaccttacatgctggtcttagttattgttaaaattgcaaggtttcttcacaccctctttgataagaagtgtttagctggcagagctttcccttgacttctgagtctagtgtgggttggcccatgacagtgggaagaaatccaacatgttacatggagaccttgtatgtaaacaaactctgtagcctttgaaagtggaactgctttttacagttaaagggctgctaaatggcttgcagatgagatcttctggctcaccttgatcttcacatgaacccattgtgacctatctggatttcctaggacctgtagtttccatttgggttatattagtgcctcaggaatgtgtcactactggtcaagcaatactcagaaattcaggctgtgaggggttagattagaggaaagtaatttaggtgagctatccagagctttcaacctcagggtttataggaaaaaaaaacaaaatacaaaaacccttaggacttctcatactctagccctgaccttgcagtctcctctgaggggcctcctaagacccttaaaataatattacaataggactttgagtgtgcatttcacagtggaaatagcctctggctagcattacttccaaatgctagttccagctaaaaacaagtactttttattagtttcttgtctttcaacattctgccatcaaaatatattcattttattaacttaccgattattgggaacctgcaaaaaaaaaaaaaaaaaaaaacacacatgctgtctgcagccactgtttggttatttttgatagtttaagagaattataaatcaagttgttctgtctactagagtcagaaattctgtgctagaatgggacttctaaaattaggtggtcctgtcactttctagagaaagacccaaattcataggtttaagtggcttgtctgacatacacatacagccagttagtaacagaattcagaatagaatagagttcttttttttctgtcagtccgttgttctacttctctttccttttcttcatggttgagcagcttttggcaaaatgtgttccatatagcagtagttccaagagatgttaatagatgtaagaaaaaaagtgtgtgtgtgttgggggtgggggattgcatggtcaattaaaatgaaggaatgctgagtttgtttccttactgtaggacttctaagagttttgaacatgctattacacattgtgaatttataaaaggggacaaacactgtttgaccttagactgcactccccttctttattcctcagagcatctcaaaggactacagggtcctttgagaaacatggcccttgatcaagtttacaactctttgagaagacatccctaatggaaatactgaatggcagatctattactgtggtaccatgtagtgtgtaataaatcttgaagtccagaaagcaagtatatttgctgtttagagctatacttaaggtatagagattcttttccacctgtggtgtgtaaaatcagtattgtgtttaattttgcaggtttttcaaggatcaactaatgtgcaaatacagtggtgatatattgatattacattttaataatgcttttgtatggcactttatagttttcagacaccttttgtaacagccctgtgagacagacaatattatccttattgtacagatgggggggctctggaggctctgaaaagtttttggtgatattcccctaagtttataccacaaaatgatggagccagaatttagttgcagaacttctgactccaagtccagagttctttactagacatctggtttcttactagctttttgctagctttttattttacagtgaaaagtatggaagcaaatcctgataattttggcttattatcaaatatcatttattttttattgcagagacccagcagatgtaactctcattgtagccatcccaaagaaaacccttctttgccctttgcagtgccacttatttaggtaactgaagtgtatttccagtacaatttgattttgaactaagatttgatatagagttgtaattgcttacataactctttgaaaatgtatcatccctgggttctcaggtgaaggaggcaattcaaaagtaaaaaagaatattcgaatacaataaataccctctgttctcacacaaatgctgtttcttagctaacttgctttgacaacctactgatgtaacttctttattaatgtgaaatatttatattttgaaataaaattactagtgttgaatgaatcatgtggtaaactt

SEQ ID NO: 310209 - DNA, 1509 bp, Artificial Sequence
  derived and/or modified sequence
atggccgacggaggaggccccaaggacgccccttctctcagatcttcccccgggcctgcaccaagggttccccgggcggtgggcccaagtggcgggggcggggaaactccccggacagctgcactggcgctgcggtttgacaagccgatcaaacaggccttttacaacactggagctgtgttatttgtgtgcctctgttgtggcgccgccgttctggtctattttattctcgaggctttccttcggccccttctgtgggctgtactgtgtgggacttttctacatccttttaagtcgagcttaacaaggctggggcgccactggctgcagagattgcaccgggcgcatactccaatcgtgctcgccgcactgctcctgcccctctgcttcgtggattatggggtggaggcactcggcgaacaagcactcagaaggcggaggctgctgctgctgctgggcgccgggggacccctcctctatggcctttactgcctaggaagctatctgggcgttcaggtccttctagttcacgccgccaccctgatttgccgaggcttggattacttcagctccctgtggatttggaccctggtcgtgggctatgtgctgactgtatcattcaaatggaacgctagcaccgagcgctacttacgcgccgtttcaatccccgtatggatcattctgttgttccatctcgccagcctggccggttcctggcgcattcccgtctttcttgtgatcgtgttcttaatgtctgtggggacgctgtatgagaaacagaacggcaaagagagtagtggcgccgaactccccgggcaagtgatcagtatggccgcttctactctcgctaacctagcaatttcaatcacaggatacgagtcaagtagtgaggaccagcctagcacacagcctgctgaagctgtagaccgcggagagagcgccccaaccctgtccacaagccccagtcccagttcccctagtcccacttcaccttcacctacactggggcgacgccgccctgagatcggaaccttcctcagaaagaagaaaacctctgacatatacttcgtgagtctggtctgggcaatcgtcgtcatgcagatctggctgaacttgtggattgtacagttactccccgtgcctattgcggtttggatacttaagaagctcgtcatccatttcggagttgtggattttctggaaaagcgctatcacgtatggtgggggataatcgaatcctttttgaaagagaggcagggagctctggccccctggccaatagttgggcttgggaaatttctcctgaaggtggactctaagatgattatctggctggagaaaatgctcgacaagattattagcatatttatcatctttctactcgtgataggaacattactcttagcactcctccttactgctaaagttcaccaggagtccgtgcatatgatcgaggtgacgtctaatttgatcaacgaaaccttggccaatcacccagaatgggcctag

SEQ ID NO: 310210 - DNA, 1509 bp, Artificial Sequence
  derived and/or modified sequence
atggctgatggcggcggccccaaggatgcccccagcctgcggagcagccctggccctgccccccgggtgcccagggctgtgggccccagcggcggcggcggggagacccccaggacagctgccctggccctgcgctttgacaagcccatcaagcaggccttctacaacacaggagctgtgctgtttgtgtgcctgtgctgcggggctgctgtgctggtgtacttcatcctggaggccttcctgcggcccctgctgtgggccgtgctgtgtggcaccttcctgcaccccttcaagagcagcctgacccggctgggccgccactggctgcagaggctgcaccgggcccacacccccatcgtgctggccgccctgctgctgcccctgtgctttgtggactatggagtggaggccctgggggagcaggccctgcggcggcggcggctgctgctgctgctgggcgctgggggccccctgctgtatggcctgtactgcctgggcagctacctgggcgtgcaggtgctgctggtgcacgccgccaccctcatctgccggggcctggactacttcagcagcctgtggatctggaccctggtggtgggctacgtgctgactgtgtccttcaagtggaatgccagcacagagcgctacctgcgggctgtgtccatccctgtgtggatcatcctgctcttccacctggccagcctggccggctcctggagaattcctgtgttcctggtgattgtgttcctgatgtctgtgggcaccctgtatgagaagcagaatggcaaggagagcagcggggctgagctgcccggccaggtgatctccatggccgccagcaccctggccaacctggccatcagcatcaccggctatgagagcagcagcgaggaccagcccagcacccagcctgctgaggccgtggacagaggagagagcgcccccaccctgagcaccagccccagccccagcagccccagccccaccagccccagccccaccctgggcagaagaagacctgagatcggcaccttcctgaggaagaagaagaccagtgacatctactttgtgtccctggtgtgggccatcgtggtgatgcagatctggctgaacctgtggatcgtgcagctgctgcctgtgcccatcgctgtgtggatcctgaagaagctggtgatccactttggagtggtggacttcctggagaagcgctaccacgtgtggtggggcatcatcgagagcttcctgaaggagcggcagggcgccctggccccctggcccatcgtgggcctgggcaagttcctgctgaaggtggacagcaagatgatcatctggctggagaagatgctggacaagatcatcagcatcttcatcatcttcctgctggtgattggcaccctgctgctggccctgctgctgacagccaaggtgcaccaggagagcgtgcacatgattgaggtgaccagcaacctgatcaatgagaccctggccaaccaccctgagtgggcctag

SEQ ID NO: 310211 - DNA, 1509 bp, Artificial Sequence
  derived and/or modified sequence
atggccgacggcggcggccccaaggacgcccccagcctgcggagctctcctggccctgcgcctagagtgccccgggcggtagggcccagtggcggcgggggtgaaactccccgcacagctgctctagccctgcgtttcgacaaaccaatcaagcaggcgttctacaatacaggtgctgtgctgtttgtctgtctgtgttgcggtgccgccgttctcgtgtatttcatacttgaggcgtttttgcgaccactgctgtgggccgtgctgtgtggcacattcctgcacccatttaagagtagcctgacacgtctaggacgccattggctgcagcgactgcaccgggcacatacacccatcgtacttgccgcactgttattaccattgtgtttcgtggattatggagtggaagccctgggcgaacaggcactcagaaggcggcgcctgctattgttacttggggcaggtgggcccctcctgtatggtctgtactgcctagggagctacctgggtgtccaagtcctcctggtgcacgctgccacattaatatgccggggccttgactattttagcagcctgtggatctggaccttagtagtaggctatgttctgaccgtaagtttcaaatggaatgcaagcactgaaaggtatctgagggcggtgtctatccccgtgtggattatccttctcttccacttggcctccctggctggatcctggcgaattcctgtctttttggtcatagtgtttctgatgagtgttggaacactctacgaaaagcagaacggtaaggagagctccggtgccgagctgcctggacaggtcatttctatggctgccagcactctggcgaatctggctatttcaatcaccggatacgagtcaagttccgaagatcagcccagtactcagccagcagaggcagtcgataggggtgagagcgcccctaccctgagcacctctccaagccctagcagtccctccccaacaagcccatcaccgacattgggaaggcgaagaccggagatcggtacttttctaagaaagaagaagaccagtgatatctacttcgtctcacttgtgtgggcaatagtggtgatgcagatatggctgaacctgtggattgtacagttactccctgtgccaattgcggtgtggatactcaaaaaactcgtcattcatttcggcgtagtcgatttcctcgagaagagataccatgtgtggtggggtattattgaatctttcctcaaggaacgacaaggagcactggccccatggcccattgtgggactgggaaaattccttctgaaagttgacagtaaaatgataatttggctcgagaagatgctggataagatcattagcatcttcataatctttctcctggtcatagggaccctcttactcgctcttttgctgactgcaaaagtgcatcaggaaagtgtgcacatgatagaggtgacctctaatctcatcaacgaaactctggccaatcatcccgagtgggcttag

SEQ ID NO: 310212 - DNA, 1509 bp, Artificial Sequence
  derived and/or modified sequence
atggctgacggtggaggacctaaggatgctccaagtttgagaagtagccccggtccagccccacgcgtgccccgagccgtcggacccagtgggggtggcggtgagacgccacgaacagccgctttggcactgagattcgacaaaccgatcaagcaggctttctacaacactggcgctgtcttgttcgtgtgcctgtgctgtggagcagccgtcctcgtttacttcattctagaggctttcctacgtccccttctatgggcagtattgtgcggcactttcttgcaccccttcaagtcttctctaacccgtcttggccgtcactggctccaaaggctgcatcgtgcgcatacccccatcgtgctggctgcactccttcttccactgtgttttgtagactatggtgttgaggctctcggcgagcaggcactgcgacgcagaagactgctcctactgctcggcgcaggtggacccctgctctacggcctctactgtctgggaagctacctgggcgtccaggtgttactggtgcacgcagctaccttgatctgccgtgggcttgactacttcagctctctgtggatttggacgctggtcgtggggtatgtcctcacagtgtcttttaagtggaacgcttcaacagagagatatctgcgggcagtgagcatacccgtctggatcattctcttattccacttggcatctctggccggatcttggagaattccagtgttcttggtgatcgtttttctgatgtctgtgggcaccctgtacgagaagcagaacggcaaggagagttcaggtgctgagctgcctggccaagtcatttctatggcggcttctaccctggccaacctggccatctcgatcacaggatacgagagcagttcagaagatcaaccgagtactcagccggctgaggcagtcgatcgcggagaatcggcccctactctgtccaccagcccgtccccgtcctcaccaagccctacttctcctagcccaacactcggtcgcaggcggccagagataggcacttttctccgaaagaagaagacatcagatatctacttcgtaagcctggtgtgggctatcgtggtgatgcagatttggctgaatctctggatcgttcagttattacccgtccctattgctgtatggattctgaaaaagttggtgattcattttggagtcgtcgatttcctggaaaaacgttaccacgtgtggtgggggattatcgagtcatttctcaaagagcgtcagggcgctttggctccgtggcctattgttgggctgggaaaattcctcctgaaagtcgatagtaaaatgattatctggctggagaaaatgcttgataagatcatatctatcttcattattttcttgctcgtgattggaacactcctgctggccctgctcctgacagcgaaggtacaccaagaaagcgtgcatatgattgaagtcacatcaaatctaattaatgaaacacttgcgaatcatccagaatgggcctag

SEQ ID NO: 310213 - DNA, 537 bp, Artificial Sequence
  derived and/or modified sequence
atggactactcatatgatgaggatctcgacgagttatgcccagtgtgtggggacaaggttagtgggtatcactatgggctgcttacgtgtgaatcttgtaaaggcttcttcaaaaggacagtgcagaacaacaagcattacacttgtacagagtcgcaatcctgcaagatcgataagactcagcgcaaacggtgtccattctgcagatttcagaaatgccttactgtaggaatgagattagaggctgtgcgcgcagatagaatgcgtggggggcggaataagttcggccccatgtacaaacgcgatagggccctgaaacaacaaaaaaaggcacagattcgcgctaacggattcaaactcgaaaccgggccccccatgggcgtgccccctccaccaccaccggcccctgactatgtgttgcccccctccttgcacgggcctgagccaaagggtctcgccgccggccctccagccgggcctttaggcgacttcggcgcaccagcactgcctatggccgtccccggggctcacggctag

SEQ ID NO: 310214 - DNA, 537 bp, Artificial Sequence
  derived and/or modified sequence
atggactacagctatgatgaggacctggatgagctgtgccctgtgtgtggggacaaggtgtctggctaccactacggcctgctgacctgtgagagctgcaagggcttcttcaagaggacagtgcagaacaacaagcactacacctgcacagagagccagagctgcaagattgacaagacccagaggaagcgctgccccttctgccgcttccagaagtgcctgactgtgggcatgaggctggaggccgtgcgggctgacaggatgaggggcggcaggaacaagtttggccccatgtacaagagggaccgggccctgaagcagcagaagaaggcccagatccgggccaacggcttcaagctggagaccggcccccccatgggcgtgcccccacctcctcctccagccccagactatgtgctgccccccagcctgcacggccctgagcccaagggcctggccgccggccccccagctggccccctgggggactttggagccccagccctgcccatggctgtgcctggggcccatggatag

SEQ ID NO: 310215 - DNA, 537 bp, Artificial Sequence
  derived and/or modified sequence
atggactacagctacgacgaggacctggacgagctgtgccccgtgtgcggtgataaagtgtctggataccattatgggctgctgacttgtgaaagttgcaagggctttttcaagagaaccgtccagaacaataagcactatacttgcaccgagtcccagagctgtaaaatcgataaaacccagaggaaacgttgtcccttctgccgcttccagaaatgcctcaccgtcggcatgagattggaggcagtgagagccgaccggatgcgtgggggcagaaacaaattcgggcccatgtacaaacgagatagagctctaaaacagcagaagaaggcccagatacgtgctaacgggtttaagttagagacaggccccccgatgggggtgcctccacctccacctcccgcacccgactatgtgctgccaccctctctgcacgggccggaaccaaaaggtctcgcagctgggccccctgccgggcccttaggggacttcggcgcgcctgcactacctatggccgtgcccggggctcatggttag

SEQ ID NO: 310216 - DNA, 826 bp, Artificial Sequence
  derived and/or modified sequence
ttggcccaggcctctaatggccagcctccttctgcagtgcctccctgcagcctgggccggccactgcctgctccacttagtgaccggtgccccctgctctgggcagggaaggtgccaggggtctcccagactcaccctcccaccatgctaccccctcttcttccctgggctgccgatgggaggagccaggcctgtgaccacaagccccatggaggtccgctggtgtcccgctgtctctggccaggcatccaccaggctgtgtgggtctgagcctagaggcggacgccgcgggcatggactattcgtacgacgaggacctggacgagctgtgccccgtgtgcggggacaaggtgtccggctaccactacggactgctcacgtgtgagagctgcaagggcttcttcaagcgcacggtgcagaacaacaagcactacacgtgcaccgagagccagagctgcaagatcgacaagacgcagcgcaagcgctgtcccttctgccgcttccagaaatgcctgacggtggggatgcgcctggaagccgtgcgcgctgaccgtatgaggggtggccggaacaagtttgggccgatgtacaagcgggaccgggccctgaaacagcagaagaaggcacagattcgggccaatggcttcaagctggagacagggcccccgatgggggtgcccccgccgccccctcccgcaccggactacgtgctgcctcccagcctgcatgggcctgagcccaagggcctggccgccggtccacctgctgggccactgggcgactttggggccccagcactgcccatggccgtgcccggtgcccacgg

SEQ ID NO: 310217 - DNA, 537 bp, Artificial Sequence
  derived and/or modified sequence
atggattattcctacgacgaagacttagatgaactttgtcccgtctgtggggataaggtatccggctaccactatggacttctcacctgtgaatcatgcaaaggattcttcaaacgcaccgtacaaaacaataagcactatacctgtaccgagagccagagctgcaagattgacaaaacacagagaaagaggtgtccattttgtcggttccaaaaatgcctgactgttggcatgaggctagaggccgttagagctgataggatgagaggcggtagaaataagtttggtcctatgtataaacgcgatcgcgctctcaaacagcagaagaaagcccagattagagccaacggcttcaaattggaaaccggcccacccatgggcgtgccgcctcctccgcctccagctccggattacgtacttcctcctagtctgcatggcccagagccgaagggattagcagccggacctcctgctggtccattgggggatttcggtgcccctgccttgcccatggcagtgccaggagctcatggttag

SEQ ID NO: 310218 - DNA, 537 bp, Artificial Sequence
  derived and/or modified sequence
atggactacagctacgacgaggacctggacgagctgtgccccgtgtgcggcgacaaggtgagcggctaccactacggcctgctgacctgcgagagctgcaagggcttcttcaagagaaccgtgcagaacaacaagcactacacctgcaccgagagccagagctgcaagatcgacaagacccagagaaagagatgccccttctgcagattccagaagtgcctgaccgtgggcatgagactggaggccgtgagagccgacagaatgagaggcggcagaaacaagttcggccccatgtacaagagagacagagccctgaagcagcagaagaaggcccagatcagagccaacggcttcaagctggagaccggcccccccatgggcgtgccccccccccccccccccgcccccgactacgtgctgccccccagcctgcacggccccgagcccaagggcctggccgccggcccccccgccggccccctgggcgacttcggcgcccccgccctgcccatggccgtgcccggcgcccacggctag

SEQ ID NO: 310219 - DNA, 333 bp, Artificial Sequence
  derived and/or modified sequence
atggagggcaaggccaagtacatcctgcccaccgagaccatctacgtgggcgagatgaaggacggcatgttccacggcgagggcaccctgtacttccccagcggcagccagtacgacgccatctgggagaacggcctggccatcaagggcacctacaccttcagcgacggcctgcactacgacgagaagaactggcactactgcgacggctacgacagaagattctacaccgagatcctgaacggcctgaagcccgccggcatggcccagctgaccaacatggacccccccagaaagatccccaagggctactacgactgcggcgacggctag

SEQ ID NO: 310220 - DNA, 333 bp, Artificial Sequence
  derived and/or modified sequence
atggaaggaaaagccaaatacattctgccaacagaaacaatttatgtgggcgagatgaaggatggcatgttccacggggagggtactttatattttccgtctgggtctcagtacgatgccatatgggaaaatggactggctataaaaggcacctatacgttttccgacggccttcattatgacgagaagaattggcactattgtgatgggtatgatagacgcttctataccgagattctgaacggccttaagcctgcaggaatggcacagctgacaaatatggaccccccccgaaagatccccaaaggttactacgattgtggtgatgggtag

SEQ ID NO: 310221 - DNA, 333 bp, Artificial Sequence
  derived and/or modified sequence
atggagggcaaggccaagtacatcctgcccacagagaccatctacgtgggggagatgaaggatggcatgtttcatggagagggcaccctgtacttccccagcggcagccagtatgatgccatctgggagaatggcctggccatcaagggcacctacaccttcagtgatggcctgcactatgatgagaagaactggcactactgtgatggctatgaccggcgcttctacacagagatcctgaatggcctgaagccagctggcatggcccagctgaccaacatggacccccccaggaagatccccaagggctactatgactgtggagatggatag

SEQ ID NO: 310222 - DNA, 333 bp, Artificial Sequence
  derived and/or modified sequence
atggagggcaaggccaagtacatcctgcccaccgagaccatctacgttggtgagatgaaggacggaatgtttcacggcgagggcacgctgtattttccttctggctcccagtatgacgctatttgggagaatggactcgcaattaagggaacatatacattctccgatggactgcactacgatgagaagaactggcactactgcgatggttatgacaggaggttttataccgagatattaaatggccttaaacctgcaggtatggctcagctaacaaacatggaccccccccggaaaattccaaaaggttactatgattgcggggacgggtag

SEQ ID NO: 310223 - DNA, 333 bp, Artificial Sequence
  derived and/or modified sequence
atggagggaaaggcaaagtacatccttcccactgagacaatttacgtgggcgaaatgaaggatggaatgtttcacggggaaggaacactatacttcccgtcgggctcccaatatgatgcgatctgggaaaatgggctcgccatcaaggggacctatacgttctctgacgggctgcactatgacgagaaaaattggcactactgtgatgggtacgatcgcagattctatacggagatactgaacggattgaagccggctggtatggctcagctgaccaatatggaccctccaagaaagattccgaaggggtattacgactgcggcgacgggtag

SEQ ID NO: 310224 - DNA, 1323 bp, Artificial Sequence
  derived and/or modified sequence
gaggcggaggcgagcgaacagagggagggacccgcccgccgcgccccggccgctgggcatgtgtgtccgcaggcgcccgacgctgccgatgtcccggggctgagccgcgcccaggtgtcccggacagtgcgtgcgagcgtgtgtgtccgcgcaggcgagcaccgcgccggccctgagcctcccgctcgctccccacggccgcggtgcatgttcgcctcctgccactgtgtgccgagaggcaggaggaccatgaaaatgatccactttcggagctccagcgtcaaatcgctcagccaggagatgagatgcaccatccggctgctggacgactcggagatctcctgccacatccagagggaaaccaaagggcagtttctcattgaccacatctgcaactactacagcctgctggagaaggactactttggcattcgctatgtggacccagagaagcaaaggcactggcttgaacctaacaagtccatcttcaagcaaatgaaaactcatccaccatacaccatgtgctttagagtgaaattctacccacatgaacccttgaagattaaagaagagctcacaagataccttttataccttcagattaaaagggacatttttcatggccgcctgctgtgctccttttctgatgctgcctacctgggtgcctgtattgttcaagctgagcttggtgattacgatcctgatgagcatcctgagaattacatcagtgagtttgagattttccccaagcagtcacagaagctggaaagaaaaatagtggaaattcataaaaatgaactcagggggcagagcccaccagttgctgaatttaacttgctcctgaaagctcacactttggaaacctacggggtggatcctcacccatgcaaggattcaacaggcacaacaacatttttaggattcacagctgcaggctttgtggtctttcagggaaataagagaatccatttgataaaatggccagatgtctgcaaattgaagtttgaagggaagacattttatgtgattggcacccagaaggagaaaaaagccatgttggcattccatacttcaacaccagctgcctgcaaacatctttggaagtgtggagtggaaaaccaggccttttataagtatgcaaaatccagtcagatcaagactgtatcaagcagcaagatattttttaaaggaagtagatttcgatatagtgggaaagttgccaaagaggtggtggaggccagttccaagatccagagggagcctcctgaggtgcacagatgtgtacagaagaaaatttgttcctgctttggggtgacttggtga

SEQ ID NO: 310225 - DNA, 804 bp, Artificial Sequence
  derived and/or modified sequence
atgtgctttcgggtgaagttctatccccacgagccgctgaaaataaaagaggagctaacaaggtatctcctttacttacagatcaagcgcgatattttccacggcaggctactgtgtagcttttccgacgctgcatatctgggtgcctgtatcgtgcaggctgagctgggagattatgatccggatgaacacccagaaaattacatcagtgaatttgaaatatttccaaagcagtcgcagaagctcgagcggaagatcgtggagatccacaagaatgagctccgaggacagtcaccccccgtcgccgagttcaacttgctgttgaaggctcacactctggaaacctacggcgtggatccacatccttgcaaagacagcacgggcactacaactttccttggatttactgctgctgggtttgtcgtctttcaggggaacaagcggatccacctcattaagtggccagacgtctgcaagctgaagtttgaaggcaaaaccttctacgtgataggaacccaaaaagagaagaaagccatgctggcctttcacacatcaacgcctgccgcatgtaaacacctgtggaagtgcggcgtggagaaccaagcattttacaagtatgcgaaatcaagtcagatcaagaccgtgtcctcctctaaaatcttcttcaagggcagtcgctttcggtatagcgggaaggtcgccaaggaggtagtagaagccagcagcaaaatccaacgggagcctcctgaggtccacagatgcgttcagaagaagatttgttcgtgctttggggttacctggtag

SEQ ID NO: 310226 - DNA, 804 bp, Artificial Sequence
  derived and/or modified sequence
atgtgcttccgggtgaagttctacccccatgagcccctgaagatcaaggaggagctgacccgctacctgctgtacctgcagatcaagagggacatcttccacggccgcctgctgtgcagcttcagtgatgctgcctacctgggcgcctgcatcgtgcaggccgagctgggggactatgaccctgatgagcaccctgagaactacatcagcgagtttgagatcttccccaagcagagccagaagctggagaggaagatcgtggagatccacaagaatgagctgcggggccagagcccccctgtggccgagttcaacctgctgctgaaggcccacaccctggagacctacggcgtggacccccacccctgcaaggacagcacaggcaccaccaccttcctgggcttcaccgctgctggctttgtggtgttccagggcaacaagaggatccacctgatcaagtggccagatgtgtgcaagctgaagtttgagggcaagaccttctacgtgattggcacccagaaggagaagaaggccatgctggccttccacaccagcaccccagctgcctgcaagcacctgtggaagtgtggggtggagaaccaggccttctacaagtatgccaagagcagccagatcaagacagtgagcagcagcaagatcttcttcaagggcagccgcttccgctacagcggcaaggtggccaaggaggtggtggaggccagcagcaagatccagcgggagcccccagaggtgcaccgctgtgtgcagaagaagatctgcagctgctttggagtgacctggtag

SEQ ID NO: 310227 - DNA, 804 bp, Artificial Sequence
  derived and/or modified sequence
atgtgcttccgggtgaagttctacccccacgagcccctgaagatcaaggaggagctgacccgttatctattgtacctgcaaataaaaagagatatatttcacgggaggctcctgtgctccttctctgatgcagcctacctgggcgcctgtattgtccaggcggagctcggggactatgatcccgatgagcacccggaaaattatattagtgagtttgagattttccccaagcagtcccagaaactggagcgcaagatagtggagattcataaaaatgagctgagaggacagagcccgcccgttgcagagttcaacctgctgctgaaggcccacacattggagacctacggggttgatccccatccttgtaaagacagcactggaaccacgacgtttctgggatttacagccgccggattcgttgtcttccaggggaacaaacgaattcacctgattaaatggcccgacgtgtgcaagttgaaatttgagggcaaaaccttctatgtgatcggcacacagaaggagaaaaaagctatgctggccttccatacatcgacacccgctgcctgtaaacatttatggaaatgcggcgtggaaaatcaggccttctataagtatgccaagagctctcagataaaaacggtgtcctcgagtaagatcttcttcaaaggtagtaggtttcggtacagcggaaaagtggctaaagaggtggtggaggcttcctcaaagatccagcgagagccgccagaagtgcatcggtgcgttcaaaagaaaatctgttcatgctttggggttacgtggtag

SEQ ID NO: 310228 - DNA, 804 bp, Artificial Sequence
  derived and/or modified sequence
atgtgcttcagagttaagttctacccccacgagccgctgaagatcaaggaagagctgacacgatatctgctttacctccaaatcaaaagagacatatttcacggcaggctcctgtgtagcttttcagatgcagcatatctgggcgcatgtattgtgcaggctgagctgggggattacgacccagatgagcaccccgaaaattacatcagcgagtttgaaatatttcccaagcagtcccagaaactggagcgcaaaattgtggaaatacataagaacgaactccgaggccagtcccctccagtggctgagtttaatctactcctgaaggcccatactttggaaacatatggagtggaccctcacccatgcaaggatagtacaggcaccacaacgtttcttggctttactgccgctggtttcgtggtcttccaggggaataagcgtattcatcttataaaatggcctgatgtctgtaagttgaaatttgaaggcaagactttttacgtgatcggtacccaaaaagaaaagaaagcaatgctggcctttcatacttcaactcctgccgcttgtaaacatctctggaaatgtggtgtggaaaaccaggccttctacaagtacgccaaaagttcccagataaaaaccgtttccagtagcaagatcttttttaagggttctcggttcaggtactcagggaaagtggcaaaagaagtggtggaggccagcagcaaaattcagagagagccaccagaggtccaccgatgcgttcaaaagaagatctgttcatgtttcggcgtcacatggtag

SEQ ID NO: 310229 - DNA, 804 bp, Artificial Sequence
  derived and/or modified sequence
atgtgcttcagagtgaagttctacccccacgagcccctgaagatcaaggaggagctgaccagatacctgctgtacctgcagatcaagagagacatcttccacggcagactgctgtgcagcttcagcgacgccgcctacctgggcgcctgcatcgtgcaggccgagctgggcgactacgaccccgacgagcaccccgagaactacatcagcgagttcgagatcttccccaagcagagccagaagctggagagaaagatcgtggagatccacaagaacgagctgagaggccagagcccccccgtggccgagttcaacctgctgctgaaggcccacaccctggagacctacggcgtggacccccacccctgcaaggacagcaccggcaccaccaccttcctgggcttcaccgccgccggcttcgtggtgttccagggcaacaagagaatccacctgatcaagtggcccgacgtgtgcaagctgaagttcgagggcaagaccttctacgtgatcggcacccagaaggagaagaaggccatgctggccttccacaccagcacccccgccgcctgcaagcacctgtggaagtgcggcgtggagaaccaggccttctacaagtacgccaagagcagccagatcaagaccgtgagcagcagcaagatcttcttcaagggcagcagattcagatacagcggcaaggtggccaaggaggtggtggaggccagcagcaagatccagagagagccccccgaggtgcacagatgcgtgcagaagaagatctgcagctgcttcggcgtgacctggtag

SEQ ID NO: 310230 - protein, 414 aa, Artificial Sequence
  derived and/or modified sequence
MFSQQQQQQLQQQQQQLQQLQQQQLQQQQLQQQQLLQLQQLLQQSPPQAPLPMAVSRGLPPQQPQQPLLNLQGTNSASLLNGSMLQRALLLQQLQGNLRGYGMASPGLAAPSLTPPQLATPNLQQFFPQATRQSLLGPPPVGVPMNPSQFNLSGRNPQKQARTSSSTTPNRKDSSSQTMPVEDKSDPPEGSEEAAEPRMDTPEDQDLPPCPEDIAKEKRTPAPEPEPCEASELPAKRLRSSEEPTEKEPPGQLQVKAQPQARMTVPKQTQTPDLLPEALEAQVLPRFQPRVLQVQAQVQSQTQPRIPSTDTQVQPKLQKQAQTQTSPEHLVLQQKQVQPQLQQEAEPQKQVQPQVQPQAHSQGPRQVQLQQEAEPLKQVQPQVQPQAHSQPHLPQVLSQQLRGTALPLQVPGPL

SEQ ID NO: 310231 - DNA, 1245 bp, Artificial Sequence
  derived and/or modified sequence
atgttcagccagcagcaacagcagcagcttcagcagcagcaacagcagctgcagcagctgcaacagcagcagttacagcagcagcagctgcagcaacagcaactattacaactccagcaactgctccagcagagtccccctcaagcaccactgccgatggctgtttcacggggcctccccccgcagcagcctcaacagccccttctgaatttgcaggggaccaactccgcatctctcctgaacgggagcatgctacagagagccctactgctgcaacaactgcagggcaacctgaggggttatggcatggcatccccaggattagctgccccgtccctcacaccgccccaactggctacccctaatctccaacaattttttcctcaagccacaaggcaatctctccttggacctccccccgttggtgtccccatgaacccgagtcaattcaacttatccggaaggaacccacagaaacaggcccgcacctcatcgtccacaaccccgaaccgcaaggactcgtcatcccagacaatgccagttgaggataaaagtgatccccctgagggatcagaagaggcagctgagccaagaatggatacaccagaagaccaagacctgcccccatgtccagaggacatcgccaaggagaagaggacccctgccccagaacctgagccatgtgaagcttctgagcttccagccaaacgcctgcgaagcagcgaggagcctaccgaaaaagaaccaccaggacaactgcaggtgaaagctcagccacaggctcgcatgaccgtcccaaagcagacacagaccccagacttgctgccagaagcactggaagcacaggtacttccccgctttcagccccgggtgctacaggtgcaggcacaggtgcaaagccaaacacagcccaggatccctagcacagatacacaagtgcagcctaaactccagaaacaggctcagacccagacctctcccgaacacctggtgctacagcaaaaacaggtgcagccacagctgcagcaggaagccgagccccagaagcaggtccagccgcaggtgcagccccaagcgcactcccaaggccctcgtcaagttcagctgcagcaagaagcagagcctctgaagcaggtgcaaccgcaggtccagccccaagctcatagtcagccccatcttccacaagttctttcgcagcagctgagaggcacagctctgcccttacaggtgcccgggccactctag

SEQ ID NO: 310232 - DNA, 1245 bp, Artificial Sequence
  derived and/or modified sequence
atgttcagccagcagcagcagcagcagctgcagcagcagcagcagcagctgcagcagctgcagcagcagcagctgcagcagcagcagctgcagcagcagcagctgctgcagctgcagcagctgctgcagcagagccccccccaggcccccctgcccatggctgtgtcccggggcctgcccccccagcagccccagcagcccctgctgaacctgcagggcaccaacagcgccagcctgctgaatggctccatgctgcagagggccctgctgctgcagcagctgcagggcaacctgcggggctacggcatggccagccctggcctggccgcccccagcctgaccccaccccagctggccacccccaacctgcagcagttcttcccccaggccacccggcagagcctgctgggccccccacctgtgggcgtgcccatgaaccccagccagttcaacctgtctggaagaaacccccagaagcaggcccggaccagcagcagcaccacccccaacaggaaggacagcagcagccagaccatgcctgtggaggacaagagtgaccccccagagggcagcgaggaggccgctgagcccaggatggacaccccagaggaccaggacctgcccccctgcccagaggacatcgccaaggagaagaggaccccagcccctgagcctgagccctgtgaggccagcgagctgcctgccaagaggctgcggagcagcgaggagcccacagagaaggagcccccaggccagctgcaggtgaaggcccagccccaggccaggatgacagtgcccaagcagacccagaccccagacctgctgcctgaggccctggaggcccaggtgctgccccgcttccagccccgggtgctgcaggtgcaggcccaggtgcagagccagacccagccccgcatccccagcacagacacccaggtgcagcccaagctgcagaagcaggcccagacccagaccagccctgagcacctggtgctgcagcagaagcaggtgcagccccagctgcagcaggaggccgagccccagaagcaggtgcagccccaggtgcagccccaggcccacagccagggcccccggcaggtgcagctgcagcaggaggccgagcccctgaagcaggtgcagccccaggtgcagccccaggcccacagccagccccacctgccccaggtgctgagccagcagctgcggggcacagccctgcccctgcaggtgcccggccccctgtag

SEQ ID NO: 310233 - DNA, 1245 bp, Artificial Sequence
  derived and/or modified sequence
atgttcagccagcagcagcagcagcagctgcagcagcagcagcagcaattgcagcagctgcaacagcaacagctccaacagcagcagctgcaacagcagcagcttctgcagctgcaacagttgctgcagcagtcacccccccaagcaccattacctatggctgtgtctagaggcctgccacctcaacagccccagcaacctttgcttaacctgcagggaactaatagcgcgtccttgttgaacggcagtatgctgcagagggctttgctgctgcagcagctgcagggcaatttgaggggctatggaatggcttcccccggcctggcggcacccagcctgacgcctcctcagcttgcgaccccaaacctccagcagttttttcctcaagcaacccgtcagagtttgctaggtcctccacctgtcggcgtaccaatgaacccttcccagttcaatctgtcggggcgcaatccgcagaagcaagccaggaccagtagttccacaacaccaaaccggaaagatagttcttctcagacaatgcctgtggaggacaagagtgaccctccggaaggctctgaggaggcggctgaaccacgcatggacactcccgaggaccaggatctccccccctgccctgaagacattgcaaaggagaaaaggaccccggcccccgagcctgaaccttgtgaggcttcggagttgccagcaaagagactcagaagttccgaggagcctaccgagaaagaaccccccggccagcttcaggtcaaagcacagccacaggccagaatgactgtccctaagcagactcagactccggatctcctgccggaagccctcgaggcacaggtgctgccaaggttccaacctcgggtgctgcaggtgcaggctcaagtgcagtcacaaacacaacccaggatcccttcaacagacacacaggtgcagcccaaactccaaaaacaggcccagacccagacgagtcccgaacatttggttctccagcaaaaacaggtgcagcctcaactccagcaagaagccgagccccagaaacaggtccagcctcaagtccagccccaggcacatagccagggtcctagacaggtgcaactgcagcaggaggcggaacccctgaaacaggtccagccgcaggtccagccccaagcacacagccagccacacctaccacaagtcctgagtcagcagcttagaggtacggcactgcctctgcaggtaccagggcccctgtag

SEQ ID NO: 310234 - DNA, 1245 bp, Artificial Sequence
  derived and/or modified sequence
atgttctcacaacagcagcaacaacagctgcaacaacagcagcaacagttgcagcaactccagcagcagcagctgcagcaacaacagctacagcagcaacaactgctccaactgcagcagctgctgcagcagagcccccctcaggccccactgcccatggcggttagtaggggcctgccacctcagcaaccgcagcagccattacttaacctgcaaggcacaaactccgcctccttactgaatggctcaatgttgcagcgggcattgctgttgcaacagctgcagggcaatctcagagggtatggcatggctagccctgggctagcggcacctagtcttaccccacctcagttggcaacacctaatttacaacagttcttccctcaggcaacacggcagtctcttctcgggccacctcctgttggagttcccatgaatcccagtcaattcaacctgtcaggcaggaacccccagaagcaggccaggacttccagcagcacgacgcccaatagaaaggactcttcctctcaaaccatgcctgtggaggacaagtcggaccccccagagggtagcgaggaggctgccgagcctcgtatggatacacccgaggaccaagatctgcctccatgcccagaggatattgcaaaagagaagcggacaccagctcctgaacccgaaccatgtgaggcctccgagctgcctgccaagaggctgaggtccagtgaggagcctaccgagaaagagccccctggtcaacttcaggtaaaagcccaaccccaggcaaggatgactgtccccaaacagacacaaacccctgaccttctacctgaggccctggaggcacaagttcttccacggttccaacctagagtgctccaggtgcaagcccaggtccaatcccagacacagcctcggatcccatccacagatactcaggtgcagccaaagctgcagaagcaagctcagacacagacgtcgccagagcatctggttctgcaacagaaacaggttcagccccagctgcagcaggaggcagagccacaaaaacaggttcaaccgcaggtgcagcctcaggcacattcacagggccctagacaggtccagctgcagcaagaggctgagccgcttaagcaggttcagccccaagtccagccacaggcccacagtcagccacacctcccacaggtcctctctcagcagttgaggggtacggctctacctctccaggttcctggccctttgtag

SEQ ID NO: 310235 - DNA, 1737 bp, Artificial Sequence
  derived and/or modified sequence
cttacgagcccacaggccccggagtagcagcggggaggccgggagcccgcgggccggagccgcccggccgaggcgtgggggctgcggggccggcccatccgtgggggcgacttgagcgttgagggcgcgcggggaggcgagccaccatgttcagccagcagcagcagcagcagctccagcaacagcagcagcagctccagcagttacagcagcagcagctccagcagcagcaattgcagcagcagcagttactgcagctccagcagctgctccagcagtccccaccacaggccccgttgcccatggctgtcagccgggggctccccccgcagcagccacagcagccgcttctgaatctccagggcaccaactcagcctccctcctcaacggctccatgctgcagagagctttgcttttacagcagttgcaaggtaacctccgaggctatggcatggcatccccaggcctcgcagcccccagcctcacacccccacaactggccactccaaatttgcaacagttctttccccaggccactcgccagtccttgctgggacctcctcctgttggggtccccatgaacccttcccagttcaacctttcaggacggaacccccagaaacaggcccggacctcctcctctaccacccccaatcgaaaggattcttcttctcagacaatgcctgtggaagacaagtcagaccccccagaggggtctgaggaagccgcagagccccggatggacacaccagaagaccaagatttaccgccctgcccagaggacatcgccaaggaaaaacgcactccagcacctgagcctgagccttgtgaggcgtccgagctgccagcaaagagattgaggagctcagaagagcccacagagaaggaacctccagggcagttacaggtgaaggcccagccgcaggcccggatgacagtaccgaaacagacacagacaccagacctgctgcctgaggccctggaagcccaagtgctgccacgattccagccacgggtcctgcaggtccaggcccaggtgcagtcacagactcagccgcggataccatccacagacacccaggtgcagccaaagctgcagaagcaggcgcaaacacagacctctccagagcacttagtgctgcaacagaagcaggtgcagccacagctgcagcaggaggcagagccacagaagcaggtgcagccacaggtacagccacaggcacattcacagggcccaaggcaggtgcagctgcagcaggaggcagagccgctgaagcaggtgcagccacaggtgcagccccaggcacattcacagccgcatctgccacaagttctatcacagcaactcaggggcacagctctcccactgcaagtccctgggccactttgagaacctgcagaaatacaaggcggccaagaaccccagccccaccacccgacctgtgagccgccggtgcgcaatcaacgcccggaacgctttgacagccctgttcacctccagcggccgcccaccctcccagcccaacacccaggacaaaacacccagcaaggtgacggctcgaccctcccagcccccactacctcggcgctcaacccgcctcaaaacctgatagagggacctccctgtccctggcctgcctgggtccagatctgctaatgctttttaggagtctgcctggaaactttgacatggttcatgtttttactcaaaatccaataaaacaaggtagtttggc

SEQ ID NO: 310236 - DNA, 1245 bp, Artificial Sequence
  derived and/or modified sequence
atgttcagccagcagcagcagcagcagctgcagcagcagcagcagcagctgcagcagctgcagcagcagcagctgcagcagcagcagctgcagcagcagcagctgctgcagctgcagcagctgctgcagcagagccccccccaggcccccctgcccatggccgtgagcagaggcctgcccccccagcagccccagcagcccctgctgaacctgcagggcaccaacagcgccagcctgctgaacggcagcatgctgcagagagccctgctgctgcagcagctgcagggcaacctgagaggctacggcatggccagccccggcctggccgcccccagcctgacccccccccagctggccacccccaacctgcagcagttcttcccccaggccaccagacagagcctgctgggccccccccccgtgggcgtgcccatgaaccccagccagttcaacctgagcggcagaaacccccagaagcaggccagaaccagcagcagcaccacccccaacagaaaggacagcagcagccagaccatgcccgtggaggacaagagcgacccccccgagggcagcgaggaggccgccgagcccagaatggacacccccgaggaccaggacctgcccccctgccccgaggacatcgccaaggagaagagaacccccgcccccgagcccgagccctgcgaggccagcgagctgcccgccaagagactgagaagcagcgaggagcccaccgagaaggagccccccggccagctgcaggtgaaggcccagccccaggccagaatgaccgtgcccaagcagacccagacccccgacctgctgcccgaggccctggaggcccaggtgctgcccagattccagcccagagtgctgcaggtgcaggcccaggtgcagagccagacccagcccagaatccccagcaccgacacccaggtgcagcccaagctgcagaagcaggcccagacccagaccagccccgagcacctggtgctgcagcagaagcaggtgcagccccagctgcagcaggaggccgagccccagaagcaggtgcagccccaggtgcagccccaggcccacagccagggccccagacaggtgcagctgcagcaggaggccgagcccctgaagcaggtgcagccccaggtgcagccccaggcccacagccagccccacctgccccaggtgctgagccagcagctgagaggcaccgccctgcccctgcaggtgcccggccccctgtag

SEQ ID NO: 310237 - DNA, 1038 bp, Artificial Sequence
  derived and/or modified sequence
atgaacgcgccattggatggtctgtccgtcagttcgtcaagtaccgggtccctgggttcggcagcaggcgcgggaggcggaggaggtgccggacttaggctgctgtctgcgaacgtcaggcagctgcaccaggcattgactgcgctcctgtcagaggcagagagagaacagtttacacattgcctcaatgcctaccacgctcggagaaacgtgttcgacctggtgcgaaccttgagagtgctactggactcacctgtgaagcgaaggcttttgcctatgctgagactcgtaattcctcgctcggaccagctgctgtttgaccagtatacggctgagggcctgtacctccctgctactaccccttaccgccagcccgcttgggggggtccagacagcgccgggcccggggaggtgagactggtctccctgcgacgcgctaaggcacatgaagggctcggattttccatccgtggtggcagtgaacatggggtgggcatctatgtaagtctggttgaacctggatcgcttgccgagaaagagggactgagggtcggtgaccagattctccgggtgaacgacaagagtctggccagagtcacccacgccgaggccgttaaggctttgaaggggagcaagaaacttgtgctgtccgtttactctgctggcaggataccaggcgggtatgtgacaaaccatatctatacatgggttgacccgcaaggtaggagcatctcaccacctagcggactgcctcagcctcacggcggcgcgttgaggcaacaagaaggcgaccgccgctccactctccatctcttgcagggtggagatgaaaagaaggtatcgggcgtggggaaggggggccagcccctgcgccaccggatactgccacccaatcccgagcagcagagctgtctcgaagctgcaaggcgggggtggttctgtccgggcagcgtcttcccacaggtgtgcaccgaagggtggtgtttcttcttcgctttcttatttgatctgtgctctgtatgctataacactggctag

SEQ ID NO: 310238 - DNA, 1038 bp, Artificial Sequence
  derived and/or modified sequence
atgaatgcccccctggatggcctgtctgtgagcagcagcagcacaggcagcctgggcagcgctgctggggccggcggcggcggcggggccggcctgcggctgctgagcgccaacgtgcggcagctgcaccaggccctgacagccctgctgtctgaggccgagcgggagcagttcacccactgcctgaatgcctaccacgccaggagaaatgtgtttgacctggtgaggaccctgcgggtgctgctggacagccctgtgaagaggcggctgctgcccatgctgcggctggtgatccccaggagtgaccagctgctgtttgaccagtacacagctgagggcctgtacctgcctgccaccaccccctaccggcagcctgcctggggcggccctgacagcgctggccctggagaggtgcggctggtgtccctgcggcgggccaaggcccacgagggcctgggcttcagcatccggggcggcagcgagcacggcgtgggcatctacgtgtccctggtggagcccggcagcctggccgagaaggagggcctgcgggtgggggaccagatcctgcgggtgaatgacaagagcctggcccgggtgacccacgccgaggccgtgaaggccctgaagggcagcaagaagctggtgctgtctgtgtacagcgctggccgcatccctgggggctacgtgaccaaccacatctacacctgggtggacccccagggccgcagcatcagcccccccagcggcctgccccagccccacggcggggccctgcggcagcaggagggggacagaagaagcaccctgcacctgctgcagggcggagatgagaagaaggtgtctggagtgggcaaaggaggccagcccctgcggcaccgcatcctgccccccaaccctgagcagcagagctgcctggaggccgcccggcggggctggttctgccccggctctgtgttcccccaggtgtgcacagagggctggtgcttcttctttgccttcctgtttgacctgtgcagcgtgtgctacaacacaggatag

SEQ ID NO: 310239 - DNA, 1038 bp, Artificial Sequence
  derived and/or modified sequence
atgaacgcccccctggacggcctgagcgtgagcagcagcagcaccggcagtttaggcagtgccgccggagcagggggtggaggaggggctgggcttagacttttaagcgcgaatgttaggcagctacaccaggctctgactgctcttctgagtgaggcagagagggagcaattcacccactgtctgaacgcctaccacgcgaggcgcaatgtgttcgacctggttcgaacgctgcgcgtcctcttggattcccctgtgaagaggaggctgcttccaatgctgcggcttgtaattcctaggtccgaccagctactctttgatcagtatacagccgaaggcctctatctgcccgccactaccccttaccgacagccagcgtggggagggccagactctgccggaccaggcgaagtccgtctggtctcattaagacgtgccaaagcacatgaagggctaggtttctccattcgggggggaagtgagcatggggtgggtatctacgtgagcctggttgaaccaggctccctggcagaaaaggaaggtctccgcgtgggggaccagattctgcgggtaaacgataagagcctcgctagagtgacacatgcggaggccgtgaaggccttgaaggggtcaaagaagctggtgctgtccgtctacagcgccggccgcatcccagggggctatgttacgaatcatatttacacctgggtcgacccacaggggcgctccatctccccgcccagcggccttcctcagcctcatgggggggctctgcgccagcaggagggcgatcgtaggagcacccttcatttattgcagggaggcgacgagaagaaggtgtctggtgtcggcaaagggggacagcccctgcgccatcgtattttgccgccaaatcccgagcagcagtcatgcctggaggctgcaagaaggggctggttctgcccgggatctgtttttcctcaagtatgcacggaggggtggtgcttcttcttcgcctttctctttgacctatgcagtgtgtgctacaatacaggatag

SEQ ID NO: 310240 - DNA, 1038 bp, Artificial Sequence
  derived and/or modified sequence
atgaatgctcccttagacggtcttagcgtttctagtagttccaccggctccctgggatcagctgccggtgctgggggtgggggtggcgctggcctgaggctcctgtcagcaaatgtccgacaactacatcaagccctgactgctctgctgagcgaagccgaacgggagcagtttactcattgcttgaacgcctaccatgcgaggcgcaacgtctttgacctggtgcgaacactcagggtgctgctggacagcccagtgaaaaggcggctactgcccatgctgcggcttgtgatcccacggagtgatcagttgctttttgaccagtatacagccgagggattatatttaccagctaccaccccctacaggcagcccgcatggggtggaccggacagtgctggacccggagaagtcaggctggtgagtttgcggagagctaaggcccatgagggcctgggatttagtattcgcggaggttccgagcacggcgtggggatctacgtgagcctggtggaacccggttctctggcagagaaagagggcctgcgggtgggagaccagatacttcgtgtaaatgataaatctctcgctagagttactcacgccgaggctgtaaaggccttaaaggggtcaaaaaaacttgtcctgagcgtttatagcgcaggacgcataccaggcggatacgtaaccaatcacatctatacctgggtggatccccagggaaggagcatttcaccaccctcaggcttgccacagccccacggaggcgcactgagacagcaggagggcgatagacgctctaccctgcacctactgcaggggggtgacgaaaagaaggtatccggggtgggcaaggggggacagccattgaggcacagaatcctgccccctaaccccgaacagcaatcttgcctcgaggctgccagacggggatggttctgtcccggatccgttttcccacaggtttgcacggagggctggtgcttcttcttcgccttcctctttgacctttgttccgtatgctataacacaggctag

SEQ ID NO: 310241 - DNA, 1038 bp, Artificial Sequence
  derived and/or modified sequence
atgaacgcccccctggacggcctgagcgtgagcagcagcagcaccggcagcctgggcagcgccgccggcgccggcggcggcggcggcgccggcctgagactgctgagcgccaacgtgagacagctgcaccaggccctgaccgccctgctgagcgaggccgagagagagcagttcacccactgcctgaacgcctaccacgccagaagaaacgtgttcgacctggtgagaaccctgagagtgctgctggacagccccgtgaagagaagactgctgcccatgctgagactggtgatccccagaagcgaccagctgctgttcgaccagtacaccgccgagggcctgtacctgcccgccaccaccccctacagacagcccgcctggggcggccccgacagcgccggccccggcgaggtgagactggtgagcctgagaagagccaaggcccacgagggcctgggcttcagcatcagaggcggcagcgagcacggcgtgggcatctacgtgagcctggtggagcccggcagcctggccgagaaggagggcctgagagtgggcgaccagatcctgagagtgaacgacaagagcctggccagagtgacccacgccgaggccgtgaaggccctgaagggcagcaagaagctggtgctgagcgtgtacagcgccggcagaatccccggcggctacgtgaccaaccacatctacacctgggtggacccccagggcagaagcatcagcccccccagcggcctgccccagccccacggcggcgccctgagacagcaggagggcgacagaagaagcaccctgcacctgctgcagggcggcgacgagaagaaggtgagcggcgtgggcaagggcggccagcccctgagacacagaatcctgccccccaaccccgagcagcagagctgcctggaggccgccagaagaggctggttctgccccggcagcgtgttcccccaggtgtgcaccgagggctggtgcttcttcttcgccttcctgttcgacctgtgcagcgtgtgctacaacaccggctag

SEQ ID NO: 310242 - DNA, 1718 bp, Artificial Sequence
  derived and/or modified sequence
agttcgcaaagtccgggcttgcggccgggcggcgcagaggcgcggaggctccccgggcggctgcatcccggggctgccccggacatgccccgcaccccttgtcggacgcccgcgccgcttcaccggctgccactccccggagtgctctgggactagagcgccctccgccccaacttctgactttggggtcccccagccctagaggaacgggcgcccggctgggggagccccgggcatggtgtgacggggcagtcaggtcagctttgcggcgcccccaaactccagccacccgtcgtctccgtgccctccagaatgtagctgctgaccccgcgccccccggactccagcagcagtctccgccacctccgggctccagcagccaactcttgtgtctctcaggaacccgccgacgtctccgcgtcccccggattccaggttcgcgacccccgccgtcttcgcgcctccgggactctagcagcggtctccgcgaccccctaggatccagccactgtacccgtgctccccaaacccaggctccagccgtcgtctccgcgctcccggggatccagctgtcgcgccagtacccgcgaggacagcggcaccgcccacaccccgcgcgctcagagcccggccgggcctcggcgtggagatgaacgcgccgctggacggcctgtcggtgagctcgtcctccaccggctcgctgggctcggcggccggggcgggcggcggcgggggcgcggggctgcggttactgtctgccaacgtgcgccagctgcaccaagcgctgaccgcgctgctgagcgaggcggagcgggagcagttcacccactgcctgaacgcttaccacgcgcgccgcaacgtcttcgacctggtgcgcaccctgcgcgtgctgctggacagtccggtcaagcggcgcctgctgcccatgcttcgtctggtcatcccgcgctccgaccagctgctcttcgaccaatacacggccgagggcctctacctgcccgccaccaccccctacaggcagcccgcctggggcggccccgacagcgcggggccaggggaggtgcgcctggtgagtttgcggcgtgccaaggcccacgagggcttgggcttcagcatccgtgggggctcggagcacggcgtgggcatctacgtgtctctggtggaaccaggctctctagctgagaaggaaggactgcgggtcggggaccagattctgcgcgtcaacgacaaatccctggcccgggtgacccacgcggaggccgtcaaggctctgaagggctccaagaagctggtgctgtctgtgtactcagcagggcgcatccctgggggctacgtcaccaaccacatctacacctgggtggacccgcagggccgcagcatctccccaccctcgggcctgccccagccccacggtggtgccctgaggcagcaggagggtgaccggaggagcaccctgcacctcctgcaaggaggggatgagaaaaaggtgagtggggtggggaaaggaggccagcctctcagacaccgtattctccctccgaacccagaacagcagagctgcttggaggccgcaagaagaggctggttctgtccaggctctgtcttccctcaagtctgtactgaagggtggtgttttttctttgcttttctttttgacctgtgtagtgtatgttataatacaggctaagctgccacaataaaagagcttaaatactgtg

SEQ ID NO: 310243 - DNA, 438 bp, Artificial Sequence
  derived and/or modified sequence
atggtgggatctagaagggtaaaagcccagacgttcgcagagcggagagaaaggagcttcagtagaagttggtctgatccaacgcccatgaaagccgacacttcgcatgatagcagggattcttccgatctgcagagcagccactgtaccttagacgaggctttcgaagatctcgattgggacactgagaagggcttagaggcagtggcttgtgataccgagggcttcgtgccaccgaaagttatgctgatttcttctaaagtgccaaaagccgagtatatcccaactatcatccggagggacgatcccagcataatccccattttatatgtttcccctgcccccggccttccacccaccgatgccctactacggccccaccctgggcctgcacctgccccacaggtcccaagggtgctatggcgatgctggctttag

SEQ ID NO: 310244 - DNA, 585 bp, Artificial Sequence
  derived and/or modified sequence
atggggcttgggcctctgtcctcatcactgagcccacagttgatatcctccaaagtacccaaggctgagtacattcccacaataatccggcgggacgacccgagtatcatacctatcttgtatgatcacgagcacgctactttcgaggacattctggaggagattgaacgcaaactgaatgtgtaccataaaggcgccaaaatttggaaaatgttgattttctgccagggcggacctggacacctgtatctcctgaaaaataaggtggccacctttgcaaaagtcgagaaggaggaagatatgattcacttttggaagagactatcaagactcatgagtaaggtcaatcccgagccaaacgtcattcacattatggggtgctatatactaggcaaccctaacggggaaaagctttttcagaaccttaggacgctgatgacaccctatcgcgtcacctttgagagccccttagagcttagcgcgcaggggaaacagatgatcgaaacctactttgacttcagactctacagactctggaaatccagacaacactctaaactcctcgattttgatgacgtcttatag

SEQ ID NO: 310245 - DNA, 438 bp, Artificial Sequence
  derived and/or modified sequence
atggtgggcagcagaagagtgaaggcccagacctttgctgagcggcgggagaggagcttcagccgctcctggagcgaccccacccccatgaaggctgacaccagccatgacagccgggacagcagtgacctgcagagcagccactgcaccctggatgaggcctttgaggacctggactgggacacagagaagggcctggaggccgtggcctgtgacacagagggctttgtgccccccaaggtgatgctgatcagcagcaaggtgcccaaggccgagtacatccccaccatcatcagaagagatgaccccagcatcatccccatcctgtatgtgtccccagcccctggcctgcccccaacagatgccctgctgcggccccaccctggccctgccccagccccccaggtgccccgggtgctgtggcgctgctggctgtag

SEQ ID NO: 310246 - DNA, 585 bp, Artificial Sequence
  derived and/or modified sequence
atgggcctgggccccctgagcagcagcctgagcccccagctgatcagcagcaaggtgcccaaggccgagtacatccccaccatcatcagaagagatgaccccagcatcatccccatcctgtatgaccatgaacatgccacctttgaggacatcctggaggagattgaaaggaagctgaatgtgtaccacaagggggccaagatctggaagatgctgatcttctgccagggcggccctggccacctgtacctgctgaagaacaaggtggccacctttgccaaggtggagaaggaggaggacatgatccacttctggaagaggctgagccggctgatgagcaaggtgaaccctgagcccaacgtcatccacatcatgggctgctacatcctgggcaaccccaacggggagaagctgttccagaacctgcggaccctgatgaccccctacagagtgacctttgagagccccctggagctgagcgcccagggcaagcagatgattgagacctactttgacttccggctgtaccgcctgtggaagagccggcagcacagcaagctgctggactttgatgatgtgctgtag

SEQ ID NO: 310247 - DNA, 2888 bp, Artificial Sequence
  derived and/or modified sequence
tctggagttgaaggggagccctggaaggctgtcgcgggaagagcactgggtgggatttgcctttgggtgggaggtggtgccaggagccagggagagcactggcttcccacaccgaaggggaacttccgcaaacacctgcgcatggtcggcagccggagggtgaaggcccagacgttcgctgagcggcgcgagcggagcttcagccggtcctggagcgaccccacccccatgaaagccgacacttcccacgactcccgagacagtaggtgccccgcacaggcccgcccaccttccccagagcctcccctagaccccagacccctgctgggggtcccctgccagggccgctgggctgcgcttttgcactcctgaatcttggtttacctgtttgtgagatggggacgccctcagcatctccgatcgcaaaggcggggctaacaacggccgcggcagtgctggccgggggcgcctgtagggccgtgcccaccgccactcgcaagaggccctcaggggcagggggctgcggtgcccgcccccactccctcccaggcgcccggcggacttggctggagctgatgcctgcacgcgccttccaccggcctcgcaccagggtctcccttcccacatcaggccgctgcccagtggtgtccacaggcctgtcctgccgggctggcggcgacctctgtatggtcctcccacttgcttggaggaccctccgggatggggctttcgggccctgtgggccttggggccatggccaggataggaggtgctgccgggcctgctgtcctggtgaccctcttgcttcccaggcagtgacctgcagagctcccactgcacgctggacgaggccttcgaggacctggactgggacactgagaagggcctggaggctgtggcctgcgacaccgaaggcttcgtgccaccaaaggtcatggtgaggcccagcccgggcagtgctcctctacaccccgagcaggactccgccccaacccgagtccagccagctctgcctgggaccacgcagccttctccagctgcctgggggagggtgtctcacagggctatacccttgggctgcctggcagccagaaggtagcctcatgggggctcccacagccccttggcttttggatgggcctggggcccctgagcagctctttgtctccgcagctcatttcctccaaggtgcccaaggctgagtacatccccactatcatccgccgggatgacccctccatcatccccatcctctacgaccatgagcacgcaaccttcgaggacatccttgaggagatagagaggaagctgaacgtctaccacaagggagccaagatctggaaaatgctgattttctgccagggaggtcctggacacctctatctcctcaagaacaaggtggccacctttgccaaagtggagaaggaagaggacatgattcacttctggaagcggctgagccgcctgatgagcaaagtgaacccagagccgaacgtcatccacatcatgggctgctacattctggggaaccccaatggagagaagctgttccagaacctcaggaccctcatgactccttatagggtcaccttcgagtcacccctggagctctcagcccaagggaagcagatgatcgagacgtactttgacttccggttgtatcgcctgtggaagagccgccagcactcgaagctgctggactttgacgacgtcctgtgaggggcagaggcctccgcccagtcaccatcaggccactccctctgcaccgggacctggggctgggccgcctcgtgctccccgggactgtgtggctccggtctcgcctggagccacttcagggcacctcagacgttgctcaggttccccctgtgggttccggtcctcgctgcacccgtggccgcagaggctgcagtccctgggggccgggaggatcccgccctgtggcccgtggatgctcagcggccaggcactgacctgccatgcctcgcctggaggctcagctgtgggcatccctccatggggttcatagaaataagtgcaatttctacacccccgaaacaattcaaagggaagcagcatttcttgttaactagttaagcactatgctgctagttacagtgtaggcaccccggcccagcagcccagcagcccacatgtgttcaggaccctccctgcccaccccctccctgccgtatcgatcaccagcaccagggtggcccgtgtgcgtggggccagcgtcgccgggctgcccagcctggctctgtctacactggccgagtctctgggtctgtctacactggccgagtctccgactgtctgtgctttcacttacactcctcttgccaccccccatccctgcttacttagacctcagccggcgccggacccggtaggggcagtctgggcagcaggaaggaagggcgcagcgtcccctccttcagaggaggctctgggtggggcctgctccccatccccccaagcccacccagcactctcattgctgctgttgagttcagcttttaccagcctcagtgtggaggctccatcccagcacacaggcctggggcttggcaggggcccagctggggctgggccctgggttttgagaaactcgctggcaccacagtgggcccctggacccggccgcgcagctggtggactgtaggggctcctgactgggcacaggagctcccagcttttgtccacggccagcaggatgggctgtcgtgtatatagctggggcgagggggcaggccccccttgtgcagagccaggggtctgagggcacctggctgtgttcccagctgagggagggctggggcgggggccgggcttggaacgatgtacgataccctcatagtgaccattaaacctgatcctccaccgcg

SEQ ID NO: 310248 - DNA, 438 bp, Artificial Sequence
  derived and/or modified sequence
atggtgggcagccggcgggtgaaggcccagaccttcgccgagcggcgggaacggtctttttcccgcagctggagtgaccctacgcccatgaaggccgatactagtcatgactccagggattcatctgacctgcagtcatcccattgcactctggatgaagctttcgaggacttggattgggacacagaaaagggcctggaggccgtggcatgcgatactgagggattcgttccacccaaggtgatgttgatttcgagtaaggtcccaaaagctgaatatattcctacaatcatcaggcgggatgatccttcaatcattcccatcctgtacgtatcccctgctcctggactgcctccaaccgacgcgctcctcagaccccatccagggcctgcccctgctcctcaggtgcccagagtcctctggagatgttggttgtag

SEQ ID NO: 310249 - DNA, 585 bp, Artificial Sequence
  derived and/or modified sequence
atgggcctgggccccctgagcagcagcctgagcccccagctgatctcttctaaagtgcccaaagcagagtacatcccgaccatcatacggcgcgacgacccatctattatccctattctgtacgaccacgagcatgctacattcgaagacatcctcgaggagattgagaggaagctgaatgtgtatcacaagggcgcgaaaatttggaaaatgctgatattctgtcagggaggacccggacatctgtatcttttaaaaaacaaagtcgcaacttttgccaaggtcgaaaaggaagaggatatgatacatttctggaaacggctgtccagacttatgagtaaggttaatcctgaacccaacgttatccatataatgggttgctacatactgggcaatccaaacggggagaaactgtttcagaacttaaggactctaatgaccccatatagggtcacgttcgagtcgcccctcgagctgtctgcacagggaaaacaaatgattgaaacatatttcgactttcgactgtacagattgtggaagagcagacagcattcaaaattactcgactttgacgacgtcctttag

SEQ ID NO: 310250 - DNA, 438 bp, Artificial Sequence
  derived and/or modified sequence
atggtgggctcccggcgagtgaaggcccagacattcgctgagcgcagggagcgctctttttctaggagctggtctgatcctacacccatgaaggcagatacaagtcacgattctcgcgactcgtctgatttacagtctagtcattgcactctggacgaggcgttcgaggaccttgactgggatactgagaagggtctggaggcagtggcgtgtgacacggaaggatttgtgccacctaaggttatgctgatctcctcgaaggtccccaaggcagaatacatccccactataatccgcagagatgacccaagtattatacccattctgtacgtgtctccagccccaggtctgcctcctacagacgccctattgagaccacatcccggaccagcccctgcccctcaggtcccccgtgttctctggcgttgctggttgtag

SEQ ID NO: 310251 - DNA, 585 bp, Artificial Sequence
  derived and/or modified sequence
atgggactcggtcccctgagtagctcgttgtcaccccagctaatcagttccaaggtgcccaaagcagaatacattccaacgataatcagaagggatgatccctcaatcattcccatactgtacgaccacgaacacgcaaccttcgaggacatcctggaggagatcgagcgaaaactgaatgtgtaccataaaggtgctaagatatggaagatgctgattttttgtcagggcggaccaggccatctgtatttactgaagaacaaggtggccacgtttgctaaagtggaaaaagaagaagatatgatacatttctggaagcgcctgtcacgcttgatgagtaaggtcaatcctgagcctaatgtgatccatataatggggtgttatatcctgggaaaccccaatggggaaaaactttttcagaatttaagaacactgatgaccccttatagggtcacattcgaaagtcctctcgaactttcggcacagggcaagcagatgatcgagacctactttgatttcagactttataggctgtggaagtcacgccagcattcgaagttgctggactttgacgatgtgctgtag

SEQ ID NO: 310252 - DNA, 438 bp, Artificial Sequence
  derived and/or modified sequence
atggtgggcagcagaagagtgaaggcccagaccttcgccgagagaagagagagaagcttcagcagaagctggagcgaccccacccccatgaaggccgacaccagccacgacagcagagacagcagcgacctgcagagcagccactgcaccctggacgaggccttcgaggacctggactgggacaccgagaagggcctggaggccgtggcctgcgacaccgagggcttcgtgccccccaaggtgatgctgatcagcagcaaggtgcccaaggccgagtacatccccaccatcatcagaagagacgaccccagcatcatccccatcctgtacgtgagccccgcccccggcctgccccccaccgacgccctgctgagaccccaccccggccccgcccccgccccccaggtgcccagagtgctgtggagatgctggctgtag

SEQ ID NO: 310253 - DNA, 585 bp, Artificial Sequence
  derived and/or modified sequence
atgggcctgggccccctgagcagcagcctgagcccccagctgatcagcagcaaggtgcccaaggccgagtacatccccaccatcatcagaagagacgaccccagcatcatccccatcctgtacgaccacgagcacgccaccttcgaggacatcctggaggagatcgagagaaagctgaacgtgtaccacaagggcgccaagatctggaagatgctgatcttctgccagggcggccccggccacctgtacctgctgaagaacaaggtggccaccttcgccaaggtggagaaggaggaggacatgatccacttctggaagagactgagcagactgatgagcaaggtgaaccccgagcccaacgtgatccacatcatgggctgctacatcctgggcaaccccaacggcgagaagctgttccagaacctgagaaccctgatgaccccctacagagtgaccttcgagagccccctggagctgagcgcccagggcaagcagatgatcgagacctacttcgacttcagactgtacagactgtggaagagcagacagcacagcaagctgctggacttcgacgacgtgctgtag

SEQ ID NO: 310254 - DNA, 1959 bp, Artificial Sequence
  derived and/or modified sequence
atggaggccagctgcctggagctggccctggagggcgagagactgtgcaaggccggcgacttcaagaccggcgtggccttcttcgaggccgccgtgcaggtgggcaccgaggacctgaagaccctgagcgccatctacagccagctgggcaacgcctacttctacctgaaggagcacggcagagccctggagtaccacaagcacgacctgctgctggccagaaccatcggcgacagaatgggcgaggccaaggccagcggcaacctgggcaacaccctgaaggtgctgggcagattcgacgaggccgccgtgtgctgccagagacacctgagcatcgcccaggagcagggcgacaaggtgggcgaggccagagccctgtacaacatcggcaacgtgtaccacgccaagggcaagcagctgagctggaacgccgccaacgccacccaggaccccggccacctgccccccgacgtgagagagaccctgtgcaaggccagcgagttctacgagagaaacctgagcctggtgaaggagctgggcgacagagccgcccagggcagagcctacggcaacctgggcaacacccactacctgctgggcaacttcaccgaggccaccaccttccacaaggagagactggccatcgccaaggagttcggcgacaaggccgccgagagaagagcctacagcaacctgggcaacgcccacgtgttcctgggcagattcgacgtggccgccgagtactacaagaagaccctgcagctgagcagacagctgagagaccaggccgtggaggcccaggcctgctacagcctgggcaacacctacaccctgctgcaggactacgagagagccgccgagtaccacctgagacacctgctgatcgcccaggagctggccgacagagtgggcgagggcagagcctgctggagcctgggcaacgcctacgtgagcatgggcagacccgcccaggccctgaccttcgccaagaagcacctgcagatcagccaggagatcggcgacagacacggcgagctgaccgccagaatgaacgtggcccagctgcagctggtgctgggcagactgaccagccccgccgccagcgagaagcccgacctggccggctacgaggcccagggcgccagacccaagagaacccagagactgagcgccgagacctgggacctgctgagactgcccctggagagagagcagaacggcgacagccaccacagcggcgactggagaggccccagcagagacagcctgcccctgcccgtgagaagcagaaagtaccaggagggccccgacgccgagagaagacccagagagggcagccacagccccctggacagcgccgacgtgagagtgcacgtgcccagaaccagcatccccagagcccccagcagcgacgaggagtgcttcttcgacctgctgaccaagttccagagcagcagaatggacgaccagagatgccccctggacgacggccaggccggcgccgccgaggccaccgccgcccccaccctggaggacagaatcgcccagcccagcatgaccgccagcccccagaccgaggagttcttcgacctgatcgccagcagccagagcagaagactggacgaccagagagccagcgtgggcagcctgcccggcctgagaatcacccacagcaacgccggccacctgagaggccacggcgagccccaggagcccggcgacgacttcttcaacatgctgatcaagtaccagagcagcagaatcgacgaccagagatgccccccccccgacgtgctgcccagaggccccaccatgcccgacgaggacttcttcagcctgatccagagagtgcaggccaagagaatggacgagcagagagtggacctggccggcggccccgagcagggcgccggcggcccccccgagccccagcagcagtgccagcccggcgccagctag

SEQ ID NO: 310255 - DNA, 1959 bp, Artificial Sequence
  derived and/or modified sequence
atggaggcttcatgcctggaacttgccctcgaaggagagcgcctgtgcaaagccggcgattttaaaacaggggtggcctttttcgaggctgccgtgcaggtggggactgaggacctcaaaacgctctcagcaatatattcacaactgggaaatgcctacttctatctgaaagagcacggtagggctcttgagtatcacaagcacgatttattgctagccagaaccattggagaccgtatgggcgaagctaaggctagcggaaacctcggtaacacacttaaggtactgggacgtttcgatgaagcagccgtttgctgtcaacggcatctgtcgatagcccaggagcagggggacaaagtcggagaggcacgcgccctttacaacattggaaatgtgtaccacgctaagggcaagcagctctcttggaatgcagccaatgctacacaggatcctgggcacctccctcccgatgtcagagaaactctctgtaaggctagtgagttttacgagcgaaatctctctctggttaaagagctgggggatagagctgcccagggccgcgcatacgggaatcttggcaacactcactacctgctaggtaacttcacggaagcgacaaccttccacaaggaaagactcgccattgccaaagagttcggcgacaaagcggctgagcgaagagcatattccaatctaggtaatgcccatgtgtttctgggcagattcgacgttgccgccgagtattacaagaaaactctacagctatctcggcagctgagggatcaagctgtggaggctcaggcctgttattctcttgggaatacctacaccttgctgcaggattacgaaagggccgcagaatatcacctgaggcacctcctcatcgctcaggagcttgcagatagagtaggggaaggtagagcttgctggtccttgggaaatgcttatgtatccatgggtcgtcccgctcaggcgttaacattcgccaaaaaacacttgcagatcagtcaggagatcggggaccgacacggcgagctaactgcgcgtatgaatgtagcccagcttcaactcgttttgggacgactgacctccccggccgcctctgagaagccggatctggcaggctatgaagcacagggtgctcgccccaagagaacacagcggctttctgctgaaacctgggatctgttgagactcccactggaaagagaacagaacggcgattctcatcactctggcgattggcgggggccatcccgggattccctgccactacccgtcagaagtagaaagtaccaagaaggtccagacgcagaaagaagacccagagagggaagtcacagtcctttggacagtgccgatgtaagagtgcacgttccaagaacgtccatccctcgagcaccctctagtgatgaggaatgctttttcgatctgttgacaaagttccagtcaagccggatggacgatcagcgatgccctttggacgatggacaagccggtgccgccgaagcgactgccgcacctactcttgaagaccggattgctcagcctagtatgaccgcttccccccagaccgaagaattttttgacctcatagccagctcgcagtccagacggctggacgaccagcgagcttctgtcgggtctctgcctgggttaagaatcacacactctaatgctggacatctgaggggacatggagaaccccaagagcctggagacgactttttcaacatgcttattaaatatcaaagcagccgaattgacgatcagcgatgtccccctccagacgttctcccaaggggcccaaccatgcccgacgaggattttttttcactgatccagcgagtccaggcgaaaaggatggacgaacagcgagtggacttagctggcggaccagagcaaggcgccggcggacccccagaaccacagcagcaatgccagcccggcgccagctag

SEQ ID NO: 310256 - DNA, 3344 bp, Artificial Sequence
  derived and/or modified sequence
atggaggcgtcctgcctagagctggcgctggagggcgagcgtctgtgcaaggcgggcgacttcaagacaggcgtggccttctttgaggctgctgtgcaggtgggcaccgaggacctgaagacactgagtgccatctacagccagctgggcaacgcctacttctacctgaaggagcacggccgggcgctggaataccacaagcatgacctcctgctggcgcggaccatcggtgaccgcatgggggaggccaaggccagtggaaacctgggaaacacactcaaggtcctggggcgcttcgacgaggctgccgtctgctgccagcggcatctgagcatcgcccaagagcagggagacaaggttggggaggcgagggccctctacaacatcgggaacgtgtaccacgccaaaggcaagcaactgtcctggaacgccgcaaacgccacgcaggaccccgggcacctgccgcccgatgtccgagagaccctgtgcaaggcctccgagttctacgagaggaacctgtccctggtgaaggagctgggcgaccgtgcggcgcagggcagggcctacggcaacctgggcaacacccactatttgttggggaacttcacagaggccacgaccttccacaaggagcgcctggccattgctaaggagtttggagacaaggcagccgagaggagggcctacagcaacctggggaacgcccacgtcttcctggggcgctttgacgtggccgccgagtactacaagaagacgctgcaactgtctcggcagctcagggaccaggcagtggaggcgcaggcctgctacagtctgggcaacacctacacgctgctgcaggactacgagcgcgcggccgagtaccacctgcggcacctgctcattgcccaggagctggccgacagagtgggcgagggccgggcgtgctggagcctgggaaatgcctacgtgtccatggggcgcccagcgcaggccctgaccttcgccaagaagcacctgcagatctcccaggagatcggggaccgccatggggagctcacggcccgcatgaacgtggcgcagctgcagctggtgctcggccgcctgaccagcccggcagcctcagagaagcctgacctggccggctatgaggcccagggggccagacccaagaggacgcagaggctgagcgcggagacctgggacctgctgagactccccctggagcgggagcagaatggagacagccaccattcaggggactggcgggggcccagcagggactcgctacccctccccgtgaggagcaggaagtaccaggaaggcccggacgctgagaggaggccccgggagggcagccactccccgctggacagcgccgacgtccgggtgcacgtgccacgcacgagcatcccgagggccccgtcttcggacgaggagtgcttctttgacctgttgaccaagttccagagcagccgcatggacgaccagcgttgtcccctggacgatggccaggccggggctgccgaggccacggccgcccccaccctggaggacaggatcgcccagccctcgatgacggcctcgccccagaccgaggaattcttcgacctcatcgccagctcccagagccgccggctggacgaccagcgggccagcgtgggcagcctgccggggctgcgaatcacccacagcaatgcagggcacctccgaggccacggcgagccccaggagccgggggacgacttcttcaacatgctcatcaagtaccagtcctccaggatcgatgaccagcgctgcccgccacctgacgtactgccccggggccctaccatgccggacgaggacttcttcagcctcattcagagggtgcaggctaagcgcatggacgagcagcgggtggacctcgccgggggcccggagcagggggcaggcggcccgcccgagccccagcagcagtgccagcctggtgcgagctaaggccctgtgcccaccgccaggcccaccctgcccccactcctggacgccggtctcacagtcacagccacgtcctcccgaggccattgccgaggacaggcactgggcatgcagccccacggcctccccgacccagggcgacaggctcaggccaagctgcccgtggtgggagggcgtgcttccatcccgggctggcccccatggccctcagcttcctcccttctgcccctgccgcaggccggacggggccttcggcatgtcggccccgacctggtgctgtcagactcccgcatcctctcccccaagcccttcccgttctgccctgccctgccaaatgtgaaaccctgctgtctcccccaccctccccaaaggtgtctctgagccgcctcttggggccaccaaggacagggccatgttctgtccccccagagctggtcttgggatggccgtgtgacaggcatgctccacccctccagcttcgtcctggggcagggctccctccaagcctgtctccccactccccggccagaggtcagcaaccacagaaggccccccagaccacgcatggcagaccaggctgcagtggcagccctgaggtgccccccgccgagtcccagggccctgcaggggcctcgacaggagccgggcctatctctaaagcagagggaatggctgggcatgaacttcgacattccaaaaccccaagccaggaaaaagggcagggcctggtcctagggatgcttactggcagcaagagcagtgcccagtcagggtgggaggtagcaccaggctctgtgaccctcacccaagtgggggggtggtcagtggaagctggggaggcttcactcagctcaaccctgcagaccccccatatgagaacccccctcctcccaccagctgggggagatgacatcactgctctctccatggggagggggctcacagggcaccaagttcgggatcctaggactggcaggacctgctggagcctgagatgggccccaggggcctgaggttgcctcctcctgtccagacccagccttggcacctcccaagactgccaagggccctaccatggccccacagcccccagggctggcagttccatctaggagggtgcctctaggccccactctcaggctaggatggagaggcagatctgggcctggtgaggtgacctgcttctggaggggcagggccgcacccgagagcagggacaggtgcccgaacacagggtctccaggacgtagcgcccccccgcatacttgaatgtatgtgcgtatttattgctcacgtctgtgccatgttgtcaatgggtcctttccaacccaagaggtacatttgtttttctgtttttcctgaaaaataaagtcggccaagtgagtgtg

SEQ ID NO: 310257 - DNA, 1959 bp, Artificial Sequence
  derived and/or modified sequence
atggaggccagctgcctggagctggccctggagggggagcggctgtgcaaggccggggacttcaagacaggagtggccttctttgaggccgctgtgcaggtgggcacagaggacctgaagaccctgagcgccatctacagccagctgggcaatgcctacttctacctgaaggagcacggccgggccctggagtaccacaagcatgacctgctgctggcccggaccatcggggacaggatgggagaggccaaggccagcggcaacctgggcaacaccctgaaggtgctgggccgctttgatgaggccgctgtgtgctgccagaggcacctgagcatcgcccaggagcagggcgacaaggtgggggaggcccgggccctgtacaacattggaaatgtgtaccacgccaagggcaagcagctgtcctggaatgctgccaatgccacccaggaccccggccacctgcccccagatgtgcgggagaccctgtgcaaggccagcgagttctatgaaagaaacctgagcctggtgaaggagctgggggacagagctgcccagggccgggcctacggcaacctgggcaacacccactacctgctgggcaacttcacagaggccaccaccttccacaaggagcggctggccatcgccaaggagtttggagacaaggctgctgagcggcgggcctacagcaacctgggcaatgcccacgtgttcctgggccgctttgatgtggccgctgagtactacaagaagaccctgcagctgagccggcagctgcgggaccaggccgtggaggcccaggcctgctacagcctgggcaacacctacaccctgctgcaggactatgaaagagctgctgagtaccacctgcggcacctgctgattgcccaggagctggccgacagagtgggggagggccgggcctgctggagcctgggcaatgcctacgtgtccatgggccggcctgcccaggccctgacctttgccaagaagcacctgcagatcagccaggagattggagacagacatggagagctgacagccaggatgaatgtggcccagctgcagctggtgctgggccgcctgaccagccctgctgccagcgagaagccagacctggccggctatgaggcccagggcgcccggcccaagaggacccagaggctgtctgctgagacctgggacctgctgcggctgcccctggagcgggagcagaatggagacagccaccacagcggggactggaggggccccagccgggacagcctgcccctgcctgtgcgcagcaggaagtaccaggagggcccagatgctgagcggcggccccgggagggcagccacagccccctggacagcgcagatgtgcgggtgcacgtgcccaggaccagcatcccccgggcccccagcagtgatgaggagtgcttctttgacctgctgaccaagttccagagcagcaggatggatgaccagcgctgccccctggatgatggccaggccggggctgctgaggccacagctgcccccaccctggaggaccgcatcgcccagcccagcatgacagccagcccccagacagaggagttctttgacctgattgccagcagccagagccggcggctggatgaccagagggcctctgtgggcagcctgcccggcctgcgcatcacccacagcaatgccggccacctgcggggccacggggagccccaggagcctggagatgacttcttcaacatgctgatcaagtaccagagcagcagaattgatgaccagcgctgccccccaccagatgtgctgccccggggccccaccatgccagatgaggacttcttcagcctcatccagagggtgcaggccaagaggatggatgagcagagggtggacctggccggcggccctgagcagggcgccggcggccccccagagccccagcagcagtgccagcccggggccagctag

SEQ ID NO: 310258 - DNA, 1959 bp, Artificial Sequence
  derived and/or modified sequence
atggaggccagctgcctggagctggccctggagggcgagcggctgtgcaaagctggagactttaagactggcgtggccttcttcgaggctgctgttcaggttgggacggaagacttgaagaccttgtccgctatttactcacaacttggcaacgcttatttttatctgaaggagcatggtagggccctggaataccacaaacatgacctgctcctagcacggacaattggagataggatgggcgaggcaaaagcctctggaaacctgggtaacacactcaaggttctcggacgattcgatgaggcagctgtctgctgtcaaagacacctctcgatcgcccaggagcagggcgacaaggtcggagaggccagagccctgtataacattggcaacgtctatcatgccaagggaaaacagctaagctggaatgccgctaacgctacacaagatcctggccacttgcccccagatgttcgggagactctctgcaaggcctctgagttctacgagcgcaacctgagcctggtcaaagagctgggtgatagagccgcgcagggacgcgcttatggaaatctagggaacacgcactatctgctggggaacttcaccgaggccaccacctttcacaaggagcggttagctatcgccaaagagttcggtgataaggcggctgaacggagggcatatagtaatctaggcaatgcgcatgtattcctgggtaggtttgatgtcgcagcggaatactacaagaaaacgttgcagttatcgaggcagttgagggatcaggccgtggaggcccaagcgtgttatagtcttggcaacacctatactctgctgcaggattacgagcgggctgccgaataccatctgcgccacctgttgatcgcccaggaattggctgatcgggtcggcgagggtagagcgtgctggtcccttgggaacgcctatgtgagcatgggtcgcccagcccaggcgctaacttttgctaagaaacatctgcagatcagccaggagataggagaccggcacggagagcttaccgccagaatgaatgtggcccagttacagctggtgttggggaggcttactagccctgccgcatctgagaagcctgatctcgccggctatgaggctcagggagccagaccgaaacggacccaacgattgtcggctgaaacctgggatctgctcagattaccccttgagcgagagcaaaatggcgattcacaccactcaggagactggcgcgggcccagtcgcgattcactgccactcccggtccgatccaggaagtaccaagagggaccggatgccgagcgccggccgagggaggggtcccatagccctctcgattccgcggacgtaagggtccatgtccccaggacctccattccccgcgccccttctagcgacgaggagtgcttttttgatctgctgaccaagtttcagtcaagtcgtatggacgatcaacgttgtcccctcgatgacgggcaggccggggcagccgaagccacggccgcacccactttggaggataggatagcccagccatcaatgaccgcttctcctcaaacagaagagttttttgacttgatcgcctctagtcagagccggcgtctggatgaccagagggcatctgtcggatcactgcccggattgcggataactcactcaaatgctggacatctgcgcggacacggtgagcctcaggagccaggagatgattttttcaatatgcttattaaataccagtcctctcggatcgacgaccagcgctgtccacccccagatgtgctcccgaggggtcctaccatgcctgatgaggatttcttctcattgattcagagggtccaggccaagagaatggacgagcagagggtagatctcgccggtggccctgaacagggcgccggcggcccccccgagccacagcagcaatgtcaacccggagcaagctag

SEQ ID NO: 310259 - DNA, 1959 bp, Artificial Sequence
  derived and/or modified sequence
atggaggcctcctgcctcgagctggccctggaaggggaaaggctgtgtaaggcgggtgactttaagacaggggtggccttcttcgaggcagccgtgcaggtgggcacggaggaccttaaaaccttgtctgccatctattcacagctcggaaacgcgtatttttacttgaaggagcatggcagagccctcgagtaccacaagcacgacctcctcctcgcacgtacaatcggtgacaggatgggggaggcgaaggcgagcgggaacctcggaaacaccttgaaggttctgggcaggtttgatgaagcagctgtgtgctgccagaggcacctgtctatcgcccaggaacagggtgacaaggtgggcgaagccagagcactgtacaatataggtaacgtttatcacgcaaaagggaagcagctatcctggaacgccgcaaatgcgacccaggacccaggacacctacctcctgacgtgcgggaaacactgtgcaaagcttcagagttttatgaacgaaatctgtcgctagttaaggagctgggtgatcgggcagcccaggggcgagcctacgggaaccttgggaacacccactatctcctgggtaacttcactgaagccactaccttccacaaggaacgcctggctattgccaaggaatttggtgacaaggctgctgagcgcagagcctattccaatctggggaatgctcatgtgtttctcggacgattcgatgtcgctgctgaatactacaagaagactctgcagctctccaggcagttacgagatcaggccgtcgaagctcaggcttgctattcgctgggcaacacgtatactttgttgcaagactatgagcgcgctgccgaatatcaccttcggcacctgttaattgctcaggaacttgctgatcgcgtaggggagggacgggcatgctggtctcttggtaatgcatacgtgtcgatgggaagaccagcccaggccctgactttcgccaaaaaacacctgcagatatctcaagagataggcgatcgacatggagagctgaccgctcgcatgaacgtggcacagctgcagttggtgttgggcaggctgacgtctccggctgcttctgagaagcccgatctggctggctacgaggcccagggtgccagaccaaaacggacccaacggctgtccgccgagacttgggatctgctgcgccttcctctggaacgggaacaaaacggcgattcccatcattcaggcgactggcggggtccttctagggattcactgcctctgcccgttaggtccagaaagtatcaggaaggtcccgatgccgagagaaggccacgggaaggatcccactccccactcgattccgcggatgttcgcgtccatgtgcccagaacgagcattcctagggccccatccagcgacgaagagtgcttcttcgatctcctgactaaatttcagtcttccaggatggacgaccagaggtgtcccctggatgacggccaggctggcgcagccgaagctacagcagccccaacgctggaagacaggatagcccagcctagtatgaccgcatccccccaaactgaggagtttttcgaccttattgcgagcagtcagtcgagaagacttgatgatcagagagcgagtgtggggtcacttcctggccttcggattactcacagtaacgccggtcatctccgaggccacggggaacctcaagagccaggggatgatttctttaacatgctgataaagtaccagtcctccaggatcgatgatcagaggtgcccacccccagatgtgctcccaaggggtcctactatgccagacgaggacttttttagcctgattcagagggttcaggccaagaggatggatgaacagcgcgtcgacctggcagggggacctgagcaaggcgcaggcggaccccctgaaccacaacagcagtgtcagcctggcgcaagctag

SEQ ID NO: 310260 - protein, 371 aa, Artificial Sequence
  derived and/or modified sequence
MLQCYRCRQWFHEACTQCLNEPMMFGDRFYLFFCSVCNQGPEYIERLPLRWVDVVHLALYNLGVQSKKKYFDFEEILAFVNHHWELLQLGKLTSTPVTDRGPHLLNALNSYKSRFLCGKEIKKKKCIFRLRIRVPPNPPGKLLPDKGLLPNENSASSELRKRGKSKPGLLPHEFQQQKRRVYRRKRSKFLLEDAIPSSDFTSAWSTNHHLASIFDFTLDEIQSLKSASSGQTFFSDVDSTDAASTSGSASTSLSYDSRWTVGSRKRKLAAKAYMPLRAKRWAAELDGRCPSDSSAEGASVPERPDEGIDSHTFESISEDDSSLSHLKSSITNYFGAAGRLACGEKYQVLARRVTPEGKVQYLVEWEGTTPY

SEQ ID NO: 310261 - DNA, 558 bp, Artificial Sequence
  derived and/or modified sequence
ttttcgaaatctccctgaactttggcggcccgaacgcctccgggggtgtcaggggaagctgatggagaatcgagctctggatccagggactcgggactcctatggtgccaccagccacctccccaacaagggggccctggcgaaggtcaagaacaacttcaaagacttgatgtccaaactgacggagggccagtatgtgctgtgccggtggacagatggcctgtactacctcgggaagatcaagagggtcagcagctctaagcaaagctgcctcgtgactttcgaagataattccaaatactgggtcctatggaaggacatacagcatgccggtgttccaggagaggagcccaagtgcaacatctgcctagggaagacatcagggccgctgaatgagatcctcatctgcgggaagtgtggcctgggttaccaccagcagtgccacatccccatagcgggcagtgctgaccagcccctgctcacaccttggttctgccgacgctgcatcttcgcactggctgtgcggaaaggcggcgcgctgaagaagggcgccatcgc

SEQ ID NO: 310262 - DNA, 888 bp, Artificial Sequence
  derived and/or modified sequence
cgcccggccagggtggaggcgggtgcggcgacccggccggctcctagaggcgcagcgggagaggaagtgtcagtttgtgaacctgcagcggccccggcctggcccctggccgggcgggcggggacctcgcagcgccgggcgagccaggtggcagggagaggacagggattcagaccgcatcccctgcccgggagcctgtgcgctctgcgctggagaaaaaggagatgggagtgggggtggagaaggtcgtggccacgccaccatctggggagccgagacccctgcagtgcctggctcgccccagggccccgcacatacttagcttcacacactccctggcacaatgccgtagacatcatcctgcccagtctcacaggagtacacacacgcaccacacagaaacaggcactggactctctccctgtgaacagatagtcacaacaccaggtgcccagcgccatggccacaaggaggagacccgagtaggcccgcggggaaagagagaggctgtgtgtggctgtagtggagagcatgtggagggacttggagccagtgtcaggggaagctgatggagaatcgagctctggatccagggactcgggactcctatggtgccaccagccacctccccaacaagggggccctggcgaaggtcaagaacaacttcaaagacttgatgtccaaactgacggagggccagtatgtgctgtgccggtggacagatggcctgtactacctcgggaagatcaagagggtcagcagctctaagcaaagctgcctcgtgactttcgaagataattccaaatactgggtcctatggaaggacatacagcatgccggtgttccaggagaggagcccaagtgcaacatctgcctagggaagacatc

SEQ ID NO: 310263 - protein, 21 aa, Artificial Sequence
  derived and/or modified sequence
MAQPGSGCKATTRCLEGTAPP

SEQ ID NO: 310264 - protein, 34 aa, Artificial Sequence
  derived and/or modified sequence
MAQPGSGCKATTRCLEGTAPPAMAQSDAEALAGA

SEQ ID NO: 310265 - DNA, 1603 bp, Artificial Sequence
  derived and/or modified sequence
gcgcggatcagcttccagcccagtcggcccggcccgggggccatggagctccgagcggcggatcgcgagcctcctgcgaaccccagcctgcacgcccggttagcattcggccgggagatgcggcagtggaatctggaagggcggtgaaaaacctacgtcctgccctcgcccggcctctccattcgtcccccgggtagagagggtcggctcgtgctcatcatcctgtgctccgtggtcttctctgccgtctacatcctcctgtgctgctgggccggcctgcccctctgcctggccacctgcctggaccaccacttccccacaggctccaggcccactgtgccgggacccctgcacttcagtggatatagcagtgtgccagatgggaagccgctggtccgcgagccctgccgcagctgtgccgtggtgtccagctccggccaaatgctgggctcaggcctgggtgctgagatcgacagtgccgagtgcgtgttccgcatgaaccaggcgcccaccgtgggctttgaggcggatgtgggccagcgcagcaccctgcgtgtcgtctcacacacaagcgtgccgctgctgctgcgcaactattcacactacttccagaaggcccgagacacgctctacatggtgtggggccagggcaggcacatggaccgggtgctcggcggccgcacctaccgcacgctgctgcagctcaccaggatgtaccccggcctgcaggtgtacaccttcacggagcgcatgatggcctactgcgaccagatcttccaggacgagacgggcaagaaccggaggcagtcgggctccttcctcagcaccggctggttcaccatgatcctcgcgctggagctgtgtgaggagatcgtggtctatgggatggtcagcgacagctactgcagggagaagagccacccctcagtgccttaccactactttgagaagggccggctagatgagtgtcagatgtacctggcacacgagcaggcgccccgaagcgcccaccgcttcatcactgagaaggcggtcttctcccgctgggccaagaagaggcccatcgtgttcgcccatccgtcctggaggactgagtagcttccgtcgtcctgccagtcgccatgccgttgcgaggcctccgggatgtcccatcccaagccatcacactccacaaaaacatttaatttatggatcctgcctcctgccacgtgctgggtggacctaaggttccttcccgccccattctggcgacacttggagccatctcaggcctcatgacttgaaggggagtggaggggggagccgtgtctcccccctccactccctgagtaattcacggcatttgggggctcaccccacctccaggtctgtcaagtggcctttgtccctggggctgatggcccccaactcaccagcatcatgaccttgtgccagtcctggtcctccctccccagccgctcctaccaccttttggtgccacacttctcaggctggccgccctggttggggcagccgagagcctggggttcattggtgaaggggccttggagttgtgactgccggggccgtatcaggaacgtacgggtaaacgtgtgttttctgg

SEQ ID NO: 310266 - DNA, 1013 bp, Artificial Sequence
  derived and/or modified sequence
ggcccgggggccatggagctccgagcggcggatcgcgagcctcctgcgaaccccagcctgcacgcccggttagcattcggccgggagatgcggcagtggaatctggaagggcggtgaaaaacctacgtcctgccctcgcccggcctctccattcgtcccccgggtagagagggtcggctcgtgctcatcatcctgtgctccgtggtcttctctgccgtctacatcctcctgtgctgctgggccggcctgcccctctgcctggccacctgcctggaccaccacttccccacaggctccaggcccactgtgccgggacccctgcacttcagtggatatagcagtgtgccagatgggaagccgctggtccgcgagccctgccgcagctgtgccgtggtgtccagctccggccaaatgctgggctcaggcctgggtgctgagatcgacagtgccgagtgcgtgttccgcatgaaccaggcgcccaccgtgggctttgaggcggatgtgggccagcgcagcaccctgcgtgtcgtctcacacacaagcgtgccgctgctgctgcgcaactattcacactacttccagaaggcccgagacacgctctacatggtgtggggccagggcaggcacatggaccgggtgctcggcggccgcacctaccgcacgctgctgcagctcaccaggatgtaccccggcctgcaggtgtacaccttcacggagcgcatgatggcctactgcgaccagatcttccaggacgagacgggcaagaaccggaggcagtcgggctccttcctcagcaccggctggttcaccatgatcctcgcgctggagctgtgtgaggagatcgtggtctatgggatggtcagcgacagctactgcagggagaagagccacccctcagtgccttaccactactttgagaagggccggctagatgagtgtcagatgtacctggcacacgagcaggcgccccgaagcgcccaccgcttcatcactgagaaggcggtcttctcccg

SEQ ID NO: 310267 - DNA, 1497 bp, Artificial Sequence
  derived and/or modified sequence
agcttccagcccagtcggcccggcccgggggccatggagctccgagcggcggatcgcgagcctcctgcgaaccccagcctgcacgcccggttagcattcggccgggagatgcggcagtggaatctggaagggcggtgaaaaacctacgtcctgccctcgcccggcctctccattcgtcccccgggtagagagggtcggctcgtgctcatcatcctgtgctccgtggtcttctctgccgtctacatcctcctgtgctgctgggccggcctgcccctctgcctggccacctgcctggaccaccacttccccacaggctccaggcccactgtgccgggacccctgcacttcagtggatatagcagtgtgccagatgggaagccgctggtccgcgagccctgccgcagctgtgccgtggtgtccagctccggccaaatgctgggctcaggcctgggtgctgagatcgacagtgccgagtgcgtgttccgcatgaaccaggcgcccaccgtgggctttgaggcggatgtgggccagcgcagcaccctgcgtgtcgtctcacacacaagcgtgccgctgctgctgcgcaactattcacactacttccagaaggcccgagacacgctctacatggtgtggggccagggcaggcacatggaccgggtgctcggcggccgcacctaccgcacgctgctgcagctcaccaggatgtaccccggcctgcaggtgtacaccttcacggagcgcatgatggcctactgcgaccagatcttccaggacgagacgggcaagaaccggaggcagtcgggctccttcctcagcaccggctggttcaccatgatcctcgcgctggagctgtgtgaggagatcgtggtctatgggatggtcagcgacagctactgcagggagaagagccacccctcagtgccttaccactactttgagaagggccggctagatgagtgtcagatgtacctggcacacgagcaggcgccccgaagcgcccaccgcttcatcactgagaaggcggtcttctcccgctgggccaagaagaggcccatcgtgttcgcccatccgtcctggaggactgagtagcttccgtcgtcctgccagtcgccatgccgttgcgaggcctccgggatgtcccatcccaagccatcacactccactccctgagtaattcacggcatttgggggctcaccccacctccaggtctgtcaagtggcctttgtccctggggctgatggcccccaactcaccagcatcatgaccttgtgccagtcctggtcctccctccccagccgctcctaccaccttttggtgccacacttctcaggctggccgccctggttggggcagccgagagcctggggttcattggtgaaggggccttggagttgtgactgccggggccgtatcaggaacgtacgggtaaacgtgtgttttctggatgctgtctctagcgtggtcatgtgtctgatgtgtttaggggtggagatgag

SEQ ID NO: 310268 - protein, 988 aa, Artificial Sequence
  derived and/or modified sequence
MKLLLTRRANWMQKDLEEMTPLHLTTRHRSPKCLALLLKFMAPGEVDTQDKNKQTALHWSAYYNNPEHVKLLIKHDSNIGIPDVEGKIPLHWAANHKDPSAVHTVRCILDAAPTESLLNWQDYEGRTPLHFAVADGNVTVVDVLTSYESCNITSYDNLFRTPLHWAALLGHAQIVHLLLERNKSGTIPSDSQGATPLHYAAQSNFAETVKVFLKHPSVKDDSDLEGRTSFMWAAGKGSDDVLRTMLSLKSDIDINMADKYGGTALHAAALSGHVSTVKLLLENNAQVDATDVMKHTPLFRACEMGHKDVIQTLIKGGARVDLVDQDGHSLLHWAALGGNADVCQILIENKINPNVQDYAGRTPLQCAAYGGYINCMAVLMENNADPNIQDKEGRTALHWSCNNGYLDAIKLLLDFAAFPNQMENNEERYTPLDYALLGERHEVIQFMLEHGALSIAAIQDIAAFKIQAVYKGYKVRKAFRDRKNLLMKHEQLRKDAAAKKREEENKRKEAEQQKGRRSPDSCRPQALPCLPSTQDVPSRQSRAPSKQPPAGNVAQGPEPRDSRGSPGGSLGGALQKEQHVSSDLQGTNSRRPNETAREHSKGQSACVHFRPNEGSDGSRHPGVPSVEKSRGETAGDERCAKGKGFVKQPSCIRVAGPDEKGEDSRRAAASLPPHDSHWKPSRRHDTEPKAKCAPQKRRTQELRGGRCSPAGSSRPGSARGEAVHAGQNPPHHRTPRNKVTQAKLTGGLYSHLPQSTEELRSGARRLETSTLSEDFQVSKETDPAPGPLSGQSVNIDLLPVELRLQIIQRERRRKELFRKKNKAAAVIQRAWRSYQLRKHLSHLRHMKQLGAGDVDRWRQESTALLLQVWRKELELKFPQTTAVSKAPKSPSKGTSGTKSTKHSVLKQIYGCSHEGKIHHPTRSVKASSVLRLNSGKAATAKQMVGKNMGKHFPLFHPQRQKTLEQIWPGFSNGHLISWDYYCSQHLSP

SEQ ID NO: 310269 - DNA, 3655 bp, Artificial Sequence
  derived and/or modified sequence
aaagcctcgggcggccttttgaggggctcggctagcttcagcgccgtggggtctgacctggctggatatagtgtaccggcccggcaggaggggcggcccggtccgggttgcgcctcctggagccgcccccgggacgtcagtcctggaggaggcgagggttgctccggttgctaagaagactatgaacaagtcagagaacctgctgtttgctggttcatcattagcatcacaagtccatgctgctgccgttaatggagataagggtgctctacagaggctcatcgtaggaaactctgctcttaaagacaaagaagatcagtttgggagaacaccacttatgtattgcgtgttggctgacagattggattgtgcagatgctcttctgaaggcaggagcagatgtgaataaaactgaccatagccagagaacagccctccatcttgcagcccagaagttttcaaggtacgctgtttccatgttactgatttacaaaaaggagaaagaatacctctgaaacttttcaggaacacttataccagggaaattatcgtttcatgaaactcttacttacacgcagagcaaactggatgcaaaaggatctggaagagatgactcctttgcacttgaccacccggcacaggagccctaagtgtttggcacttctgctgaagtttatggcaccaggagaagtggatacacaggataaaaacaagcaaacagctctgcattggagtgcctactacaataaccctgagcatgtgaagctgctcatcaagcatgattctaacattgggattcctgatgttgaaggcaagatcccacttcactgggcagccaaccataaagatccaagtgctgttcacacagtgagatgcattctggatgctgctccaacagagtctttactgaactggcaagactacgagggtcgaactcctcttcactttgcagttgctgatgggaatgtgaccgtggttgatgtcttgacctcatatgaaagctgcaatataacgtcttatgataacttatttcgaaccccactgcactgggcagctttattaggccatgcacagattgtccatctccttttagaaagaaataagtctggaactatcccatctgacagccaaggagccacacctttgcactatgctgctcagagtaactttgctgaaacggttaaagtgtttttaaaacatccttcagtgaaagatgattcagacctggaaggaagaacatcctttatgtgggcagctggcaaaggcagtgatgatgtccttagaactatgctgagcttaaaatcggacatagatattaacatggctgacaaatatggaggtacagctttgcatgctgctgctctttctggccatgtcagcaccgtgaagttattactggaaaataatgctcaagtagatgctactgatgttatgaaacatactccacttttccgagcctgtgagatgggacacaaagatgtgattcagacactcattaaaggtggagcaagggtagatctagttgaccaagatggacattctcttctacattgggcagcactgggaggaaatgctgatgtttgccagatattaatagaaaataagatcaatccaaatgtccaggattatgcaggaagaacccctttgcagtgtgcagcatatggaggctatatcaactgcatggcagttctcatggaaaacaatgcagaccctaacattcaagacaaagagggaagaacagctttgcattggtcctgcaacaatggataccttgatgccattaaattactgctagactttgctgctttccctaatcagatggaaaacaatgaagagagatacacaccccttgattatgctttgcttggtgagcgccatgaagtgatccagttcatgttggagcacggtgccctgtccatcgcagccatacaagacatcgccgccttcaaaatccaagctgtctacaaagggtacaaggtcagaaaagccttccgagacaggaaaaatctcctcatgaagcatgaacagttgagaaaagatgctgctgccaaaaagcgagaggaagaaaacaaacgaaaagaggcagaacagcaaaaaggaaggcggagcccagattcctgcagaccccaggcccttccctgtctgcctagcacccaggatgtgcccagcaggcagagccgggcccccagcaagcagcctcctgctggcaacgtggcccaaggccctgagccaagagacagcagaggatctccaggagggtctctaggcggagccctccagaaggagcagcatgtttcctcagatttgcagggaacaaactccagaaggccaaatgaaacagccagagaacattctaaaggccaatctgcttgtgtccacttcagacccaatgaaggcagtgatggaagcaggcatccaggagttccctctgttgagaagtccagaggtgagacagctggcgatgagcggtgtgcaaaggggaaaggcttcgtgaagcagccctcctgtatcagggtggctgggcctgatgagaaaggagaggactccaggcgggcagctgcaagccttccaccgcacgatagccactggaagcccagcaggcggcatgacacagaacccaaggccaaatgtgccccccagaaaaggcgcactcaagagctcagaggaggaaggtgctctccggctggttctagccgccctggcagtgcccggggggaggcggtccatgctgggcagaatcctccccaccatcgtacaccaagaaacaaagtgacacaagccaagctcacaggagggctctattcacatttgccacagagcacagaggagttgaggtcaggagctaggaggctggagacatctaccctgtccgaggactttcaggtatctaaggagactgatccagcacctggtcccctctctgggcagagtgtgaatattgaccttctccccgtagagctccgactgcagataattcagagagaacgaaggaggaaggagctgtttcgcaaaaagaacaaggcagcagcagtcatccagcgcgcctggcgaagctaccagctcaggaagcacctgtcccaccttcggcatatgaagcagcttggagctggagatgtggacagatggaggcaagagtctacagcattgctcctccaggtttggaggaaggaactggaactaaaattcccccaaaccactgcagtaagcaaggcccccaagagtccatccaagggcacctcaggcacaaagtccaccaagcactcagtgcttaagcaaatctatggttgttctcacgaagggaaaatacatcatcctacaagatctgtaaaagcctcttctgtgctgcgtctcaactcaggtaaggcagccactgcaaagcagatggtggggaagaacatggggaagcattttcctttgtttcatccccaaagacagaagacattagaacagatatggccagggttttccaatggtcatttgatttcatgggattattactgtagccaacatctgtctccctaagaggcaaattattttcacaactaaaagctattattgttaacattaactccaacagaaataaatggtagctattattgatcacttttacacattttttcacacaaaggaaataaatgaaaatactgtcactcttc

SEQ ID NO: 310270 - protein, 101 aa, Artificial Sequence
  derived and/or modified sequence
MNKSENLLFAGSSLASQVHAAAVNGDKGALQRLIVGNSALKDKEDQFGRTPLMYCVLADRLDCADALLKAGADVNKTDHSQRTALHLAAQKALRTISTGRI

SEQ ID NO: 310271 - DNA, 306 bp, Artificial Sequence
  derived and/or modified sequence
atgaacaaatccgagaatttgctttttgccggctcctccttggcttcccaagtgcatgccgcagccgttaatggagacaagggggccctgcaaaggctgattgttggtaattctgcactgaaagataaagaagatcagttcggaaggaccccattgatgtactgcgtgcttgccgatcgcctcgactgtgccgatgcattactaaaagctggagctgacgtgaacaaaaccgatcactctcaacggacagccctgcatctcgccgcccagaaggcacttaggacgatctccactggccgtatttag

SEQ ID NO: 310272 - DNA, 1654 bp, Artificial Sequence
  derived and/or modified sequence
cggctagcttcagcgccgtggggtctgacctggctggatatagtgtaccggcccggcaggaggggcggcccggtccgggttgcgcctcctggagccgcccccgggacgtcagtcctggaggaggcgagggttgctccggttgctaagaagactatgaacaagtcagagaacctgctgtttgctggttcatcattagcatcacaagtccatgctgctgccgttaatggagataagggtgctctacagaggctcatcgtaggaaactctgctcttaaagacaaagaagatcagtttgggagaacaccacttatgtattgcgtgttggctgacagattggattgtgcagatgctcttctgaaggcaggagcagatgtgaataaaactgaccatagccagagaacagccctccatcttgcagcccagaaggcattgagaacaatcagcacaggcaggatctaagagactacaatcattcaaagaagagaaacacgtaaagtgagtaccacattcatcctggccttttcctttatgacattttccaaactggaatgcaaaagaatacaaccctaacaggaagcagcagccttaccaggctgaagaaactgaggcagagtttggagataatagtggctggaacttgaaagtcaaaatcctggagaggagggaattgcagagaaagaatgcaagaatctggatacaaattcctcacaagtttttaacagattcctaaactgtgcttgtatagggtggtgctctaagaaacctagtattaaacaacagctgggagactagacagctgagtagagattattttaaattatcctatattttcttttatgtttaaatctcttaatatataacacattgatttttgtatggggatccattctcattttaaagcatatggataactaattttcccaacacaacctagttcattaatttttggccatttagtatctgctctctgtcagttccaggcttttgtactacgaactccctatgcatttctgtttttttaaatgagggatcctgaatactagggagcctttgggaaatttgaaaataaaagttacatgatcagtgtattttagggggactaatatggcaactaaagctactttggaagagaaagagtggagatacatagattgctattatagttcaggccaatagagaggaattgggtttaagagatacattatggaggcagaagtgttcattcaacaagcgtttgttaaatatctactatgtaatcatgattatacaactagagagaatatgaaaaaaatgaattacgtatgttagcttatagatggatgctctcagtacccatccctattaatcgtcatttccctttgtttagtgaaccttctgatatattggatatcaaatatcctttccaagtattgtctgtcccacttaattctggtatccatgaatgcagaagtgtgctatttatgtaatcatgaacactcatgtatatgtgtataccttcattcattcaacatgtgttaaaactattatgtaacaggcatcatgttaggccttggaacacaaaggtgaacaacatgattcctgctcttaagttgcttacaaagatcatggatgaagatattaaatgataattaaagctgattgatctaccttgtaa

SEQ ID NO: 310273 - DNA, 306 bp, Artificial Sequence
  derived and/or modified sequence
atgaacaagtctgagaacctgctgtttgctggcagcagcctggccagccaggtgcacgccgctgctgtgaatggagacaagggggccctgcagaggctcatcgtgggcaacagcgccctgaaggacaaggaggaccagtttggaagaacacccctgatgtactgtgtgctggccgaccggctggactgtgctgatgccctgctgaaggccggggctgatgtgaacaagacagaccacagccagaggacagccctgcacctggccgcccagaaggccctgcggaccatcagcacaggccgcatctag

SEQ ID NO: 310274 - DNA, 306 bp, Artificial Sequence
  derived and/or modified sequence
atgaacaagagcgagaacctgctgttcgccggcagcagcctggccagtcaagtgcacgccgcggcggttaatggagacaagggcgccctccagagactgatcgtaggaaacagtgccctgaaagataaggaagaccagttcggaaggaccccgctgatgtattgtgtgctcgccgatcggttggattgtgccgacgcccttctgaaggccggagccgacgttaacaagacagaccatagtcaacgcactgctctgcatcttgcagcccagaaggctctgcggactatctccaccggtcggatttag

SEQ ID NO: 310275 - DNA, 306 bp, Artificial Sequence
  derived and/or modified sequence
atgaacaaaagcgaaaaccttcttttcgcaggctcctctctggcgtcccaggtgcacgctgccgctgtgaacggagataagggggcactacaaagactcatcgtcggcaactcggcccttaaagacaaggaagaccagttcggtaggacaccactgatgtattgtgtgttggcagataggctagactgtgccgacgcgctgctcaaggccggtgcagatgtgaataagaccgatcactcacaacgaaccgctctccacctggctgctcagaaagcgttaaggacaataagtacgggacgtatctag

SEQ ID NO: 310276 - DNA, 306 bp, Artificial Sequence
  derived and/or modified sequence
atgaacaagagcgagaacctgctgttcgccggcagcagcctggccagccaggtgcacgccgccgccgtgaacggcgacaagggcgccctgcagagactgatcgtgggcaacagcgccctgaaggacaaggaggaccagttcggcagaacccccctgatgtactgcgtgctggccgacagactggactgcgccgacgccctgctgaaggccggcgccgacgtgaacaagaccgaccacagccagagaaccgccctgcacctggccgcccagaaggccctgagaaccatcagcaccggcagaatctag

SEQ ID NO: 310277 - DNA, 2967 bp, Artificial Sequence
  derived and/or modified sequence
atgaagctgctattaacgcgccgcgcgaactggatgcaaaaggatctggaggagatgaccccccttcacttgactacccggcacagaagtcccaaatgccttgccctcctgctaaaatttatggcgcccggagaggtcgacactcaggacaagaataagcagactgccctgcactggagcgcatactacaacaatcccgagcatgtcaaactcctaataaagcatgacagcaatatcgggatccccgatgtggaaggaaagatcccattgcattgggccgcaaatcacaaggatccgtccgcagtgcacacagtgcgttgcatactggacgcagcccctaccgaaagtttgctcaactggcaggactacgagggcagaacaccgcttcacttcgccgtggctgatggcaacgtgacagtggtcgatgttcttacatcatatgagtcctgtaacattacgagttacgacaacctcttcagaacaccattgcactgggccgctcttctaggccacgcacagatcgtgcatcttctcctcgaacggaataagtcggggaccattccatcagacagccagggggccacacctttgcattacgctgcccagtcgaatttcgcagagaccgtgaaggtgttcctgaagcacccttccgtgaaagacgactctgacttggaggggcgaacctcttttatgtgggccgccggcaagggttcagacgatgtcctcaggactatgctgagcctgaagagcgatattgacattaacatggcggacaaatacgggggcaccgctcttcatgctgcagccttgtccggacacgtaagcactgtgaaattactcctggaaaataacgcacaagtggatgctactgatgtgatgaagcacactccactgttccgggcatgcgaaatgggacacaaggacgtgattcagaccctgatcaagggaggggcccgcgtggacctcgtggatcaggatggacattctctcctccattgggctgctctgggaggtaatgccgacgtgtgtcagatcttgatcgagaataagataaacccaaacgtgcaggactatgccggtcgtacacctctacagtgtgctgcctatggcggatatatcaactgcatggcagttctcatggagaacaacgctgatccgaacatccaggataaggaaggacgcaccgcactgcattggagctgtaacaacggatatcttgatgctattaaactcttgctcgacttcgccgccttcccaaaccaaatggagaacaacgaggaaaggtacacacctctagactatgcgctcttaggtgaaagacacgaggtcatacagtttatgctggagcatggcgccttgagtatagcagcgatccaagacattgcagcctttaagattcaggctgtgtacaagggttacaaggtgcggaaagcctttcgtgataggaaaaacctcctgatgaaacacgagcagctccgtaaagatgccgcagccaaaaaacgggaagaagagaacaaacgtaaagaggctgaacagcagaaaggcaggcgaagtcctgacagctgtcgcccgcaggctctcccttgtctcccgagcacacaagatgtaccatctcgtcagagtagagcccccagtaaacagccccccgcaggcaacgttgctcaaggcccagaaccgagggatagcagaggatcgcccggtgggtctttaggcggagccctacagaaggagcagcatgtgtcctcagatctgcaaggaacgaactctcgacggcccaatgagacagccagagagcactcaaaggggcagtcagcctgtgtgcacttcagacccaacgaagggtccgacggcagtcggcaccccggggtgccttcagtagaaaaatccagaggcgagacagctggggacgagcggtgtgctaagggaaaaggctttgtgaagcagcccagttgtattcgggtcgccggaccagacgagaaaggtgaagattcaaggcgcgcggccgcttctctcccacctcatgatagtcactggaaacccagcaggaggcatgatacagagcccaaggccaagtgcgctccccagaaacgccgaactcaggagctacgggggggaagatgttcacccgcaggctcatcccgtccagggagtgcccgcggagaagcagttcatgctgggcaaaatccgcctcatcatcgcacaccacggaataaagtgacccaggcaaagttaacgggggggctgtactcacatctgccccagtctaccgaagaacttcggagtggggccaggcgcctggagacaagcacccttagcgaagactttcaggtttcaaaggagacagacccggctccggggcctcttagtggacagtctgtgaacatcgacctgctgcctgtcgaattgcgacttcagatcatacagagggaaaggcggcggaaggagctgtttcgcaaaaagaataaggccgcggctgtcattcaacgggcctggagaagttatcagttacgtaaacaccttagccatctgaggcacatgaagcagctgggagcgggtgacgtcgatagatggaggcaggagtcaaccgccttgctcctgcaggtctggcgcaaagaactagagctaaagttcccacaaacaacagcagtgagtaaagctcccaaatctccaagcaagggcacaagcgggactaaatccacaaaacacagcgtgttgaagcagatttacgggtgttctcacgaaggaaaaatccaccacccgacaaggagtgtaaaggcctcatctgtcctcagactcaatagcgggaaagctgccactgctaaacagatggtgggtaaaaatatgggtaaacacttccccctcttccatcctcaaagacagaagaccttggaacagatttggcccggtttctcgaacggccaccttattagctgggattattattgttcccaacacttgagcccgtag

SEQ ID NO: 310278 - DNA, 2967 bp, Artificial Sequence
  derived and/or modified sequence
atgaagctgctgctgacccggcgggccaactggatgcagaaggacctggaggagatgacccccctgcacctgaccaccaggcacaggagccccaagtgcctggccctgctgctgaagttcatggcccctggagaggtggacacccaggacaagaacaagcagacagccctgcactggagcgcctactacaacaaccctgagcacgtgaagctgctgatcaagcatgacagcaacatcggcatcccagatgtggagggcaagatccccctgcactgggccgccaaccacaaggaccccagcgctgtgcacacagtgcgctgcatcctggatgctgcccccacagagagcctgctgaactggcaggactatgagggccgcacccccctgcactttgctgtggctgatggaaatgtgacagtggtggatgtgctgaccagctatgagagctgcaacatcaccagctatgacaacctcttccgcacccccctgcactgggccgccctgctgggccacgcccagatcgtgcacctgctgctggagaggaacaagagcggcaccatccccagcgacagccagggcgccacccccctgcactacgccgcccagagcaactttgctgagaccgtgaaggtgttcctgaagcaccccagcgtgaaggatgacagcgacctggagggccgcaccagcttcatgtgggccgccggcaagggcagtgatgatgtgctgcggaccatgctgagcctgaagagtgacatcgacatcaacatggctgacaagtatggaggaacagccctgcatgctgctgccctgagcggccacgtgtccacagtgaagctgctgctggagaacaatgcccaggtggatgccacagatgtgatgaagcacacccccctcttccgggcctgtgagatgggccacaaggatgtgatccagaccctcatcaagggcggggcccgggtggacctggtggaccaggacggccacagcctgctgcactgggccgccctgggcggcaatgctgatgtgtgccagatcctgattgagaacaagatcaaccccaacgtgcaggactatgccggccgcacccccctgcagtgtgccgcctatggaggctacatcaactgcatggctgtgctgatggagaacaatgctgaccccaacatccaggacaaggagggccgcacagccctgcactggagctgcaacaacggctacctggatgccatcaagctgctgctggactttgctgccttccccaaccagatggagaacaatgaggagcgctacacccccctggactatgccctgctgggggagagacatgaagtcatccagttcatgctggagcacggggccctgagcattgctgccatccaggacattgctgccttcaagatccaggccgtgtacaagggctacaaggtgaggaaggccttccgggacaggaagaacctgctgatgaagcatgagcagctgaggaaggatgctgctgccaagaagcgggaggaggagaacaagaggaaggaggccgagcagcagaagggccgccgcagcccagacagctgccggccccaggccctgccctgcctgcccagcacccaggatgtgcccagccggcagagccgggcccccagcaagcagcccccagctggaaatgtggcccagggccctgagccccgggacagccggggcagccctgggggcagcctgggcggggccctgcagaaggagcagcacgtgtccagtgacctgcagggcaccaacagccggcggcccaatgaaacagcccgggagcacagcaagggccagagcgcctgtgtgcacttccggcccaatgaaggaagtgatggcagccgccaccctggggtgcccagcgtggagaagagcagaggagaaacagctggagatgagcgctgtgccaagggcaaaggatttgtgaagcagcccagctgcatccgggtggccggcccagatgagaagggggaggacagcagaagagctgctgccagcctgccccctcatgacagccactggaagcccagcagaagacatgacacagagcccaaggccaagtgtgccccccagaagaggaggacccaggagctgcggggcggccgctgcagccctgctggcagcagcaggcctggcagcgcccggggggaggccgtgcatgctggccagaaccccccccaccacaggacccccaggaacaaggtgacccaggccaagctgactggaggcctgtacagccacctgccccagagcacagaggagctgcggagcggggcccggcggctggagaccagcaccctgtctgaggacttccaggtgtccaaggagacagatcctgcccctggccccctgagcggccagagcgtgaacatcgacctgctgcctgtggagctgcggctgcagatcatccagcgggagaggaggaggaaggagctgttcaggaagaagaacaaggctgctgctgtgatccagagggcctggaggagctaccagctgaggaagcacctgagccacctgcggcacatgaagcagctgggcgctggagatgtggaccgctggaggcaggagagcacagccctgctgctgcaggtgtggaggaaggagctggagctgaagttcccccagaccacagctgtgtccaaggcccccaagagccccagcaagggcaccagcggcaccaagagcaccaagcacagcgtgctgaagcagatctacggctgcagccatgagggcaagatccaccaccccaccaggtctgtgaaggccagctctgtgctgcggctgaacagcggcaaggccgccacagccaagcagatggtgggcaagaacatgggcaagcacttccccctcttccacccccagaggcagaagaccctggagcagatctggccaggcttcagcaatggccacctgatctcctgggactactactgcagccagcacctgagcccctag

SEQ ID NO: 310279 - DNA, 2967 bp, Artificial Sequence
  derived and/or modified sequence
atgaagctgctgctgacccggcgggccaactggatgcagaaggacctagaagagatgacgccactgcacttgacaacccgtcatagatcacctaaatgtctcgcgctgctactcaaattcatggctcccggggaagtcgacacacaggacaagaataaacagactgcactgcactggagtgcctactacaacaatccagaacatgtcaagctcctcattaagcacgatagcaacataggaattccagatgttgagggaaagatcccgctccattgggcagccaatcacaaggatcccagtgccgtgcataccgtacggtgcattctcgacgccgcccctacagagtcactcttgaattggcaggactatgaagggcgcacaccgcttcacttcgcggtggctgatggcaatgtgacagtggtggacgtgttaactagttatgaaagctgcaacatcacgagttacgataatctctttcgaactccactccactgggcggctctcctcgggcatgcacagattgtgcacctgcttttagaaaggaacaaaagtggtacaattccttctgacagtcagggggctactccactgcattacgctgctcagagcaatttcgcagagaccgtgaaggtgttcctgaaacacccatccgtaaaagatgacagcgatcttgaaggtcgtaccagctttatgtgggccgccgggaagggaagtgacgatgtactgaggaccatgcttagcctcaaatcggacatcgacatcaacatggctgacaaatacggtggcacagctctacacgctgccgccctctccgggcacgtgagcacagtcaagctgcttttggagaacaatgctcaggttgacgccacggatgtgatgaagcacaccccactgtttagagcatgcgagatggggcataaggacgtgatccaaacacttataaagggcggtgcccgggtcgacttagttgatcaggacggccattcgcttctgcattgggcggccttgggtggtaatgctgatgtctgtcaaatcctaatcgagaacaagatcaaccctaatgtgcaggactacgcggggaggacccccctccagtgtgccgcttacggtggctatatcaactgtatggcggtgttgatggaaaacaacgccgatccaaatatccaggataaagaaggcagaaccgctttgcattggtcttgtaacaacggctacctggatgccattaaacttctcctggacttcgcagccttccccaaccagatggaaaacaacgaggagaggtatactccactcgattacgcgcttctcggggagcggcacgaggtgatccagttcatgttagaacatggagcactcagcatcgcggccattcaggacatcgctgcatttaagatccaggcggtttacaagggctacaaagtccgcaaggcattccgggacagaaaaaacctactcatgaagcacgagcagctgcgcaaagacgctgctgccaaaaagagggaggaagagaacaaacgcaaggaggccgaacagcagaagggcaggcgctcgcccgacagctgccgcccccaggccctgccttgtctgccatctactcaggatgtgccaagccgccaatctagagccccttcaaaacagccccctgcagggaacgttgcgcagggccctgagcccagagacagccggggttctccggggggaagccttgggggggcgctgcaaaaggaacagcatgtctcaagcgatctgcagggcaccaacagtcgacgccctaacgagaccgctcgagaacacagcaagggccagtccgcctgcgtccactttcggcccaatgagggaagtgatggaagccggcaccccggtgtgccctcagtcgagaagagcagaggtgaaacagctggagacgaacggtgcgctaagggaaagggcttcgtaaaacagccctcctgcattcgagtagcagggcccgatgaaaaaggggaggattcaaggcgtgccgctgccagtctgcccccacatgattcacactggaagcctagcaggagacatgacaccgaaccaaaagctaagtgtgcaccccagaaacgcaggacgcaggagcttcgcggtggtcggtgcagcccagcgggcagctccagacccggcagcgctagaggcgaagcggtgcatgcaggccagaatccaccccaccatagaacaccccggaacaaagtaactcaagcaaaattgaccgggggcctctatagccacctgccccagtctacagaggaacttcgtagtggagctaggcgccttgagacctctacactttcagaagattttcaagtcagcaaggaaaccgacccagccccgggcccgctcagcggacagtctgttaacatagaccttcttcctgttgagcttcgcctccagattatacagagggagagaagacggaaagaacttttcaggaagaagaacaaggccgcagctgtgatccagcgtgcctggaggagctatcagctgcgaaagcatttgtcacacttgcgacacatgaaacagctcggtgcaggcgacgtggataggtggcgacaagagagcacggcccttttgcttcaagtgtggcgcaaggaactagagttaaagttcccccaaaccacggctgtttctaaagcaccaaagtcgccatccaaaggaacaagtgggacaaaatccactaaacacagtgtcctgaagcaaatttatggatgcagccatgaggggaaaatccatcatcctaccaggagcgttaaggcttcgtcagtccttcgccttaattcagggaaggcagccaccgcaaagcagatggtgggtaaaaacatggggaaacatttcccactgtttcatccccagagacagaagaccctcgagcagatctggccaggattttccaacggccacctcatctcgtgggattactattgttctcaacatctttcgccctag

SEQ ID NO: 310280 - DNA, 2967 bp, Artificial Sequence
  derived and/or modified sequence
atgaaactgctcctgacgagacgagcgaattggatgcagaaagatctggaggagatgactccattgcatctcactacacggcaccgctcccccaagtgcctggcattgctgcttaaatttatggcgcctggagaagtggatactcaggacaagaataaacagacagcgttacactggtctgcatactataataatccagaacatgtgaaactgttaattaagcacgactcgaacatcggtatcccagatgtggagggaaagattccacttcactgggccgcaaatcacaaggacccatctgctgtgcatacagtccgctgcattctcgatgccgctcctactgagtccctgttgaactggcaggattatgaaggacgcacccccctccactttgcggtggcagatggaaatgtgaccgtggtggatgtcctgacaagttatgagagctgtaacattacttcttacgataacctgttccggacaccgcttcactgggccgctttgctcggtcatgctcaaattgtacacctgctgctggaaagaaacaaaagcggaaccattccatcagattcccaaggcgctactccactccattatgcggctcagagtaatttcgcagagaccgttaaagtgttcttgaagcacccctctgttaaagatgactccgaccttgagggaaggacgtcatttatgtgggcagcagggaaaggcagcgacgatgtcttgagaacaatgttgagcctgaagagcgatattgatattaacatggctgataagtacggcggaaccgcgcttcacgccgctgccctctcaggccatgtatccaccgtgaagctgttacttgaaaataatgcgcaggtcgacgctaccgacgtaatgaaacacaccccactttttcgggcttgcgaaatgggccataaggatgtgatccagactctgattaaagggggtgcacgggtcgatctcgtggatcaggacgggcatagcttgttacattgggcagccttgggaggtaatgctgatgtttgtcagattctgattgaaaataaaattaaccccaacgttcaggactatgcgggtaggaccccactgcaatgcgccgcttatggtgggtatattaattgcatggccgttttgatggaaaataacgccgatcccaacatacaagataaggaagggcgtactgccttgcactggtcctgcaacaatggatacctggatgccatcaaattactgttggattttgccgcattcccaaatcaaatggagaacaatgaagagcgatatacccctctcgattacgccctcctgggggagaggcacgaggttatacagttcatgcttgaacatggcgcattgtcgattgcagcaatacaagatatagcagcgtttaagattcaggccgtatacaagggctacaaggtgcgaaaggcattcagagacagaaagaacctattgatgaagcacgagcagttacggaaggacgctgctgctaaaaagcgggaagaggaaaataaaaggaaggaggccgagcaacagaaaggccgtaggtcgccggacagttgtcggccacaggccctcccatgcctcccaagtactcaggatgtgcccagtaggcagtctagggccccatccaagcagccaccggcaggtaacgtggcccaagggcctgaacctcgggattctcggggatccccgggagggagcctaggaggcgcactgcagaaggagcagcatgtgtcatctgatctccaggggaccaatagtcgccgtccaaatgaaacagcgagggagcatagcaaaggacaaagcgcctgcgtgcacttcagaccaaatgagggtagtgatggttctcgacatccaggggttccgagtgtggagaaatccagaggtgagaccgccggagacgagaggtgtgctaagggaaagggatttgtgaaacagccgtcatgtatccgtgtggccggaccggacgagaagggcgaggactcacggagagccgcagcaagtctgccaccccatgacagccactggaagccctcccgaagacatgatacggaaccgaaagcaaaatgtgcccctcaaaaacgccgtactcaggagctccggggaggcaggtgctcacctgctgggtccagcagaccgggatctgcccgtggagaagcggtgcatgctggacaaaatccaccccatcatcggacgcctagaaataaagtgacacaggccaagctcacggggggactctatagtcacctgccccagtctacagaggagcttcgatctggcgcacgcagactcgagacgagtacgctaagcgaggatttccaggtcagtaaggaaacagatccggctcccggtccactgagtgggcagagcgtcaacatcgacctcctccctgtggagttgagactccagattattcaacgagaacgcaggcgaaaggagctgtttcggaaaaagaacaaagctgccgctgtgatccaaagggcttggcgatcttatcagctcaggaaacacttgagccacctgaggcatatgaaacagctgggggctggcgacgtggaccggtggaggcaagagtcgactgcacttctgttgcaagtctggagaaaagagctggagctgaaatttccacaaaccaccgccgtgagcaaggctcccaaaagcccatccaaaggaacttctgggaccaagtcaaccaagcactccgtgcttaaacagatctacggatgtagccacgagggtaaaattcaccatccaacacggtcagttaaagcctcttccgtgttgcgcctgaacagcgggaaggccgcaaccgccaagcagatggttggcaagaacatggggaaacactttcccctgttccatccccaacgccagaagacacttgagcagatctggcccggattttccaatggccatttaatctcatgggattattactgcagccaacacttaagtccatag

SEQ ID NO: 310281 - DNA, 2967 bp, Artificial Sequence
  derived and/or modified sequence
atgaagctgctgctgaccagaagagccaactggatgcagaaggacctggaggagatgacccccctgcacctgaccaccagacacagaagccccaagtgcctggccctgctgctgaagttcatggcccccggcgaggtggacacccaggacaagaacaagcagaccgccctgcactggagcgcctactacaacaaccccgagcacgtgaagctgctgatcaagcacgacagcaacatcggcatccccgacgtggagggcaagatccccctgcactgggccgccaaccacaaggaccccagcgccgtgcacaccgtgagatgcatcctggacgccgcccccaccgagagcctgctgaactggcaggactacgagggcagaacccccctgcacttcgccgtggccgacggcaacgtgaccgtggtggacgtgctgaccagctacgagagctgcaacatcaccagctacgacaacctgttcagaacccccctgcactgggccgccctgctgggccacgcccagatcgtgcacctgctgctggagagaaacaagagcggcaccatccccagcgacagccagggcgccacccccctgcactacgccgcccagagcaacttcgccgagaccgtgaaggtgttcctgaagcaccccagcgtgaaggacgacagcgacctggagggcagaaccagcttcatgtgggccgccggcaagggcagcgacgacgtgctgagaaccatgctgagcctgaagagcgacatcgacatcaacatggccgacaagtacggcggcaccgccctgcacgccgccgccctgagcggccacgtgagcaccgtgaagctgctgctggagaacaacgcccaggtggacgccaccgacgtgatgaagcacacccccctgttcagagcctgcgagatgggccacaaggacgtgatccagaccctgatcaagggcggcgccagagtggacctggtggaccaggacggccacagcctgctgcactgggccgccctgggcggcaacgccgacgtgtgccagatcctgatcgagaacaagatcaaccccaacgtgcaggactacgccggcagaacccccctgcagtgcgccgcctacggcggctacatcaactgcatggccgtgctgatggagaacaacgccgaccccaacatccaggacaaggagggcagaaccgccctgcactggagctgcaacaacggctacctggacgccatcaagctgctgctggacttcgccgccttccccaaccagatggagaacaacgaggagagatacacccccctggactacgccctgctgggcgagagacacgaggtgatccagttcatgctggagcacggcgccctgagcatcgccgccatccaggacatcgccgccttcaagatccaggccgtgtacaagggctacaaggtgagaaaggccttcagagacagaaagaacctgctgatgaagcacgagcagctgagaaaggacgccgccgccaagaagagagaggaggagaacaagagaaaggaggccgagcagcagaagggcagaagaagccccgacagctgcagaccccaggccctgccctgcctgcccagcacccaggacgtgcccagcagacagagcagagcccccagcaagcagccccccgccggcaacgtggcccagggccccgagcccagagacagcagaggcagccccggcggcagcctgggcggcgccctgcagaaggagcagcacgtgagcagcgacctgcagggcaccaacagcagaagacccaacgagaccgccagagagcacagcaagggccagagcgcctgcgtgcacttcagacccaacgagggcagcgacggcagcagacaccccggcgtgcccagcgtggagaagagcagaggcgagaccgccggcgacgagagatgcgccaagggcaagggcttcgtgaagcagcccagctgcatcagagtggccggccccgacgagaagggcgaggacagcagaagagccgccgccagcctgcccccccacgacagccactggaagcccagcagaagacacgacaccgagcccaaggccaagtgcgccccccagaagagaagaacccaggagctgagaggcggcagatgcagccccgccggcagcagcagacccggcagcgccagaggcgaggccgtgcacgccggccagaaccccccccaccacagaacccccagaaacaaggtgacccaggccaagctgaccggcggcctgtacagccacctgccccagagcaccgaggagctgagaagcggcgccagaagactggagaccagcaccctgagcgaggacttccaggtgagcaaggagaccgaccccgcccccggccccctgagcggccagagcgtgaacatcgacctgctgcccgtggagctgagactgcagatcatccagagagagagaagaagaaaggagctgttcagaaagaagaacaaggccgccgccgtgatccagagagcctggagaagctaccagctgagaaagcacctgagccacctgagacacatgaagcagctgggcgccggcgacgtggacagatggagacaggagagcaccgccctgctgctgcaggtgtggagaaaggagctggagctgaagttcccccagaccaccgccgtgagcaaggcccccaagagccccagcaagggcaccagcggcaccaagagcaccaagcacagcgtgctgaagcagatctacggctgcagccacgagggcaagatccaccaccccaccagaagcgtgaaggccagcagcgtgctgagactgaacagcggcaaggccgccaccgccaagcagatggtgggcaagaacatgggcaagcacttccccctgttccacccccagagacagaagaccctggagcagatctggcccggcttcagcaacggccacctgatcagctgggactactactgcagccagcacctgagcccctag

SEQ ID NO: 310282 - protein, 895 aa, Artificial Sequence
  derived and/or modified sequence
MNKSENLLFAGSSLASQVHAAAVNGDKGALQRLIVGNSALKDKEDQFGRTPLMYCVLADRLDCADALLKAGADVNKTDHSQRTALHLAAQKGNYRFMKLLLTRRANWMQKDLEEMTPLHLTTRHRSPKCLALLLKFMAPGEVDTQDKNKQTALHWSAYYNNPEHVKLLIKHDSNIGIPDVEGKIPLHWAANHKDPSAVHTVRCILDAAPTESLLNWQDYEGRTPLHFAVADGNVTVVDVLTSYESCNITSYDNLFRTPLHWAALLGHAQIVHLLLERNKSGTIPSDSQGATPLHYAAQSNFAETVKVFLKHPSVKDDSDLEGRTSFMWAAGKGSDDVLRTMLSLKSDIDINMADKYGGTALHAAALSGHVSTVKLLLENNAQVDATDVMKHTPLFRACEMGHKDVIQTLIKGGARVDLVDQDGHSLLHWAALGGNADVCQILIENKINPNVQDYAGRTPLQCAAYGGYINCMAVLMENNADPNIQDKEGRTALHWSCNNGYLDAIKLLLDFAAFPNQMENNEERYTPLDYALLGERHEVIQFMLEHGALSIAAIQDIAAFKIQAVYKGYKVRKAFRDRKNLLMKHEQLRKDAAAKKREEENKRKEAEQQKGRRSPDSCRPQALPCLPSTQDVPSRQSRAPSKQPPAGNVAQGPEPRDSRGSPGGSLGGALQKEQHVSSDLQGTNSRRPNETAREHSKGQSACVHFRPNEGSDGSRHPGVPSVEKSRELRLQIIQRERRRKELFRKKNKAAAVIQRAWRSYQLRKHLSHLRHMKQLGAGDVDRWRQESTALLLQVWRKELELKFPQTTAVSKAPKSPSKGTSGTKSTKHSVLKQIYGCSHEGKIHHPTRSVKASSVLRLNSVSNLQCIHLLENSGRSKNFSYNLQSATQPKNKTKP

SEQ ID NO: 310283 - protein, 159 aa, Artificial Sequence
  derived and/or modified sequence
MCWTRTATCPVWRSGQRPTSGRTMRGSGFGGRRHPYGKDSPAPPGSAELPGLQGSVPPHWGGVAGNSAGHRGPRARCPRGGAGGCAHHHPGPPQLLRDSRPCRTGWQESAGAEARGQGREVFFPPARRAAGTRHPGCVCAVGAAGAAAEGPAAPGGGGG

SEQ ID NO: 310284 - DNA, 2688 bp, Artificial Sequence
  derived and/or modified sequence
atgaacaagtccgaaaaccttttgttcgccggctcttctctagcaagccaagtgcatgccgccgctgttaacggcgacaaaggggcacttcaaagactgatcgtgggaaatagcgcgctgaaggacaaagaggatcaattcgggagaacacctctgatgtactgtgtcctcgctgaccgacttgactgcgccgacgccctgctcaaggccggagccgacgtcaataagaccgatcatagccagcggaccgcactgcacttggccgcccagaagggaaactaccgtttcatgaaattgctgttgactcggcgcgcaaactggatgcagaaggacctcgaggaaatgaccccacttcatctgacaaccagacaccgttcacccaagtgtctggcgctgctgttgaagtttatggcccctggcgaggtcgatacgcaggacaaaaacaagcagactgccttgcactggtcagcatactacaataatccagaacacgttaagctccttatcaaacatgacagtaatattggaatccccgatgtagagggaaagattccattgcactgggccgcaaatcacaaggaccctagcgccgtgcatacggtgcgttgtattcttgatgctgcacccacagaatcactcctgaactggcaagattatgaaggccgaacgccactccactttgccgtggcggacggaaatgtgaccgtagtcgatgttctgaccagctacgaatcctgcaacatcacatcctacgataatctcttccgcacgcctctgcactgggctgctctcttgggacacgctcaaattgttcatctgcttctcgaacgaaacaagagcgggacgattccctcggattcccagggtgcgactcccttacactacgcagctcaaagtaactttgcagagactgtcaaagtcttccttaagcaccctagcgttaaggatgattccgaccttgagggccgcaccagtttcatgtgggccgctggcaagggttccgacgatgtcctcaggaccatgcttagcctgaagagcgacatcgatatcaatatggctgataaatatggagggaccgccctgcacgcggcagctctttccggccatgttagcaccgtaaaacttctactggagaacaatgctcaggtggatgccacagacgtgatgaagcacacacctctgttccgcgcatgcgaaatgggccacaaggatgtaatccagaccttgattaagggcggcgcaagagtcgacctggtggaccaggatggacactccctactccattgggctgcactggggggcaacgctgatgtatgccagattctcatcgagaataagattaatcccaacgtccaggattatgccggacggactcctctgcagtgcgcggcttacgggggctatattaactgtatggccgttctgatggagaataatgccgatcccaatatccaggataaggaaggccgaaccgccctgcactggagttgcaacaatggctatctggatgccattaaactgctgctggatttcgcggctttcccaaatcaaatggaaaataacgaagagagatatactcctctggattacgcccttttgggagaacgccatgaggtcatccagtttatgcttgaacacggcgcattgtccatcgccgccattcaggatattgcggcttttaagatacaggcggtctataaaggatataaggtgcgcaaggccttcagggaccgcaagaacttgctgatgaaacatgagcagctgaggaaggatgcagctgccaaaaagagggaggaggagaacaaacggaaagaagccgaacagcaaaagggccgccgtagcccagatagctgccgaccccaggccctgccatgtctaccatctacacaagatgttccatcacgacagtcccgggccccatcgaagcaacccccggcaggaaacgttgctcagggaccagagcctagagattcacgcggaagtcctgggggcagtctggggggggctctccaaaaggagcagcacgtatctagtgatttgcagggcaccaatagccgacggccgaatgaaaccgctcgcgagcacagcaaaggacagtcggcgtgtgtgcacttccgtcccaatgagggctcagatggaagccggcacccaggtgtgcccagcgtcgaaaaatctcgggagctgcgtctccagattatccagcgggagagacgtaggaaggagctattccggaagaagaataaagccgccgccgtcattcagcgggcctggcggtcatatcagctccggaagcatctgtcccatttgcggcacatgaagcagcttggggcaggagacgtagacaggtggaggcaagaatcaacagccttgctcctgcaggtctggcgtaaggagctggaactcaagtttcctcagaccaccgctgtttcgaaggctccaaagtctccttcgaagggaacgtctggcactaagtcaacaaagcacagtgtcctgaagcagatttacgggtgctcacatgagggaaagatccaccaccctacccggagtgtcaaggcaagctccgtgctgaggctgaatagcgtcagcaatctgcagtgtatacacctgctggagaacagcggaaggtccaagaatttctcttataatctccagagtgccacacagcccaaaaataaaaccaaaccctag

SEQ ID NO: 310285 - DNA, 2968 bp, Artificial Sequence
  derived and/or modified sequence
cttttgaggggctcggctagcttcagcgccgtggggtctgacctggctggatatagtgtaccggcccggcaggaggggcggcccggtccgggttgcgcctcctggagccgcccccgggacgtcagtcctggaggaggcgagggttgctccggttgctaagaagactatgaacaagtcagagaacctgctgtttgctggttcatcattagcatcacaagtccatgctgctgccgttaatggagataagggtgctctacagaggctcatcgtaggaaactctgctcttaaagacaaagaagatcagtttgggagaacaccacttatgtattgcgtgttggctgacagattggattgtgcagatgctcttctgaaggcaggagcagatgtgaataaaactgaccatagccagagaacagccctccatcttgcagcccagaagggaaattatcgtttcatgaaactcttacttacacgcagagcaaactggatgcaaaaggatctggaagagatgactcctttgcacttgaccacccggcacaggagccctaagtgtttggcacttctgctgaagtttatggcaccaggagaagtggatacacaggataaaaacaagcaaacagctctgcattggagtgcctactacaataaccctgagcatgtgaagctgctcatcaagcatgattctaacattgggattcctgatgttgaaggcaagatcccacttcactgggcagccaaccataaagatccaagtgctgttcacacagtgagatgcattctggatgctgctccaacagagtctttactgaactggcaagactacgagggtcgaactcctcttcactttgcagttgctgatgggaatgtgaccgtggttgatgtcttgacctcatatgaaagctgcaatataacgtcttatgataacttatttcgaaccccactgcactgggcagctttattaggccatgcacagattgtccatctccttttagaaagaaataagtctggaactatcccatctgacagccaaggagccacacctttgcactatgctgctcagagtaactttgctgaaacggttaaagtgtttttaaaacatccttcagtgaaagatgattcagacctggaaggaagaacatcctttatgtgggcagctggcaaaggcagtgatgatgtccttagaactatgctgagcttaaaatcggacatagatattaacatggctgacaaatatggaggtacagctttgcatgctgctgctctttctggccatgtcagcaccgtgaagttattactggaaaataatgctcaagtagatgctactgatgttatgaaacatactccacttttccgagcctgtgagatgggacacaaagatgtgattcagacactcattaaaggtggagcaagggtagatctagttgaccaagatggacattctcttctacattgggcagcactgggaggaaatgctgatgtttgccagatattaatagaaaataagatcaatccaaatgtccaggattatgcaggaagaacccctttgcagtgtgcagcatatggaggctatatcaactgcatggcagttctcatggaaaacaatgcagaccctaacattcaagacaaagagggaagaacagctttgcattggtcctgcaacaatggataccttgatgccattaaattactgctagactttgctgctttccctaatcagatggaaaacaatgaagagagatacacaccccttgattatgctttgcttggtgagcgccatgaagtgatccagttcatgttggagcacggtgccctgtccatcgcagccatacaagacatcgccgccttcaaaatccaagctgtctacaaagggtacaaggtcagaaaagccttccgagacaggaaaaatctcctcatgaagcatgaacagttgagaaaagatgctgctgccaaaaagcgagaggaagaaaacaaacgaaaagaggcagaacagcaaaaaggaaggcggagcccagattcctgcagaccccaggcccttccctgtctgcctagcacccaggatgtgcccagcaggcagagccgggcccccagcaagcagcctcctgctggcaacgtggcccaaggccctgagccaagagacagcagaggatctccaggagggtctctaggcggagccctccagaaggagcagcatgtttcctcagatttgcagggaacaaactccagaaggccaaatgaaacagccagagaacattctaaaggccaatctgcttgtgtccacttcagacccaatgaaggcagtgatggaagcaggcatccaggagttccctctgttgagaagtccagagagctccgactgcagataattcagagagaacgaaggaggaaggagctgtttcgcaaaaagaacaaggcagcagcagtcatccagcgcgcctggcgaagctaccagctcaggaagcacctgtcccaccttcggcatatgaagcagcttggagctggagatgtggacagatggaggcaagagtctacagcattgctcctccaggtttggaggaaggaactggaactaaaattcccccaaaccactgcagtaagcaaggcccccaagagtccatccaagggcacctcaggcacaaagtccaccaagcactcagtgcttaagcaaatctatggttgttctcacgaagggaaaatacatcatcctacaagatctgtaaaagcctcttctgtgctgcgtctcaactcagtgagcaacctacagtgtatacatctccttgagaacagtggaagatcaaagaacttttcttataacctgcaatcagctactcagccaaaaaacaaaacaaaaccttgactgcctatggaggaagactgtgttcgggggagctggcatagctagtgcagagttcagattttctgctgataatcttttacaccttgggaaaactttaatatccgtacctgaagg

SEQ ID NO: 310286 - DNA, 2688 bp, Artificial Sequence
  derived and/or modified sequence
atgaacaagtctgagaacctgctgtttgctggcagcagcctggccagccaggtgcacgccgctgctgtgaatggagacaagggggccctgcagaggctcatcgtgggcaacagcgccctgaaggacaaggaggaccagtttggaagaacacccctgatgtactgtgtgctggccgaccggctggactgtgctgatgccctgctgaaggccggggctgatgtgaacaagacagaccacagccagaggacagccctgcacctggccgcccagaagggcaactaccgcttcatgaagctgctgctgacccggcgggccaactggatgcagaaggacctggaggagatgacccccctgcacctgaccaccaggcacaggagccccaagtgcctggccctgctgctgaagttcatggcccctggagaggtggacacccaggacaagaacaagcagacagccctgcactggagcgcctactacaacaaccctgagcacgtgaagctgctgatcaagcatgacagcaacatcggcatcccagatgtggagggcaagatccccctgcactgggccgccaaccacaaggaccccagcgctgtgcacacagtgcgctgcatcctggatgctgcccccacagagagcctgctgaactggcaggactatgagggccgcacccccctgcactttgctgtggctgatggaaatgtgacagtggtggatgtgctgaccagctatgagagctgcaacatcaccagctatgacaacctcttccgcacccccctgcactgggccgccctgctgggccacgcccagatcgtgcacctgctgctggagaggaacaagagcggcaccatccccagcgacagccagggcgccacccccctgcactacgccgcccagagcaactttgctgagaccgtgaaggtgttcctgaagcaccccagcgtgaaggatgacagcgacctggagggccgcaccagcttcatgtgggccgccggcaagggcagtgatgatgtgctgcggaccatgctgagcctgaagagtgacatcgacatcaacatggctgacaagtatggaggaacagccctgcatgctgctgccctgagcggccacgtgtccacagtgaagctgctgctggagaacaatgcccaggtggatgccacagatgtgatgaagcacacccccctcttccgggcctgtgagatgggccacaaggatgtgatccagaccctcatcaagggcggggcccgggtggacctggtggaccaggacggccacagcctgctgcactgggccgccctgggcggcaatgctgatgtgtgccagatcctgattgagaacaagatcaaccccaacgtgcaggactatgccggccgcacccccctgcagtgtgccgcctatggaggctacatcaactgcatggctgtgctgatggagaacaatgctgaccccaacatccaggacaaggagggccgcacagccctgcactggagctgcaacaacggctacctggatgccatcaagctgctgctggactttgctgccttccccaaccagatggagaacaatgaggagcgctacacccccctggactatgccctgctgggggagagacatgaagtcatccagttcatgctggagcacggggccctgagcattgctgccatccaggacattgctgccttcaagatccaggccgtgtacaagggctacaaggtgaggaaggccttccgggacaggaagaacctgctgatgaagcatgagcagctgaggaaggatgctgctgccaagaagcgggaggaggagaacaagaggaaggaggccgagcagcagaagggccgccgcagcccagacagctgccggccccaggccctgccctgcctgcccagcacccaggatgtgcccagccggcagagccgggcccccagcaagcagcccccagctggaaatgtggcccagggccctgagccccgggacagccggggcagccctgggggcagcctgggcggggccctgcagaaggagcagcacgtgtccagtgacctgcagggcaccaacagccggcggcccaatgaaacagcccgggagcacagcaagggccagagcgcctgtgtgcacttccggcccaatgaaggaagtgatggcagccgccaccctggggtgcccagcgtggagaagagccgggagctgcggctgcagatcatccagcgggagaggaggaggaaggagctgttcaggaagaagaacaaggctgctgctgtgatccagagggcctggaggagctaccagctgaggaagcacctgagccacctgcggcacatgaagcagctgggcgctggagatgtggaccgctggaggcaggagagcacagccctgctgctgcaggtgtggaggaaggagctggagctgaagttcccccagaccacagctgtgtccaaggcccccaagagccccagcaagggcaccagcggcaccaagagcaccaagcacagcgtgctgaagcagatctacggctgcagccatgagggcaagatccaccaccccaccaggtctgtgaaggccagctctgtgctgcggctgaacagcgtgagcaacctgcagtgcatccacctgctggagaacagcggccgcagcaagaacttctcctacaacctgcagagcgccacccagcccaagaacaagaccaagccctag

SEQ ID NO: 310287 - DNA, 2688 bp, Artificial Sequence
  derived and/or modified sequence
atgaacaagagcgagaacctgctgttcgccggcagcagcctggcctctcaagtccacgccgctgccgttaacggggacaaaggtgctttgcagagattgatcgttgggaacagcgctctcaaagataaggaggatcagttcggtcgaacccctctgatgtattgtgtgctcgcggacaggttagattgcgccgacgcactgttgaaggcaggtgctgacgtaaacaagacagatcactcacagaggaccgccctgcacctagcagcccagaaaggcaactacaggttcatgaagctgctgctcaccagacgagccaattggatgcaaaaggatctggaagagatgaccccactccatttaaccactcggcatcgatctcctaagtgcctggccctgctcctcaagttcatggcaccaggtgaagtcgatacacaggataagaataaacaaactgccctgcattggtccgcttactacaacaaccctgagcatgtgaagttgctgattaagcatgattccaacatcgggatccccgatgtggaagggaagattccccttcactgggcagccaatcacaaagatccctctgcggtgcatacggttaggtgtatcttggacgcagccccgactgaatcgttgctgaactggcaggattatgagggcagaacccccctccactttgcggtcgccgacggaaatgtaacggtggtcgacgtcctgacttcttatgaaagctgcaacattaccagctatgacaacctgtttagaacgcctcttcactgggcggctctactaggacacgcccagatcgtgcacctgcttctcgagaggaacaagagcggcacaataccgtccgattctcaaggagctaccccactgcactatgcagcccagagtaactttgctgagacagtaaaggtctttcttaagcatccgtctgtgaaagatgattccgatctggagggacgtacctcttttatgtgggcagccggcaaggggtcagatgacgtattgaggaccatgctaagcctgaaaagcgatatagatataaacatggccgataagtacggcgggacagctcttcacgctgctgccctttctggccatgtcagtactgttaaactgctccttgaaaataatgctcaggtcgacgccaccgacgtcatgaaacataccccactgttccgggcctgcgaaatgggccacaaagatgtgatacagaccctgattaagggcggagcgcgtgtcgatctcgtggaccaagacggacattccctgctgcattgggctgctctaggcgggaacgctgacgtgtgtcagatactgattgaaaacaagatcaacccaaacgtgcaagactatgccggaaggactccacttcagtgtgcagcatatgggggttacatcaactgtatggctgtcctaatggagaacaacgccgacccaaacattcaggataaagagggccgcaccgcccttcactggagttgtaacaacgggtatctggatgcaattaaactgctgttagatttcgcggccttcccaaatcagatggaaaacaacgaagagaggtacacaccactagactatgcactgctgggtgagagacatgaggtcatccagttcatgctggaacacggggcgctgtctattgctgcaatacaagatattgccgcctttaaaatacaggccgtgtacaagggctacaaagtgagaaaggctttccgtgacagaaagaaccttctcatgaaacatgagcagctgagaaaggacgcagcggccaagaagagagaggaggaaaacaagcggaaggaagcggaacaacagaaaggccgccgatcccccgatagttgccggccacaggccctgccgtgcttaccctccacccaagacgtgccttcgcgtcagtcaagagcaccaagcaagcaaccccccgccgggaacgtggcccagggacctgaacccagggacagccggggctcgcccggaggttctcttgggggggccctgcagaaggagcagcatgtaagctctgaccttcaaggtaccaattcgcggcgaccaaacgagactgctcgagagcactcgaaaggacagtctgcgtgtgtgcatttccggccaaacgagggtagcgacggctcccggcatccgggcgtgccaagcgtagagaagtcccgcgagttaagactacagataatccagcgcgaaaggaggcgtaaggaactcttccggaagaagaacaaagccgccgctgttatccagagagcttggcggagctatcagcttcggaagcacctgtcccatctgagacacatgaagcaactgggtgctggggacgttgaccgctggcgccaggagtcaaccgctcttttactgcaggtgtggcggaaggagctggagctgaaattcccccagaccactgccgtgagcaaagcacctaaaagccctagcaagggtaccagcggaacaaagtctacgaaacactccgtgttgaaacagatatatggttgtagtcacgaggggaaaatccatcatcccacccggtctgtgaaagctagctccgtgctcagactcaacagcgtctccaatctccagtgcattcatctcctggagaattccggtagaagtaagaacttctcgtacaatttacagtccgccactcagcctaaaaacaagacaaagccttag

SEQ ID NO: 310288 - DNA, 2688 bp, Artificial Sequence
  derived and/or modified sequence
atgaacaaatcagaaaacctactttttgctggcagcagtctggccagtcaagtgcacgcagctgccgtgaatggggacaagggcgcactgcagagactcatcgtgggtaactcggcactgaaggataaggaggatcagttcggaaggaccccgctgatgtactgcgtgctggctgatcgcctggattgtgcagatgctctgctgaaagccggtgcagacgtaaataaaactgatcattcacagagaaccgccttacatctggctgcacaaaaggggaattaccgattcatgaagttgctactgacaaggcgtgctaattggatgcagaaggacttggaagagatgacacctttgcatttgactacaagacacagaagccccaagtgcctcgccctgctgctcaagttcatggcacccggagaggtagacacacaggacaagaataaacagacagcactgcactggtctgcttactataataatcctgaacacgtgaaacttctgatcaagcatgatagtaacattggcatccccgacgttgagggcaagatccctttgcattgggccgctaaccacaaggacccctcagcagtccataccgtgagatgtatcctggatgcagccccaacagaatctctgctgaactggcaggactacgaaggccgtacacctctgcactttgccgtcgcagatgggaatgtcacggtggtggatgtcctcaccagctacgaaagctgtaatattacatcatacgataacttgttccggacccctctacattgggcggcactactgggtcacgctcaaatcgtgcatcttctactcgagcgtaataagtcgggcaccataccctccgacagccagggcgctacacccttgcactacgccgcacagagcaatttcgcagaaactgtgaaggtcttcctgaagcatccctccgtcaaggatgatagcgatctcgagggaaggacctctttcatgtgggcggctggaaagggatcagacgatgtattgcgcactatgctgtctttgaaatctgatatcgatatcaacatggccgataaatatggcggtaccgccctgcacgctgctgccctaagcggccacgtgtccacagtgaagctgctgcttgaaaataacgcacaggtagatgcgaccgatgtgatgaaacatactccattgttccgagcctgcgagatgggtcataaggatgtgatccagacactgatcaagggcggagccagggtggatctggtggatcaggatggtcactcactcctgcactgggcagccctgggcggaaacgctgacgtctgccagattttgatcgagaataagataaaccctaatgttcaggattacgcgggacgcactcccctgcagtgtgctgcctacggcggttatattaattgtatggcagtcttgatggagaataatgccgatccaaacatccaggataaagagggtcgtacggctctgcattggagctgcaataacggctatctggatgccatcaagctgctactcgacttcgctgcgttcccaaaccagatggaaaataacgaggaaagatacaccccactggactatgcactcctaggtgagaggcatgaggttatccagttcatgctcgaacacggtgcattgtccattgctgccatccaagacatcgcagccttcaaaattcaagccgtttacaagggctacaaagttcgaaaagcctttcgggataggaaaaacttactgatgaagcatgaacaactcagaaaggacgcagcggctaaaaaacgagaggaagagaataagagaaaagaggccgagcagcagaaaggtagaaggagccctgactcatgccggcctcaggctctgccctgtctgccttctacacaggatgtgccatccagacagagcagggcaccatctaagcagcccccagccggaaatgttgcacagggaccggagcccagagattcgagaggatcccccggaggttccctgggcggtgccctccagaaagagcagcacgttagtagcgacctgcaggggacaaatagtagaaggcccaatgagactgcacgcgagcacagcaagggacagtctgcgtgcgtccacttcaggccaaacgaaggctcagatggaagccgccatcccggagtgccatccgtggagaagagtagagagctgagactccagatcatccagcgggagcgaagacggaaggagttattcaggaagaagaacaaggccgctgccgttatccagagagcttggcgcagctaccagctgaggaagcatctctcccacttaagacacatgaaacagctcggggctggtgatgttgataggtggagacaggagtctaccgccctcttactccaggtctggcggaaggaattggagctgaagttccctcaaactacagccgtttctaaggcacccaaatccccctctaaagggactagtgggacaaaaagcacgaaacactcagttctgaaacagatctacggctgttcccatgagggcaaaatccaccatccgactcgcagcgtgaaagcaagtagtgtactgagactgaattccgtcagcaacttgcagtgtatacacctgctggaaaactcaggccgatctaagaacttctcgtataaccttcagtccgctacacaacccaaaaataaaactaaaccgtag

SEQ ID NO: 310289 - DNA, 2688 bp, Artificial Sequence
  derived and/or modified sequence
atgaacaagagcgagaacctgctgttcgccggcagcagcctggccagccaggtgcacgccgccgccgtgaacggcgacaagggcgccctgcagagactgatcgtgggcaacagcgccctgaaggacaaggaggaccagttcggcagaacccccctgatgtactgcgtgctggccgacagactggactgcgccgacgccctgctgaaggccggcgccgacgtgaacaagaccgaccacagccagagaaccgccctgcacctggccgcccagaagggcaactacagattcatgaagctgctgctgaccagaagagccaactggatgcagaaggacctggaggagatgacccccctgcacctgaccaccagacacagaagccccaagtgcctggccctgctgctgaagttcatggcccccggcgaggtggacacccaggacaagaacaagcagaccgccctgcactggagcgcctactacaacaaccccgagcacgtgaagctgctgatcaagcacgacagcaacatcggcatccccgacgtggagggcaagatccccctgcactgggccgccaaccacaaggaccccagcgccgtgcacaccgtgagatgcatcctggacgccgcccccaccgagagcctgctgaactggcaggactacgagggcagaacccccctgcacttcgccgtggccgacggcaacgtgaccgtggtggacgtgctgaccagctacgagagctgcaacatcaccagctacgacaacctgttcagaacccccctgcactgggccgccctgctgggccacgcccagatcgtgcacctgctgctggagagaaacaagagcggcaccatccccagcgacagccagggcgccacccccctgcactacgccgcccagagcaacttcgccgagaccgtgaaggtgttcctgaagcaccccagcgtgaaggacgacagcgacctggagggcagaaccagcttcatgtgggccgccggcaagggcagcgacgacgtgctgagaaccatgctgagcctgaagagcgacatcgacatcaacatggccgacaagtacggcggcaccgccctgcacgccgccgccctgagcggccacgtgagcaccgtgaagctgctgctggagaacaacgcccaggtggacgccaccgacgtgatgaagcacacccccctgttcagagcctgcgagatgggccacaaggacgtgatccagaccctgatcaagggcggcgccagagtggacctggtggaccaggacggccacagcctgctgcactgggccgccctgggcggcaacgccgacgtgtgccagatcctgatcgagaacaagatcaaccccaacgtgcaggactacgccggcagaacccccctgcagtgcgccgcctacggcggctacatcaactgcatggccgtgctgatggagaacaacgccgaccccaacatccaggacaaggagggcagaaccgccctgcactggagctgcaacaacggctacctggacgccatcaagctgctgctggacttcgccgccttccccaaccagatggagaacaacgaggagagatacacccccctggactacgccctgctgggcgagagacacgaggtgatccagttcatgctggagcacggcgccctgagcatcgccgccatccaggacatcgccgccttcaagatccaggccgtgtacaagggctacaaggtgagaaaggccttcagagacagaaagaacctgctgatgaagcacgagcagctgagaaaggacgccgccgccaagaagagagaggaggagaacaagagaaaggaggccgagcagcagaagggcagaagaagccccgacagctgcagaccccaggccctgccctgcctgcccagcacccaggacgtgcccagcagacagagcagagcccccagcaagcagccccccgccggcaacgtggcccagggccccgagcccagagacagcagaggcagccccggcggcagcctgggcggcgccctgcagaaggagcagcacgtgagcagcgacctgcagggcaccaacagcagaagacccaacgagaccgccagagagcacagcaagggccagagcgcctgcgtgcacttcagacccaacgagggcagcgacggcagcagacaccccggcgtgcccagcgtggagaagagcagagagctgagactgcagatcatccagagagagagaagaagaaaggagctgttcagaaagaagaacaaggccgccgccgtgatccagagagcctggagaagctaccagctgagaaagcacctgagccacctgagacacatgaagcagctgggcgccggcgacgtggacagatggagacaggagagcaccgccctgctgctgcaggtgtggagaaaggagctggagctgaagttcccccagaccaccgccgtgagcaaggcccccaagagccccagcaagggcaccagcggcaccaagagcaccaagcacagcgtgctgaagcagatctacggctgcagccacgagggcaagatccaccaccccaccagaagcgtgaaggccagcagcgtgctgagactgaacagcgtgagcaacctgcagtgcatccacctgctggagaacagcggcagaagcaagaacttcagctacaacctgcagagcgccacccagcccaagaacaagaccaagccctag

SEQ ID NO: 310290 - DNA, 997 bp, Artificial Sequence
  derived and/or modified sequence
agatgaaaaccgggcgggatggcagccccggggccagggatgcgggagccgccgggaagacccgcgcgccgctcgactcagagggactcacaccttcccccgacaaagaggcggccccactgtcgaccaagtgcccaaggcattgtgggagtcatgattccaagatgcccgcgacggaaaatggaacttgtcagctccttgtcatgggagcattgtgggcgccacaactcattcagctgcagtgaaaagactgttgcatgtcgctgtgcagcctcttatcgccgaggtctggcttccgctgctgctgcgcggcccctcccccgcccgcccagccccaccaggaagcccagggcggactcgtcgagctcctaatgcacgcggcggcgagaaaaacgctcttcaactttccgccggcgccctcccgcgcttccccgggccacagggtcgcctgtcaaccggacagagcccgcaagagcgggtcatgggcggtcgcccagcggcgccgagagcaggaggaagccggagcccgcgcgggcgccgtggatcccctcggcctcccgttggtatcttccatctcatgcgttcagcattgtaacctcgcggcgggcgtgcagaccggacgccctcccgcttcttctaccgactgctaggcacaccagtgggttcattttgaaagaggcccttgcaccgggctttgcaaggaagccggcaaggttagattgaaggttagaagccaattagactagaatcctgcgatctggtgagactgccgccttaaaatgcaccaaacagtttttgaacctggagggctaacaggcgggaaaaacatctgcaagactgccaccgtgtatttttctcaagtaacaggctatccacagttttggaattccttagtgaaactgtcacacaggcacaaacacatgtcagctttccttctagtttgtaaataatatttgtaatttacaggccactgtattcccaactttgcaccatgtga

SEQ ID NO: 310291 - DNA, 147 bp, Artificial Sequence
  derived and/or modified sequence
atgagccgggccggcggccggggcgagcagagccggtggggccggagggccgagctccggggccttgggaggcctgaagcacctttacggctgggccccgatgtctgcggttcagtaccttgcgcacgcggggccggttccgagtag

SEQ ID NO: 310292 - DNA, 6590 bp, Artificial Sequence
  derived and/or modified sequence
gagattcctcaggcttcccttgtgaggctgcctgggttctgccgctgggtggtttgggatgtccaagagatatcccctttcagccagtgactcggtcctcagttgctgctccggaaagacgctggggctgggaagggccctgtgtcctctggctttaaaatgggcaatgctattgaaaaacagaagcccttgaaacgaagtcatctgtacccctggaaacaagactctcagcgttctcatctctcttccttcaccatgaagctgatggacaaattccactcacccaaaatcaagagaacgccatcaaagaagggaaaaccagctgaggtgtccgtaaagattccagagaagcctgtgaacaaagaggcaacagacagatttctaccagagggctaccctctccccttggatctggagcagcaggcagtagaatttatgtccaccagtgctgtggcttccaggtctcaaaggcagaagaacctgagctggctggaggagaaagagaaggaagttgtcagtgccctgcgctactttaagaccattgtggacaaaatggcaattgataagaaggtactggagatgcttccagggtcagccagcaaggtgctggaggccatcttacccctggtgcagaacgatcctcgaattcagcacagctcagccctctcttcctgctatagccgagtgtaccaaagcctcgccaacctcattcgctggtctgaccaagtgatgctggaaggcgtgaactcagaagacaaggagatggtgacgactgtgaagggggtcatcaaggctgtgctggatggagtgaaggagctggtcaggctcaccatcgagaagcagggacgtccgtctccgacgagccccgtgaagcccagttcccctgccagcaagcctgatggcccagcagagctccccctgacagaccgcgaggtagagatcctaaacaagacgactgggatgtcacagtcaactgagctcctcccagatgccacggatgaagaggtcgcgccccccaagcctcctctgcctggcattcgggtggttgataatagtcctccaccagcattgccacccaagaaaagacagtcggcgccgtcccctacccgagtggctgtggtggcccccatgagccgagccaccagtggctccagtttgcctgttggaatcaataggcaggattttgatgttgactgttacgcacagaggcgactgtcaggaggcagccactcatatggtggagagtcgccccgcctctccccctgcagcagcataggcaagctcagcaagtcagacgagcagctgtcctctctggacagggacagtgggcagtgctcccggaacacaagctgtgaaacactagaccactatgatcccgactatgaattcctccagcaagacctctctaacgcagaccagatacctcagcagacggcctggaaccttagcccgttgccagagtctttgggggagtctgggtctccatttcttggccctcctttccagctgcctcttggcggccatccccagccagacggacctctggccccagggcagcagacagatacgccacctgctctccccgagaagaagcgcaggagcgcagcctcccagacggcggacggctctggctgcagggtgtcctacgagcggcatccctcgcagtatgacaacatctctggggaggacctgcagagcacagccccgatcccatccgtcccctacgcgccctttgctgctattctgccctttcagcatggaggttcctcagcccctgtcgaatttgtgggtgattttactgctcctgagtcaaccggtgacccagaaaaaccacctcctctaccagagaagaaaaacaaacacatgctggcctacatgcagttgctggaggactactcggagccgcagccctctatgttctaccagacgccacagaacgagcacatctaccagcagaagaacaagctcctcatggaggtatacggcttcagcgactccttcagtggggtggactccgtgcaggagctggccccgccgcccgccctaccccccaagcagcggcagctgcaggcctcctgtgctgcttcttccttctcctctgtctcccactgtgtccagcaaactaaagtggccttcacccccgaggacggcagtgccgctcagggcctcagtgtgtccgtctctaactcctttctcagccggcacggcagcttgcccgtgccctcgtataagtctgtgtttaggtcctactcccaggatttcgtgcctcaccaccaagcttccgttccgcctttccttccgcctacctcctcttcctctccacatttcccacctgcccaccagtctcagagctctgacttagccgtgccaaccatggccggtccacctcccagcaccgtggacgggcctctctcggcttctcaggagagcagctttcatgggaatactgtctgccttccttccgaaacctctttcactgactcggagccaccggctgggaaagacggacatcccagagatccctcagcggtcagcggcgtccctgggaaggacagcagagacggcagtgagagggccccaaagtcaccagatgctctggagtcggctcagtcggaggaggaagtggacgagctgtccctcattgaccacaacgaaattatgtccaggctgacgctcaagcaggagggtgatgacgggccggacgtccgcggaggatctggggacatcttactggtccatgctactgagactgacaggaaagatttggtgttgtactgcgaggcattcctgaccacctacaggaccttcatctccccagaggagctcatcaagaagctgcagtacagatatgagaaattctctccctttgccgacacattcaagaagcgcgtcagcaagaacacgttcttcgtgctggtacgggtggtggatgagctctgcctggtggagttgacagaagagatcctgaagctgctgatggaactggtcttccgcctggtgtgcaatggggagctgagcctggcccgtgtgctccggaagaacatcctggacaaggtggaccagaagaagctactcaggtgtgccacctccagccagcccctggcagcccggggggtagcagccaggccggggaccttgcacgactttcacagccatgagatagcggagcagctaacgctgctggatgctgagctcttctataaaatagagattcctgaggttttgctttgggcaaaagagcagaatgaggagaagagccccaacttgacccagttcacggagcacttcaacaacatgtcctactgggtccggtccataatcatgttacaggaaaaggcccaggacagggaacggctgctcttgaagttcatcaagatcatgaagcacttgcggaagctgaataacttcaactcctacttggccatcctctctgccctggactcggcgcccatccgcaggctggagtggcagaagcagacttcagagggcctggccgagtactgcacactgatcgacagctcgtcctccttccgagcctaccgggccgccctctcggaggtggaaccgccgtgcatcccgtacctggggctgatcctgcaggacctgaccttcgttcacctgggaaacccagactacatcgacgggaaagtgaacttctccaagcggtggcagcagttcaacatcctcgacagcatgcgctgcttccagcaggcgcactatgacatgcggaggaacgacgacattataaacttcttcaatgacttcagtgaccacctggctgaggaggccctatgggaactgtctctgaaaattaaacccaggaacataacaaggagaaaaacagaccgggaagagaagacctaggagcagacgccgggatccaggagaatgctcgaggggcgcagagggcagctcccagaccggagaggaccttggacctgttaggcgcatggcaggagtcccggcctcggagccatgaggctggccagccctcagcggggccgggcgggagctggagcctgccagccgcttcctgcctccttcctctgtgggagcagacccgtgggcctcagggcagccagcaggcaggtcttgttgccaatttacaaaccggtggttttctggtttggttttgttttctgcttttacttccatctctcccctcttgaccttccacccactcccctccagggagagagcagcagagacctcatcagcagaccaaggaagtggtgggtgctccccctccctaagctccagggtccctgaatcttctgaaatctcaaatgagtggaggcctcctggggtggcctgtcctgcaggggccctggaatgggggcaagcagctgggtgggcagaatgcagagtagactcgggggaggatcctttcactttccgcttccccttctgatgcatggaggatggtgtgagcttttcagcaggcccggaaaggtacgcaggtgacgccttagcagccccgcagctggtgctctgccccgcggtactggcgccatcagggcctcccttgcccgcctgagagcagcagcagtctctgtcatcccgtcgccccttaccccccaccccaggccactgggcccctcccacaccacctggggagctgagaagaggaggctggagtaagggaggacttgatcatccaagaaatactttttattgctgggagtcttctgaacctcaccaaactgaggccagagctgagctcctgggggagttaattcagaggggagaggccagcacctccctcctccatcgctcgctgtgtgccttaaactccatctcatgtccctccccatcccctggctttccctccctccttgccccatcctgggccagccagcagggctcctcctctggctcttcagacctttcagccagtgctgtcagtgcccctgggagggaagggcatccctgaggcacccgaatggtccctcagggtgcagggaggcagaagcctggccacagaggagcctcctaaggcagcagctgcagcaagcgcaccctctccccactctccccacgccagagcggcttccagagcagatgctgtttccatcctcctcgtcaaaaccattctcgctgctgagcttgacaatctgggcaaggcttgtggggcgcttgacaaacagaatctgccctgtgccgcctggttccgtggcctccagcatgagcctgcaggcagggcgctgcgggaacccagttgtgctgccccagcccatgcctccgggtctgctgtgcatgaatgagtgctcacttgtcccgggtttaggacgtggtcaagtgaacagcagggtctaactgtgcttacttagcccagttcaaacagaacaaaggaaaaatatagaaagcaacatctgttgatcatttaggtttttttttaaaccaccatgtcactttgagtccttcatgggtttttgaacagcatttatcaagaagaaaatgtgggctttttcccctctcccgtgttttgtttgtcctgtagatagagggaggaaagccgtgcagtggcaggcgggaccccctctggtggcgggaccccctcttgcggtggtcttgcggggccagccgggacctgtcactttattatttaaggagtgtgtgtgtagagtcgctggcttattaacagtattgtgtgtgggttgggtttttagtttgttccttctttttgaagtcccttcatttcaatccttgactctctctccccttcccttgcccagctctgttgaatgctgctgtgcgcgtgtgagggccgctctgcacacagggcccttgggttgtgtgaactgaaattctccctgtatttgtgagactcgcaggagtccccatctgtagcacaggcaatgccagtgccatgctgcagcctcagaaaccaggcctctcactccagcagcaggcagaaccgtgtctgtggtcgggtgctgtccacagctctgtctgccttgttcttgggcttgagctggatagaggtggggtctcttcaccttccctgaattcagaacagaccctgtgcctggccccagtgtgcccaggcaattccccaggccctcactgggagcccttggtgttctgagcagcagggcccaggcagcacatgagcagtgcccaggggctccctgcgtgaggacggcaaggtgcgatgtatgtctaacttattgatggcaggcagccccctgtgccccctaagcctggccctggttattgctgagctctgtgctcagtgctgcggcctggccgtggctcgtctgttcctttggggggcccgggcgggttgtgggaatcagtcttcacagacagacgtgagccaggcggaggactcgttccttgcagaggtcagtcctcacctgcaggtgtcggggtgtgggggggcaaggaggggcaggcacacaccatgtctgacctgaacccgattctggggagcatcttcccgctccggccccacgacctccacagggttacattgtaatatatatgccccagctaacctgtctgatggtggcatcttcctgcagacatttcaaacatgtaacttttatatgaaaaaaaataaacacagatgaaagctgcccaatgcc

SEQ ID NO: 310293 - DNA, 6683 bp, Artificial Sequence
  derived and/or modified sequence
gagattcctcaggcttcccttgtgaggctgcctgggttctgccgctgggtggtttgggatgtccaagagatatcccctttcagccagtgactcggtcctcagttgctgctccggaaagacgctggggctgggaagggccctgtgtcctctggctttaaaatgggcaatgctattgaaaaacagaagcccttgaaacgaagtcatctgtacccctggaaacaagactctcagcgttctcatctctcttccttcaccatgaagctgatggacaaattccactcacccaaaatcaagagaacgccatcaaagaagggaaaaccagctgaggtgtccgtaaagattccagagaagcctgtgaacaaagaggcaacagacagatttctaccagagggctaccctctccccttggatctggagcagcaggcagtagaatttatgtccaccagtgctgtggcttccaggtctcaaaggcagaagaacctgagctggctggaggagaaagagaaggaagttgtcagtgccctgcgctactttaagaccattgtggacaaaatggcaattgataagaaggtactggagatgcttccagggtcagccagcaaggtgctggaggccatcttacccctggtgcagaacgatcctcgaattcagcacagctcagccctctcttcctgctatagccgagtgtaccaaagcctcgccaacctcattcgctggtctgaccaagtgatgctggaaggcgtgaactcagaagacaaggagatggtgacgactgtgaagggggtcatcaaggctgtgctggatggagtgaaggagctggtcaggctcaccatcgagaagcagggacgtccgtctccgacgagccccgtgaagcccagttcccctgccagcaagcctgatggcccagcagagctccccctgacagaccgcgaggtagagatcctaaacaagacgactgggatgtcacagtcaactgagctcctcccagatgccacggatgaagaggtcgcgccccccaagcctcctctgcctggcattcgggtggttgataatagtcctccaccagcattgccacccaagaaaagacagtcggcgccgtcccctacccgagtggctgtggtggcccccatgagccgagccaccagtggctccagtttgcctgttggaatcaataggcaggattttgatgttgactgttacgcacagaggcgactgtcaggaggcagccactcatatggtggagagtcgccccgcctctccccctgcagcagcataggcaagctcagcaagtcagacgagcagctgtcctctctggacagggacagtgggcagtgctcccggaacacaagctgtgaaacactagaccactatgatcccgactatgaattcctccagcaagacctctctaacgcagaccagatacctcagcagacggcctggaaccttagcccgttgccagagtctttgggggagtctgggtctccatttcttggccctcctttccagctgcctcttggcggccatccccagccagacggacctctggccccagggcagcagacagatacgccacctgctctccccgagaagaagcgcaggagcgcagcctcccagacggcggacggctctggctgcagggtgtcctacgagcggcatccctcgcagtatgacaacatctctggggaggacctgcagagcacagccccgatcccatccgtcccctacgcgccctttgctgctattctgccctttcagcatggaggttcctcagcccctgtcgaatttgtgggtgattttactgctcctgagtcaaccggtgacccagaaaaaccacctcctctaccagagaagaaaaacaaacacatgctggcctacatgcagttgctggaggactactcggagccgcagccctctatgttctaccagacgccacagaacgagcacatctaccagcagaagaacaagctcctcatggaggtatacggcttcagcgactccttcagtggggtggactccgtgcaggagctggccccgccgcccgccctaccccccaagcagcggcagctgcaggcctcctgtgctgcttcttccttctcctctgtctcccactgtgtccagcaaactaaagtggccttcacccccgaggacggcagtgccgctcagggcctcagtgtgtccgtctctaactcctttctcagccggcacggcagcttgcccgtgccctcgtataagtctgtgtttaggtcctactcccaggatttcgtgcctcaccaccaagcttccgttccgcctttccttccgcctacctcctcttcctctccacatttcccacctgcccaccagtctcagagctctgacttagccgtgccaaccatggccggtccacctcccagcaccgtggacgggcctctctcggcttctcaggagagcagctttcatgggaatactgtctgccttccttccgaaacctctttcactgactcgagtgaaaacgccagtgaggaagctggtgagggtgaatatgtcaatctgtattcctctggccagagcagcgaggagctggctccctctcgaggagagccaccggctgggaaagacggacatcccagagatccctcagcggtcagcggcgtccctgggaaggacagcagagacggcagtgagagggccccaaagtcaccagatgctctggagtcggctcagtcggaggaggaagtggacgagctgtccctcattgaccacaacgaaattatgtccaggctgacgctcaagcaggagggtgatgacgggccggacgtccgcggaggatctggggacatcttactggtccatgctactgagactgacaggaaagatttggtgttgtactgcgaggcattcctgaccacctacaggaccttcatctccccagaggagctcatcaagaagctgcagtacagatatgagaaattctctccctttgccgacacattcaagaagcgcgtcagcaagaacacgttcttcgtgctggtacgggtggtggatgagctctgcctggtggagttgacagaagagatcctgaagctgctgatggaactggtcttccgcctggtgtgcaatggggagctgagcctggcccgtgtgctccggaagaacatcctggacaaggtggaccagaagaagctactcaggtgtgccacctccagccagcccctggcagcccggggggtagcagccaggccggggaccttgcacgactttcacagccatgagatagcggagcagctaacgctgctggatgctgagctcttctataaaatagagattcctgaggttttgctttgggcaaaagagcagaatgaggagaagagccccaacttgacccagttcacggagcacttcaacaacatgtcctactgggtccggtccataatcatgttacaggaaaaggcccaggacagggaacggctgctcttgaagttcatcaagatcatgaagcacttgcggaagctgaataacttcaactcctacttggccatcctctctgccctggactcggcgcccatccgcaggctggagtggcagaagcagacttcagagggcctggccgagtactgcacactgatcgacagctcgtcctccttccgagcctaccgggccgccctctcggaggtggaaccgccgtgcatcccgtacctggggctgatcctgcaggacctgaccttcgttcacctgggaaacccagactacatcgacgggaaagtgaacttctccaagcggtggcagcagttcaacatcctcgacagcatgcgctgcttccagcaggcgcactatgacatgcggaggaacgacgacattataaacttcttcaatgacttcagtgaccacctggctgaggaggccctatgggaactgtctctgaaaattaaacccaggaacataacaaggagaaaaacagaccgggaagagaagacctaggagcagacgccgggatccaggagaatgctcgaggggcgcagagggcagctcccagaccggagaggaccttggacctgttaggcgcatggcaggagtcccggcctcggagccatgaggctggccagccctcagcggggccgggcgggagctggagcctgccagccgcttcctgcctccttcctctgtgggagcagacccgtgggcctcagggcagccagcaggcaggtcttgttgccaatttacaaaccggtggttttctggtttggttttgttttctgcttttacttccatctctcccctcttgaccttccacccactcccctccagggagagagcagcagagacctcatcagcagaccaaggaagtggtgggtgctccccctccctaagctccagggtccctgaatcttctgaaatctcaaatgagtggaggcctcctggggtggcctgtcctgcaggggccctggaatgggggcaagcagctgggtgggcagaatgcagagtagactcgggggaggatcctttcactttccgcttccccttctgatgcatggaggatggtgtgagcttttcagcaggcccggaaaggtacgcaggtgacgccttagcagccccgcagctggtgctctgccccgcggtactggcgccatcagggcctcccttgcccgcctgagagcagcagcagtctctgtcatcccgtcgccccttaccccccaccccaggccactgggcccctcccacaccacctggggagctgagaagaggaggctggagtaagggaggacttgatcatccaagaaatactttttattgctgggagtcttctgaacctcaccaaactgaggccagagctgagctcctgggggagttaattcagaggggagaggccagcacctccctcctccatcgctcgctgtgtgccttaaactccatctcatgtccctccccatcccctggctttccctccctccttgccccatcctgggccagccagcagggctcctcctctggctcttcagacctttcagccagtgctgtcagtgcccctgggagggaagggcatccctgaggcacccgaatggtccctcagggtgcagggaggcagaagcctggccacagaggagcctcctaaggcagcagctgcagcaagcgcaccctctccccactctccccacgccagagcggcttccagagcagatgctgtttccatcctcctcgtcaaaaccattctcgctgctgagcttgacaatctgggcaaggcttgtggggcgcttgacaaacagaatctgccctgtgccgcctggttccgtggcctccagcatgagcctgcaggcagggcgctgcgggaacccagttgtgctgccccagcccatgcctccgggtctgctgtgcatgaatgagtgctcacttgtcccgggtttaggacgtggtcaagtgaacagcagggtctaactgtgcttacttagcccagttcaaacagaacaaaggaaaaatatagaaagcaacatctgttgatcatttaggtttttttttaaaccaccatgtcactttgagtccttcatgggtttttgaacagcatttatcaagaagaaaatgtgggctttttcccctctcccgtgttttgtttgtcctgtagatagagggaggaaagccgtgcagtggcaggcgggaccccctctggtggcgggaccccctcttgcggtggtcttgcggggccagccgggacctgtcactttattatttaaggagtgtgtgtgtagagtcgctggcttattaacagtattgtgtgtgggttgggtttttagtttgttccttctttttgaagtcccttcatttcaatccttgactctctctccccttcccttgcccagctctgttgaatgctgctgtgcgcgtgtgagggccgctctgcacacagggcccttgggttgtgtgaactgaaattctccctgtatttgtgagactcgcaggagtccccatctgtagcacaggcaatgccagtgccatgctgcagcctcagaaaccaggcctctcactccagcagcaggcagaaccgtgtctgtggtcgggtgctgtccacagctctgtctgccttgttcttgggcttgagctggatagaggtggggtctcttcaccttccctgaattcagaacagaccctgtgcctggccccagtgtgcccaggcaattccccaggccctcactgggagcccttggtgttctgagcagcagggcccaggcagcacatgagcagtgcccaggggctccctgcgtgaggacggcaaggtgcgatgtatgtctaacttattgatggcaggcagccccctgtgccccctaagcctggccctggttattgctgagctctgtgctcagtgctgcggcctggccgtggctcgtctgttcctttggggggcccgggcgggttgtgggaatcagtcttcacagacagacgtgagccaggcggaggactcgttccttgcagaggtcagtcctcacctgcaggtgtcggggtgtgggggggcaaggaggggcaggcacacaccatgtctgacctgaacccgattctggggagcatcttcccgctccggccccacgacctccacagggttacattgtaatatatatgccccagctaacctgtctgatggtggcatcttcctgcagacatttcaaacatgtaacttttatatgaaaaaaaataaacacagatgaaagctgcccaatgcc

SEQ ID NO: 310294 - protein, 464 aa, Artificial Sequence
  derived and/or modified sequence
MSRATSGSSLPVGINRQDFDVDCYAQRRLSGGSHSYGGESPRLSPCSSIGKLSKSDEQLSSLDRDSGQCSRNTSCETLDHYDPDYEFLQQDLSNADQIPQQTAWNLSPLPESLGESGSPFLGPPFQLPLGGHPQPDGPLAPGQQTDTPPALPEKKRRSAASQTADGSGCRVSYERHPSQYDNISGEDLQSTAPIPSVPYAPFAAILPFQHGGSSAPVEFVGDFTAPESTGDPEKPPPLPEKKNKHMLAYMQLLEDYSEPQPSMFYQTPQNEHIYQQKNKLLMEVYGFSDSFSGVDSVQELAPPPALPPKQRQLQASCAASSFSSVSHCVQQTKVAFTPEDGSAAQGLSVSVSNSFLSRHGSLPVPSYKSVFRSYSQDFVPHHQASVPPFLPPTSSSSPHFPPAHQSQSSDLAVPTMAGPPPSTVDGPLSASQESSFHGNTVCLPSETSFTDSEPPAGKDGHPRD

SEQ ID NO: 310295 - protein, 228 aa, Artificial Sequence
  derived and/or modified sequence
  misc_feature (1)..(1): Xaa can be any naturally occurring amino acid
XLPEKKNKHMLAYMQLLEDYSEPQPSMFYQTPQNEHIYQQKNKLLMEVYGFSDSFSGVDSVQELAPPPALPPKQRQLQASCAASSFSSVSHCVQQTKVAFTPEDGSAAQGLSVSVSNSFLSRHGSLPVPSYKSVFRSYSQDFVPHHQASVPPFLPPTSSSSPHFPPAHQSQSSDLAVPTMAGPPPSTVDGPLSASQESSFHGNTVCLPSETSFTDSEPPAGKDGHPRD

SEQ ID NO: 310296 - DNA, 1395 bp, Artificial Sequence
  derived and/or modified sequence
atgagcagagccaccagcggcagcagcctgcccgtgggcatcaacagacaggacttcgacgtggactgctacgcccagagaagactgagcggcggcagccacagctacggcggcgagagccccagactgagcccctgcagcagcatcggcaagctgagcaagagcgacgagcagctgagcagcctggacagagacagcggccagtgcagcagaaacaccagctgcgagaccctggaccactacgaccccgactacgagttcctgcagcaggacctgagcaacgccgaccagatcccccagcagaccgcctggaacctgagccccctgcccgagagcctgggcgagagcggcagccccttcctgggcccccccttccagctgcccctgggcggccacccccagcccgacggccccctggcccccggccagcagaccgacaccccccccgccctgcccgagaagaagagaagaagcgccgccagccagaccgccgacggcagcggctgcagagtgagctacgagagacaccccagccagtacgacaacatcagcggcgaggacctgcagagcaccgcccccatccccagcgtgccctacgcccccttcgccgccatcctgcccttccagcacggcggcagcagcgcccccgtggagttcgtgggcgacttcaccgcccccgagagcaccggcgaccccgagaagcccccccccctgcccgagaagaagaacaagcacatgctggcctacatgcagctgctggaggactacagcgagccccagcccagcatgttctaccagaccccccagaacgagcacatctaccagcagaagaacaagctgctgatggaggtgtacggcttcagcgacagcttcagcggcgtggacagcgtgcaggagctggcccccccccccgccctgccccccaagcagagacagctgcaggccagctgcgccgccagcagcttcagcagcgtgagccactgcgtgcagcagaccaaggtggccttcacccccgaggacggcagcgccgcccagggcctgagcgtgagcgtgagcaacagcttcctgagcagacacggcagcctgcccgtgcccagctacaagagcgtgttcagaagctacagccaggacttcgtgccccaccaccaggccagcgtgccccccttcctgccccccaccagcagcagcagcccccacttcccccccgcccaccagagccagagcagcgacctggccgtgcccaccatggccggccccccccccagcaccgtggacggccccctgagcgccagccaggagagcagcttccacggcaacaccgtgtgcctgcccagcgagaccagcttcaccgacagcgagccccccgccggcaaggacggccaccccagagactag

SEQ ID NO: 310297 - DNA, 687 bp, Artificial Sequence
  derived and/or modified sequence
tgactgcccgagaagaagaacaagcacatgctggcctacatgcagctgctggaggactacagcgagccccagcccagcatgttctaccagaccccccagaacgagcacatctaccagcagaagaacaagctgctgatggaggtgtacggcttcagcgacagcttcagcggcgtggacagcgtgcaggagctggcccccccccccgccctgccccccaagcagagacagctgcaggccagctgcgccgccagcagcttcagcagcgtgagccactgcgtgcagcagaccaaggtggccttcacccccgaggacggcagcgccgcccagggcctgagcgtgagcgtgagcaacagcttcctgagcagacacggcagcctgcccgtgcccagctacaagagcgtgttcagaagctacagccaggacttcgtgccccaccaccaggccagcgtgccccccttcctgccccccaccagcagcagcagcccccacttcccccccgcccaccagagccagagcagcgacctggccgtgcccaccatggccggccccccccccagcaccgtggacggccccctgagcgccagccaggagagcagcttccacggcaacaccgtgtgcctgcccagcgagaccagcttcaccgacagcgagccccccgccggcaaggacggccaccccagagactag

SEQ ID NO: 310298 - DNA, 1395 bp, Artificial Sequence
  derived and/or modified sequence
atgtccagagccaccagcggtagtagcctgcccgtgggcattaacagacaggattttgatgtggattgttacgctcagcggagattaagcggtgggtctcactcttacggaggcgaaagccctcgcttgagtccctgctccagcatcggtaagctgagcaaatccgatgagcagctatcttccttagaccgtgacagtgggcagtgcagtcgcaatacaagttgcgaaactctcgaccactatgatcctgactatgaattcctacagcaggacctgtctaatgctgatcagatcccacagcagactgcatggaacctgagtcccttgcctgaatccctcggtgaatctggaagtccattcctgggacccccctttcagctccctttgggagggcacccgcagccggacggaccacttgcacccggacagcaaaccgacacaccgcccgcacttcccgaaaaaaagcgacgatctgctgcatcacagacagctgatgggagtgggtgcagggtgtcttacgagagacaccctagccaatacgacaatatatcaggggaggacctccagagcacagctccaattccttccgtgccgtacgccccttttgctgcaattctgccatttcagcacgggggcagctcagccccagttgagtttgtgggggatttcaccgccccggagtcaaccggggatccagagaaaccaccacctctccccgaaaagaagaataaacatatgcttgcctacatgcagctgctggaagattattctgaaccacaaccgtccatgttttatcaaactccccagaacgaacatatctatcaacagaagaacaaattactgatggaggtgtacggatttagcgattctttctctggagtagattctgtgcaggaactcgcccccccaccagccttgcctcccaagcagcggcagcttcaggcctcatgcgccgccagttcgttcagctccgtaagtcattgcgtgcaacaaaccaaagtcgccttcacccccgaggacgggtcagctgcccagggcctgtcagtgtccgtgtctaactcctttttaagtcggcacggaagtcttcccgttccatcgtataagtcagtgttccgaagctactctcaggacttcgttccacatcaccaggccagcgtgccacctttcctgcctccgacatcctcaagctccccccatttccccccagcacatcaatctcaatctagcgatttagcggttccaacaatggccggccccccccccagcacagtagatgggcccctgagtgcatcacaggagagctcatttcacggcaatacagtgtgtctgccttccgagacgtcctttactgattctgaaccaccagcaggcaaggatggtcaccctagggattag

SEQ ID NO: 310299 - DNA, 687 bp, Artificial Sequence
  derived and/or modified sequence
taactgccagagaaaaagaataaacatatgctcgcctatatgcagctcctggaggattatagcgagccccagcctagcatgttttatcaaacaccccagaacgaacatatctaccagcagaagaacaagcttctgatggaagtgtacggctttagtgatagcttcagcggggtggattcagtgcaagagctggccccgcccccagcgctacctccgaagcagagacagttgcaggcctcctgcgcagctagctcgttctcttccgtaagccactgcgtccagcagaccaaagtagcttttaccccggaggatgggagcgccgcccagggactgtctgttagcgtctcaaatagctttttgtcccggcacggctccctccccgttccttcatacaaaagcgtctttcgaagttacagtcaggattttgtgcctcaccatcaagcgagtgtaccaccgtttctccctcctacctctagcagcagcccacacttccccccagcccaccagtctcagtcgtcagatctcgccgtccccactatggcagggcctccacctagcacagttgatgggcccctgtctgctagtcaggagagctctttccacgggaacaccgtctgcttaccatctgagactagcttcactgatagtgagccacccgccgggaaggacggtcatccaagggactag

SEQ ID NO: 310300 - DNA, 1395 bp, Artificial Sequence
  derived and/or modified sequence
atgagccgggccaccagcggcagcagcctgcctgtgggcatcaaccggcaggactttgatgtggactgctacgcccagaggcggctgagcggcggcagccacagctatggaggagagagcccccggctgagcccctgcagcagcatcggcaagctgagcaagagtgatgagcagctgagcagcctggaccgggacagcggccagtgcagcaggaacaccagctgtgagaccctggaccactatgaccctgactatgagttcctgcagcaggacctgagcaatgctgaccagatcccccagcagacagcctggaacctgagccccctgcctgagagcctgggggagagcggcagccccttcctgggcccccccttccagctgcccctgggcggccacccccagccagatggccccctggcccctggccagcagacagacaccccaccagccctgcctgagaagaagagaagatctgctgccagccagacagcagatggcagcggctgccgggtgtcctatgagcggcaccccagccagtatgacaacatcagcggggaggacctgcagagcacagcccccatccccagcgtgccctatgccccctttgctgccatcctgcccttccagcacggcggcagcagcgcccctgtggagtttgtgggggacttcaccgcccctgagagcactggagaccctgagaagcccccacccctgcctgagaagaagaacaagcacatgctggcctacatgcagctgctggaggactacagcgagccccagcccagcatgttctaccagaccccccagaatgagcacatctaccagcagaagaacaagctgctgatggaggtgtatggcttcagtgacagcttcagcggcgtggacagcgtgcaggagctggcccctcctccagccctgccccccaagcagaggcagctgcaggccagctgtgccgccagcagcttcagctctgtgagccactgtgtgcagcagaccaaggtggccttcaccccagaagatggcagcgctgcccagggcctgtctgtgtctgtgagcaacagcttcctgagcagacatggcagcctgcctgtgcccagctacaagtctgtgttccgcagctacagccaggactttgtgccccaccaccaggcctctgtgccccccttcctgccccccaccagcagcagcagcccccacttccccccagcccaccagagccagagcagtgacctggccgtgcccaccatggccggccccccacccagcacagtggatggccccctgagcgccagccaggagagcagcttccacggcaacacagtgtgcctgcccagcgagaccagcttcacagacagcgagcccccagctgggaaggatggccacccccgggactag

SEQ ID NO: 310301 - DNA, 687 bp, Artificial Sequence
  derived and/or modified sequence
tgactgcctgagaagaagaacaagcacatgctggcctacatgcagctgctggaggactacagcgagccccagcccagcatgttctaccagaccccccagaatgagcacatctaccagcagaagaacaagctgctgatggaggtgtatggcttcagtgacagcttcagcggcgtggacagcgtgcaggagctggcccctcctccagccctgccccccaagcagaggcagctgcaggccagctgtgccgccagcagcttcagctctgtgagccactgtgtgcagcagaccaaggtggccttcaccccagaagatggcagcgctgcccagggcctgtctgtgtctgtgagcaacagcttcctgagcagacatggcagcctgcctgtgcccagctacaagtctgtgttccgcagctacagccaggactttgtgccccaccaccaggcctctgtgccccccttcctgccccccaccagcagcagcagcccccacttccccccagcccaccagagccagagcagtgacctggccgtgcccaccatggccggccccccacccagcacagtggatggccccctgagcgccagccaggagagcagcttccacggcaacacagtgtgcctgcccagcgagaccagcttcacagacagcgagcccccagctgggaaggatggccacccccgggactag

SEQ ID NO: 310302 - DNA, 1395 bp, Artificial Sequence
  derived and/or modified sequence
atgagccgggccaccagcggcagcagcctgcccgtgggcatcaacaggcaggatttcgacgtggactgttacgcgcagcggcgcttatccggtggcagccactcttacggcggcgagtcccctcgtctctcaccttgcagctcaatcggtaagctcagcaagagcgatgagcaactatccagcctagatagagactcgggacagtgctctagaaatacgtcatgtgaaacattggatcactacgaccccgactacgaattcctacaacaggacttgagcaatgcggaccagatcccacagcagacagcctggaatctctctcccttgcccgaatccttaggcgagagcggaagcccctttcttgggcccccattccaacttcccctaggtggtcatccacagcccgacggcccactggcgcccggccagcaaaccgatactcccccggcgctccctgaaaagaaaaggaggagcgctgcgtcgcagacagcggacgggtccggttgccgcgtttcttatgagaggcaccccagtcaatatgacaatattagtggagaagatcttcagagcacagctcccatcccctctgtcccatacgctcccttcgctgcgatattacctttccaacatggcggttcctctgcgccagtggaatttgttggtgacttcacagcccccgagtcaacaggtgacccggaaaagccacccccactgcctgaaaaaaaaaacaagcatatgctagcatacatgcaactgctcgaggactacagtgaaccacagccttctatgttttatcagacgccgcagaatgagcacatttaccagcagaagaacaagctgctcatggaggtatatggattctccgacagcttttctggggtggactctgttcaggagttagcaccgcctccagcgctgcctccgaagcagaggcaactgcaagcgtcctgcgcagcctcctctttttccagcgtttcccattgcgtgcagcaaactaaggtcgctttcacacctgaggatggttcagcggcacagggcctctctgtcagcgtgagcaactcattcctgtccagacatggatctctgcccgtgccatcttataaaagtgtatttaggagctatagtcaagacttcgtcccccaccatcaagccagcgtgccacctttcttacctcctactagtagcagctcaccacactttccacctgcccaccagtctcagagtagcgatctggccgtgccaaccatggctgggcctcccccttctaccgtcgatggcccgctgtctgcatcccaagagtcttcttttcacggcaacaccgtctgtctgccatccgagaccagctttactgattcagagccacctgctggcaaggatggacaccctagagactag

SEQ ID NO: 310303 - DNA, 687 bp, Artificial Sequence
  derived and/or modified sequence
tgactgcccgagaagaagaacaagcacatgctggcctacatgcagctactggaagactatagcgaaccccagcccagtatgttttatcagacaccgcagaacgaacacatataccagcagaaaaacaaactcctgatggaggtttatgggttttccgattcgttttccggcgtggactcagtgcaagagctcgctccaccacccgccctgccaccaaagcagaggcaactccaggcatcgtgcgcagcttcctccttttcttccgtttctcattgcgtgcagcagactaaggtggcatttactccggaggacgggagcgccgcgcagggtctgtcagtttcagtatcaaacagtttcctgtccaggcatggtagcctgccagtcccatcttacaaatcagtctttcgatcctactcccaggattttgtcccacatcaccaggcatctgttccccctttcctcccccctacgtcttcctcttcccctcatttccccccagctcatcagtcccagagctccgatctcgcagttcctaccatggccggacctcccccatccactgttgatggtcccttgtcagccagccaggagtcatcattccacggtaacacagtgtgtctgcccagcgagacatcatttactgactccgaaccccccgctggaaaagatggacaccctagggattag

SEQ ID NO: 310304 - DNA, 1395 bp, Artificial Sequence
  derived and/or modified sequence
atgagtagggctacatctggctcctctctgcccgtcgggattaaccgacaagatttcgatgtcgattgctacgctcagcggcgactctcggggggatcacacagttacggcggtgagagcccaagactaagtccctgcagttctattggcaagcttagtaagtcggacgaacagctgagtagcctggatagagactctggccagtgtagccgcaatacatcttgcgagactctggaccactatgaccccgactatgagtttctgcagcaggacttgtccaacgcagatcagatcccgcagcagaccgcatggaatttgtctcctttacccgagtcattaggggaaagtggatcgcccttccttggcccacctttccagctgcctcttggcggtcatccccagcctgacggcccactcgcccctggacaacagactgacactcccccagccctgcccgagaagaagagaaggtctgctgctagccagactgccgacggatccggctgcagagtttcatatgaacgccatcccagccaatatgacaatattagcggggaggaccttcagagtactgctccaataccatccgtgccctatgccccattcgctgctatcctccctttccaacatggtggctcaagtgccccagttgaattcgttggtgacttcactgcaccagagtctaccggagacccagagaagcctcctcccctgccagagaagaagaataaacatatgcttgcttatatgcagttgctggaggattactccgagccacagcccagtatgttttaccaaacaccccagaacgagcatatataccaacaaaagaacaaactcctgatggaggtctacggattcagtgatagcttcagcggggttgactctgtgcaagaactcgcccctcccccagccttaccccctaaacagaggcagctgcaagcgagctgtgctgcttcttctttctctagcgtgagtcactgtgtgcagcagacgaaggtcgccttcaccccagaggacggaagcgcagctcaagggctttcagtgtccgtgtctaactcattcctttctcggcacgggagcctgccggtgccttcctacaagtctgtttttcgcagctacagtcaagacttcgtgccacatcatcaagcttcggtgcctcctttcctaccccctacgagttcttcatcccctcacttccctcccgcacaccagagtcagagctctgatttggccgttcccactatggcgggtccccctcctagcaccgttgatgggcctcttagtgcatcccaagagtcctcattccatggcaatacagtctgcctgccatccgagacaagttttacggatagcgaacccccagcaggcaaggacggacacccacgggactag

SEQ ID NO: 310305 - DNA, 687 bp, Artificial Sequence
  derived and/or modified sequence
tagttgcccgagaagaagaataagcacatgttggcgtatatgcaactgctggaggattacagcgagccacagccttccatgttttatcagacaccgcagaacgagcacatttatcagcagaagaacaagttactgatggaagtgtacgggtttagtgactcttttagtggcgtagatagcgtgcaggagctggctcccccaccggcactacccccaaaacagaggcagctacaagcttcatgcgccgcatcttccttttcgagcgtttcccactgcgtgcagcagacgaaggtggcctttacccccgaggacggttccgccgctcagggactgtccgtctcggtcagtaactcatttctgtctcgccatggatctctgccagtgccatcctataaatccgttttccgctcttattcccaggacttcgtgcctcaccaccaggcttcagtccctcccttcctgcccccaactagttcttcaagtccccactttccccctgcccaccagtcccagtccagcgatttggctgtgcccacgatggcagggccacctccatccacagtcgacgggcctctgtcggcctcccaggaaagttctttccacggcaacactgtgtgtctcccaagcgagacctccttcaccgatagcgagcctcccgcaggaaaggatggtcatcctagagactag

SEQ ID NO: 310306 - DNA, 683 bp, Artificial Sequence
  derived and/or modified sequence
ctctaccagagaagaaaaacaaacacatgctggcctacatgcagttgctggaggactactcggagccgcagccctctatgttctaccagacgccacagaacgagcacatctaccagcagaagaacaagctcctcatggaggtatacggcttcagcgactccttcagtggggtggactccgtgcaggagctggccccgccgcccgccctaccccccaagcagcggcagctgcaggcctcctgtgctgcttcttccttctcctctgtctcccactgtgtccagcaaactaaagtggccttcacccccgaggacggcagtgccgctcagggcctcagtgtgtccgtctctaactcctttctcagccggcacggcagcttgcccgtgccctcgtataagtctgtgtttaggtcctactcccaggatttcgtgcctcaccaccaagcttccgttccgcctttccttccgcctacctcctcttcctctccacatttcccacctgcccaccagtctcagagctctgacttagccgtgccaaccatggccggtccacctcccagcaccgtggacgggcctctctcggcttctcaggagagcagctttcatgggaatactgtctgccttccttccgaaacctctttcactgactcggagccaccggctgggaaagacggacatcccagagat

SEQ ID NO: 310307 - protein, 159 aa, Artificial Sequence
  derived and/or modified sequence
MEVYGFSDSFSGVDSVQELAPPPALPPKQRQLYKSVFRSYSQDFVPHHQASVPPFLPPTSSSSPHFPPAHQSQSSDLAVPTMAGPPPSTVDGPLSASQESSFHGNTVCLPSETSFTDSEPPAGKDGHPRDPSAVSGVPGKDSRDGSERAPKSPDALESA

SEQ ID NO: 310308 - DNA, 480 bp, Artificial Sequence
  derived and/or modified sequence
atggaggtgtacggcttcagcgacagcttcagcggcgtggacagcgtgcaggagctggcccccccccccgccctgccccccaagcagagacagctgtacaagagcgtgttcagaagctacagccaggacttcgtgccccaccaccaggccagcgtgccccccttcctgccccccaccagcagcagcagcccccacttcccccccgcccaccagagccagagcagcgacctggccgtgcccaccatggccggccccccccccagcaccgtggacggccccctgagcgccagccaggagagcagcttccacggcaacaccgtgtgcctgcccagcgagaccagcttcaccgacagcgagccccccgccggcaaggacggccaccccagagaccccagcgccgtgagcggcgtgcccggcaaggacagcagagacggcagcgagagagcccccaagagccccgacgccctggagagcgcctag

SEQ ID NO: 310309 - DNA, 480 bp, Artificial Sequence
  derived and/or modified sequence
atggaagtctatgggttcagcgacagctttagcggagttgatagtgtccaagaactggcacctccaccagccctgcctcccaagcagagacagctgtacaagagcgtgttccgctcatactcccaagacttcgtgccccaccaccaggccagcgtgccccccttcttgccccccacgtcctcgagctccccacacttcccaccagcccaccaatcccagtcatctgatcttgccgtacctaccatggcgggcccccctccaagcaccgtcgacggccctcttagtgcaagccaggagtcaagcttccatggcaataccgtctgtctgccatctgaaaccagtttcacggacagcgagccacccgcagggaaggacggccacccaagagatccatcagcagtgtcaggcgttccaggaaaggatagccgagacggatccgaacgtgcacccaagtctcctgatgccttggagagcgcttag

SEQ ID NO: 310310 - DNA, 480 bp, Artificial Sequence
  derived and/or modified sequence
atggaggtgtatggcttcagtgacagcttctctggagtggacagcgtgcaggagctggcccctcctccagccctgccccccaagcagaggcagctgtacaagtctgtgttccgcagctacagccaggactttgtgccccaccaccaggcctctgtgccccccttcctgccccccaccagcagcagcagcccccacttccccccagcccaccagagccagagcagtgacctggccgtgcccaccatggccggccccccacccagcacagtggatggccccctgagcgccagccaggagagcagcttccacggcaacacagtgtgcctgcccagcgagaccagcttcacagacagcgagcccccagctgggaaggatggccacccccgggaccccagcgctgtgtctggagtgcctgggaaggacagcagagatggcagcgagcgggcccccaagagcccagatgccctggagagcgcctag

SEQ ID NO: 310311 - DNA, 480 bp, Artificial Sequence
  derived and/or modified sequence
atggaggtgtacggcttcagcgacagcttcagcggcgtggacagcgtgcaggagctggcccctcccccggctttgccaccaaagcagcggcaattatataagtcagtgttccgatcttatagtcaagacttcgtgccccaccatcaagccagcgtgcccccttttctgcctccgacgtcctcatcgagccctcacttcccgcctgcacatcagagccaatcatctgatctggcggtcccaaccatggccggaccccccccgtctactgtcgatggccctctcagtgcttctcaggagtccagctttcacggcaacacagtatgtctcccctccgagacttcctttacggattctgagcctccagcagggaaagatggccatcccagagatccctctgcagtgagtggagtgcccggcaaagactcaagggacggctcagaacgggccccaaagtcacccgacgctctggagtcagcttag

SEQ ID NO: 310312 - DNA, 480 bp, Artificial Sequence
  derived and/or modified sequence
atggaggtctacggcttttccgatagcttctccggcgtagattcagtccaggagctcgctcctcctcccgctctgccacctaagcagaggcaattatacaaaagcgtgttccgtagctatagccaggatttcgttcctcatcaccaggccagcgtgccccctttcctccccccaacttctagttcaagtccacattttccgccagctcatcagagccagagttccgatctggctgtcccaactatggctggcccacctccaagcactgtggacggtcctttgagtgcgtctcaggagagcagctttcatggtaacacagtgtgcctgccctccgagaccagctttaccgactccgaacctccagccggaaaagacggccatcccagagatccgtcagcagtgagcggtgtgcctggaaaagatagccgcgacgggagtgaacgagcacctaagtctcccgacgcgctggaatctgcatag

SEQ ID NO: 310313 - DNA, 4322 bp, Artificial Sequence
  derived and/or modified sequence
ccttttctgggcaccgccttctgctagggggttgtagatgaaagtgcctgctcccagagaagcttgtctaacctagcacagtttctaagctacccaggctgccagaccgagcgaccgtgctgccatggacacagactctcagcgttctcatctctcttccttcaccatgaagctgatggacaaattccactcacccaaaatcaagagaacgccatcaaagaagggaaaaccagctgaggtgtccgtaaagattccagagaagcctgtgaacaaagaggcaacagacagatttctaccagagggctaccctctccccttggatctggagcagcaggcagtagaatttatgtccaccagtgctgtggcttccaggtctcaaaggcagaagaacctgagctggctggaggagaaagagaaggaagttgtcagtgccctgcgctactttaagaccattgtggacaaaatggcaattgataagaaggtactggagatgcttccagggtcagccagcaaggtgctggaggccatcttacccctggtgcagaacgatcctcgaattcagcacagctcagccctctcttcctgctatagccgagtgtaccaaagcctcgccaacctcattcgctggtctgaccaagtgatgctggaaggcgtgaactcagaagacaaggagatggtgacgactgtgaagggggtcatcaaggctgtgctggatggagtgaaggagctggtcaggctcaccatcgagaagcagggacgtccgtctccgacgagccccgtgaagcccagttcccctgccagcaagcctgatggcccagcagagctccccctgacagaccgcgaggtagagatcctaaacaagacgactgggatgtcacagtcaactgagctcctcccagatgccacggatgaagaggtcgcgccccccaagcctcctctgcctggcattcgggtggttgataatagtcctccaccagcattgccacccaagaaaagacagtcggcgccgtcccctacccgagtggctgtggtggcccccatgagccgagccaccagtggctccagtttgcctgttggaatcaataggcaggattttgatgttgactgttacgcacagaggcgactgtcaggaggcagccactcatatggtggagagtcgccccgcctctccccctgcagcagcataggcaagctcagcaagtcagacgagcagctgtcctctctggacagggacagtgggcagtgctcccggaacacaagctgtgaaacactagaccactatgatcccgactatgaattcctccagcaagacctctctaacgcagaccagatacctcagcagacggcctggaaccttagcccgttgccagagtctttgggggagtctgggtctccatttcttggccctcctttccagctgcctcttggcggccatccccagccagacggacctctggccccagggcagcagacagatacgccacctgctctccccgagaagaagcgcaggagcgcagcctcccagacggcggacggctctggctgcagggtgtcctacgagcggcatccctcgcagtatgacaacatctctggggaggacctgcagagcacagccccgatcccatccgtcccctacgcgccctttgctgctattctgccctttcagcatggaggttcctcagcccctgtcgaatttgtgggtgattttactgctcctgagtcaaccggtgacccagaaaaaccacctcctctaccagagaagaaaaacaaacacatgctggcctacatgcagttgctggaggactactcggagccgcagccctctatgttctaccagacgccacagaacgagcacatctaccagcagaagaacaagctcctcatggaggtatacggcttcagcgactccttcagtggggtggactccgtgcaggagctggccccgccgcccgccctaccccccaagcagcggcagctgtataagtctgtgtttaggtcctactcccaggatttcgtgcctcaccaccaagcttccgttccgcctttccttccgcctacctcctcttcctctccacatttcccacctgcccaccagtctcagagctctgacttagccgtgccaaccatggccggtccacctcccagcaccgtggacgggcctctctcggcttctcaggagagcagctttcatgggaatactgtctgccttccttccgaaacctctttcactgactcggagccaccggctgggaaagacggacatcccagagatccctcagcggtcagcggcgtccctgggaaggacagcagagacggcagtgagagggccccaaagtcaccagatgctctggagtcggctcagtcggaggaggaagtggacgagctgtccctcattgaccacaacgaaattatgtccaggctgacgctcaagcaggagggtgatgacgggccggacgtccgcggaggatctggggacatcttactggtccatgctactgagactgacaggaaagatttggtgttgtactgcgaggcattcctgaccacctacaggaccttcatctccccagaggagctcatcaagaagctgcagtacagatatgagaaattctctccctttgccgacacattcaagaagcgcgtcagcaagaacacgttcttcgtgctggtacgggtggtggatgagctctgcctggtggagttgacagaagagatcctgaagctgctgatggaactggtcttccgcctggtgtgcaatggggagctgagcctggcccgtgtgctccggaagaacatcctggacaaggtggaccagaagaagctactcaggtgtgccacctccagccagcccctggcagcccggggggtagcagccaggccggggaccttgcacgactttcacagccatgagatagcggagcagctaacgctgctggatgctgagctcttctataaaatagagattcctgaggttttgctttgggcaaaagagcagaatgaggagaagagccccaacttgacccagttcacggagcacttcaacaacatgtcctactgggtccggtccataatcatgttacaggaaaaggcccaggacagggaacggctgctcttgaagttcatcaagatcatgaagcacttgcggaagctgaataacttcaactcctacttggccatcctctctgccctggactcggcgcccatccgcaggctggagtggcagaagcagacttcagagggcctggccgagtactgcacactgatcgacagctcgtcctccttccgagcctaccgggccgccctctcggaggtggaaccgccgtgcatcccgtacctggggctgatcctgcaggacctgaccttcgttcacctgggaaacccagactacatcgacgggaaagtgaacttctccaagcggtggcagcagttcaacatcctcgacagcatgcgctgcttccagcaggcgcactatgacatgcggaggaacgacgacattataaacttcttcaatgacttcagtgaccacctggctgaggaggccctatgggaactgtctctgaaaattaaacccaggaacataacaaggagaaaaacagaccgggaagagaagacctaggagcagacgccgggatccaggagaatgctcgaggggcgcagagggcagctcccagaccggagaggaccttggacctgttaggcgcatggcaggagtcccggcctcggagccatgaggctggccagccctcagcggggccgggcgggagctggagcctgccagccgcttcctgcctccttcctctgtgggagcagacccgtgggcctcagggcagccagcaggcaggtcttgttgccaatttacaaaccggtggttttctggtttggttttgttttctgcttttacttccatctctcccctcttgaccttccacccactcccctccagggagagagcagcagagacctcatcagcagaccaaggaagtggtgggtgctccccctccctaagctccagggtccctgaatcttctgaaatctcaaatgagtggaggcctcctggggtggcctgtcctgcaggggccctggaatgggggcaagcagctgggtgggcagaatgcagagtagactcgggggaggatcctttcactttccgcttccccttctgatgcatggaggatggtgtgagcttttcagcaggcccggaaaggtacgcaggtgacgccttagcagccccgcagctggtgctctgccccgcggtactggcgccatcagggcctcccttgcccgcctgagagcagcagcagtctctgtcatcccgtcgcccc

SEQ ID NO: 310314 - protein, 1055 aa, Artificial Sequence
  derived and/or modified sequence
MSTSAVASRSQRQKNLSWLEEKEKEVVSALRYFKTIVDKMAIDKKVLEMLPGSASKVLEAILPLVQNDPRIQHSSALSSCYSRVYQSLANLIRWSDQVMLEGVNSEDKEMVTTVKGVIKAVLDGVKELVRLTIEKQGRPSPTSPVKPSSPASKPDGPAELPLTDREVEILNKTTGMSQSTELLPDATDEEVAPPKPPLPGIRVVDNSPPPALPPKKRQSAPSPTRVAVVAPMSRATSGSSLPVGINRQDFDVDCYAQRRLSGGSHSYGGESPRLSPCSSIGKLSKSDEQLSSLDRDSGQCSRNTSCETLDHYDPDYEFLQQDLSNADQIPQQTAWNLSPLPESLGESGSPFLGPPFQLPLGGHPQPDGPLAPGQQTDTPPALPEKKRRSAASQTADGSGCRVSYERHPSQYDNISGEDLQSTAPIPSVPYAPFAAILPFQHGGSSAPVEFVGDFTAPESTGDPEKPPPLPEKKNKHMLAYMQLLEDYSEPQPSMFYQTPQNEHIYQQKNKLLMEVYGFSDSFSGVDSVQELAPPPALPPKQRQLASCAASSFSSVSHCVQQTKVAFTPEDGSAAQGLSVSVSNSFLSRHGSLPVPSEPPAGKDGHPRDPSAVSGVPGKDSRDGSERAPKSPDALESAQSEEEVDELSLIDHNEIMSRLTLKQEGDDGPDVRGGSGDILLVHATETDRKDLVLYCEAFLTTYRTFISPEELIKKLQYRYEKFSPFADTFKKRVSKNTFFVLVRVVDELCLVELTEEILKLLMELVFRLVCNGELSLARVLRKNILDKVDQKKLLRCATSSQPLAARGVAARPGTLHDFHSHEIAEQLTLLDAELFYKIEIPEVLLWAKEQNEEKSPNLTQFTEHFNNMSYWVRSIIMLQEKAQDRERLLLKFIKIMKHLRKLNNFNSYLAILSALDSAPIRRLEWQKQTSEGLAEYCTLIDSSSSFRAYRAALSEVEPPCIPYLGLILQDLTFVHLGNPDYIDGKVNFSKRWQQFNILDSMRCFQQAHYDMRRNDDIINFFNDFSDHLAEEALWELSLKIKPRNITRRKTDREEKT

SEQ ID NO: 310315 - protein, 1023 aa, Artificial Sequence
  derived and/or modified sequence
FKTIVDKMAIDKKVLEMLPGSASKVLEAILPLVQNDPRIQHSSALSSCYSRVYQSLANLIRWSDQVMLEGVNSEDKEMVTTVKGVIKAVLDGVKELVRLTIEKQGRPSPTSPVKPSSPASKPDGPAELPLTDREVEILNKTTGMSQSTELLPDATDEEVAPPKPPLPGIRVVDNSPPPALPPKKRQSAPSPTRVAVVAPMSRATSGSSLPVGINRQDFDVDCYAQRRLSGGSHSYGGESPRLSPCSSIGKLSKSDEQLSSLDRDSGQCSRNTSCETLDHYDPDYEFLQQDLSNADQIPQQTAWNLSPLPESLGESGSPFLGPPFQLPLGGHPQPDGPLAPGQQTDTPPALPEKKRRSAASQTADGSGCRVSYERHPSQYDNISGEDLQSTAPIPSVPYAPFAAILPFQHGGSSAPVEFVGDFTAPESTGDPEKPPPLPEKKNKHMLAYMQLLEDYSEPQPSMFYQTPQNEHIYQQKNKLLMEVYGFSDSFSGVDSVQELAPPPALPPKQRQLASCAASSFSSVSHCVQQTKVAFTPEDGSAAQGLSVSVSNSFLSRHGSLPVPSEPPAGKDGHPRDPSAVSGVPGKDSRDGSERAPKSPDALESAQSEEEVDELSLIDHNEIMSRLTLKQEGDDGPDVRGGSGDILLVHATETDRKDLVLYCEAFLTTYRTFISPEELIKKLQYRYEKFSPFADTFKKRVSKNTFFVLVRVVDELCLVELTEEILKLLMELVFRLVCNGELSLARVLRKNILDKVDQKKLLRCATSSQPLAARGVAARPGTLHDFHSHEIAEQLTLLDAELFYKIEIPEVLLWAKEQNEEKSPNLTQFTEHFNNMSYWVRSIIMLQEKAQDRERLLLKFIKIMKHLRKLNNFNSYLAILSALDSAPIRRLEWQKQTSEGLAEYCTLIDSSSSFRAYRAALSEVEPPCIPYLGLILQDLTFVHLGNPDYIDGKVNFSKRWQQFNILDSMRCFQQAHYDMRRNDDIINFFNDFSDHLAEEALWELSLKIKPRNITRRKTDREEKT

SEQ ID NO: 310316 - DNA, 3168 bp, Artificial Sequence
  derived and/or modified sequence
atgagcaccagcgccgtggccagcagaagccagagacagaagaacctgagctggctggaggagaaggagaaggaggtggtgagcgccctgagatacttcaagaccatcgtggacaagatggccatcgacaagaaggtgctggagatgctgcccggcagcgccagcaaggtgctggaggccatcctgcccctggtgcagaacgaccccagaatccagcacagcagcgccctgagcagctgctacagcagagtgtaccagagcctggccaacctgatcagatggagcgaccaggtgatgctggagggcgtgaacagcgaggacaaggagatggtgaccaccgtgaagggcgtgatcaaggccgtgctggacggcgtgaaggagctggtgagactgaccatcgagaagcagggcagacccagccccaccagccccgtgaagcccagcagccccgccagcaagcccgacggccccgccgagctgcccctgaccgacagagaggtggagatcctgaacaagaccaccggcatgagccagagcaccgagctgctgcccgacgccaccgacgaggaggtggccccccccaagccccccctgcccggcatcagagtggtggacaacagccccccccccgccctgccccccaagaagagacagagcgcccccagccccaccagagtggccgtggtggcccccatgagcagagccaccagcggcagcagcctgcccgtgggcatcaacagacaggacttcgacgtggactgctacgcccagagaagactgagcggcggcagccacagctacggcggcgagagccccagactgagcccctgcagcagcatcggcaagctgagcaagagcgacgagcagctgagcagcctggacagagacagcggccagtgcagcagaaacaccagctgcgagaccctggaccactacgaccccgactacgagttcctgcagcaggacctgagcaacgccgaccagatcccccagcagaccgcctggaacctgagccccctgcccgagagcctgggcgagagcggcagccccttcctgggcccccccttccagctgcccctgggcggccacccccagcccgacggccccctggcccccggccagcagaccgacaccccccccgccctgcccgagaagaagagaagaagcgccgccagccagaccgccgacggcagcggctgcagagtgagctacgagagacaccccagccagtacgacaacatcagcggcgaggacctgcagagcaccgcccccatccccagcgtgccctacgcccccttcgccgccatcctgcccttccagcacggcggcagcagcgcccccgtggagttcgtgggcgacttcaccgcccccgagagcaccggcgaccccgagaagcccccccccctgcccgagaagaagaacaagcacatgctggcctacatgcagctgctggaggactacagcgagccccagcccagcatgttctaccagaccccccagaacgagcacatctaccagcagaagaacaagctgctgatggaggtgtacggcttcagcgacagcttcagcggcgtggacagcgtgcaggagctggcccccccccccgccctgccccccaagcagagacagctggccagctgcgccgccagcagcttcagcagcgtgagccactgcgtgcagcagaccaaggtggccttcacccccgaggacggcagcgccgcccagggcctgagcgtgagcgtgagcaacagcttcctgagcagacacggcagcctgcccgtgcccagcgagccccccgccggcaaggacggccaccccagagaccccagcgccgtgagcggcgtgcccggcaaggacagcagagacggcagcgagagagcccccaagagccccgacgccctggagagcgcccagagcgaggaggaggtggacgagctgagcctgatcgaccacaacgagatcatgagcagactgaccctgaagcaggagggcgacgacggccccgacgtgagaggcggcagcggcgacatcctgctggtgcacgccaccgagaccgacagaaaggacctggtgctgtactgcgaggccttcctgaccacctacagaaccttcatcagccccgaggagctgatcaagaagctgcagtacagatacgagaagttcagccccttcgccgacaccttcaagaagagagtgagcaagaacaccttcttcgtgctggtgagagtggtggacgagctgtgcctggtggagctgaccgaggagatcctgaagctgctgatggagctggtgttcagactggtgtgcaacggcgagctgagcctggccagagtgctgagaaagaacatcctggacaaggtggaccagaagaagctgctgagatgcgccaccagcagccagcccctggccgccagaggcgtggccgccagacccggcaccctgcacgacttccacagccacgagatcgccgagcagctgaccctgctggacgccgagctgttctacaagatcgagatccccgaggtgctgctgtgggccaaggagcagaacgaggagaagagccccaacctgacccagttcaccgagcacttcaacaacatgagctactgggtgagaagcatcatcatgctgcaggagaaggcccaggacagagagagactgctgctgaagttcatcaagatcatgaagcacctgagaaagctgaacaacttcaacagctacctggccatcctgagcgccctggacagcgcccccatcagaagactggagtggcagaagcagaccagcgagggcctggccgagtactgcaccctgatcgacagcagcagcagcttcagagcctacagagccgccctgagcgaggtggagcccccctgcatcccctacctgggcctgatcctgcaggacctgaccttcgtgcacctgggcaaccccgactacatcgacggcaaggtgaacttcagcaagagatggcagcagttcaacatcctggacagcatgagatgcttccagcaggcccactacgacatgagaagaaacgacgacatcatcaacttcttcaacgacttcagcgaccacctggccgaggaggccctgtgggagctgagcctgaagatcaagcccagaaacatcaccagaagaaagaccgacagagaggagaagacctag

SEQ ID NO: 310317 - DNA, 3072 bp, Artificial Sequence
  derived and/or modified sequence
ttcaagaccatcgtggacaagatggccatcgacaagaaggtgctggagatgctgcccggcagcgccagcaaggtgctggaggccatcctgcccctggtgcagaacgaccccagaatccagcacagcagcgccctgagcagctgctacagcagagtgtaccagagcctggccaacctgatcagatggagcgaccaggtgatgctggagggcgtgaacagcgaggacaaggagatggtgaccaccgtgaagggcgtgatcaaggccgtgctggacggcgtgaaggagctggtgagactgaccatcgagaagcagggcagacccagccccaccagccccgtgaagcccagcagccccgccagcaagcccgacggccccgccgagctgcccctgaccgacagagaggtggagatcctgaacaagaccaccggcatgagccagagcaccgagctgctgcccgacgccaccgacgaggaggtggccccccccaagccccccctgcccggcatcagagtggtggacaacagccccccccccgccctgccccccaagaagagacagagcgcccccagccccaccagagtggccgtggtggcccccatgagcagagccaccagcggcagcagcctgcccgtgggcatcaacagacaggacttcgacgtggactgctacgcccagagaagactgagcggcggcagccacagctacggcggcgagagccccagactgagcccctgcagcagcatcggcaagctgagcaagagcgacgagcagctgagcagcctggacagagacagcggccagtgcagcagaaacaccagctgcgagaccctggaccactacgaccccgactacgagttcctgcagcaggacctgagcaacgccgaccagatcccccagcagaccgcctggaacctgagccccctgcccgagagcctgggcgagagcggcagccccttcctgggcccccccttccagctgcccctgggcggccacccccagcccgacggccccctggcccccggccagcagaccgacaccccccccgccctgcccgagaagaagagaagaagcgccgccagccagaccgccgacggcagcggctgcagagtgagctacgagagacaccccagccagtacgacaacatcagcggcgaggacctgcagagcaccgcccccatccccagcgtgccctacgcccccttcgccgccatcctgcccttccagcacggcggcagcagcgcccccgtggagttcgtgggcgacttcaccgcccccgagagcaccggcgaccccgagaagcccccccccctgcccgagaagaagaacaagcacatgctggcctacatgcagctgctggaggactacagcgagccccagcccagcatgttctaccagaccccccagaacgagcacatctaccagcagaagaacaagctgctgatggaggtgtacggcttcagcgacagcttcagcggcgtggacagcgtgcaggagctggcccccccccccgccctgccccccaagcagagacagctggccagctgcgccgccagcagcttcagcagcgtgagccactgcgtgcagcagaccaaggtggccttcacccccgaggacggcagcgccgcccagggcctgagcgtgagcgtgagcaacagcttcctgagcagacacggcagcctgcccgtgcccagcgagccccccgccggcaaggacggccaccccagagaccccagcgccgtgagcggcgtgcccggcaaggacagcagagacggcagcgagagagcccccaagagccccgacgccctggagagcgcccagagcgaggaggaggtggacgagctgagcctgatcgaccacaacgagatcatgagcagactgaccctgaagcaggagggcgacgacggccccgacgtgagaggcggcagcggcgacatcctgctggtgcacgccaccgagaccgacagaaaggacctggtgctgtactgcgaggccttcctgaccacctacagaaccttcatcagccccgaggagctgatcaagaagctgcagtacagatacgagaagttcagccccttcgccgacaccttcaagaagagagtgagcaagaacaccttcttcgtgctggtgagagtggtggacgagctgtgcctggtggagctgaccgaggagatcctgaagctgctgatggagctggtgttcagactggtgtgcaacggcgagctgagcctggccagagtgctgagaaagaacatcctggacaaggtggaccagaagaagctgctgagatgcgccaccagcagccagcccctggccgccagaggcgtggccgccagacccggcaccctgcacgacttccacagccacgagatcgccgagcagctgaccctgctggacgccgagctgttctacaagatcgagatccccgaggtgctgctgtgggccaaggagcagaacgaggagaagagccccaacctgacccagttcaccgagcacttcaacaacatgagctactgggtgagaagcatcatcatgctgcaggagaaggcccaggacagagagagactgctgctgaagttcatcaagatcatgaagcacctgagaaagctgaacaacttcaacagctacctggccatcctgagcgccctggacagcgcccccatcagaagactggagtggcagaagcagaccagcgagggcctggccgagtactgcaccctgatcgacagcagcagcagcttcagagcctacagagccgccctgagcgaggtggagcccccctgcatcccctacctgggcctgatcctgcaggacctgaccttcgtgcacctgggcaaccccgactacatcgacggcaaggtgaacttcagcaagagatggcagcagttcaacatcctggacagcatgagatgcttccagcaggcccactacgacatgagaagaaacgacgacatcatcaacttcttcaacgacttcagcgaccacctggccgaggaggccctgtgggagctgagcctgaagatcaagcccagaaacatcaccagaagaaagaccgacagagaggagaagacctag

SEQ ID NO: 310318 - DNA, 3168 bp, Artificial Sequence
  derived and/or modified sequence
atgtccacctctgctgttgcgagcaggagccagaggcagaagaatctctcttggctggaagaaaaggaaaaagaggtggtgtcagcacttagatactttaagactatcgttgacaaaatggcaattgataaaaaagttctagagatgctgccaggctctgcttccaaggtgctggaggccatcctgccccttgtacagaacgacccccgcatccagcactctagcgcgctgagttcgtgctacagcagggtgtaccagtccctggctaacttaatcagatggtccgaccaggttatgttagagggggtcaatagtgaggataaggaaatggtgactacagtaaagggggtaatcaaggcagtcctggatggcgtgaaagaactcgtgaggctgactattgaaaagcagggtcgaccctcacctaccagccctgtgaagcccagctcccctgcttcaaaacctgatgggcccgctgagctccctctgactgacagggaagttgaaatcttgaataagactactgggatgtctcagtcaacagagctgctgccagacgcaactgatgaggaggtggccccccccaaaccgcctctgcctggcatccgggtcgtggataacagtcctccgcccgccttgccacccaagaagcgtcaatccgcaccaagcccaacaagggtggccgttgttgctcctatgtcaagagctacaagcggatcttctttacccgttggtattaaccgccaggacttcgatgtagactgttatgcccagcgtcgcctgtctgggggtagccatagttacggtggcgaatcaccacgcttatctccatgctcatctattggcaagttaagcaagagtgacgagcaattatccagtctggaccgggattccggacagtgctctcgtaatacaagctgtgaaactttagatcattacgacccagactatgagtttctccagcaggacctgtcaaatgccgaccagatcccccagcaaactgcctggaaccttagtccgctcccggagagcttgggagagtctggttcccctttcctgggccccccgtttcaactgcctctgggagggcaccctcagcccgacggacctctggcccccggacaacagacggacacccctccagccctgccagaaaaaaagagacgaagcgctgctagccagaccgccgatgggtcaggatgtcgggtgtcatatgaacggcacccctcccagtatgacaacatatcgggagaggatctacagtccacggctcctatcccaagcgtcccgtatgctccctttgccgccatcctgccctttcagcacggggggtccagcgcaccagtagagttcgtgggagacttcacggccccagagtctaccggcgaccctgagaaacctcccccgctcccggaaaaaaaaaataaacacatgcttgcctatatgcaactgctagaggattactcagagccacaaccaagcatgttctaccaaaccccgcagaacgagcacatctatcagcagaaaaacaagctcctaatggaggtctacggctttagcgactctttttcaggcgtggactcagtacaagaattagcacctccaccagcccttccgccaaagcagagacagcttgcgtcttgcgcagctagcagcttcagcagtgtcagtcactgtgtgcagcagacaaaagtggctttcacacccgaagatggcagcgccgcccaaggcctgagcgtgtctgtgtccaattctttccttagcagacacggctcactgcccgtgccatctgagcccccagctgggaaagacggccaccctcgggacccctctgccgttagcggggtgcccgggaaggattctagggatggttccgaacgagccccaaagtcacctgacgcactggaatcggcccagtcagaggaggaggtcgatgaactgtctttgattgaccataatgaaatcatgagccgtttgactctcaaacaggagggggatgacggcccagatgtgcgtggggggtccggtgacatcctgttagttcatgccaccgagactgatcggaaagacctcgttctgtattgcgaggcattcctcaccacctatcgaacatttatcagccctgaagaactgattaaaaaactgcagtaccgatatgaaaaattttcaccttttgccgacacctttaagaaaagggtgagcaaaaacaccttctttgttctcgtgcgcgtagtggacgagttgtgcctggtagagctcacagaggaaattctgaagctactcatggaactggtctttcgcctcgtgtgtaatggagagttgtctctcgcgcgagtgctccgaaagaatattctggataaagtggaccagaaaaaactgctccggtgcgctacatcctcccagcctctggccgcacgtggcgtggctgctagacctggcaccctgcacgacttccattcccatgagattgcagagcagctaacactcctggacgccgaactcttctacaagatcgaaattcctgaagtactgctgtgggctaaggagcagaatgaggaaaaaagtcctaacctgactcagtttaccgagcattttaataatatgtcatactgggtccgctctatcataatgcttcaagagaaggcccaagaccgcgaaaggcttttgttaaagtttatcaagatcatgaaacatctccgaaaactaaataacttcaacagttacttggcgatcctgagtgccctggactcagcccccatacgtcgcttagaatggcagaagcagaccagcgagggcctggcagagtattgtacactgatcgacagcagttcatcattcagggcgtatcgggctgccttatctgaagtggagcctccctgcatcccataccttggactaatactgcaggacttgacgttcgtccatttggggaaccctgattatatagacggaaaggtgaatttttccaagcgctggcagcaattcaacatcttggactctatgcggtgctttcaacaggctcattatgatatgagacggaacgatgatatcatcaacttttttaatgacttttctgatcatctagctgaggaagcactctgggagttatcactgaaaattaagcccagaaacataactcgccgcaagacggaccgcgaggagaagacgtag

SEQ ID NO: 310319 - DNA, 3072 bp, Artificial Sequence
  derived and/or modified sequence
ttcaagactattgttgataaaatggcgattgacaaaaaggtattggagatgctgcctggtagtgcgagtaaagtcctggaagctatcttaccgctcgtgcagaacgatccccgcatccagcactcaagtgcgctttcctcatgctacagtagagtgtaccagtcgttagccaatctgatccggtggagcgatcaggtgatgcttgagggggtcaactccgaggataaagagatggtgacaaccgtgaagggcgtgattaaggctgttctggacggggtcaaggagcttgttaggctgacaatcgaaaagcagggccggccctcacctactagccccgtgaagcccagcagtccagctagcaagcctgatgggcccgctgaactccccttgacagatagagaggtcgaaatcctgaataagactaccggaatgagccaatccactgagctgttgcctgatgcgaccgatgaggaagtcgctccacctaagccaccgcttccaggcattcgggttgtcgacaatagcccacctccagcccttccccccaagaaacgccagtcagctccaagtcctaccagggtggccgtcgttgcacctatgagtcgcgctacctccggttccagcctgcctgtagggattaaccgccaagactttgacgtcgactgctacgcacaacgcagactcagcggcggatcacactcctacggcggcgagagtccccgcctcagcccctgtagctccattggaaaactgtccaagtcggacgaacagttgtcttccttggatcgtgatagcgggcagtgttcccgcaatacctcgtgcgagacactcgaccattatgacccggattatgagtttctgcagcaggatctctccaacgccgatcagattcctcaacaaacagcctggaacttatcgcccttacccgagtctcttggcgagtccggctcccccttcttagggccaccattccagctgccgttaggcggccatccacagccagacggacccctcgccccaggccagcaaactgatacacctcccgcccttccagagaaaaagaggagatccgctgcgtctcagaccgccgatggttcggggtgccgagtttcatatgagcgccatccttcacaatacgacaatatctcaggcgaggacctgcagagcacggcaccgattcccagcgtgccttatgccccttttgcagcaatcctcccctttcagcacggtggatcatccgcccccgtggagttcgtcggggattttaccgctcctgagtcaaccggagacccagaaaagccccccccactgcccgaaaagaaaaataagcatatgctggcatatatgcagctgctcgaagactattctgaaccacagccctccatgttctaccagactccacagaatgagcacatataccagcagaaaaataagcttctaatggaagtgtatgggttcagtgactccttttcaggcgtggactccgtccaggaactggcaccccccccagctctgccgcccaaacagagacagctcgcctcctgtgcggcctcttcattttcttctgtgagtcactgtgtgcaacagacaaaggtggcatttactccagaggatggaagcgctgcacagggcctcagcgtttccgtttccaatagttttctatccagacatgggtccctgcctgttccttctgagcccccagcaggcaaagatggccaccctagggacccaagcgctgttagcggcgtgccaggaaaagactcccgcgacggatccgagcgagcgccaaaatctccggatgctctcgagagcgcacagtctgaggaggaggtggatgagctcagtctaattgaccacaatgaaataatgtcccgtttgacactgaagcaggaaggcgatgacggaccagacgtgcggggaggttccggagacatcctcttagtccacgctaccgagacggaccgcaaggacctggtgctgtattgtgaagcgttcctgaccacatacaggacattcatttcacccgaggagttgatcaagaagctgcagtataggtatgagaaattttccccgtttgccgacacttttaagaagagggtgagcaagaatacttttttcgtcttggtccgcgtcgttgacgaactttgtctcgttgaacttaccgaggaaatcctgaagttgctgatggagctggtgttccgtttggtgtgcaacggtgagctaagcctggcacgggtcctccggaagaatatcctcgataaagtggaccagaagaaactcttaaggtgtgctacaagctctcaacccctcgcggcccggggcgttgccgcaagaccaggcaccctgcatgatttccattcccacgagattgcagaacaacttaccttgttagatgcggagttattctacaaaattgagattccagaagtgctgttatgggccaaagagcagaatgaagagaaatcacccaacttgactcaatttacagaacatttcaacaatatgtcttactgggtccggagtataatcatgctgcaagaaaaagctcaggatagagagagactgctcctcaagttcattaagattatgaagcatctgaggaagctgaataactttaacagttacctggccatcttgagtgccttagactccgctcctattaggcggctcgagtggcagaagcagacttcagaagggcttgccgagtactgcacacttattgacagcagttctagcttccgagcataccgggcggccctgagtgaagttgagccaccctgtattccttacctggggctcatactacaagacctgaccttcgtgcatctcggcaaccccgactacattgatgggaaggtgaacttctctaaaaggtggcagcagttcaacattttggacagcatgcggtgctttcagcaggcgcactatgacatgcggaggaacgatgacatcatcaacttttttaacgacttctctgaccacctcgctgaagaagccctttgggagctcagcctgaagattaaacctagaaatattactcgccgaaaaaccgatagggaggagaagacatag

SEQ ID NO: 310320 - DNA, 3168 bp, Artificial Sequence
  derived and/or modified sequence
atgagcaccagcgctgtggccagccgcagccagaggcagaagaacctgtcctggctggaggagaaggagaaggaggtggtgtctgccctgcgctacttcaagaccatcgtggacaagatggccatcgacaagaaggtgctggagatgctgcccggcagcgccagcaaggtgctggaggccatcctgcccctggtgcagaatgacccccgcatccagcacagcagcgccctgagcagctgctacagccgggtgtaccagagcctggccaacctgatccgctggagcgaccaggtgatgctggagggcgtgaacagcgaggacaaggagatggtgaccaccgtgaagggcgtcatcaaggctgtgctggatggagtgaaggagctggtgcggctgaccatcgagaagcagggccggcccagccccaccagccctgtgaagcccagcagccctgccagcaagccagatggccctgctgagctgcccctgacagaccgggaggtggagatcctgaacaagaccaccggcatgagccagagcacagagctgctgcctgatgccacagatgaggaggtggccccacccaagccacccctgcccggcatccgggtggtggacaacagccccccaccagccctgccccccaagaagaggcagagcgcccccagccccaccagggtggccgtggtggcccccatgagccgggccaccagcggcagcagcctgcctgtgggcatcaaccggcaggactttgatgtggactgctacgcccagaggcggctgagcggcggcagccacagctatggaggagagagcccccggctgagcccctgcagcagcatcggcaagctgagcaagagtgatgagcagctgagcagcctggaccgggacagcggccagtgcagcaggaacaccagctgtgagaccctggaccactatgaccctgactatgagttcctgcagcaggacctgagcaatgctgaccagatcccccagcagacagcctggaacctgagccccctgcctgagagcctgggggagagcggcagccccttcctgggcccccccttccagctgcccctgggcggccacccccagccagatggccccctggcccctggccagcagacagacaccccaccagccctgcctgagaagaagagaagatctgctgccagccagacagcagatggcagcggctgccgggtgtcctatgaaagacaccccagccagtatgacaacatctctggagaggacctgcagagcacagcccccatccccagcgtgccctatgccccctttgctgccatcctgcccttccagcacggcggcagcagcgcccctgtggagtttgtgggggacttcaccgcccctgagagcactggagaccctgagaagcccccacccctgcctgagaagaagaacaagcacatgctggcctacatgcagctgctggaggactacagcgagccccagcccagcatgttctaccagaccccccagaatgagcacatctaccagcagaagaacaagctgctgatggaggtgtatggcttcagtgacagcttctctggagtggacagcgtgcaggagctggcccctcctccagccctgccccccaagcagaggcagctggccagctgtgccgccagcagcttcagctctgtgagccactgtgtgcagcagaccaaggtggccttcaccccagaagatggcagcgctgcccagggcctgtctgtgtctgtgagcaacagcttcctgagcagacatggcagcctgcctgtgcccagcgagcccccagctgggaaggatggccacccccgggaccccagcgctgtgtctggagtgcctgggaaggacagcagagatggcagcgagcgggcccccaagagcccagatgccctggagagcgcccagagcgaggaggaggtggatgagctgagcctgattgaccacaatgagatcatgagccggctgaccctgaagcaggagggagatgatggcccagatgtgcggggcggcagcggggacatcctgctggtgcacgccacagaaacagacaggaaggacctggtgctgtactgtgaggccttcctgaccacctaccgcaccttcatcagccctgaggagctgatcaagaagctgcagtaccgctatgagaagttcagcccctttgctgacaccttcaagaagagggtgtccaagaacaccttctttgtgctggtgcgggtggtggatgagctgtgcctggtggagctgacagaggagatcctgaagctgctgatggagctggtgttccggctggtgtgcaatggagagctgagcctggcccgggtgctgaggaagaacatcctggacaaggtggaccagaagaagctgctgcgctgtgccaccagcagccagcccctggccgcccggggcgtggccgcccggcccggcaccctgcatgacttccacagccatgaaattgctgagcagctgaccctgctggatgctgagctgttctacaagattgagatccctgaggtgctgctgtgggccaaggagcagaatgaggagaagagccccaacctgacccagttcacagagcacttcaacaacatgagctactgggtgcgcagcatcatcatgctgcaggagaaggcccaggaccgggagcggctgctgctgaagttcatcaagatcatgaagcacctgaggaagctgaacaacttcaacagctacctggccatcctgagcgccctggacagcgcccccatccggcggctggagtggcagaagcagaccagcgagggcctggccgagtactgcaccctgattgacagcagcagcagcttccgggcctaccgggccgccctgtctgaggtggagcccccctgcatcccctacctgggcctcatcctgcaggacctgacctttgtgcacctgggcaacccagactacattgatggcaaggtgaacttcagcaagcgctggcagcagttcaacatcctggacagcatgcgctgcttccagcaggcccactatgacatgagaagaaatgatgacatcatcaacttcttcaatgacttcagtgaccacctggccgaggaggccctgtgggagctgagcctgaagatcaagcccaggaacatcaccaggaggaagacagaccgggaggagaagacctag

SEQ ID NO: 310321 - DNA, 3072 bp, Artificial Sequence
  derived and/or modified sequence
ttcaagaccatcgtggacaagatggccatcgacaagaaggtgctggagatgctgcccggcagcgccagcaaggtgctggaggccatcctgcccctggtgcagaatgacccccgcatccagcacagcagcgccctgagcagctgctacagccgggtgtaccagagcctggccaacctgatccgctggagcgaccaggtgatgctggagggcgtgaacagcgaggacaaggagatggtgaccaccgtgaagggcgtcatcaaggctgtgctggatggagtgaaggagctggtgcggctgaccatcgagaagcagggccggcccagccccaccagccctgtgaagcccagcagccctgccagcaagccagatggccctgctgagctgcccctgacagaccgggaggtggagatcctgaacaagaccaccggcatgagccagagcacagagctgctgcctgatgccacagatgaggaggtggccccacccaagccacccctgcccggcatccgggtggtggacaacagccccccaccagccctgccccccaagaagaggcagagcgcccccagccccaccagggtggccgtggtggcccccatgagccgggccaccagcggcagcagcctgcctgtgggcatcaaccggcaggactttgatgtggactgctacgcccagaggcggctgagcggcggcagccacagctatggaggagagagcccccggctgagcccctgcagcagcatcggcaagctgagcaagagtgatgagcagctgagcagcctggaccgggacagcggccagtgcagcaggaacaccagctgtgagaccctggaccactatgaccctgactatgagttcctgcagcaggacctgagcaatgctgaccagatcccccagcagacagcctggaacctgagccccctgcctgagagcctgggggagagcggcagccccttcctgggcccccccttccagctgcccctgggcggccacccccagccagatggccccctggcccctggccagcagacagacaccccaccagccctgcctgagaagaagagaagatctgctgccagccagacagcagatggcagcggctgccgggtgtcctatgaaagacaccccagccagtatgacaacatctctggagaggacctgcagagcacagcccccatccccagcgtgccctatgccccctttgctgccatcctgcccttccagcacggcggcagcagcgcccctgtggagtttgtgggggacttcaccgcccctgagagcactggagaccctgagaagcccccacccctgcctgagaagaagaacaagcacatgctggcctacatgcagctgctggaggactacagcgagccccagcccagcatgttctaccagaccccccagaatgagcacatctaccagcagaagaacaagctgctgatggaggtgtatggcttcagtgacagcttctctggagtggacagcgtgcaggagctggcccctcctccagccctgccccccaagcagaggcagctggccagctgtgccgccagcagcttcagctctgtgagccactgtgtgcagcagaccaaggtggccttcaccccagaagatggcagcgctgcccagggcctgtctgtgtctgtgagcaacagcttcctgagcagacatggcagcctgcctgtgcccagcgagcccccagctgggaaggatggccacccccgggaccccagcgctgtgtctggagtgcctgggaaggacagcagagatggcagcgagcgggcccccaagagcccagatgccctggagagcgcccagagcgaggaggaggtggatgagctgagcctgattgaccacaatgagatcatgagccggctgaccctgaagcaggagggagatgatggcccagatgtgcggggcggcagcggggacatcctgctggtgcacgccacagaaacagacaggaaggacctggtgctgtactgtgaggccttcctgaccacctaccgcaccttcatcagccctgaggagctgatcaagaagctgcagtaccgctatgagaagttcagcccctttgctgacaccttcaagaagagggtgtccaagaacaccttctttgtgctggtgcgggtggtggatgagctgtgcctggtggagctgacagaggagatcctgaagctgctgatggagctggtgttccggctggtgtgcaatggagagctgagcctggcccgggtgctgaggaagaacatcctggacaaggtggaccagaagaagctgctgcgctgtgccaccagcagccagcccctggccgcccggggcgtggccgcccggcccggcaccctgcatgacttccacagccatgaaattgctgagcagctgaccctgctggatgctgagctgttctacaagattgagatccctgaggtgctgctgtgggccaaggagcagaatgaggagaagagccccaacctgacccagttcacagagcacttcaacaacatgagctactgggtgcgcagcatcatcatgctgcaggagaaggcccaggaccgggagcggctgctgctgaagttcatcaagatcatgaagcacctgaggaagctgaacaacttcaacagctacctggccatcctgagcgccctggacagcgcccccatccggcggctggagtggcagaagcagaccagcgagggcctggccgagtactgcaccctgattgacagcagcagcagcttccgggcctaccgggccgccctgtctgaggtggagcccccctgcatcccctacctgggcctcatcctgcaggacctgacctttgtgcacctgggcaacccagactacattgatggcaaggtgaacttcagcaagcgctggcagcagttcaacatcctggacagcatgcgctgcttccagcaggcccactatgacatgagaagaaatgatgacatcatcaacttcttcaatgacttcagtgaccacctggccgaggaggccctgtgggagctgagcctgaagatcaagcccaggaacatcaccaggaggaagacagaccgggaggagaagacctag

SEQ ID NO: 310322 - DNA, 3168 bp, Artificial Sequence
  derived and/or modified sequence
atgagcaccagcgccgtggccagccggagccagcggcagaagaacctctcgtggcttgaagaaaaagagaaggaggttgtgagcgccctgcggtactttaaaacaatcgttgataaaatggccatagataagaaagtcctcgagatgcttcctggctcagcatctaaggtcctagaagccattctgccactggtccagaatgaccctcgaatccagcactcctcagcgctgagcagttgctactccagagtatatcagtctctggcaaatctgatccgttggtctgaccaagtcatgctggaaggggtcaactcagaggacaaagagatggtgaccacagtgaagggagtgatcaaggcggtgcttgacggggtgaaggagctggtgcgtcttacaatcgagaagcagggcagacctagtcctacctccccagttaaaccctcctcaccggctagtaagcctgacggcccagccgagttgcccctcaccgatcgtgaggtagaaattctgaataaaacgactgggatgtcccaatccacggaattgttgcctgacgccacagacgaggaggtcgccccaccaaaaccaccactccctggtataagggttgtggacaacagtccgccgccagctcttcctccgaaaaagcgccagagcgcaccttctcccacccgagtggcagtggtggccccaatgagtagagctacatcaggatcaagtctgccagtgggcattaacaggcaagactttgatgttgactgttatgcccagcgccggctcagtggagggtctcactcttatggaggggaaagccctcggctgtcaccatgttcaagtatcggcaaactaagtaagagcgatgagcagctcagctccctggatagggattctggccagtgctccaggaatacaagctgtgagactctggaccattatgacccagattatgaattcctgcagcaggacttgtctaacgccgatcagatcccccagcagaccgcctggaacctgtccccactgcctgagtcactaggggaaagtggatctccattcttgggaccacccttccaattgccacttggaggccatccccagccggacggcccactggcccctggccaacagaccgacacccctccagccctccctgagaaaaaacgccgtagcgctgccagccaaacagcggatggatccggctgccgcgtgagctatgagcggcacccttcccaatatgataatatttcaggagaagatctacaaagcacagctccaataccatctgtgccctacgctcccttcgccgccattctgcccttccaacacggtggatcttctgctccagttgaatttgtgggcgactttaccgcacctgagtcaactggagaccctgagaagccgccccccctgccagagaaaaaaaataagcacatgttagcctatatgcaactgcttgaagactattctgaaccccagccatcaatgttttaccagaccccacagaatgagcacatataccagcagaagaacaagctgctcatggaggtgtacgggtttagtgactcttttagcggcgttgactcagtacaggagcttgctccccctccagcactacctccaaagcagcggcagttagcctcatgtgcagcctcctccttctcaagcgtatctcactgcgtgcagcagacaaaagtggccttcactcctgaggatgggtctgcggcccagggcctgtccgtgagcgtgtctaacagttttctgtcccggcacgggagccttcctgtaccttctgaacctcccgcaggtaaagacgggcatccacgcgaccccagtgccgtgagcggcgttcctggtaaggactcgcgagacggcagcgagcgcgctcccaagtctcccgatgcacttgagagtgctcaatctgaggaggaggtcgacgagctgtccctgatcgatcataacgaaatcatgtcaaggcttacgctcaaacaggaaggagacgatggtccagatgtgcgcggggggtcgggagacatcctgttggtacatgcaaccgaaacagacagaaaggacctggttttgtactgcgaagccttccttaccacataccgcacttttattagccccgaggagctgattaaaaagttgcagtatagatatgagaagttcagtcccttcgcggacacattcaagaagcgcgtgagtaaaaacacgttcttcgtactggtccgcgtggttgacgaactttgcctggtcgagttgactgaagagatactcaagctgttgatggagctggttttcagactggtgtgtaacggcgagctttccttggcccgcgtgctcaggaagaatattctggacaaagttgatcagaaaaaactgctgcggtgtgctacctcaagccagccgttggctgcccggggagtggcagcaaggccaggtaccctccatgattttcattctcacgagattgcagagcaactgacccttttggatgcagagttgttttacaaaatcgaaatcccagaggtactgctgtgggctaaagaacagaatgaggaaaaatccccgaatctcacccagttcactgaacacttcaataatatgagctactgggtcagaagcataatcatgcttcaggaaaaagcgcaggatagagagcgactgctcctgaaattcattaagattatgaagcatctgagaaagcttaacaactttaatagctatcttgctatattgagtgcattagacagtgctcccattagacggttggagtggcaaaagcagactagtgaaggtttggctgagtattgtaccttgatcgactccagcagctcattccgtgcatatagggccgctctaagcgaagttgagccaccttgcatcccttatttgggacttatccttcaggacctgactttcgttcatcttgggaatcctgactacattgacggcaaagtgaactttagcaagaggtggcaacagttcaatattctggattctatgcggtgctttcagcaggcacattacgatatgagacgcaatgatgatatcatcaacttctttaatgatttctcggaccacctcgcagaggaggcactgtgggagttgagcttgaaaatcaagccgcgaaacattacacggagaaaaacagacagagaagagaagacgtag

SEQ ID NO: 310323 - DNA, 3072 bp, Artificial Sequence
  derived and/or modified sequence
ttcaagaccatcgtggacaagatggccatcgacaagaaggtgctggaaatgttacccggttccgcatccaaggtactcgaagccatcttacccctcgttcagaatgacccgaggatacagcattccagtgctctgagcagctgttattccagagtctaccagtcactcgctaatctcatccggtggtccgatcaggtcatgctggaaggggtcaacagcgaagataaagagatggtgacaacagttaagggagtgataaaggctgtgctcgatggggtcaaagagttggtcaggctgaccatagaaaaacagggcaggccctcccctacctccccggtgaaaccgtctagtccagctagcaagccggatggacccgctgagctgcctctgacagatcgcgaagtggaaattctgaataaaaccactgggatgtcccagtcaacagaactcctgcctgacgcaactgacgaagaggtggctccccctaagcctccccttcctggtatccgtgtggttgataattcaccaccccctgccctgccacctaaaaaaaggcaaagtgctccctccccaaccagggtggctgtggtggcccccatgtctcgggcaacgtccggtagttctctgcccgttgggattaaccgccaggacttcgatgtcgattgttacgcacaacgccggctgtcgggaggttcccacagctatggcggtgaaagccccaggctttccccatgtagtagtattggcaaattgtcaaagtcagacgagcagctgagcagtctcgaccgggactccggacagtgctccagaaatacctcttgcgagaccctggatcactatgaccctgattacgagttcctgcagcaagacttgagcaacgctgatcagattccccagcagacggcatggaacctaagccctttacccgagagcctaggagagtctggctctccattcctcggacctcccttccaacttcctctggggggacatccccaacctgatggtcccttggctcctggacagcagaccgataccccacctgcactcccagagaagaaacgaaggagcgctgcaagtcagacagccgatggaagcggctgcagagtgagctacgagcgccatccgtcccagtacgacaatatttccggtgaggatttacagagtaccgctcctatcccatctgtgccatacgcaccattcgccgctatccttccttttcaacatgggggctcttctgccccagtcgagtttgtcggcgattttactgcaccagaatctaccggcgaccccgaaaaacctccccccctgccagaaaagaagaacaaacacatgctggcctacatgcagcttctcgaggactacagcgagcctcagccttcaatgttctaccagacgccacagaatgagcacatctatcaacagaagaacaagctcctcatggaggtgtatggattttctgattccttcagcggcgtggacagcgtccaggagttggctccgcctcccgcactcccacctaaacagcgacagctggcttcgtgcgctgcaagctcgttctcctccgtcagccattgcgttcagcagacgaaagttgccttcaccccagaagatggcagtgcagcccaagggctgtccgtcagtgtctccaactcatttctgtctcggcatggctcattgcccgtccccagtgaacccccagctggaaaagacgggcacccgcgtgatccaagtgcagtgtccggggtacctggcaaagacagtagagatgggtccgagcgggcacccaagagccctgatgccttggaatccgcccagtctgaagaagaggtcgacgaactgtcactcatcgatcataatgagatcatgagtaggctaacactgaagcaagagggggacgacggcccagacgtgaggggtggatcaggcgatattctcttagtacatgccacagagactgatagaaaagacttggttttgtattgcgaggctttcttgaccacttatcgcacatttatctcccccgaagagctgatcaagaagctgcagtatcggtacgagaagtttagtccgttcgccgacacttttaagaaacgcgtgagcaagaatacattttttgtgctggttagagtggtggatgagctgtgcttggttgaattaactgaagagatcctgaaattgctgatggagctggtgtttcgccttgtctgtaatggagaacttagcctggcacgcgtcttgcggaaaaatatactggataaagttgaccagaagaaactgctgagatgtgctacgtccagtcagcccctggctgctaggggcgttgcagcccggccagggaccctgcatgacttccattcccacgaaatagcagagcagttgacactcctggacgccgagctcttttacaaaatcgaaatccctgaagttttgctatgggctaaggagcagaacgaggagaagtccccaaacctcacgcagttcaccgagcactttaataacatgagctattgggttaggtcaataatcatgctacaggagaaagctcaggaccgagagcgcctattgctcaagttcataaagatcatgaagcacctgagaaaactgaataacttcaactcctatctggccatcttatctgccctggattctgcccccataaggaggctggaatggcagaaacagacgtctgaaggcctcgccgagtactgcacacttatcgattcgtcctctagttttcgggcatatagggcagccttgagtgaggtcgagcctccctgcataccctacttgggcctaatcctccaggatctgactttcgtacatctggggaaccctgactacatcgacggcaaagtgaactttagcaagaggtggcagcagttcaatattctggactcgatgcgttgttttcagcaggctcattacgacatgcgccgcaacgatgatataatcaatttcttcaatgacttttctgaccatctcgccgaggaagctctgtgggagcttagcctgaagatcaaaccaagaaacatcactagacgcaagaccgatcgcgaagaaaaaacatag

SEQ ID NO: 310324 - DNA, 3168 bp, Artificial Sequence
  derived and/or modified sequence
atgtcaacaagcgccgtggcaagtagaagtcaaagacaaaagaacctctcttggctggaggagaaggagaaagaagttgtcagcgctttgcggtactttaaaaccatagtcgacaagatggccatcgataaaaaggtcctcgaaatgctaccaggttcagctagcaaagtcctggaggccattctccccttagtgcagaatgatcctcgcattcagcactccagcgcccttagcagttgctacagcagggtttatcaaagcctggcaaacttaatacggtggagtgaccaggttatgctggagggcgtgaatagtgaagataaggagatggtgactaccgtgaaaggggtgattaaagccgtgcttgacggcgtcaaggagctcgtgcgtctgaccattgagaagcagggccgtccctctcccacctctccagtgaaaccttcatcacctgcgagcaagcccgacggcccagccgagctaccactcacagatcgagaggtggaaatccttaacaaaactaccggaatgtcacagtccactgagctactccctgatgctacggatgaggaagtcgcacccccaaagccgccattgcccggtattcgtgtagtggacaattctccacccccagccctgcctcccaagaaacgccaaagcgcaccctcaccaacaagagtggcagttgttgccccaatgagccgggctaccagcggatcctccctgcctgtagggattaataggcaagattttgacgtggactgctatgcccagcgccgtctttcaggaggctctcactcttatggaggcgaaagccctcgcctgagcccatgctcaagtatcggcaaacttagcaaatcggatgagcagctgagttcactcgaccgcgatagcggccagtgtagtcggaacacttcttgtgagactttggatcattacgacccagactacgaattccttcagcaggatctgagtaatgctgatcagatcccacagcagactgcttggaatctgagccctctgccagaatcccttggagaaagcgggagccccttcttgggccctcccttccagcttcctttaggaggacacccccagccagatggtcccctggcgccaggacagcagaccgatacccccccagccctgcctgaaaaaaaaaggcgcagcgccgcatcccagacagccgatggtagcggctgtcgagtctcatacgagcgccacccaagtcagtacgataacatcagtggcgaggacctgcagtcaacggcgcctatcccgtctgttccatacgcccctttcgctgcaatcctgcctttccagcacggaggctcttctgctcccgtcgagtttgtgggcgacttcacggcgcctgagtctacaggggatcctgaaaaaccacctccccttccggaaaaaaagaacaaacacatgctggcatacatgcagctgttggaagactatagtgagccgcagccaagcatgttttatcagaccccgcagaacgagcatatataccagcagaaaaataagttgctcatggaggtgtatggcttttccgactctttttccggggtcgacagcgtgcaggagctggccccacctcctgcattgccaccaaagcagcggcagttggcttcatgtgccgcttcctccttctcctcagttagccattgtgtacagcagactaaggtagctttcacccccgaggacggatctgccgctcagggactttccgtttccgtcagcaattcattcctcagtcggcatggttctctccccgtaccgagtgagcccccagccggaaaggatggacacccacgggacccctccgcggttagcggtgtgcctggaaaagactccagagacggcagcgaacgcgctccgaagtctcctgatgcattggagtcggcacagagcgaagaagaggtcgacgagctgtccctcatcgatcacaatgaaattatgagtcggctcaccctgaagcaggaaggcgacgacggtcctgacgtacgcggaggctctggtgacatcctactcgtacatgccaccgagactgacaggaaagacttggtactgtattgtgaggccttccttaccacgtacagaacattcatttcacctgaagaactaataaagaagttgcagtataggtacgagaaattttccccatttgccgacacctttaagaagcgtgtaagtaaaaataccttttttgtgttggtgcgggtggtggatgaattgtgcctggtagagctcaccgaggaaatcctgaaactcttgatggagctggtgttcaggttggtgtgtaacggggagctgtctttagcccgagtattaagaaaaaatatcctggacaaagtggaccagaaaaaactactgagatgcgctacatcctcacagcccctcgccgcaagaggggtggcagctaggcccggtactttacatgatttccacagccacgagatcgccgaacagctgacacttctagatgccgagctgttttataaaatagaaattcccgaagtcttactctgggcaaaggaacaaaacgaagagaaatctcccaatctgacccaattcactgaacacttcaataatatgtcttactgggttagatcgatcatcatgctgcaagaaaaagcccaggaccgcgagagactcctgctgaaattcatcaaaatcatgaagcacctgaggaaattaaataactttaattcctacctcgctattctctccgctctggactccgctcccatcagacgccttgagtggcagaagcagaccagcgagggtcttgcggaatactgcacactgatcgacagttcctccagtttcagagcctatcgcgcagccttaagcgaggtcgaacctccatgcatcccctatcttggattgatccttcaggatctgacttttgtgcatttgggcaatccagattacatcgacgggaaagtgaacttcagcaagagatggcagcaatttaatatcctggattccatgaggtgtttccaacaggcccattacgatatgagacggaacgacgacattatcaattttttcaatgatttttccgatcatctagcagaggaggccctgtgggagctcagcctcaagattaaaccccgaaacatcacgcgcaggaagaccgatcgcgaggaaaagacctag

SEQ ID NO: 310325 - DNA, 3072 bp, Artificial Sequence
  derived and/or modified sequence
tttaaaactatcgtagataaaatggcaatagacaaaaaggtcctggagatgttacctggatccgcatcaaaagttctcgaggcaatactcccactggtgcagaatgacccaaggatacaacacagcagcgcgctctccagttgttatagccgcgtgtatcagtcactggctaacctgatacgctggtctgaccaggtgatgctggaaggcgtaaattcagaagataaagaaatggtgacaactgtaaagggcgtcattaaagctgtacttgacggcgtgaaggagcttgtgcgcttaacaatcgagaaacagggccgaccatctcccaccagcccagtgaagccctccagccccgcaagcaagcctgacggcccagccgagctgccactcaccgaccgtgaggtcgaaattctcaacaaaacaactggaatgtctcagagtaccgaactccttccagacgccaccgatgaggaggtagctcctcctaagcctcccttgccaggaattagagtggtggacaactcacctccccctgctctcccccctaaaaagcgccagtctgcgccatcacctacacgggtggccgttgtggctcctatgagtagagccacatctgggtcctcactgccagttggcattaaccggcaggacttcgatgtggactgctatgcgcagcgtaggttgagcgggggaagccacagttacggcggagagtcccctcgactgagcccatgctcctctataggtaaactcagtaagtcggacgaacagctgtcatccctggacagagattccggccagtgctccagaaacacgtcatgcgagactctcgatcactacgaccccgattatgaatttcttcagcaggacctttccaacgccgaccagatcccccagcagactgcctggaacctgtctccgcttcccgaaagccttggagagtctggtagtccatttctgggacccccatttcagctgccccttgggggacaccctcagccggatggaccactggccccagggcagcagaccgacacgccgccagccttgcccgagaaaaaaaggcggtctgccgcaagccagaccgccgatggtagtggatgtagggttagctatgagcggcatccctcacagtacgacaacatctccggcgaggatctgcagtccaccgctcctatccctagtgtcccatatgcccctttcgcggctatcctaccttttcaacatggcggatccagcgcccctgtcgagttcgtgggcgacttcaccgccccagaaagcactggggaccctgaaaaaccaccaccgctgcccgagaaaaagaacaaacacatgctggcatatatgcagttattagaggattattctgaaccacagcctagcatgttctaccagaccccgcagaacgagcatatttaccagcaaaaaaacaaactcctcatggaggtctatggatttagcgatagctttagcggcgtggactccgtgcaggagctagcaccccctcctgccctgccgcctaaacaacgccagttggcctcctgtgcggctagcagctttagcagtgtgtctcactgcgtccaacagacaaaagttgcctttacaccggaagacggaagtgcggcacaaggcctcagtgtcagcgtgagcaactcctttctgagccggcatgggagcctccccgtgccctccgaacccccagccggaaaagacggccaccctagagatccatctgccgtgagcggcgtacccggtaaagattccagagacgggtcggaacgggcacccaaatctcctgacgcactcgagtcagctcagtcagaagaggaggtggatgagctgagcttaatcgaccacaacgaaattatgtctaggctgacgcttaaacaggagggagacgacggacctgacgtcagagggggttccggggatattctcctggttcacgcgacagaaactgatcgcaaagacttggtgctgtattgcgaggcattcttaactacataccgcacttttataagtccagaggagctgattaagaagttgcagtatagatatgagaaatttagcccgtttgccgatacattcaagaagagggtgtccaaaaatactttcttcgtcctggttcgtgttgttgacgagttgtgtctggtagagctgactgaagaaattttgaagctgctcatggagctcgtgtttaggttagtgtgtaacggggagttgtcgctggcacgcgtcctgaggaagaacatccttgacaaggtggaccagaagaagctgctccgctgcgcgacctcttctcaacccttagccgctcggggtgtagcggctcggccaggcactcttcacgattttcacagccatgaaatcgccgaacagctgactcttctggacgcagagctcttttacaagattgaaatcccagaagttctgctctgggctaaagagcagaacgaggaaaagtctccgaacttgacacagtttacagagcatttcaacaacatgagctattgggtgaggtctatcataatgttgcaggagaaagcccaggatagggaaagactcctgctcaagtttatcaaaattatgaaacacctgcgcaaactcaataatttcaattcctacctcgctatcctgagcgcactggattcggcccctatcaggcgcctggaatggcagaaacaaacctccgaaggactggccgaatactgcactctcattgattccagtagcagcttccgagcctatcgtgcagccctgtccgaagtggagccaccctgcattccctacttgggtctaatattgcaagatctcacctttgtgcacctggggaacccagactacattgacggcaaggtgaactttagtaaaaggtggcagcagtttaacatactggatagcatgcggtgctttcagcaggctcactatgatatgcgaagaaacgacgacattatcaatttcttcaacgactttagcgaccatctggctgaggaggccctctgggagctcagcctgaagatcaaaccacgtaatatcaccaggaggaaaaccgaccgggaagaaaaaacatag

SEQ ID NO: 310326 - DNA, 6329 bp, Artificial Sequence
  derived and/or modified sequence
gagattcctcaggcttcccttgtgaggctgcctgggttctgccgctgggtggtttgggatgtccaagagatatcccctttcagccagtgactcggtcctcagttgctgctccggaaagacgctggggctgggaagggccctgtgtcctctggctttaaaatgggcaatgctattgaaaaacagaagcccttgaaacgaagtcatctgtacccctggaaacaagactctcagcgttctcatctctcttccttcaccatgaagctgatggacaaattccactcacccaaaatcaagagaacgccatcaaagaagggaaaaccagctgaggtgtccgtaaagattccagagaagcctgtgaacaaagaggcaacagacagatttctaccagagggctaccctctccccttggatctggagcagcaggcagtagaatttatgtccaccagtgctgtggcttccaggtctcaaaggcagaagaacctgagctggctggaggagaaagagaaggaagttgtcagtgccctgcgctactttaagaccattgtggacaaaatggcaattgataagaaggtactggagatgcttccagggtcagccagcaaggtgctggaggccatcttacccctggtgcagaacgatcctcgaattcagcacagctcagccctctcttcctgctatagccgagtgtaccaaagcctcgccaacctcattcgctggtctgaccaagtgatgctggaaggcgtgaactcagaagacaaggagatggtgacgactgtgaagggggtcatcaaggctgtgctggatggagtgaaggagctggtcaggctcaccatcgagaagcagggacgtccgtctccgacgagccccgtgaagcccagttcccctgccagcaagcctgatggcccagcagagctccccctgacagaccgcgaggtagagatcctaaacaagacgactgggatgtcacagtcaactgagctcctcccagatgccacggatgaagaggtcgcgccccccaagcctcctctgcctggcattcgggtggttgataatagtcctccaccagcattgccacccaagaaaagacagtcggcgccgtcccctacccgagtggctgtggtggcccccatgagccgagccaccagtggctccagtttgcctgttggaatcaataggcaggattttgatgttgactgttacgcacagaggcgactgtcaggaggcagccactcatatggtggagagtcgccccgcctctccccctgcagcagcataggcaagctcagcaagtcagacgagcagctgtcctctctggacagggacagtgggcagtgctcccggaacacaagctgtgaaacactagaccactatgatcccgactatgaattcctccagcaagacctctctaacgcagaccagatacctcagcagacggcctggaaccttagcccgttgccagagtctttgggggagtctgggtctccatttcttggccctcctttccagctgcctcttggcggccatccccagccagacggacctctggccccagggcagcagacagatacgccacctgctctccccgagaagaagcgcaggagcgcagcctcccagacggcggacggctctggctgcagggtgtcctacgagcggcatccctcgcagtatgacaacatctctggggaggacctgcagagcacagccccgatcccatccgtcccctacgcgccctttgctgctattctgccctttcagcatggaggttcctcagcccctgtcgaatttgtgggtgattttactgctcctgagtcaaccggtgacccagaaaaaccacctcctctaccagagaagaaaaacaaacacatgctggcctacatgcagttgctggaggactactcggagccgcagccctctatgttctaccagacgccacagaacgagcacatctaccagcagaagaacaagctcctcatggaggtatacggcttcagcgactccttcagtggggtggactccgtgcaggagctggccccgccgcccgccctaccccccaagcagcggcagctggcctcctgtgctgcttcttccttctcctctgtctcccactgtgtccagcaaactaaagtggccttcacccccgaggacggcagtgccgctcagggcctcagtgtgtccgtctctaactcctttctcagccggcacggcagcttgcccgtgccctcggagccaccggctgggaaagacggacatcccagagatccctcagcggtcagcggcgtccctgggaaggacagcagagacggcagtgagagggccccaaagtcaccagatgctctggagtcggctcagtcggaggaggaagtggacgagctgtccctcattgaccacaacgaaattatgtccaggctgacgctcaagcaggagggtgatgacgggccggacgtccgcggaggatctggggacatcttactggtccatgctactgagactgacaggaaagatttggtgttgtactgcgaggcattcctgaccacctacaggaccttcatctccccagaggagctcatcaagaagctgcagtacagatatgagaaattctctccctttgccgacacattcaagaagcgcgtcagcaagaacacgttcttcgtgctggtacgggtggtggatgagctctgcctggtggagttgacagaagagatcctgaagctgctgatggaactggtcttccgcctggtgtgcaatggggagctgagcctggcccgtgtgctccggaagaacatcctggacaaggtggaccagaagaagctactcaggtgtgccacctccagccagcccctggcagcccggggggtagcagccaggccggggaccttgcacgactttcacagccatgagatagcggagcagctaacgctgctggatgctgagctcttctataaaatagagattcctgaggttttgctttgggcaaaagagcagaatgaggagaagagccccaacttgacccagttcacggagcacttcaacaacatgtcctactgggtccggtccataatcatgttacaggaaaaggcccaggacagggaacggctgctcttgaagttcatcaagatcatgaagcacttgcggaagctgaataacttcaactcctacttggccatcctctctgccctggactcggcgcccatccgcaggctggagtggcagaagcagacttcagagggcctggccgagtactgcacactgatcgacagctcgtcctccttccgagcctaccgggccgccctctcggaggtggaaccgccgtgcatcccgtacctggggctgatcctgcaggacctgaccttcgttcacctgggaaacccagactacatcgacgggaaagtgaacttctccaagcggtggcagcagttcaacatcctcgacagcatgcgctgcttccagcaggcgcactatgacatgcggaggaacgacgacattataaacttcttcaatgacttcagtgaccacctggctgaggaggccctatgggaactgtctctgaaaattaaacccaggaacataacaaggagaaaaacagaccgggaagagaagacctaggagcagacgccgggatccaggagaatgctcgaggggcgcagagggcagctcccagaccggagaggaccttggacctgttaggcgcatggcaggagtcccggcctcggagccatgaggctggccagccctcagcggggccgggcgggagctggagcctgccagccgcttcctgcctccttcctctgtgggagcagacccgtgggcctcagggcagccagcaggcaggtcttgttgccaatttacaaaccggtggttttctggtttggttttgttttctgcttttacttccatctctcccctcttgaccttccacccactcccctccagggagagagcagcagagacctcatcagcagaccaaggaagtggtgggtgctccccctccctaagctccagggtccctgaatcttctgaaatctcaaatgagtggaggcctcctggggtggcctgtcctgcaggggccctggaatgggggcaagcagctgggtgggcagaatgcagagtagactcgggggaggatcctttcactttccgcttccccttctgatgcatggaggatggtgtgagcttttcagcaggcccggaaaggtacgcaggtgacgccttagcagccccgcagctggtgctctgccccgcggtactggcgccatcagggcctcccttgcccgcctgagagcagcagcagtctctgtcatcccgtcgccccttaccccccaccccaggccactgggcccctcccacaccacctggggagctgagaagaggaggctggagtaagggaggacttgatcatccaagaaatactttttattgctgggagtcttctgaacctcaccaaactgaggccagagctgagctcctgggggagttaattcagaggggagaggccagcacctccctcctccatcgctcgctgtgtgccttaaactccatctcatgtccctccccatcccctggctttccctccctccttgccccatcctgggccagccagcagggctcctcctctggctcttcagacctttcagccagtgctgtcagtgcccctgggagggaagggcatccctgaggcacccgaatggtccctcagggtgcagggaggcagaagcctggccacagaggagcctcctaaggcagcagctgcagcaagcgcaccctctccccactctccccacgccagagcggcttccagagcagatgctgtttccatcctcctcgtcaaaaccattctcgctgctgagcttgacaatctgggcaaggcttgtggggcgcttgacaaacagaatctgccctgtgccgcctggttccgtggcctccagcatgagcctgcaggcagggcgctgcgggaacccagttgtgctgccccagcccatgcctccgggtctgctgtgcatgaatgagtgctcacttgtcccgggtttaggacgtggtcaagtgaacagcagggtctaactgtgcttacttagcccagttcaaacagaacaaaggaaaaatatagaaagcaacatctgttgatcatttaggtttttttttaaaccaccatgtcactttgagtccttcatgggtttttgaacagcatttatcaagaagaaaatgtgggctttttcccctctcccgtgttttgtttgtcctgtagatagagggaggaaagccgtgcagtggcaggcgggaccccctctggtggcgggaccccctcttgcggtggtcttgcggggccagccgggacctgtcactttattatttaaggagtgtgtgtgtagagtcgctggcttattaacagtattgtgtgtgggttgggtttttagtttgttccttctttttgaagtcccttcatttcaatccttgactctctctccccttcccttgcccagctctgttgaatgctgctgtgcgcgtgtgagggccgctctgcacacagggcccttgggttgtgtgaactgaaattctccctgtatttgtgagactcgcaggagtccccatctgtagcacaggcaatgccagtgccatgctgcagcctcagaaaccaggcctctcactccagcagcaggcagaaccgtgtctgtggtcgggtgctgtccacagctctgtctgccttgttcttgggcttgagctggatagaggtggggtctcttcaccttccctgaattcagaacagaccctgtgcctggccccagtgtgcccaggcaattccccaggccctcactgggagcccttggtgttctgagcagcagggcccaggcagcacatgagcagtgcccaggggctccctgcgtgaggacggcaaggtgcgatgtatgtctaacttattgatggcaggcagccccctgtgccccctaagcctggccctggttattgctgagctctgtgctcagtgctgcggcctggccgtggctcgtctgttcctttggggggcccgggcgggttgtgggaatcagtcttcacagacagacgtgagccaggcggaggactcgttccttgcagaggtcagtcctcacctgcaggtgtcggggtgtgggggggcaaggaggggcaggcacacaccatgtctgacctgaacccgattctggggagcatcttcccgctccggccccacgacctccacagggttacattgtaatatatatgccccagctaacctgtctgatggtggcatcttcctgcagacatttcaaacatgtaacttttatatgaaaaaaaataaacacagatgaaagctgcccaatgcc

SEQ ID NO: 310327 - DNA, 5799 bp, Artificial Sequence
  derived and/or modified sequence
tttaagaccattgtggacaaaatggcaattgataagaaggtactggagatgcttccagggtcagccagcaaggtgctggaggccatcttacccctggtgcagaacgatcctcgaattcagcacagctcagccctctcttcctgctatagccgagtgtaccaaagcctcgccaacctcattcgctggtctgaccaagtgatgctggaaggcgtgaactcagaagacaaggagatggtgacgactgtgaagggggtcatcaaggctgtgctggatggagtgaaggagctggtcaggctcaccatcgagaagcagggacgtccgtctccgacgagccccgtgaagcccagttcccctgccagcaagcctgatggcccagcagagctccccctgacagaccgcgaggtagagatcctaaacaagacgactgggatgtcacagtcaactgagctcctcccagatgccacggatgaagaggtcgcgccccccaagcctcctctgcctggcattcgggtggttgataatagtcctccaccagcattgccacccaagaaaagacagtcggcgccgtcccctacccgagtggctgtggtggcccccatgagccgagccaccagtggctccagtttgcctgttggaatcaataggcaggattttgatgttgactgttacgcacagaggcgactgtcaggaggcagccactcatatggtggagagtcgccccgcctctccccctgcagcagcataggcaagctcagcaagtcagacgagcagctgtcctctctggacagggacagtgggcagtgctcccggaacacaagctgtgaaacactagaccactatgatcccgactatgaattcctccagcaagacctctctaacgcagaccagatacctcagcagacggcctggaaccttagcccgttgccagagtctttgggggagtctgggtctccatttcttggccctcctttccagctgcctcttggcggccatccccagccagacggacctctggccccagggcagcagacagatacgccacctgctctccccgagaagaagcgcaggagcgcagcctcccagacggcggacggctctggctgcagggtgtcctacgagcggcatccctcgcagtatgacaacatctctggggaggacctgcagagcacagccccgatcccatccgtcccctacgcgccctttgctgctattctgccctttcagcatggaggttcctcagcccctgtcgaatttgtgggtgattttactgctcctgagtcaaccggtgacccagaaaaaccacctcctctaccagagaagaaaaacaaacacatgctggcctacatgcagttgctggaggactactcggagccgcagccctctatgttctaccagacgccacagaacgagcacatctaccagcagaagaacaagctcctcatggaggtatacggcttcagcgactccttcagtggggtggactccgtgcaggagctggccccgccgcccgccctaccccccaagcagcggcagctggcctcctgtgctgcttcttccttctcctctgtctcccactgtgtccagcaaactaaagtggccttcacccccgaggacggcagtgccgctcagggcctcagtgtgtccgtctctaactcctttctcagccggcacggcagcttgcccgtgccctcggagccaccggctgggaaagacggacatcccagagatccctcagcggtcagcggcgtccctgggaaggacagcagagacggcagtgagagggccccaaagtcaccagatgctctggagtcggctcagtcggaggaggaagtggacgagctgtccctcattgaccacaacgaaattatgtccaggctgacgctcaagcaggagggtgatgacgggccggacgtccgcggaggatctggggacatcttactggtccatgctactgagactgacaggaaagatttggtgttgtactgcgaggcattcctgaccacctacaggaccttcatctccccagaggagctcatcaagaagctgcagtacagatatgagaaattctctccctttgccgacacattcaagaagcgcgtcagcaagaacacgttcttcgtgctggtacgggtggtggatgagctctgcctggtggagttgacagaagagatcctgaagctgctgatggaactggtcttccgcctggtgtgcaatggggagctgagcctggcccgtgtgctccggaagaacatcctggacaaggtggaccagaagaagctactcaggtgtgccacctccagccagcccctggcagcccggggggtagcagccaggccggggaccttgcacgactttcacagccatgagatagcggagcagctaacgctgctggatgctgagctcttctataaaatagagattcctgaggttttgctttgggcaaaagagcagaatgaggagaagagccccaacttgacccagttcacggagcacttcaacaacatgtcctactgggtccggtccataatcatgttacaggaaaaggcccaggacagggaacggctgctcttgaagttcatcaagatcatgaagcacttgcggaagctgaataacttcaactcctacttggccatcctctctgccctggactcggcgcccatccgcaggctggagtggcagaagcagacttcagagggcctggccgagtactgcacactgatcgacagctcgtcctccttccgagcctaccgggccgccctctcggaggtggaaccgccgtgcatcccgtacctggggctgatcctgcaggacctgaccttcgttcacctgggaaacccagactacatcgacgggaaagtgaacttctccaagcggtggcagcagttcaacatcctcgacagcatgcgctgcttccagcaggcgcactatgacatgcggaggaacgacgacattataaacttcttcaatgacttcagtgaccacctggctgaggaggccctatgggaactgtctctgaaaattaaacccaggaacataacaaggagaaaaacagaccgggaagagaagacctaggagcagacgccgggatccaggagaatgctcgaggggcgcagagggcagctcccagaccggagaggaccttggacctgttaggcgcatggcaggagtcccggcctcggagccatgaggctggccagccctcagcggggccgggcgggagctggagcctgccagccgcttcctgcctccttcctctgtgggagcagacccgtgggcctcagggcagccagcaggcaggtcttgttgccaatttacaaaccggtggttttctggtttggttttgttttctgcttttacttccatctctcccctcttgaccttccacccactcccctccagggagagagcagcagagacctcatcagcagaccaaggaagtggtgggtgctccccctccctaagctccagggtccctgaatcttctgaaatctcaaatgagtggaggcctcctggggtggcctgtcctgcaggggccctggaatgggggcaagcagctgggtgggcagaatgcagagtagactcgggggaggatcctttcactttccgcttccccttctgatgcatggaggatggtgtgagcttttcagcaggcccggaaaggtacgcaggtgacgccttagcagccccgcagctggtgctctgccccgcggtactggcgccatcagggcctcccttgcccgcctgagagcagcagcagtctctgtcatcccgtcgccccttaccccccaccccaggccactgggcccctcccacaccacctggggagctgagaagaggaggctggagtaagggaggacttgatcatccaagaaatactttttattgctgggagtcttctgaacctcaccaaactgaggccagagctgagctcctgggggagttaattcagaggggagaggccagcacctccctcctccatcgctcgctgtgtgccttaaactccatctcatgtccctccccatcccctggctttccctccctccttgccccatcctgggccagccagcagggctcctcctctggctcttcagacctttcagccagtgctgtcagtgcccctgggagggaagggcatccctgaggcacccgaatggtccctcagggtgcagggaggcagaagcctggccacagaggagcctcctaaggcagcagctgcagcaagcgcaccctctccccactctccccacgccagagcggcttccagagcagatgctgtttccatcctcctcgtcaaaaccattctcgctgctgagcttgacaatctgggcaaggcttgtggggcgcttgacaaacagaatctgccctgtgccgcctggttccgtggcctccagcatgagcctgcaggcagggcgctgcgggaacccagttgtgctgccccagcccatgcctccgggtctgctgtgcatgaatgagtgctcacttgtcccgggtttaggacgtggtcaagtgaacagcagggtctaactgtgcttacttagcccagttcaaacagaacaaaggaaaaatatagaaagcaacatctgttgatcatttaggtttttttttaaaccaccatgtcactttgagtccttcatgggtttttgaacagcatttatcaagaagaaaatgtgggctttttcccctctcccgtgttttgtttgtcctgtagatagagggaggaaagccgtgcagtggcaggcgggaccccctctggtggcgggaccccctcttgcggtggtcttgcggggccagccgggacctgtcactttattatttaaggagtgtgtgtgtagagtcgctggcttattaacagtattgtgtgtgggttgggtttttagtttgttccttctttttgaagtcccttcatttcaatccttgactctctctccccttcccttgcccagctctgttgaatgctgctgtgcgcgtgtgagggccgctctgcacacagggcccttgggttgtgtgaactgaaattctccctgtatttgtgagactcgcaggagtccccatctgtagcacaggcaatgccagtgccatgctgcagcctcagaaaccaggcctctcactccagcagcaggcagaaccgtgtctgtggtcgggtgctgtccacagctctgtctgccttgttcttgggcttgagctggatagaggtggggtctcttcaccttccctgaattcagaacagaccctgtgcctggccccagtgtgcccaggcaattccccaggccctcactgggagcccttggtgttctgagcagcagggcccaggcagcacatgagcagtgcccaggggctccctgcgtgaggacggcaaggtgcgatgtatgtctaacttattgatggcaggcagccccctgtgccccctaagcctggccctggttattgctgagctctgtgctcagtgctgcggcctggccgtggctcgtctgttcctttggggggcccgggcgggttgtgggaatcagtcttcacagacagacgtgagccaggcggaggactcgttccttgcagaggtcagtcctcacctgcaggtgtcggggtgtgggggggcaaggaggggcaggcacacaccatgtctgacctgaacccgattctggggagcatcttcccgctccggccccacgacctccacagggttacattgtaatatatatgccccagctaacctgtctgatggtggcatcttcctgcagacatttcaaacatgtaacttttatatgaaaaaaaataaacacagatgaaagctgcccaatgcca

SEQ ID NO: 310328 - protein, 336 aa, Artificial Sequence
  derived and/or modified sequence
MEVYGFSDSFSGVDSVQELAPPPALPPKQRQLSENASEEAGEGEYVNLYSSGQSSEELAPSRGEPPAGKDGHPRDPSAVSGVPGKDSRDGSERAPKSPDALESAQSEEEVDELSLIDHNEIMSRLTLKQEGDDGPDVRGGSGDILLVHATETDRKDLVLYCEAFLTTYRTFISPEELIKKLQYRYEKFSPFADTFKKRVSKNTFFVLVRVVDELCLVELTEEILKLLMELVFRLVCNGELSLARVLRKNILDKVDQKKLLRCATSSQPLAARGVAARPGTLHDFHSHEIAEQLTLLDAELFYKIEIPEVLLWAKEQNEEKSPNLTQFTEHFNNMSY

SEQ ID NO: 310329 - protein, 319 aa, Artificial Sequence
  derived and/or modified sequence
  misc_feature (1)..(1): Xaa can be any naturally occurring amino acid
XLAPPPALPPKQRQLSENASEEAGEGEYVNLYSSGQSSEELAPSRGEPPAGKDGHPRDPSAVSGVPGKDSRDGSERAPKSPDALESAQSEEEVDELSLIDHNEIMSRLTLKQEGDDGPDVRGGSGDILLVHATETDRKDLVLYCEAFLTTYRTFISPEELIKKLQYRYEKFSPFADTFKKRVSKNTFFVLVRVVDELCLVELTEEILKLLMELVFRLVCNGELSLARVLRKNILDKVDQKKLLRCATSSQPLAARGVAARPGTLHDFHSHEIAEQLTLLDAELFYKIEIPEVLLWAKEQNEEKSPNLTQFTEHFNNMSY

SEQ ID NO: 310330 - DNA, 1011 bp, Artificial Sequence
  derived and/or modified sequence
atggaggtgtacggcttcagcgacagcttcagcggcgtggacagcgtgcaggagctggcccccccccccgccctgccccccaagcagagacagctgagcgagaacgccagcgaggaggccggcgagggcgagtacgtgaacctgtacagcagcggccagagcagcgaggagctggcccccagcagaggcgagccccccgccggcaaggacggccaccccagagaccccagcgccgtgagcggcgtgcccggcaaggacagcagagacggcagcgagagagcccccaagagccccgacgccctggagagcgcccagagcgaggaggaggtggacgagctgagcctgatcgaccacaacgagatcatgagcagactgaccctgaagcaggagggcgacgacggccccgacgtgagaggcggcagcggcgacatcctgctggtgcacgccaccgagaccgacagaaaggacctggtgctgtactgcgaggccttcctgaccacctacagaaccttcatcagccccgaggagctgatcaagaagctgcagtacagatacgagaagttcagccccttcgccgacaccttcaagaagagagtgagcaagaacaccttcttcgtgctggtgagagtggtggacgagctgtgcctggtggagctgaccgaggagatcctgaagctgctgatggagctggtgttcagactggtgtgcaacggcgagctgagcctggccagagtgctgagaaagaacatcctggacaaggtggaccagaagaagctgctgagatgcgccaccagcagccagcccctggccgccagaggcgtggccgccagacccggcaccctgcacgacttccacagccacgagatcgccgagcagctgaccctgctggacgccgagctgttctacaagatcgagatccccgaggtgctgctgtgggccaaggagcagaacgaggagaagagccccaacctgacccagttcaccgagcacttcaacaacatgagctactag

SEQ ID NO: 310331 - DNA, 960 bp, Artificial Sequence
  derived and/or modified sequence
tgactggcccccccccccgccctgccccccaagcagagacagctgagcgagaacgccagcgaggaggccggcgagggcgagtacgtgaacctgtacagcagcggccagagcagcgaggagctggcccccagcagaggcgagccccccgccggcaaggacggccaccccagagaccccagcgccgtgagcggcgtgcccggcaaggacagcagagacggcagcgagagagcccccaagagccccgacgccctggagagcgcccagagcgaggaggaggtggacgagctgagcctgatcgaccacaacgagatcatgagcagactgaccctgaagcaggagggcgacgacggccccgacgtgagaggcggcagcggcgacatcctgctggtgcacgccaccgagaccgacagaaaggacctggtgctgtactgcgaggccttcctgaccacctacagaaccttcatcagccccgaggagctgatcaagaagctgcagtacagatacgagaagttcagccccttcgccgacaccttcaagaagagagtgagcaagaacaccttcttcgtgctggtgagagtggtggacgagctgtgcctggtggagctgaccgaggagatcctgaagctgctgatggagctggtgttcagactggtgtgcaacggcgagctgagcctggccagagtgctgagaaagaacatcctggacaaggtggaccagaagaagctgctgagatgcgccaccagcagccagcccctggccgccagaggcgtggccgccagacccggcaccctgcacgacttccacagccacgagatcgccgagcagctgaccctgctggacgccgagctgttctacaagatcgagatccccgaggtgctgctgtgggccaaggagcagaacgaggagaagagccccaacctgacccagttcaccgagcacttcaacaacatgagctactag

SEQ ID NO: 310332 - DNA, 1011 bp, Artificial Sequence
  derived and/or modified sequence
atggaagtttatggattctctgattcattctccggcgtggatagcgtgcaggaactggctcctcccccagcactcccacccaagcaacgccagttaagcgagaatgctagtgaggaagctggggagggggaatacgttaatctgtattcctcgggacaaagtagcgaagagcttgccccatctagaggggaacccccagcaggtaaagacgggcatccccgcgatccttccgcggtttctggtgtgcccggcaaggactctagggacgggagcgagcgcgctcctaaatcaccagacgctctcgagtctgctcagtcagaggaagaagttgatgagctctccctaattgatcataatgagatcatgtcccgcttgacactgaagcaggaaggggatgacggtcccgacgtgcgggggggaagcggcgacatcctgctggtgcacgcgactgaaactgataggaaagaccttgtgttgtattgcgaagccttcctcaccacctaccggacgttcatttcgcctgaggaattgatcaaaaaactgcagtaccgctacgagaagttctctccatttgcagacactttcaagaagcgagtgtccaaaaacacgttctttgtcctggtcagggttgttgatgagctatgcctcgttgagctgaccgaagagatactcaagctgttgatggagctggtattccggctcgtgtgcaacggggagctctccctggcgagggtactacggaagaacatcctggacaaagtagaccagaaaaaactgcttcgttgtgcaacatcctcccagccgttggccgctcggggcgtggctgcccggccggggaccttgcatgatttccatagccatgaaatcgccgaacagttgacccttctggacgcagagctgttttataagattgagatcccagaggttctgctgtgggcaaaggaacagaacgaagaaaagtcacctaacttaacacaattcacagagcacttcaacaacatgtcttactag

SEQ ID NO: 310333 - DNA, 960 bp, Artificial Sequence
  derived and/or modified sequence
tgactggccccaccacccgcactccctcccaagcagaggcagctgtctgagaacgcaagcgaagaggcaggtgaaggggagtatgtcaatttgtattcctctggccagtccagtgaggagctggccccaagccggggagaaccaccagccggtaaggacggccaccctcgagacccaagcgccgtgtccggggtgcccgggaaggactcaagagacggcagcgagcgagcaccaaagtctccggatgccttggaatctgctcaatccgaggaagaagttgatgagttgtccctgatagaccacaatgaaattatgtccagacttaccctgaaacaggagggtgacgacgggcccgatgtgaggggaggatcgggggacattttgcttgttcacgctacagaaaccgacagaaaggatctggttctgtactgtgaggcattcctcacaacctatcgcaccttcatctcccctgaagaattgatcaagaagctgcagtacagatatgaaaagttctcgccctttgcagacacgttcaagaaaagggtttctaagaacacgttcttcgtactggtcagggtggtggacgagctctgcctggtggagctgaccgaggagattttgaaactcctgatggagctggtctttcgcctcgtgtgcaacggagaactgtctctggcaagagtgctgcgcaaaaatattttagataaggtggaccagaaaaaattactacgctgcgcaacctcttctcagcctcttgcagctaggggcgtggccgcccgccccggaactcttcatgatttccactcacatgaaatcgcggaacagttgaccctactggacgcggaattgttctataaaattgaaatacccgaggtcctgctctgggccaaggagcagaacgaggaaaagagtccaaaccttacccaatttacggaacattttaataacatgtcatattag

SEQ ID NO: 310334 - DNA, 1011 bp, Artificial Sequence
  derived and/or modified sequence
atggaggtgtatggcttcagtgacagcttctctggagtggacagcgtgcaggagctggcccctcctccagccctgccccccaagcagaggcagctgtctgaaaatgccagcgaggaggccggggagggggagtatgtgaacctgtacagcagcggccagagcagcgaggagctggcccccagcagaggagagcccccagctgggaaggatggccacccccgggaccccagcgctgtgtctggagtgcctgggaaggacagcagagatggcagcgagcgggcccccaagagcccagatgccctggagagcgcccagagcgaggaggaggtggatgagctgagcctgattgaccacaatgagatcatgagccggctgaccctgaagcaggagggagatgatggcccagatgtgcggggcggcagcggggacatcctgctggtgcacgccacagaaacagacaggaaggacctggtgctgtactgtgaggccttcctgaccacctaccgcaccttcatcagccctgaggagctgatcaagaagctgcagtaccgctatgagaagttcagcccctttgctgacaccttcaagaagagggtgtccaagaacaccttctttgtgctggtgcgggtggtggatgagctgtgcctggtggagctgacagaggagatcctgaagctgctgatggagctggtgttccggctggtgtgcaatggagagctgagcctggcccgggtgctgaggaagaacatcctggacaaggtggaccagaagaagctgctgcgctgtgccaccagcagccagcccctggccgcccggggcgtggccgcccggcccggcaccctgcatgacttccacagccatgaaattgctgagcagctgaccctgctggatgctgagctgttctacaagattgagatccctgaggtgctgctgtgggccaaggagcagaatgaggagaagagccccaacctgacccagttcacagagcacttcaacaacatgagctactag

SEQ ID NO: 310335 - DNA, 960 bp, Artificial Sequence
  derived and/or modified sequence
tgactggcccctcctccagccctgccccccaagcagaggcagctgtctgaaaatgccagcgaggaggccggggagggggagtatgtgaacctgtacagcagcggccagagcagcgaggagctggcccccagcagaggagagcccccagctgggaaggatggccacccccgggaccccagcgctgtgtctggagtgcctgggaaggacagcagagatggcagcgagcgggcccccaagagcccagatgccctggagagcgcccagagcgaggaggaggtggatgagctgagcctgattgaccacaatgagatcatgagccggctgaccctgaagcaggagggagatgatggcccagatgtgcggggcggcagcggggacatcctgctggtgcacgccacagaaacagacaggaaggacctggtgctgtactgtgaggccttcctgaccacctaccgcaccttcatcagccctgaggagctgatcaagaagctgcagtaccgctatgagaagttcagcccctttgctgacaccttcaagaagagggtgtccaagaacaccttctttgtgctggtgcgggtggtggatgagctgtgcctggtggagctgacagaggagatcctgaagctgctgatggagctggtgttccggctggtgtgcaatggagagctgagcctggcccgggtgctgaggaagaacatcctggacaaggtggaccagaagaagctgctgcgctgtgccaccagcagccagcccctggccgcccggggcgtggccgcccggcccggcaccctgcatgacttccacagccatgaaattgctgagcagctgaccctgctggatgctgagctgttctacaagattgagatccctgaggtgctgctgtgggccaaggagcagaatgaggagaagagccccaacctgacccagttcacagagcacttcaacaacatgagctactag

SEQ ID NO: 310336 - DNA, 1011 bp, Artificial Sequence
  derived and/or modified sequence
atggaggtgtacggcttcagcgacagcttcagcggcgtggacagcgtgcaggagctggcccctcctcctgcactgccccctaagcagcgccagctgagcgagaatgcctccgaggaggctggagaaggtgaatatgtgaacctctacagcagtggacaatcatccgaggaactggccccctcgaggggcgagccgcccgcaggcaaagacggacacccacgggatcctagtgcagtctctggcgtgccagggaaagactctcgcgatgggagcgagcgggcccctaaaagccctgacgcacttgaaagtgcgcaaagcgaggaggaggtggacgaactgtccctgatagatcacaacgaaataatgagcagactgacacttaagcaagagggggacgatggacctgacgtaagaggggggtccggagatatccttctcgttcacgcaactgagaccgatagaaaagacctagtgctatactgtgaggccttccttacaacatataggacttttattagcccagaagagctcataaagaagttgcagtaccggtacgaaaagttctctccatttgcggatacatttaagaagcgggtgtcaaaaaacaccttcttcgtactggtgcgtgttgttgacgagctttgcttggtggaattaacagaggaaattttgaagctcctaatggagttagtattcagacttgtgtgtaacggcgaattaagcctagcaagagttttaaggaaaaatattcttgataaagtggatcagaagaagctgctcagatgcgccacgtcctcacagccattggcagcacgtggtgtagccgccagacctgggaccctgcatgattttcactctcacgaaatagcggagcagcttaccttgcttgacgccgagctcttttataaaatcgagattcctgaggtcctgctgtgggctaaggagcagaatgaggaaaagtcaccaaacttaacacagtttacagaacacttcaacaacatgagctattag

SEQ ID NO: 310337 - DNA, 960 bp, Artificial Sequence
  derived and/or modified sequence
tgactggcccccccccccgccctgccccccaagcagcggcagctgtcagaaaatgccagcgaggaagctggggagggggaatacgtgaatttgtacagcagcggacagtcgagcgaggaacttgccccaagccgcggggaacctcctgcaggaaaggacggccacccccgggacccgagcgcagtgtcaggagtgccaggcaaagacagccgggacggatctgaacgggcacccaagagcccagatgctctggaaagcgctcagtccgaggaggaggtggatgagcttagcctcatagatcataacgagattatgtcgagattgaccctgaagcaggagggagacgacgggcctgatgtgcgaggtgggagcggggatattctgctcgtacacgccactgaaaccgatcggaaagacctcgtgctctactgcgaggctttcctcacaacttatcgcacctttattagtcccgaggagctgatcaagaagcttcaatatcggtacgagaaattctctcctttcgccgatacattcaaaaagcgcgttagcaaaaatacctttttcgtgctggtgagggttgtggacgaactgtgccttgtggaactaacggaggagattctgaaactgctcatggagttggtttttaggttggtatgcaatggcgaactgagcctagcccgcgtgcttagaaaaaacatcctcgataaagtcgaccaaaaaaagcttctgcgatgtgcgactagctcccagccacttgccgcccggggcgtggcagcacgcccggggacactgcacgactttcactctcacgaaatcgccgaacaactgacactattggatgctgagctcttctataaaatcgagattccggaggtgctcctgtgggccaaggaacagaacgaggagaaatctcctaatctgacccaatttaccgagcattttaataatatgtcttactag

SEQ ID NO: 310338 - DNA, 1011 bp, Artificial Sequence
  derived and/or modified sequence
atggaggtttacggattcagtgatagcttcagtggagtcgatagtgtgcaggaactcgcgcctcccccagcactgccccctaagcagcggcagttgtccgagaatgcttccgaagaagccggtgaaggcgaatatgtcaacctgtactcgtccgggcagtcttctgaggaattggctccgtcgaggggcgagccacctgcaggtaaggacggtcatcctcgcgacccatcagccgttagcggcgtacccggaaaggactctagggatggctctgaaagggcccctaagagcccggatgccctggagtccgcccagagcgaggaagaggtcgacgagttgagtctgatcgatcataatgaaatcatgtcccggctcaccctcaaacaggaaggagatgatgggcctgatgtgaggggtggatccggagacatcctgctggtacatgcgactgaaaccgatagaaaagacctagtactctattgtgaggccttcctcactacctataggacatttatatctccagaggaactgatcaagaaactacagtacagatacgaaaagttttctccttttgccgatacattcaaaaagcgagttagcaaaaacacctttttcgtactcgtgagagtggtggatgaactatgcttagttgaattaactgaagaaatcctcaagcttctgatggagttggtgtttagattggtgtgcaacggagagctcagcttggccagggtccttcgtaaaaatatcttggataaggtggatcagaaaaaactgctgcgatgcgccacctcctctcaacctctcgcagctagaggcgtcgcagccagaccaggaactctgcacgactttcatagtcatgaaatagcagagcaattaacccttctggatgcagagctgttctacaagattgaaatcccagaggtgctgctgtgggcgaaagagcagaacgaggaaaagtctcctaatctgactcagtttacggaacactttaataatatgtcttattag

SEQ ID NO: 310339 - DNA, 960 bp, Artificial Sequence
  derived and/or modified sequence
tagttggcaccgcctcctgcacttccaccgaaacagaggcagctgtctgagaacgcaagcgaagaggccggtgagggtgagtatgtcaatctttactctagcggacagagcagtgaagaactagccccatctagaggagagccccctgccggtaaggacgggcatcccagggaccccagtgctgtgagtggagttccaggcaaggactcccgggacggtagtgagagagcgcctaaatctccggacgcgctggagagtgcacagagcgaggaggaagtggacgagctcagccttattgatcataacgagatcatgtcaaggctgacactaaagcaagagggcgacgacggcccagatgtgcgaggcggaagtggcgacattctgctggtacatgccactgaaaccgaccgcaaggatctggtgctgtactgtgaggcgttcctgaccacttatagaacgttcatttctcccgaagagttgatcaaaaagttgcagtacaggtacgaaaagtttagcccttttgccgacaccttcaaaaagcgcgtgtcgaagaacacctttttcgtgctcgtccgcgtggtggacgagctctgtctggtggaactcacagaagaaatcctcaagctactgatggaactcgtctttcgcctagtgtgtaatggcgagctgtctctcgcaagagtattgaggaagaacatcctggacaaggttgatcaaaagaagctactccgctgtgcaacctcctctcagccactcgccgctagaggcgtagccgcacggccaggaacactacacgatttccactcacacgaaattgccgaacagctgactctcctggacgccgaactgttttataagatagagattcccgaggtcctactgtgggccaaggagcagaatgaagaaaagtcccccaatttgacccagtttaccgaacactttaacaatatgagttactag

SEQ ID NO: 310340 - DNA, 957 bp, Artificial Sequence
  derived and/or modified sequence
gctggccccgccgcccgccctaccccccaagcagcggcagctgagtgaaaacgccagtgaggaagctggtgagggtgaatatgtcaatctgtattcctctggccagagcagcgaggagctggctccctctcgaggagagccaccggctgggaaagacggacatcccagagatccctcagcggtcagcggcgtccctgggaaggacagcagagacggcagtgagagggccccaaagtcaccagatgctctggagtcggctcagtcggaggaggaagtggacgagctgtccctcattgaccacaacgaaattatgtccaggctgacgctcaagcaggagggtgatgacgggccggacgtccgcggaggatctggggacatcttactggtccatgctactgagactgacaggaaagatttggtgttgtactgcgaggcattcctgaccacctacaggaccttcatctccccagaggagctcatcaagaagctgcagtacagatatgagaaattctctccctttgccgacacattcaagaagcgcgtcagcaagaacacgttcttcgtgctggtacgggtggtggatgagctctgcctggtggagttgacagaagagatcctgaagctgctgatggaactggtcttccgcctggtgtgcaatggggagctgagcctggcccgtgtgctccggaagaacatcctggacaaggtggaccagaagaagctactcaggtgtgccacctccagccagcccctggcagcccggggggtagcagccaggccggggaccttgcacgactttcacagccatgagatagcggagcagctaacgctgctggatgctgagctcttctataaaatagagattcctgaggttttgctttgggcaaaagagcagaatgaggagaagagccccaacttgacccagttcacggagcacttcaacaacatgtcctactg

SEQ ID NO: 310341 - DNA, 696 bp, Artificial Sequence
  derived and/or modified sequence
atggaggtgtacggcttcagcgacagcttcagcggcgtggacagcgtgcaggagctggcccccccccccgccctgccccccaagcagagacagctgcaggccagctgcgccgccagcagcttcagcagcgtgagccactgcgtgcagcagaccaaggtggccttcacccccgaggacggcagcgccgcccagggcctgagcgtgagcgtgagcaacagcttcctgagcagacacggcagcctgcccgtgcccagctacaagagcgtgttcagaagctacagccaggacttcgtgccccaccaccaggccagcgtgccccccttcctgccccccaccagcagcagcagcccccacttcccccccgcccaccagagccagagcagcgacctggccgtgcccaccatggccggccccccccccagcaccgtggacggccccctgagcgccagccaggagagcagcttccacggcaacaccgtgtgcctgcccagcgagaccagcttcaccgacagcagcgagaacgccagcgaggaggccggcgagggcgagtacgtgaacctgtacagcagcggccagagcagcgaggagctggcccccagcagaggcgagccccccgccggcaaggacggccaccccagagaccccagcgccgtgagcggcgtgcccggcaaggacagcagagacggcagcgagtag

SEQ ID NO: 310342 - DNA, 696 bp, Artificial Sequence
  derived and/or modified sequence
atggaagtgtatggcttctccgacagcttttccggagtggatagtgtccaggaattagcgcccccccccgccttgccccctaagcaacgccagttacaggctagctgtgccgcaagtagcttcagttccgtcagtcattgcgtccagcagactaaggtcgccttcacccccgaggatggatctgcagctcagggactgtcagttagcgtttctaacagctttttgtctcggcacggatccctgccagtgccttcctataaatctgtctttcggagctacagtcaagattttgtccctcatcatcaagcatctgtgcctccgttcctgccgcctacaagctcttctagcccacattttccacctgctcatcagagtcagtcatcagacctcgctgtgcctaccatggccgggccacctccctccactgtggacggcccactgtcagccagccaggagagctcctttcatgggaatacggtgtgtctgcctagcgagacaagctttaccgacagctcagagaatgctagcgaggaggcaggcgaaggcgagtacgtgaatctgtattcctcaggtcagtccagcgaggagctggcccctagccgcggagagccacccgccggtaaggacggacacccgcgggacccctcagcagtctcaggcgttccaggtaaggactcaagggacggctccgagtag

SEQ ID NO: 310343 - DNA, 696 bp, Artificial Sequence
  derived and/or modified sequence
atggaggtgtatggcttcagtgacagcttctctggagtggacagcgtgcaggagctggcccctcctccagccctgccccccaagcagaggcagctgcaggccagctgtgccgccagcagcttcagctctgtgagccactgtgtgcagcagaccaaggtggccttcaccccagaagatggcagcgctgcccagggcctgtctgtgtctgtgagcaacagcttcctgagccgccacggcagcctgcctgtgcccagctacaagagcgtcttccgcagctacagccaggactttgtgccccaccaccaggcctctgtgccccccttcctgccccccaccagcagcagcagcccccacttccccccagcccaccagagccagagcagtgacctggccgtgcccaccatggccggccccccacccagcacagtggatggccccctgagcgccagccaggagagcagcttccacggcaacacagtgtgcctgcccagcgagaccagcttcacagacagcagtgaaaatgccagcgaggaggccggggagggggagtatgtgaacctgtacagcagcggccagagcagcgaggagctggcccccagcagaggagagcccccagctgggaaggatggccacccccgggaccccagcgctgtgtctggagtgcctgggaaggacagcagagatggcagcgagtag

SEQ ID NO: 310344 - DNA, 696 bp, Artificial Sequence
  derived and/or modified sequence
atggaggtgtacggcttcagcgacagcttcagcggcgtggacagcgtgcaagaactagccccacctccagccctgccacctaagcaaagacagttgcaggcgtcttgcgcggccagctctttttctagcgtctcccactgcgtgcaacagaccaaagttgcttttaccccagaagatgggtctgcagctcagggactcagtgtgtcagtcagcaactcctttttgtctcgacacggcagcctccccgttcctagctacaaatctgtgttccgatcgtattcacaggacttcgtgcctcatcaccaggcctctgtcccacccttccttccgcccactagcagctcaagtccacatttccctccagctcaccagagccagagctcagatctggcggtgcctaccatggccggccccccacccagcacagtggacggtccactgtctgctagccaggagtcttcgttccatggcaacaccgtgtgtctgccatctgagacaagctttactgattccagtgaaaacgcgagcgaggaagcaggggaaggagagtacgtgaatctgtactcaagcggtcaatccagcgaagagcttgcccctagtcgtggagagccaccggccggcaaggacggacacccacgggatccgtcagcggtgagtggtgtgccaggcaaggattcaagagatggctccgagtag

SEQ ID NO: 310345 - DNA, 696 bp, Artificial Sequence
  derived and/or modified sequence
atggaggtgtacggattctcggacagtttttcaggcgttgatagcgtgcaggagctggcacctccccctgctctccctccaaagcagagacaactgcaggcttcatgcgcagccagcagtttctccagcgtgtcccactgcgttcagcagacaaaggtggccttcactccggaagatggttcagccgcacagggcctcagcgtgtccgtgtccaactcctttttgagccgccacggatccctgcccgtgccctcttacaaatctgttttcagatcctatagtcaggatttcgtaccacatcaccaggcaagcgtgccaccattcttgccaccaacttcttccagtagtcctcacttcccacctgcccaccagagtcaaagttccgatctggctgtgccaactatggcaggcccacccccatcgacggtagacggacctctgagcgccagtcaagagtcatcgtttcacggtaatacagtgtgtttaccctcggagacgagctttacagattccagtgagaacgcctctgaagaggctggtgagggcgagtacgtcaacctttattcatctggccagagctctgaggaactggctccctctagaggcgagccaccggctgggaaagacgggcaccctcgggacccctctgctgtctcaggcgttcccggaaaagattccagagacggcagcgagtag

SEQ ID NO: 310346 - protein, 86 aa, Artificial Sequence
  derived and/or modified sequence
MEVYGFSDSFSGVDSVQELAPPPALPPKQRQLEPPAGKDGHPRDPSAVSGVPGKDSRDGSESGITSVYRWNIQRQQRLSYGHTASQ

SEQ ID NO: 310347 - DNA, 261 bp, Artificial Sequence
  derived and/or modified sequence
atggaggtgtacggcttcagcgacagcttcagcggcgtggacagcgtgcaggagctggcccccccccccgccctgccccccaagcagagacagctggagccccccgccggcaaggacggccaccccagagaccccagcgccgtgagcggcgtgcccggcaaggacagcagagacggcagcgagagcggcatcaccagcgtgtacagatggaacatccagagacagcagagactgagctacggccacaccgccagccagtag

SEQ ID NO: 310348 - DNA, 261 bp, Artificial Sequence
  derived and/or modified sequence
atggaagtctacgggttttcagacagtttttcaggcgtagattctgtacaggagctggcaccaccaccagccctcccgcctaagcaacggcaactggagcccccggctgggaaagacggccacccaagggacccgagcgccgtttctggcgttcccggcaaggactccagggacggaagcgaatccgggatcaccagcgtgtatcggtggaacatccagcgtcagcaaagactgagctatggacatactgcatctcagtag

SEQ ID NO: 310349 - DNA, 261 bp, Artificial Sequence
  derived and/or modified sequence
atggaggtgtatggcttcagtgacagcttctctggagtggacagcgtgcaggagctggcccctcctccagccctgccccccaagcagaggcagctggagcccccagctgggaaggatggccacccccgggaccccagcgctgtgtctggagtgcctgggaaggacagcagagatggcagcgagagcggcatcacctctgtgtaccgctggaacatccagaggcagcagaggctgtcctatggccacacagccagccagtag

SEQ ID NO: 310350 - DNA, 261 bp, Artificial Sequence
  derived and/or modified sequence
atggaggtgtacggcttcagcgacagcttcagcggcgtggacagcgtccaggagctggcccctccaccagccttgccacctaaacagagacagctggagcctcctgccgggaaggatggccaccccagagatccttctgcggtctcaggtgtacctggaaaggacagccgcgacgggtcggaaagtgggattaccagcgtgtaccggtggaatattcagaggcagcaacgactctcttacgggcacaccgcttcgcaatag

SEQ ID NO: 310351 - DNA, 261 bp, Artificial Sequence
  derived and/or modified sequence
atggaggtttacgggttttcagactcattttcaggagtcgactcggtgcaagagctggcccctccgcctgctcttccccctaaacagcgccaattggaaccacctgcaggcaaagatgggcacccacgcgatccaagcgccgttagcggagttccaggcaaggactctcgagacgggtccgagagtggaatcacatcagtctatcgctggaatatccagcggcagcagcggctttcctacgggcacacggctagccagtag

SEQ ID NO: 310352 - DNA, 563 bp, Artificial Sequence
  derived and/or modified sequence
acaacatctctggggaggacctgcagagcacagccccgatcccatccgtcccctacgcgccctttgctgctattctgccctttcagcatggaggttcctcagcccctgtcgaatttgtgggtgattttactgctcctgagtcaaccggtgacccagaaaaaccacctcctctaccagagaagaaaaacaaacacatgctggcctacatgcagttgctggaggactactcggagccgcagccctctatgttctaccagacgccacagaacgagcacatctaccagcagaagaacaagctcctcatggaggtatacggcttcagcgactccttcagtggggtggactccgtgcaggagctggccccgccgcccgccctaccccccaagcagcggcagctggagccaccggctgggaaagacggacatcccagagatccctcagcggtcagcggcgtccctgggaaggacagcagagacggcagtgagagcggaatcacttccgtgtacagatggaacatccagaggcagcagcgactgtcctatggccacacagccagtcagtag

SEQ ID NO: 310353 - protein, 275 aa, Artificial Sequence
  derived and/or modified sequence
MGSAPWAPVLLLALGLRGLQAGGEWRRPPAHSPVPAPPLRFASPHSPQGPGPRLPGALLPAASGPLQLRALRQQDLPSALPGVGQVLGPGRGAHLLLHWERGRRVGLRQQLGLRRGAGGRAGGSTGLRGAPLLREVAAVRCAVHAARAHGAADGGAGPGRLRRAAPRATTRPRGPGCPRHRLRWKLWGDAQCLPEDEVSPPGGGGAGGQRARSSCGRPRRLQPVLPGRHGGSLRHGPLGVRHLPAAVRREGPDPALHVRPECLHRAGHDGLPLPH

SEQ ID NO: 310354 - DNA, 828 bp, Artificial Sequence
  derived and/or modified sequence
atgggaagcgctccatgggcaccggtcctgctgctcgccctcggactgagaggcctgcaggctggtggcgagtggcgtcggcctccagcccattcacccgttcccgcaccaccccttcgctttgcttcaccacactcccctcagggcccaggtccgaggctccccggtgcattgctgccagccgctagtgggcctctacaattgagggcactgcggcagcaggatctgccgtcagcccttcctggcgttggccaggttttaggtcctggtcggggtgctcaccttctgttgcattgggagcggggtcggagggtcgggctgagacaacagttgggcctccgcagaggagcaggaggcagagctggtggctctaccgggttaagaggggctcctttgttaagggaggtggccgctgtaaggtgcgcagtgcacgccgctagggcccatggcgcagccgacggtggggctggaccaggacggttacgcagagctgccccaagagcaaccactagaccccgaggccctggttgtcccagacacaggttgcgttggaaactttggggtgacgcgcagtgtctcccggaagatgaggtcagccccccaggtggtggcggagctggcggtcagcgcgctcggtcctcctgcggcagacccaggcgccttcagcccgttttacctggccgtcatggcggaagtctgcggcatggcccactgggagtgcgccacctacctgctgccgtaaggcgcgagggcccagaccctgcactgcacgttagacccgaatgcttgcacagagccggacacgacggactgcctctgccacattag

SEQ ID NO: 310355 - DNA, 828 bp, Artificial Sequence
  derived and/or modified sequence
atgggtagcgctccctgggcccccgtgctgttacttgcactgggactccgaggactccaggctggcggagagtggcggaggccacccgcgcattcacccgtgccagcccctccactgcggtttgcttccccccacagccctcaagggcctggcccccggctcccaggtgccctcctccctgctgcttctggcccactgcagttacgcgcactgcgtcagcaggatctgccaagcgcattaccaggcgtaggtcaggtgctcggaccaggtcgaggagcccacttattgctacattgggaacgcggacggcgcgtcggactgaggcagcaactagggctgagacgcggagcaggaggtagggctggcggttctacaggactcagaggcgccccattgctgcgtgaggttgcagcagttagatgcgccgtgcacgccgcccgggcacacggagctgcagacgggggtgctggtcctggccgcttgagaagagctgccccacgcgctacaaccaggccaaggggtccgggctgtcctaggcaccgactcaggtggaagctgtggggcgacgcacagtgtctcccggaagacgaagtctcccctcctggtggaggcggagctggcggacaaagagctagaagctcctgcggaagaccccgtagactgcaacccgtcttgcctggccgacatggaggttccctgagacacggacccttgggggtgagacatctccctgccgcggtgaggagggagggcccagacccagccctccacgtacgcccagaatgcttgcaccgcgccggacacgatgggttgccattgccccattag

SEQ ID NO: 310356 - DNA, 828 bp, Artificial Sequence
  derived and/or modified sequence
atgggctccgcaccttgggcaccagttctgttactcgctttaggcctccggggattacaggccggtggcgagtggcgcagaccacccgcccactctcctgtgccagccccacctttgagattcgccagcccacattcccctcagggtccaggcccccgattgcccggcgccctcctccctgccgcatcaggaccattgcagctcagagccctccgccagcaggacctaccttccgccttgcctggagtaggacaagtgctcggccccgggagaggtgcccatttgcttctccattgggaaagagggaggcgcgtggggttacgacagcaactgggattgaggcgcggcgcaggaggacgagcagggggatctaccggactgaggggcgcccctctgctgagggaagtggccgcagtgcgatgcgccgtccacgccgcaagggctcacggtgccgccgatggaggagcaggccccggaagactccgcagagctgcccctagggctacgacccggcctagaggaccaggctgtccacgccatagactacgctggaaattgtggggtgacgcgcagtgcctgccagaggatgaagttagtcctccaggcggcggcggcgcaggcggacagagagcccggtccagctgtggccgtcctagaagactgcaaccagtgctgccaggccgacacggtggatccctcagacatggccccctcggtgtgagacacctgcctgccgccgtgcgaagggagggccccgatcccgcactgcatgtgagacccgagtgtctgcatagagcaggacatgatggcctccccctgccacattag

SEQ ID NO: 310357 - DNA, 828 bp, Artificial Sequence
  derived and/or modified sequence
atgggcagcgccccctgggcccccgtgctgctgctggccctgggcctgagaggcctgcaggccggcggcgagtggagaagaccccccgcccacagccccgtgcccgccccccccctgagattcgccagcccccacagcccccagggccccggccccagactgcccggcgccctgctgcccgccgccagcggccccctgcagctgagagccctgagacagcaggacctgcccagcgccctgcccggcgtgggccaggtgctgggccccggcagaggcgcccacctgctgctgcactgggagagaggcagaagagtgggcctgagacagcagctgggcctgagaagaggcgccggcggcagagccggcggcagcaccggcctgagaggcgcccccctgctgagagaggtggccgccgtgagatgcgccgtgcacgccgccagagcccacggcgccgccgacggcggcgccggccccggcagactgagaagagccgcccccagagccaccaccagacccagaggccccggctgccccagacacagactgagatggaagctgtggggcgacgcccagtgcctgcccgaggacgaggtgagcccccccggcggcggcggcgccggcggccagagagccagaagcagctgcggcagacccagaagactgcagcccgtgctgcccggcagacacggcggcagcctgagacacggccccctgggcgtgagacacctgcccgccgccgtgagaagagagggccccgaccccgccctgcacgtgagacccgagtgcctgcacagagccggccacgacggcctgcccctgccccactag

SEQ ID NO: 310358 - DNA, 828 bp, Artificial Sequence
  derived and/or modified sequence
atgggcagtgccccatgggctccagtgctattgctcgcactcggactgcgtgggctgcaggcagggggtgagtggcgaagacctcctgcgcattcccctgtacctgcccccccgctgcgttttgcatcaccacactccccacagggacccggacccagactgcccggggccctgctcccagccgccagcggccccttgcagctgcgcgccctgaggcagcaggatctgccatccgcactgcccggagtggggcaagtgctcggccctggtcgcggcgcacatcttctgcttcactgggaaaggggacggcgggtcgggctgcgccagcagttggggctgaggagaggtgccggaggccgggctggtggtagcacaggattacggggcgcgccccttttacgcgaggtggccgctgtgaggtgtgccgtccatgccgctcgcgcccacggggccgcggacggcggggctgggccaggtcggctgaggagagccgccccccgcgccacaacccgcccacgcggcccgggttgtccgcgccacaggctgcggtggaaattgtggggggatgcacaatgcctgcccgaagacgaagtctcacctcccgggggggggggagccggggggcagagggctagaagttcctgtggcaggccacgaagacttcaacctgtgctgcccggtagacatggtggatctctcaggcacggtccgctcggggtccggcacctgcccgcggctgtgcggcgggaggggcctgatcccgcactgcacgtcagaccagagtgcctccaccgcgccggccacgacggactcccactgcctcactag

SEQ ID NO: 310359 - DNA, 828 bp, Artificial Sequence
  derived and/or modified sequence
atgggcagcgccccctgggcccctgtgctgctgctggccctgggcctgcggggcctgcaggccggcggggagtggaggcggcccccagcccacagccctgtgcctgccccacccctgcgctttgccagcccccacagcccccagggccctggcccccggctgcccggggccctgctgcctgctgccagcggccccctgcagctgcgggccctgcggcagcaggacctgcccagcgccctgcccggggtgggccaggtgctgggccctggccgcggggcccacctgctgctgcactgggagcggggcagaagagtgggcctgcggcagcagctgggcctgcggagaggagctgggggccgggccggcggcagcacaggcctgcggggggcccccctgctgcgggaggtggccgctgtgcgctgtgctgtgcatgctgcccgggcccatggagctgctgatggaggagctggccctggccgcctgcggcgggccgccccccgggccaccacccggccccggggccctggctgccccaggcaccggctgcgctggaagctgtggggagatgcccagtgcctgcctgaagatgaggtgagccccccaggcggcggcggggccggcggccagagggcccggagcagctgtggccggccccggcggctgcagcctgtgctgcccggcagacatggaggcagcctgcggcacggccccctgggcgtgcgccacctgcctgctgctgtgcggcgggagggccctgaccctgccctgcacgtgcggccagaatgtctgcaccgggccggccatgatggcctgcccctgccccactag

SEQ ID NO: 310360 - DNA, 828 bp, Artificial Sequence
  derived and/or modified sequence
atgggcagcgccccctgggcccccgtgctgctgctggccctgggcctgaggggcctgcaggctgggggcgagtggcgcagacctcccgcccacagcccggtcccggcaccccctctgcgctttgcctcccctcattccccccaagggcccggtcctcgcctccctggtgctctgcttccagctgcctcaggccccctccagctgagggctctgaggcagcaggaccttccttctgcacttcctggcgtgggccaggtgcttgggccaggccgtggcgcccatttactcttacattgggaacgaggcaggagagtgggattgcggcaacagctgggactaagaaggggcgccggggggcgggctggcgggtcaactggtttgcggggggcacctttgctcagagaagtagcagcagttcgttgcgccgtccatgcggcgcgcgcacacggggccgccgatggtggtgccggaccggggcgacttcgtagggccgcacccagagctacaactcgacctcgcggcccaggctgcccaagacaccggctgaggtggaaactctggggcgatgcacagtgtctgccggaagacgaggtctcacctccagggggcggcggagctggaggtcagagagctaggtctagctgtggtcggccacggagactccagccggtgttgcctggccgccatggcggctccctgcgccacggccctctgggggtcaggcatcttccagctgctgttagacgcgaagggcccgacccggctctccacgtgagacccgaatgtctgcatcgagctggacacgacggtctgccactcccacactag

SEQ ID NO: 310361 - RNA, 828 nt, Artificial Sequence
  derived and/or modified sequence
auggguagcgcucccugggcccccgugcuguuacuugcacugggacuccgaggacuccaggcuggcggagaguggcggaggccacccgcgcauucacccgugccagccccuccacugcgguuugcuuccccccacagcccucaagggccuggcccccggcucccaggugcccuccucccugcugcuucuggcccacugcaguuacgcgcacugcgucagcaggaucugccaagcgcauuaccaggcguaggucaggugcucggaccaggucgaggagcccacuuauugcuacauugggaacgcggacggcgcgucggacugaggcagcaacuagggcugagacgcggagcaggagguagggcuggcgguucuacaggacucagaggcgccccauugcugcgugagguugcagcaguuagaugcgccgugcacgccgcccgggcacacggagcugcagacgggggugcugguccuggccgcuugagaagagcugccccacgcgcuacaaccaggccaagggguccgggcuguccuaggcaccgacucagguggaagcuguggggcgacgcacagugucucccggaagacgaagucuccccuccugguggaggcggagcuggcggacaaagagcuagaagcuccugcggaagaccccguagacugcaacccgucuugccuggccgacauggagguucccugagacacggacccuugggggugagacaucucccugccgcggugaggagggagggcccagacccagcccuccacguacgcccagaaugcuugcaccgcgccggacacgauggguugccauugccccauuag

SEQ ID NO: 310362 - RNA, 828 nt, Artificial Sequence
  derived and/or modified sequence
augggcuccgcaccuugggcaccaguucuguuacucgcuuuaggccuccggggauuacaggccgguggcgaguggcgcagaccacccgcccacucuccugugccagccccaccuuugagauucgccagcccacauuccccucaggguccaggcccccgauugcccggcgcccuccucccugccgcaucaggaccauugcagcucagagcccuccgccagcaggaccuaccuuccgccuugccuggaguaggacaagugcucggccccgggagaggugcccauuugcuucuccauugggaaagagggaggcgcgugggguuacgacagcaacugggauugaggcgcggcgcaggaggacgagcagggggaucuaccggacugaggggcgccccucugcugagggaaguggccgcagugcgaugcgccguccacgccgcaagggcucacggugccgccgauggaggagcaggccccggaagacuccgcagagcugccccuagggcuacgacccggccuagaggaccaggcuguccacgccauagacuacgcuggaaauuguggggugacgcgcagugccugccagaggaugaaguuaguccuccaggcggcggcggcgcaggcggacagagagcccgguccagcuguggccguccuagaagacugcaaccagugcugccaggccgacacgguggaucccucagacauggcccccucggugugagacaccugccugccgccgugcgaagggagggccccgaucccgcacugcaugugagacccgagugucugcauagagcaggacaugauggccucccccugccacauuag

SEQ ID NO: 310363 - protein, 267 aa, Artificial Sequence
  derived and/or modified sequence
MTCSLGKVYISEIAYPAVRGLLGSCVQLMVVVGILLAYLAGWVLEWRWLAVLGCVPPSLMLLLMCFMPETPRFLLTQHRRQEAMAALRFLWGSEQGWEDPPIGAEQSFHLALLRQPGIYKPFIIGVSLMAFQQLSGVNAVMFYAETIFEEAKFKDSSLASVVVGVIQVLFTAVAALIMDRAGRRLLLVLSGVVMVFSTSAFGAYFKLTQGGPGNSSHVAISAPVSAQPVDASVGLAWLAVGSMCLFIAGFAVGWGPIPWLLMSEIFP

SEQ ID NO: 310364 - protein, 256 aa, Artificial Sequence
  derived and/or modified sequence
MTPEDPEETQPLLGPPGGSAPRGRRVFLAAFAAALGPLSFGFALGYSSPAIPSLQRAAPPAPRLDDAAASWFGVYISEIAYPAVRGLLGSCVQLMVVVGILLAYLAGWVLEWRWLAVLGCVPPSLMLLLMCFMPETPRFLLTQHRRQEAMAALRFLWGSEQGWEDPPIGAEQSFHLALLRQPGIYKPFIIGVSLMAFQQLSGVNAVMFYAETIFEEAKFKDSSLASVVVGVIQVLFTAVAALIMDRAGRRLLLVLS

SEQ ID NO: 310365 - protein, 265 aa, Artificial Sequence
  derived and/or modified sequence
MVVVGILLAYLAGWVLEWRWLAVLGCVPPSLMLLLMCFMPETPRFLLTQHRRQEAMAALRFLWGSEQGWEDPPIGAEQSFHLALLRQPGIYKPFIIGVSLMAFQQLSGVNAVMFYAETIFEEAKFKDSSLASVVVGVIQVLFTAVAALIMDRAGRRLLLVLSGVVMVFSTSAFGAYFKLTQGGPGNSSHVAISAPVSAQPVDASVGLAWLAVGSMCLFIAGFAVGWGPIPWLLMSEIFPLHVKGVATGICVLTNWLMAFLVTKEF

SEQ ID NO: 310366 - DNA, 804 bp, Artificial Sequence
  derived and/or modified sequence
atgacgtgctccctgggcaaagtttacattagtgaaattgcctatcccgcagtgcgggggctgttagggagttgtgtgcaactgatggtggtggttggaatcctactggcatacctcgcaggttgggttttagagtggcggtggctcgcggtgctgggttgcgtgccccctagcctgatgcttctgctgatgtgcttcatgccagagacacccagatttctgttgacccagcatcgcaggcaagaggccatggccgctctcaggttcctatgggggtcggagcagggctgggaggacccccctattggtgccgagcagtcgtttcatctagcactgctgagacagcccggtatctataagccattcattatcggtgtatctctgatggctttccagcaactgtccggcgtgaacgctgtgatgttctacgccgaaaccatcttcgaagaagccaagtttaaggattcttcgttagcctcagtggtggttggggtaattcaggtcctgttcaccgcagtggccgccctcatcatggatagggccggcaggcggctgctgctggtgttgtcaggagttgtgatggtgttttccacaagtgccttcggagcatatttcaagctgacacagggggggccagggaacagctcccacgtggcgatatccgcacccgtctcggcccagcccgtggacgcaagtgttggcttggcatggctggctgttgggtcaatgtgcctgttcatcgctggattcgcagtgggctggggaccgataccttggctcctgatgtccgagatctttccatag

SEQ ID NO: 310367 - DNA, 771 bp, Artificial Sequence
  derived and/or modified sequence
atgaccccggaggatcccgaagagacgcagccactgctggggccacctggcggatccgcacccaggggtcggagagtgtttttggcagcttttgctgctgcactgggaccattgagctttggcttcgccctcggatactcctcgccagcaattccttccttacagagggcggcccccccagccccaaggcttgacgacgcagctgcttcgtggttcggcgtctatataagcgaaattgcttacccagcagtgcgggggctcctgggaagctgtgtgcagctgatggtggtggtgggcatattgctagcatatctcgctggctgggtcctggagtggcgctggctagcagtcctgggatgtgtgcctccaagcctaatgcttcttttgatgtgtttcatgcctgagacccctcggtttctgttaacacagcataggcggcaggaggcaatggccgctctcaggttcctatggggatccgaacaaggctgggaagatccaccgattggggcggaacagagcttccacttggctctgcttaggcagcccggcatatataaacccttcatcatcggtgtgtcactaatggcgttccagcagctgtctggggtgaacgcagtaatgttttatgccgaaactatttttgaagaggccaagttcaaggattcctctttagcatctgtggtcgtcggagtgatccaggtactctttacagccgtggccgcgctcatcatggacagggccggtaggcgcctgctgctcgtcctctcttag

SEQ ID NO: 310368 - DNA, 804 bp, Artificial Sequence
  derived and/or modified sequence
atgacctgtagcctaggaaaagtttacatttctgagattgcttatccagctgttagaggcctattaggtagctgtgtgcagctcatggtcgttgtaggcattcttctggcatacctggctggttgggtgttggagtggaggtggcttgccgtgcttggctgtgtgccgccgagtctcatgctgttactcatgtgcttcatgcctgagaccccaagatttcttctcacccagcataggaggcaggaggctatggcagctctccgtttcctttggggctcagagcagggatgggaggaccccccgatcggtgctgagcagagtttccatcttgcattgctgcggcagcctgggatctataaacccttcatcataggcgtcagtcttatggccttccagcaactatccggcgtgaacgctgtaatgttctacgcggaaacaatctttgaagaagcaaagttcaaggatagctccttggcaagcgtcgtggttggggtcatacaggtgctgttcacagccgtggctgccttaatcatggatagagccggcagaagattgctgttagtcctatcgggtgtggttatggtcttttcaacctcggccttcggcgcctattttaagctgactcagggcggccccggcaactcttcccacgtggccatatctgcccccgtgagcgcccagcccgttgatgcatcggtgggactggcatggttagccgtcggtagcatgtgcctattcatcgctggatttgcggtgggttggggaccaattccatggctgctcatgagtgagatattcccatag

SEQ ID NO: 310369 - DNA, 831 bp, Artificial Sequence
  derived and/or modified sequence
caactgatggtcgtggtgggaattctgctggcttatctagccggctgggtcctggagtggcgatggctggccgtccttgggtgcgtgcctccctccttgatgctcctgctaatgtgctttatgcccgaaacgccaaggttcttactgactcagcacagacgtcaggaggctatggctgcactaagattcctgtggggctcagagcagggttgggaggaccctccgataggggctgagcagtctttccacctggcactgttacgtcaaccaggtatatacaagccctttataatcggggtgtctctgatggccttccagcagctgagcggcgtcaatgctgtgatgttttacgcagagacaatctttgaagaagctaagtttaaagatagtagcctcgcgtcagtggtggtgggggtgatccaagttctgttcaccgccgtagccgcattgattatggacagggcagggcgccgattgctgcttgttctctctggggtcgtgatggtgtttagcacctcagcctttggcgcctatttcaaactgacacaggggggaccagggaattcaagtcacgtagctataagcgcacctgttagcgctcaacccgtagatgcctccgtgggtttggcctggcttgcagtaggcagtatgtgcctcttcatcgcaggatttgccgttgggtggggacccatcccatggctgctaatgtcagagatctttcccttacacgtgaagggcgtcgccacagggatttgtgtgctgacgaactggttaatggcgttcctggtcacaaaggaattttcttctctgatgttgttgctcctgctgtag

SEQ ID NO: 310370 - DNA, 804 bp, Artificial Sequence
  derived and/or modified sequence
atgacctgcagcctgggcaaggtgtacatcagcgagatcgcctacccagctgtgcggggcctgctgggcagctgtgtgcagctgatggtggtggtgggcatcctgctggcctacctggccggctgggtgctggagtggcgctggctggccgtgctgggctgtgtgccccccagcctgatgctgctgctgatgtgcttcatgcctgagaccccccgcttcctgctgacccagcaccggcggcaggaggccatggccgccctgcgcttcctgtggggcagcgagcagggctgggaggacccccccatcggggctgagcagagcttccacctggccctgctgcggcagcccggcatctacaagcccttcatcatcggcgtgtccctgatggccttccagcagctgtctggagtgaatgctgtgatgttttatgcagagaccatctttgaggaggccaagttcaaggacagcagcctggcctctgtggtggtgggcgtcatccaggtgctcttcaccgctgtggccgccctgatcatggacagagctggaagaaggctgctgctggtgctgagcggcgtggtgatggtgttcagcaccagcgcctttggagcctacttcaagctgacccagggcggccctggcaacagcagccacgtggccatcagcgcccctgtgtctgcccagcctgtggatgcctctgtgggcctggcctggctggccgtgggctccatgtgcctcttcatcgccggctttgctgtgggctggggccccatcccctggctgctgatgtctgagatcttcccctag

SEQ ID NO: 310371 - DNA, 771 bp, Artificial Sequence
  derived and/or modified sequence
atgaccccagaggaccctgaggagacccagcccctgctgggccccccaggcggcagcgccccccggggccggcgggtcttcctggccgcctttgctgctgccctgggccccctgagctttggatttgccctgggctacagcagccctgccatccccagcctgcagagagctgcccccccagccccccggctggatgatgctgctgcctcctggtttggagtgtacatcagcgagatcgcctacccagctgtgcggggcctgctgggcagctgtgtgcagctgatggtggtggtgggcatcctgctggcctacctggccggctgggtgctggagtggcgctggctggccgtgctgggctgtgtgccccccagcctgatgctgctgctgatgtgcttcatgcctgagaccccccgcttcctgctgacccagcaccggcggcaggaggccatggccgccctgcgcttcctgtggggcagcgagcagggctgggaggacccccccatcggggctgagcagagcttccacctggccctgctgcggcagcccggcatctacaagcccttcatcatcggcgtgtccctgatggccttccagcagctgtctggagtgaatgctgtgatgttttatgcagagaccatctttgaggaggccaagttcaaggacagcagcctggcctctgtggtggtgggcgtcatccaggtgctcttcaccgctgtggccgccctgatcatggacagagctggaagaaggctgctgctggtgctgtcctag

SEQ ID NO: 310372 - DNA, 831 bp, Artificial Sequence
  derived and/or modified sequence
cagctgatggtggtggtgggcatcctgctggcctacctggccggctgggtgctggagtggcgctggctggccgtgctgggctgtgtgccccccagcctgatgctgctgctgatgtgcttcatgcctgagaccccccgcttcctgctgacccagcaccggcggcaggaggccatggccgccctgcgcttcctgtggggcagcgagcagggctgggaggacccccccatcggggctgagcagagcttccacctggccctgctgcggcagcccggcatctacaagcccttcatcatcggcgtgtccctgatggccttccagcagctgtctggagtgaatgctgtgatgttttatgcagagaccatctttgaggaggccaagttcaaggacagcagcctggcctctgtggtggtgggcgtcatccaggtgctcttcaccgctgtggccgccctgatcatggacagagctggaagaaggctgctgctggtgctgagcggcgtggtgatggtgttcagcaccagcgcctttggagcctacttcaagctgacccagggcggccctggcaacagcagccacgtggccatcagcgcccctgtgtctgcccagcctgtggatgcctctgtgggcctggcctggctggccgtgggctccatgtgcctcttcatcgccggctttgctgtgggctggggccccatcccctggctgctgatgtctgagatcttccccctgcacgtgaagggcgtggccaccggcatctgtgtgctgaccaactggctgatggccttcctggtgaccaaggagttcagcagcctgatgctgctgctgctgctgtag

SEQ ID NO: 310373 - DNA, 804 bp, Artificial Sequence
  derived and/or modified sequence
atgacctgcagcctgggcaaggtgtacatcagcgagatcgcctaccctgctgtgcgcggcctcctgggatcatgcgtccaactgatggtggttgtaggaatcctgcttgcctatctggctggttgggtgctggagtggcgctggctggcagtcctgggatgtgtgcccccttccttgatgctgctgctgatgtgcttcatgccagagacgcccagatttttgcttacccagcatcgacgtcaggaagctatggccgcgttgaggttcctgtgggggtcagaacagggctgggaggatcctccaatcggagccgaacagagttttcatcttgctttactgcgtcagccaggtatatataaaccgtttattattggagtgagtttgatggccttccagcaactctccggcgtcaacgcagtgatgttttacgctgagaccatttttgaagaagccaagtttaaagatagcagcctggcgtctgtggtagtcggggtgatccaggtgctattcaccgccgtcgcggccttgataatggatcgcgccggtcggagattactgttagtactgtccggtgtcgtgatggtcttttccacctccgccttcggcgcctactttaagctcactcagggcggtccaggcaattccagccacgtggccatctctgctccagtgagcgcacagccagtcgatgcctccgtgggacttgcatggctcgccgtgggcagcatgtgtctgttcattgccggcttcgcggtggggtgggggcccataccatggctgctaatgtcggaaattttcccgtag

SEQ ID NO: 310374 - DNA, 771 bp, Artificial Sequence
  derived and/or modified sequence
atgacccccgaggaccccgaggagacccagcccctgctgggccccccgggcggaagtgcccctagagggagaagggtgtttctggctgctttcgctgctgctttagggcccctgagcttcgggttcgctttgggctactcatctccagctattccatcattgcagcgggcagcacctccagcccctcgactggacgatgccgcagcttcctggtttggagtatacatctccgagattgcctatccagctgttcgtggcctactgggttcgtgcgttcagctgatggtggttgtcgggatactgctagcttatttggccggatgggtcctcgaatggcgttggcttgctgttttagggtgtgtacccccgagcttgatgctgctgctgatgtgcttcatgcccgaaactccccgctttttgctcacccagcatcgcaggcaggaggccatggctgctctgagattcctctggggttctgagcagggatgggaggacccacctattggtgccgaacagagcttccacctcgccctgttacggcagcctggaatttacaagcccttcataatcggcgtgagtctgatggctttccagcagctgagcggggtgaacgcagtgatgttttacgccgaaaccatcttcgaggaagccaagttcaaggactcctccttggcaagtgttgtcgtaggcgtgatccaggtcctctttacagccgttgccgcactgattatggaccgagcgggaaggcgtctgctgcttgtgttgtcttag

SEQ ID NO: 310375 - DNA, 804 bp, Artificial Sequence
  derived and/or modified sequence
atgacctgcagcctgggcaaggtgtacatcagcgagatcgcctacccggcagtccgtgggctgctgggcagctgtgtgcaactgatggtcgttgttggcattctcctggcttaccttgctggatgggtgctggaatggaggtggctggcagtgcttgggtgcgtgccgccctccttgatgctgctactcatgtgttttatgcctgaaacaccccgattcttactgacacagcaccgaagacaagaggcaatggctgccttgaggtttttatgggggtctgagcagggctgggaggaccctcccataggcgccgagcagtcattccacctggctcttttgagacaaccaggaatctacaaaccgtttatcattggtgtcagtttgatggccttccagcagttgagtggcgtcaacgccgtcatgttctacgccgaaacaatatttgaggaggccaaattcaaggattccagtctggcgtccgtggtcgttggcgtgattcaggtcctgtttactgcagtagcagctctcatcatggatagagctggacggagactgctcctggtgctttcaggagtcgttatggtcttttcaactagcgcctttggagcttactttaagttgacccaaggggggccaggcaatagttctcatgtcgctatcagcgctccagttagtgcacagcctgtggatgccagcgttggcctggcatggctggccgtgggttcgatgtgtctgttcattgctggctttgctgttggatgggggccgattccttggctcctgatgtcagagatcttcccctag

SEQ ID NO: 310376 - DNA, 831 bp, Artificial Sequence
  derived and/or modified sequence
cagctgatggtggtggtgggcatcctgctggcctacctggccggctgggtcctcgagtggaggtggctggcagtgctggggtgcgtgcctccaagccttatgcttttactgatgtgctttatgcctgaaactccacgtttcctacttacccagcatcgcagacaggaggccatggcggccctgaggttcctctggggctcagagcaaggttgggaagatcccccaatcggcgccgagcagtcctttcaccttgcgttgttaagacaacctgggatctacaagccgtttattatcggagttagcctgatggccttccaacagctcagcggagttaatgccgtcatgttctacgccgagacgatcttcgaagaggcaaaattcaaggactcttctctggcatctgttgttgtgggggtgatccaggtgttgttcaccgcagtggcagctctcattatggatcgggcaggtcggcggctgctgttggtgctttcgggtgttgtgatggttttcagcaccagtgccttcggagcatactttaaattgacgcagggtgggccagggaattccagtcacgtcgccatttctgcccctgtcagcgctcaacccgtcgacgccagcgtaggattggcgtggctggccgtgggctcgatgtgcctgttcatcgcagggtttgctgtggggtgggggcctattccatggttgctcatgagtgagattttcccactgcacgttaagggcgtagctacaggaatttgcgttctcactaattggttgatggcgttccttgtcacaaaagagtttagttcactgatgctgttacttctgctgtag

SEQ ID NO: 310377 - DNA, 804 bp, Artificial Sequence
  derived and/or modified sequence
atgacgtgctccctgggaaaggtgtatatctctgagatcgcctatcccgctgtgcgtggcttattggggtcctgtgtccaactgatggttgtggttggcattcttctggcgtatctggctggatgggtgctcgaatggcggtggctagccgttctggggtgcgttcccccttctctgatgttgcttttgatgtgtttcatgcctgaaacccctcgcttcctgctcacacagcataggaggcaagaagcaatggccgcattaaggttcctatggggtagtgagcaaggttgggaagaccctcccattggagccgagcaatctttccacctggccttacttcgtcaacctggaatttacaagcccttcataatcggagtttcactgatggccttccaacagctgagtggagtgaacgccgtaatgttttacgcggagactatttttgaggaagcaaaattcaaggactccagcctggcttcggtagttgtaggggtgatccaggtcctgttcacagccgtcgccgctcttatcatggaccgagctgggagacggcttttactcgtgttgtctggagtggtaatggttttcagtacaagcgccttcggggcatacttcaagctgacacagggagggcctggcaactcctcgcacgtggcaatctcagccccagtgtccgctcagccagtggacgctagtgtggggctggcctggctggcagtcggttccatgtgtcttttcatcgcgggtttcgcagtcggctgggggcctatcccatggctgttaatgagtgagatatttccatag

SEQ ID NO: 310378 - DNA, 771 bp, Artificial Sequence
  derived and/or modified sequence
atgaccccagaagatccagaggaaacacaacccctgttaggcccacccggtggttccgctcccaggggcaggcgagtcttcctggcggcattcgccgctgctctgggacctctgtcttttggatttgcactgggctattcctcccccgcaattccttctctccaacgggcagcacccccagcgccaagattggacgacgccgctgcctcctggttcggggtgtacattagcgaaatagcttacccagccgttagagggctactgggctcatgcgtccaattaatggtcgtggttggaatattactggcctacctcgcgggatgggtcttagagtggagatggctggctgtactcggatgcgtgcccccatcactgatgctgctcctgatgtgctttatgccagaaacaccacgttttctactgacgcaacaccgacggcaggaagccatggccgctcttcgctttctttggggcagcgagcaggggtgggaggatcctcctatcggcgcagaacagtccttccatctggccctgctgagacagcctggcatttataagccctttatcatcggtgtctccctcatggccttccagcagctgtccggagttaacgctgttatgttctatgctgagactatattcgaggaggcaaaattcaaagactcttccctggcgtcagtggtcgtaggtgtgatccaggtgctcttcactgcagtagctgcactaatcatggaccgagcaggtcggagactgctgctcgttctgtcttag

SEQ ID NO: 310379 - DNA, 804 bp, Artificial Sequence
  derived and/or modified sequence
atgacctgttcactggggaaggtctatatctcagagattgcatacccagctgtgagagggttgctggggtcatgcgtccagttgatggtcgttgttggcatactgcttgcttatctggccggatgggtactggaatggcggtggctggcagtcttaggttgcgtgcctccctctctcatgctcctgcttatgtgctttatgcctgagaccccaaggttcctgctcacccagcatcgtaggcaggaggcaatggctgcactccggtttctatggggatctgagcaggggtgggaagacccccctattggcgcagagcagagcttccacctggcactcctcaggcagcctggcatttacaaaccctttataatcggggtttctctgatggcttttcaacaactgtccggagtaaacgcggttatgttttacgctgagacaatttttgaagaggccaaatttaaagactccagcttggctagcgtggtagtcggggtcatccaggttctgttcacagcagtggctgccctgataatggacagggccggacggaggttgctgctggtgctctcgggtgtggttatggtcttttctactagtgctttcggtgcatactttaaattgacgcaaggtgggccaggcaattcctcacatgtggctatctcggcccctgttagtgcacagcccgttgacgccagcgtgggtctggcgtggctggccgtagggagcatgtgtctctttattgccggttttgctgtgggctggggccctattccatggctgctcatgagcgaaatattcccctag

SEQ ID NO: 310380 - DNA, 831 bp, Artificial Sequence
  derived and/or modified sequence
cagctgatggtggtggttgggatcctgttggcttacctagcgggatgggtgctcgaatggcgctggctcgctgtacttggatgcgtccctccgtctctgatgcttctcctgatgtgcttcatgccagaaacaccaagattcctcctgacgcagcatcgccgtcaagaggcaatggccgcactgagattcctctggggtagcgagcaggggtgggaggaccccccaatcggggctgagcagtcttttcacctcgcattgctgagacagcccggtatctacaagcctttcataattggggtgtctttgatggcttttcagcagctgtcgggcgttaatgcagtgatgttttatgccgaaactatcttcgaggaggctaagtttaaggattcctctctcgctagcgtggttgtgggggtgatccaggtcctgttcacagcggtcgctgcactgatcatggaccgagctggcaggcgcctgctactggtcctgtctggggtcgtaatggtgttttccactagcgccttcggcgcttattttaaactgactcaggggggacccggtaactctagccacgttgccattagtgcccctgtcagcgcccaacctgtcgacgccagtgtgggcctggcatggctcgctgtgggctctatgtgtctgtttattgctggctttgcagtcggctgggggcctatcccttggctgctcatgtcggaaatctttcctttacacgtaaagggagttgctactgggatttgcgttctgaccaactggctgatggcgtttctggtgactaaggaattcagtagtctaatgctgctacttctcttatag

SEQ ID NO: 310381 - DNA, 1447 bp, Artificial Sequence
  derived and/or modified sequence
atgacatgcagtctcggaaaggtctacatctccgaaatcgcctacccagcagtccgggggttgctcggctcctgtgtgcagctaatggtcgtcgtcggcatcctcctggcctacctggcaggctgggtgctggagtggcgctggctggctgtgctgggctgcgtgcccccctccctcatgctgcttctcatgtgcttcatgcccgagaccccgcgcttcctgctgactcagcacaggcgccaggaggccatggccgccctgcggttcctgtggggctccgagcagggctgggaagacccccccatcggggctgagcagagctttcacctggccctgctgcggcagcccggcatctacaagcccttcatcatcggcgtctccctgatggccttccagcagctgtcgggggtcaacgccgtcatgttctatgcagagaccatctttgaagaggccaagttcaaggacagcagcctggcctcggtcgtcgtgggtgtcatccaggtgctgttcacagctgtggcggctctcatcatggacagagcagggcggaggctgctcctggtcttgtcaggtgtggtcatggtgttcagcacgagtgccttcggcgcctacttcaagctgacccagggtggccctggcaactcctcgcacgtggccatctcggcgcctgtctctgcacagcctgttgatgccagcgtggggctggcctggctggccgtgggcagcatgtgcctcttcatcgccggctttgcggtgggctgggggcccatcccctggctcctcatgtcagagatcttccctctgcatgtcaagggcgtggcgacaggcatctgcgtcctcaccaactggctcatggcctttctcgtgaccaaggagttcagcagcctcatggaggtcctcaggccctatggagccttctggcttgcctccgctttctgcatcttcagtgtccttttcactttgttctgtgtccctgaaactaaaggaaagactctggaacaaatcacagcccattttgaggggcgatgacagccactcactaggggatggagcaagcctgtgactccaagctgggcccaagcccagagcccctgcctgccccaggggagccagaatccagccccttggagccttggtctgcagggtccctccttcctgtcatgctccctccagcccatgacccggggctaggaggctcactgcctcctgttccagctcctgctgctgctctgaggactcaggaacaccttcgagctttgcagacctgcggtcagccctccatgcgcaagactaaagcagcggaagaggaggtgggcctctaggatctttgtcttctggctggaggtgcttttggaggttgggtgctgggcattcagtcgctcctctcacgcggctgccttatcgggaaggaaatttgtttgccaaataaagactgacacagaaaatc

SEQ ID NO: 310382 - DNA, 793 bp, Artificial Sequence
  derived and/or modified sequence
ggccgatcggcgttggccgccgacatgacgcccgaggacccagaggaaacccagccgcttctggggcctcctggcggcagcgcgccccgcggccgccgcgtcttcctcgccgccttcgccgctgccctgggcccactcagcttcggcttcgcgctcggctacagctccccggccatccctagcctgcagcgcgccgcgcccccggccccgcgcctggacgacgccgccgcctcctggttcggggtctacatctccgaaatcgcctacccagcagtccgggggttgctcggctcctgtgtgcagctaatggtcgtcgtcggcatcctcctggcctacctggcaggctgggtgctggagtggcgctggctggctgtgctgggctgcgtgcccccctccctcatgctgcttctcatgtgcttcatgcccgagaccccgcgcttcctgctgactcagcacaggcgccaggaggccatggccgccctgcggttcctgtggggctccgagcagggctgggaagacccccccatcggggctgagcagagctttcacctggccctgctgcggcagcccggcatctacaagcccttcatcatcggcgtctccctgatggccttccagcagctgtcgggggtcaacgccgtcatgttctatgcagagaccatctttgaagaggccaagttcaaggacagcagcctggcctcggtcgtcgtgggtgtcatccaggtgctgttcacagctgtggcggctctcatcatggacagagcagggcggaggctgctcctggtcttgtcag

SEQ ID NO: 310383 - DNA, 933 bp, Artificial Sequence
  derived and/or modified sequence
caggcctgggggcgcggctccccctggcgggaccttctgggtgccaggcttgaagtccctgcgttatctcgcggtccctcccgtcgaccctgggaaggatcctactgttctctccattttacactgaggtcatgacatgcagtctcggaaaggtctacatctccgaaatcgcctacccagcagtccgggggttgctcggctcctgtgtgcagctaatggtcgtcgtcggcatcctcctggcctacctggcaggctgggtgctggagtggcgctggctggctgtgctgggctgcgtgcccccctccctcatgctgcttctcatgtgcttcatgcccgagaccccgcgcttcctgctgactcagcacaggcgccaggaggccatggccgccctgcggttcctgtggggctccgagcagggctgggaagacccccccatcggggctgagcagagctttcacctggccctgctgcggcagcccggcatctacaagcccttcatcatcggcgtctccctgatggccttccagcagctgtcgggggtcaacgccgtcatgttctatgcagagaccatctttgaagaggccaagttcaaggacagcagcctggcctcggtcgtcgtgggtgtcatccaggtgctgttcacagctgtggcggctctcatcatggacagagcagggcggaggctgctcctggtcttgtcaggtgtggtcatggtgttcagcacgagtgccttcggcgcctacttcaagctgacccagggtggccctggcaactcctcgcacgtggccatctcggcgcctgtctctgcacagcctgttgatgccagcgtggggctggcctggctggccgtgggcagcatgtgcctcttcatcgccggctttgcggtgggctgggggcccatcccctggctcctcatgtcagagatcttccctc

SEQ ID NO: 310384 - DNA, 1030 bp, Artificial Sequence
  derived and/or modified sequence
cagctaatggtcgtcgtcggcatcctcctggcctacctggcaggctgggtgctggagtggcgctggctggctgtgctgggctgcgtgcccccctccctcatgctgcttctcatgtgcttcatgcccgagaccccgcgcttcctgctgactcagcacaggcgccaggaggccatggccgccctgcggttcctgtggggctccgagcagggctgggaagacccccccatcggggctgagcagagctttcacctggccctgctgcggcagcccggcatctacaagcccttcatcatcggcgtctccctgatggccttccagcagctgtcgggggtcaacgccgtcatgttctatgcagagaccatctttgaagaggccaagttcaaggacagcagcctggcctcggtcgtcgtgggtgtcatccaggtgctgttcacagctgtggcggctctcatcatggacagagcagggcggaggctgctcctggtcttgtcaggtgtggtcatggtgttcagcacgagtgccttcggcgcctacttcaagctgacccagggtggccctggcaactcctcgcacgtggccatctcggcgcctgtctctgcacagcctgttgatgccagcgtggggctggcctggctggccgtgggcagcatgtgcctcttcatcgccggctttgcggtgggctgggggcccatcccctggctcctcatgtcagagatcttccctctgcatgtcaagggcgtggcgacaggcatctgcgtcctcaccaactggctcatggcctttctcgtgaccaaggagttcagcagcctcatgctcctgctgctgctctgaggactcaggaacaccttcgagctttgcagacctgcggtcagccctccatgcgcaagactaaagcagcggaagaggaggtgggcctctaggatctttgtcttctggctggaggtgcttttggaggttgggtgctgggcattcagtcgctcctctcacgcggctgccttatcgggaaggaaatttgtttgccaaataaaga

SEQ ID NO: 310385 - DNA, 992 bp, Artificial Sequence
  derived and/or modified sequence
ggccggtgcgggccgcactcgcagggcccgtggcggttcaggcgccagagctggccgatcggcgttggccgccgacatgacgcccgaggacccagaggaaacccagccgcttctggggcctcctggcggcaggtctacatctccgaaatcgcctacccagcagtccgggggttgctcggctcctgtgtgcagctaatggtcgtcgtcggcatcctcctggcctacctggcaggctgggtgctggagtggcgctggctggctgtgctgggctgcgtgcccccctccctcatgctgcttctcatgtgcttcatgcccgagaccccgcgcttcctgctgactcagcacaggcgccaggaggccatggccgccctgcggttcctgtggggctccgagcagggctgggaagacccccccatcggggctgagcagagctttcacctggccctgctgcggcagcccggcatctacaagcccttcatcatcggcgtctccctgatggccttccagcagctgtcgggggtcaacgccgtcatgttctatgcagagaccatctttgaagaggccaagttcaaggacagcagcctggcctcggtcgtcgtgggtgtcatccaggtgctgttcacagctgtggcggctctcatcatggacagagcagggcggaggctgctcctggtcttgtcaggtgtggtcatggtgttcagcacgagtgccttcggcgcctacttcaagctgacccagggtggccctggcaactcctcgcacgtggccatctcggcgcctgtctctgcacagcctgttgatgccagcgtggggctggcctggctggccgtgggcagcatgtgcctcttcatcgccggctttgcggtgggctgggggcccatcccctggctcctcatgtcagagatcttccctctgcatgtcaagggcgtggcgacaggcatctgcgtcctcaccaactggctcatggcctttctcgtgaccaaggagttcag

SEQ ID NO: 310386 - DNA, 804 bp, Artificial Sequence
  derived and/or modified sequence
atgacctgcagcctgggcaaggtgtacatcagcgagatcgcctaccccgccgtgagaggcctgctgggcagctgcgtgcagctgatggtggtggtgggcatcctgctggcctacctggccggctgggtgctggagtggagatggctggccgtgctgggctgcgtgccccccagcctgatgctgctgctgatgtgcttcatgcccgagacccccagattcctgctgacccagcacagaagacaggaggccatggccgccctgagattcctgtggggcagcgagcagggctgggaggacccccccatcggcgccgagcagagcttccacctggccctgctgagacagcccggcatctacaagcccttcatcatcggcgtgagcctgatggccttccagcagctgagcggcgtgaacgccgtgatgttctacgccgagaccatcttcgaggaggccaagttcaaggacagcagcctggccagcgtggtggtgggcgtgatccaggtgctgttcaccgccgtggccgccctgatcatggacagagccggcagaagactgctgctggtgctgagcggcgtggtgatggtgttcagcaccagcgccttcggcgcctacttcaagctgacccagggcggccccggcaacagcagccacgtggccatcagcgcccccgtgagcgcccagcccgtggacgccagcgtgggcctggcctggctggccgtgggcagcatgtgcctgttcatcgccggcttcgccgtgggctggggccccatcccctggctgctgatgagcgagatcttcccctag

SEQ ID NO: 310387 - DNA, 771 bp, Artificial Sequence
  derived and/or modified sequence
atgacccccgaggaccccgaggagacccagcccctgctgggcccccccggcggcagcgcccccagaggcagaagagtgttcctggccgccttcgccgccgccctgggccccctgagcttcggcttcgccctgggctacagcagccccgccatccccagcctgcagagagccgccccccccgcccccagactggacgacgccgccgccagctggttcggcgtgtacatcagcgagatcgcctaccccgccgtgagaggcctgctgggcagctgcgtgcagctgatggtggtggtgggcatcctgctggcctacctggccggctgggtgctggagtggagatggctggccgtgctgggctgcgtgccccccagcctgatgctgctgctgatgtgcttcatgcccgagacccccagattcctgctgacccagcacagaagacaggaggccatggccgccctgagattcctgtggggcagcgagcagggctgggaggacccccccatcggcgccgagcagagcttccacctggccctgctgagacagcccggcatctacaagcccttcatcatcggcgtgagcctgatggccttccagcagctgagcggcgtgaacgccgtgatgttctacgccgagaccatcttcgaggaggccaagttcaaggacagcagcctggccagcgtggtggtgggcgtgatccaggtgctgttcaccgccgtggccgccctgatcatggacagagccggcagaagactgctgctggtgctgagctag

SEQ ID NO: 310388 - DNA, 831 bp, Artificial Sequence
  derived and/or modified sequence
cagctgatggtggtggtgggcatcctgctggcctacctggccggctgggtgctggagtggagatggctggccgtgctgggctgcgtgccccccagcctgatgctgctgctgatgtgcttcatgcccgagacccccagattcctgctgacccagcacagaagacaggaggccatggccgccctgagattcctgtggggcagcgagcagggctgggaggacccccccatcggcgccgagcagagcttccacctggccctgctgagacagcccggcatctacaagcccttcatcatcggcgtgagcctgatggccttccagcagctgagcggcgtgaacgccgtgatgttctacgccgagaccatcttcgaggaggccaagttcaaggacagcagcctggccagcgtggtggtgggcgtgatccaggtgctgttcaccgccgtggccgccctgatcatggacagagccggcagaagactgctgctggtgctgagcggcgtggtgatggtgttcagcaccagcgccttcggcgcctacttcaagctgacccagggcggccccggcaacagcagccacgtggccatcagcgcccccgtgagcgcccagcccgtggacgccagcgtgggcctggcctggctggccgtgggcagcatgtgcctgttcatcgccggcttcgccgtgggctggggccccatcccctggctgctgatgagcgagatcttccccctgcacgtgaagggcgtggccaccggcatctgcgtgctgaccaactggctgatggccttcctggtgaccaaggagttcagcagcctgatgctgctgctgctgctgtag

SEQ ID NO: 310389 - protein, 169 aa, Artificial Sequence
  derived and/or modified sequence
  misc_feature (1)..(1): Xaa can be any naturally occurring amino acid
XGRRVFLAAFAAALGPLSFGFALGYSSPAIPSLQRAAPPAPRLDDAAASWFGVYISEIAYPAVRGLLGSCVQLMVVVGILLAYLAGWVLEWRWLAVLGCVPPSLMLLLMCFMPETPRFLLTQHRRQEAMAALRFLWGSEQGWEDPPIGAEQQLSGVNAVMFYAETIFEE

SEQ ID NO: 310390 - protein, 241 aa, Artificial Sequence
  derived and/or modified sequence
MTCSLGKVYISEIAYPAVRGLLGSCVQLMVVVGILLAYLAGWVLEWRWLAVLGCVPPSLMLLLMCFMPETPRFLLTQHRRQEAMAALRFLWGSEQGWEDPPIGAEQQLSGVNAVMFYAETIFEEAKFKDSSLASVVVGVIQVLFTAVAALIMDRAGRRLLLVLSGVVMVFSTSAFGAYFKLTQGGPGNSSHVAISAPVSAQPVDASVGLAWLAVGSMCLFIAGFAVGWGPIPWLLMSEIFP

SEQ ID NO: 310391 - DNA, 510 bp, Artificial Sequence
  derived and/or modified sequence
tgaggccggagagtgttcctggccgccttcgccgccgccctcggtcctctgagctttggatttgccctgggctactcctctcccgccataccctccctgcagcgggcggctccacccgcaccgaggctggatgatgccgccgcgagttggtttggcgtgtatatcagtgaaattgcatatccggccgtgcgcggtctattagggagctgcgtgcagctgatggtggttgtaggaatcttgcttgcctatctcgccgggtgggtcctggaatggcgctggctcgccgtgttgggctgcgtgcctccttctcttatgctattgctgatgtgtttcatgcctgagacgcctcgatttctcttgacacagcaccggcgacaggaggcgatggcagcgctgcggttcctgtggggatccgaacagggctgggaagatcccccaattggcgccgagcaacagctgtccggtgtgaatgccgtgatgttctatgcggagacgatttttgaagagtag

SEQ ID NO: 310392 - DNA, 726 bp, Artificial Sequence
  derived and/or modified sequence
atgacgtgctccttgggaaaagtctatatttctgagattgcctacccggctgtgcgcggactgctggggagctgtgtgcagctcatggtggtggtgggcattctgcttgcgtacttggccggctgggtgctggagtggcgttggctggccgtattagggtgtgtgccaccctctctcatgctactgttgatgtgctttatgccagagaccccaaggttcctgctcacccagcacagacgtcaggaggcaatggcagccctgcgtttcctgtggggaagtgagcaggggtgggaggatccaccaatcggtgccgagcagcagctcagcggtgtcaatgctgtaatgttctacgctgaaacgatttttgaggaagctaaattcaaggatagttccctggctagtgtcgttgtgggagttattcaagtgctttttaccgcagtagccgccctgatcatggatagggctgggcgcagactattgcttgttctcagtggcgtggtgatggtcttttccacttccgcctttggagcctacttcaagctgacccagggaggtcctggcaactcaagccatgtcgcgatctccgcaccggtctccgcccagccggtggatgcctcagtgggactggcctggctggcagtgggctcaatgtgcctgtttattgctggattcgcggtaggctggggcccgatcccctggcttctcatgtcagaaatttttccctag

SEQ ID NO: 310393 - DNA, 510 bp, Artificial Sequence
  derived and/or modified sequence
tgaggaagaagagtcttcctggccgcctttgctgctgccctgggccccctgagctttggatttgccctgggctacagcagccctgccatccccagcctgcagagagctgcccccccagccccccggctggatgatgctgctgcctcctggtttggagtgtacatcagcgagatcgcctacccagctgtgcggggcctgctgggcagctgtgtgcagctgatggtggtggtgggcatcctgctggcctacctggccggctgggtgctggagtggcgctggctggccgtgctgggctgtgtgccccccagcctgatgctgctgctgatgtgcttcatgcctgagaccccccgcttcctgctgacccagcaccggcggcaggaggccatggccgccctgcgcttcctgtggggcagcgagcagggctgggaggacccccccatcggggctgagcagcagctgagcggcgtgaatgctgtgatgttttatgcagagaccatctttgaggagtag

SEQ ID NO: 310394 - DNA, 726 bp, Artificial Sequence
  derived and/or modified sequence
atgacctgcagcctgggcaaggtgtacatcagcgagatcgcctacccagctgtgcggggcctgctgggcagctgtgtgcagctgatggtggtggtgggcatcctgctggcctacctggccggctgggtgctggagtggcgctggctggccgtgctgggctgtgtgccccccagcctgatgctgctgctgatgtgcttcatgcctgagaccccccgcttcctgctgacccagcaccggcggcaggaggccatggccgccctgcgcttcctgtggggcagcgagcagggctgggaggacccccccatcggggctgagcagcagctgtctggagtgaatgctgtgatgttttatgcagagaccatctttgaggaggccaagttcaaggacagcagcctggcctctgtggtggtgggcgtcatccaggtgctcttcaccgctgtggccgccctgatcatggacagagctggaagaaggctgctgctggtgctgagcggcgtggtgatggtgttcagcaccagcgcctttggagcctacttcaagctgacccagggcggccctggcaacagcagccacgtggccatcagcgcccctgtgtctgcccagcctgtggatgcctctgtgggcctggcctggctggccgtgggctccatgtgcctcttcatcgccggctttgctgtgggctggggccccatcccctggctgctgatgtctgagatcttcccctag

SEQ ID NO: 310395 - DNA, 510 bp, Artificial Sequence
  derived and/or modified sequence
tgaggccggcgggtgttcctggccgccttcgccgccgccctgggccccttaagtttcggtttcgctctcggttacagctctcccgctatccccagcctgcagagggctgccccaccagctccgaggctggacgatgcagcagcgagctggttcggggtgtacatatcagaaatcgcctaccctgcagtcaggggcctcctcggtagctgtgttcagctgatggtagtggtgggcatccttctcgcttatctggccggatgggtgttagaatggcgctggctggctgtactcggttgcgtgccaccctccttgatgttgctcctgatgtgctttatgcctgagacacctcgctttttgcttactcaacacagaaggcaagaggctatggcagctctgcggttcttgtggggcagcgaacagggatgggaagacccgccaatcggcgcggagcagcagctgagcggcgtgaatgctgttatgttctatgcagaaaccatcttcgaggaatag

SEQ ID NO: 310396 - DNA, 726 bp, Artificial Sequence
  derived and/or modified sequence
atgacctgcagcctgggcaaggtgtacatcagcgagatcgcctacccagccgttcggggcctgctgggaagctgtgtgcagctcatggtcgtggtcgggatactgttggcttacctggcaggatgggtcctcgaatggcggtggctggcggtgctggggtgtgtacctccatctctcatgctgttgcttatgtgcttcatgcctgagactccacgcttcttattaacccagcacaggaggcaggaagccatggcagccctgcggtttctgtggggctcagagcaggggtgggaggatcccccaattggcgccgagcagcaattgtccggggtcaacgcagtgatgttctacgctgagacaatctttgaggaggctaaatttaaagacagctctctcgcatctgttgtcgtaggggtgatccaggtactgttcacagcggtggctgccctcatcatggacagagccggaagacgattacttctggtgcttagtggcgtggtgatggtgttctccacgtctgcattcggtgcctatttcaagcttacacaaggcggccccggaaacagcagccatgtggcaatctccgcgcccgtgtccgcccagcccgtggatgcatccgtaggtctggcctggctcgccgtgggctccatgtgcctattcattgctggattcgccgttggctggggccctattccctggctgcttatgagcgaaatttttccctag

SEQ ID NO: 310397 - DNA, 510 bp, Artificial Sequence
  derived and/or modified sequence
tagggcagacgggtttttctggccgcttttgctgcagccttgggtcccctgtcttttggattcgctttaggatattcgtcgcctgcgattccatcccttcagagggcagcccctcctgcccctcggctcgacgatgctgcagcctcgtggttcggtgtgtacatcagtgagatcgcgtacccggcagtgcgaggacttttaggcagttgtgtccagctgatggtggtcgtcggcatattactggcatatttggccggttgggtgctggagtggcgctggcttgctgtgctcgggtgtgtaccgccttctctgatgcttctactgatgtgcttcatgcctgagaccccaagatttcttttaacacaacacagaagacaggaggccatggccgctctgcggtttctatggggcagtgagcagggctgggaggaccccccaattggggctgaacagcagctgagcggagtgaatgccgttatgttttacgccgaaactatcttcgaagaatag

SEQ ID NO: 310398 - DNA, 726 bp, Artificial Sequence
  derived and/or modified sequence
atgacttgcagcctgggtaaagtctacatatctgaaatcgcgtaccctgcagtgcgcggactgctgggatcctgcgtgcagttaatggtcgtggtcggcatcctgctcgcatatctggccggttgggtgctggagtggcggtggctggccgtcctcggttgcgtcccacccagccttatgctgttgttaatgtgcttcatgccagagacacctagatttctgcttacccagcaccgacgacaggaagccatggcagccctgcggttcctttggggctctgagcaggggtgggaagatcctcccattggcgcagagcagcagctcagcggcgtcaatgcagtgatgttctatgccgaaacaattttcgaggaggccaagtttaaagactcatcattggcatccgtcgtggtcggggtaattcaggtcctgttcaccgccgttgccgctctgattatggatagggctggcaggagattactattggtattatccggagtcgtgatggtcttttccacctctgccttcggtgcctatttcaaattgacccagggcggacctggtaatagcagccacgttgccatctcagcccctgtgagcgctcagcccgtggacgcttctgtgggcctcgcatggctcgcggtgggcagtatgtgtctgttcattgccggatttgccgtcggatgggggcctattccatggctgctgatgagtgaaatcttcccttag

SEQ ID NO: 310399 - DNA, 506 bp, Artificial Sequence
  derived and/or modified sequence
gcggccgccgcgtcttcctcgccgccttcgccgctgccctgggcccactcagcttcggcttcgcgctcggctacagctccccggccatccctagcctgcagcgcgccgcgcccccggccccgcgcctggacgacgccgccgcctcctggttcggggtctacatctccgaaatcgcctacccagcagtccgggggttgctcggctcctgtgtgcagctaatggtcgtcgtcggcatcctcctggcctacctggcaggctgggtgctggagtggcgctggctggctgtgctgggctgcgtgcccccctccctcatgctgcttctcatgtgcttcatgcccgagaccccgcgcttcctgctgactcagcacaggcgccaggaggccatggccgccctgcggttcctgtggggctccgagcagggctgggaagacccccccatcggggctgagcagcagctgtcgggggtcaacgccgtcatgttctatgcagagaccatctttgaagag

SEQ ID NO: 310400 - DNA, 854 bp, Artificial Sequence
  derived and/or modified sequence
caggcctgggggcgcggctccccctggcgggaccttctgggtgccaggcttgaagtccctgcgttatctcgcggtccctcccgtcgaccctgggaaggatcctactgttctctccattttacactgaggtcatgacatgcagtctcggaaaggtctacatctccgaaatcgcctacccagcagtccgggggttgctcggctcctgtgtgcagctaatggtcgtcgtcggcatcctcctggcctacctggcaggctgggtgctggagtggcgctggctggctgtgctgggctgcgtgcccccctccctcatgctgcttctcatgtgcttcatgcccgagaccccgcgcttcctgctgactcagcacaggcgccaggaggccatggccgccctgcggttcctgtggggctccgagcagggctgggaagacccccccatcggggctgagcagcagctgtcgggggtcaacgccgtcatgttctatgcagagaccatctttgaagaggccaagttcaaggacagcagcctggcctcggtcgtcgtgggtgtcatccaggtgctgttcacagctgtggcggctctcatcatggacagagcagggcggaggctgctcctggtcttgtcaggtgtggtcatggtgttcagcacgagtgccttcggcgcctacttcaagctgacccagggtggccctggcaactcctcgcacgtggccatctcggcgcctgtctctgcacagcctgttgatgccagcgtggggctggcctggctggccgtgggcagcatgtgcctcttcatcgccggctttgcggtgggctgggggcccatcccctggctcctcatgtcagagatcttccct

SEQ ID NO: 310401 - DNA, 510 bp, Artificial Sequence
  derived and/or modified sequence
tgaggcagaagagtgttcctggccgccttcgccgccgccctgggccccctgagcttcggcttcgccctgggctacagcagccccgccatccccagcctgcagagagccgccccccccgcccccagactggacgacgccgccgccagctggttcggcgtgtacatcagcgagatcgcctaccccgccgtgagaggcctgctgggcagctgcgtgcagctgatggtggtggtgggcatcctgctggcctacctggccggctgggtgctggagtggagatggctggccgtgctgggctgcgtgccccccagcctgatgctgctgctgatgtgcttcatgcccgagacccccagattcctgctgacccagcacagaagacaggaggccatggccgccctgagattcctgtggggcagcgagcagggctgggaggacccccccatcggcgccgagcagcagctgagcggcgtgaacgccgtgatgttctacgccgagaccatcttcgaggagtag

SEQ ID NO: 310402 - DNA, 726 bp, Artificial Sequence
  derived and/or modified sequence
atgacctgcagcctgggcaaggtgtacatcagcgagatcgcctaccccgccgtgagaggcctgctgggcagctgcgtgcagctgatggtggtggtgggcatcctgctggcctacctggccggctgggtgctggagtggagatggctggccgtgctgggctgcgtgccccccagcctgatgctgctgctgatgtgcttcatgcccgagacccccagattcctgctgacccagcacagaagacaggaggccatggccgccctgagattcctgtggggcagcgagcagggctgggaggacccccccatcggcgccgagcagcagctgagcggcgtgaacgccgtgatgttctacgccgagaccatcttcgaggaggccaagttcaaggacagcagcctggccagcgtggtggtgggcgtgatccaggtgctgttcaccgccgtggccgccctgatcatggacagagccggcagaagactgctgctggtgctgagcggcgtggtgatggtgttcagcaccagcgccttcggcgcctacttcaagctgacccagggcggccccggcaacagcagccacgtggccatcagcgcccccgtgagcgcccagcccgtggacgccagcgtgggcctggcctggctggccgtgggcagcatgtgcctgttcatcgccggcttcgccgtgggctggggccccatcccctggctgctgatgagcgagatcttcccctag

SEQ ID NO: 310403 - protein, 115 aa, Artificial Sequence
  derived and/or modified sequence
MAMVSEFLKQAWFIENEEQEYVQTVKSSKGGPGSAVSPYPTFNPSSDVAALHKAIMVKGVDEATIIDILTKRNNAQRQQIKAAYLQETGKPLDETLKKALTGHLEEVVLALLKTP

SEQ ID NO: 310404 - protein, 204 aa, Artificial Sequence
  derived and/or modified sequence
MNLILRYTFSKMAMVSEFLKQAWFIENEEQEYVQTVKSSKGGPGSAVSPYPTFNPSSDVAALHKAIMVKGVDEATIIDILTKRNNAQRQQIKAAYLQETGKPLDETLKKALTGHLEEVVLALLKTPAQFDADELRAAMKGLGTDEDTLIEILASRTNKEIRDINRVYREELKRDLAKDITSDTSGDFRNALLSLAKGDRSEDFG

SEQ ID NO: 310405 - DNA, 615 bp, Artificial Sequence
  derived and/or modified sequence
atgaatctaatccttcggtacacattctccaagatggcaatggtctctgaatttttgaagcaggcctggtttatcgaaaatgaggaacaggaatatgtacagaccgtgaagtccagtaaaggaggcccaggaagcgctgtgtccccatatccaacgtttaacccctcttcagacgtggctgctttacacaaagcaattatggtcaagggcgtggatgaggcaacaattattgatattctcaccaaaaggaataatgcccagagacaacaaataaaggcagcgtatttgcaggaaactggcaaaccattagacgagaccctcaaaaaagcactaacaggacacttggaggaggttgtgctcgcgttgctgaagacccctgcccaatttgatgccgacgaactgcgcgctgccatgaagggcttaggcactgacgaggacacactgatcgagattttggcctccagaacaaataaggagattcgtgacataaatcgggtctaccgcgaagagctgaagagggacctggcaaaggatatcacgtccgatacttcaggtgacttcagaaacgctcttctgtccctcgcgaaaggagaccggtccgaagactttggatag

SEQ ID NO: 310406 - DNA, 615 bp, Artificial Sequence
  derived and/or modified sequence
atgaacctgatcctgcgctacaccttcagcaagatggccatggtgtctgagttcctgaagcaggcctggttcattgaaaatgaggagcaggagtatgtgcagacagtgaagagcagcaagggcggccctggcagcgctgtgagcccctaccccaccttcaaccccagcagtgatgtggccgccctgcacaaggccatcatggtgaagggcgtggatgaggccaccatcatcgacatcctgaccaagagaaataatgcccagaggcagcagatcaaggccgcctacctgcaggagaccgggaagcccctggatgagaccctgaagaaggccctgaccggccacctggaggaggtggtgctggccctgctgaagaccccagcccagtttgatgctgatgagctgcgggccgccatgaagggcctgggcacagatgaggacaccctgattgagatcctggccagcaggaccaacaaggagatccgggacatcaacagagtgtaccgggaggagctgaagagggacctggccaaggacatcaccagtgacaccagcggggacttcagaaatgccctgctgagcctggccaagggggacagaagtgaagattttggatag

SEQ ID NO: 310407 - DNA, 615 bp, Artificial Sequence
  derived and/or modified sequence
atgaacctgatcctgcggtacaccttcagcaagatggccatggtgtcagaatttttgaaacaagcctggttcatcgaaaacgaagagcaggaatatgtccaaacagtaaagagtagcaaaggaggcccagggtctgctgtcagcccgtatcccacctttaacccttcgagcgatgtcgccgccttgcataaggcaataatggtgaagggtgtcgacgaagccacgatcatagacatcctaacaaagcggaacaatgcccagcgacagcagattaaggccgcctacttgcaggagacggggaagcctctagatgagaccttaaaaaaggccctgactgggcatctggaggaggtggtgctggcattactgaagacgcccgcccagttcgatgccgatgaactgagggcagcaatgaaggggttgggaactgacgaagacacattgattgagatattggcgtcacggacaaacaaggaaattagagatattaacagggtgtaccgtgaagagctgaagagagacctggccaaggatatcacatccgacacgtctggagatttcaggaacgcactgctgtcccttgcgaagggggaccgctcggaagattttggatag

SEQ ID NO: 310408 - DNA, 1509 bp, Artificial Sequence
  derived and/or modified sequence
agctgagccatgtacttcaaacagaaggcagccaattactaacttctggttgctaggtgtggcttcctttaaaatcctataaaatcagaagcccaagtctccactgccagtgtgaaatcttcagagaagaatttctctttagttctttgcaagaaggtagagataaagacactttttcaaaaatggcaatggtatcagaattcctcaagcaggcctggtttattgaaaatgaagagcaggaatatgttcaaactgtgaagtcatccaaaggtggtcccggatcagcggtgagcccctatcctaccttcaatccatcctcggatgtcgctgccttgcataaggccataatggttaaaggtgtggatgaagcaaccatcattgacattctaactaagcgaaacaatgcacagcgtcaacagatcaaagcagcatatctccaggaaacaggaaagcccctggatgaaacactgaagaaagcccttacaggtcaccttgaggaggttgttttagctctgctaaaaactccagcgcaatttgatgctgatgaacttcgtgctgccatgaagggccttggaactgatgaagatactctaattgagattttggcatcaagaactaacaaagaaatcagagacattaacagggtctacagagaggaactgaagagagatctggccaaagacataacctcagacacatctggagattttcggaacgctttgctttctcttgctaagggtgaccgatctgaggactttggtgtgaatgaagacttggctgattcagatgccagggccttgtatgaagcaggagaaaggagaaaggggacagacgtaaacgtgttcaataccatccttaccaccagaagctatccacaacttcgcagagtgtttcagaaatacaccaagtacagtaagcatgacatgaacaaagttctggacctggagttgaaaggtgacattgagaaatgcctcacagctatcgtgaagtgcgccacaagcaaaccagctttctttgcagagaagcttcatcaagccatgaaaggtgttggaactcgccataaggcattgatcaggattatggtttcccgttctgaaattgacatgaatgatatcaaagcattctatcagaagatgtatggtatctccctttgccaagccatcctggatgaaaccaaaggagattatgagaaaatcctggtggctctttgtggaggaaactaaacattcccttgatggtctcaagctatgatcagaagactttaattatatattttcatcctataagcttaaataggaaagtttcttcaacaggattacagtgtagctacctacatgctgaaaaatatagcctttaaatcatttttatattataactctgtataatagagataagtccattttttaaaaatgttttccccaaaccataaaaccctatacaagttgttctagtaacaatacatgagaaagatgtctatgtagctgaaaataaaatgacgtcacaagacaa

SEQ ID NO: 310409 - DNA, 2209 bp, Artificial Sequence
  derived and/or modified sequence
aaaaaaaaaaaaaaaaaaaaaagcaatcattaagcttttcatctagccattacttttgtacaggctctcattaattccacatagatggtctaatggtctactaaatagtattctaatcctccatcttgtctatctcttagccattctccatgataaaggatgaatggtctttcggaaacataaatgaaaccatgctgctttaaaaaaacaaacaaacaaaaagaaacccattaatgttttcccaaagctttgtggacacattgaagcttcttgtttcagcttctgccaacatttctcgctccagcaaactttcttctgcttcccaaatatgacaagcttcttctttaacttttctgccaggttaatcttgactcatttcaagagaggcttgggtcagccagggcctactctaagaagtttctttagcccttatgttttcctatggagagcacacactagctttaagtcctgagggtacttaagatgatatttcaatgtttttgtactcttagtgcttggcatatggtgggtggtctacaaatttagaacaatgtagtgaaccacaaactcctctcttcagcctgtgtgcttacttgtagtagttgtctgatctctaaaatttagaactgaatatgccaagaaagagttcaatttcagagaggagggtatggtttcattttaagtataaaagcttcctttaaaaaaaattacgtcttacattttgttatgctcctaagtgtaattgatcctggaaagtaagcgcaaggctactctctaatgctaactcttatgtatgtaagaggtgaggaaggagaggttgtgtgtggtgcatttgttttgtaaaagcatctaactgttttctttccagacactttttcaaaaatggcaatggtatcagaattcctcaagcaggcctggtttattgaaaatgaagagcaggaatatgttcaaactgtgaagtcatccaaaggtggtcccggatcagcggtgagcccctatcctaccttcaatccatcctcggatgtcgctgccttgcataaggccataatggttaaaggtgtggatgaagcaaccatcattgacattctaactaagcgaaacaatgcacagcgtcaacagatcaaagcagcatatctccaggaaacaggaaagcccctggatgaaacactgaagaaagcccttacaggtcaccttgaggaggttgttttagctctgctaaaaactccagcgcaatttgatgctgatgaacttcgtgctgccatgaagggccttggaactgatgaagatactctaattgagattttggcatcaagaactaacaaagaaatcagagacattaacagggtctacagagaggaactgaagagagatctggccaaagacataacctcagacacatctggagattttcggaacgctttgctttctcttgctaagggtgaccgatctgaggactttggtgtgaatgaagacttggctgattcagatgccagggccttgtatgaagcaggagaaaggagaaaggggacagacgtaaacgtgttcaataccatccttaccaccagaagctatccacaacttcgcagagtgtttcagaaatacaccaagtacagtaagcatgacatgaacaaagttctggacctggagttgaaaggtgacattgagaaatgcctcacagctatcgtgaagtgcgccacaagcaaaccagctttctttgcagagaagcttcatcaagccatgaaaggtgttggaactcgccataaggcattgatcaggattatggtttcccgttctgaaattgacatgaatgatatcaaagcattctatcagaagatgtatggtatctccctttgccaagccatcctggatgaaaccaaaggagattatgagaaaatcctggtggctctttgtggaggaaactaaacattcccttgatggtctcaagctatgatcagaagactttaattatatattttcatcctataagcttaaataggaaagtttcttcaacaggattacagtgtagctacctacatgctgaaaaatatagcctttaaatcatttttatattataactctgtataatagagataagtccattttttaaaaatgttttccccaaaccataaaaccctatacaagttgttctagtaacaatacatgagaaagatgtctatgtagctgaaaataaaatgacgtcacaagacaa

SEQ ID NO: 310410 - DNA, 526 bp, Artificial Sequence
  derived and/or modified sequence
tttgcaagaaggtagagataaagggaaggtgtgggaaggacttgtgaaatacatattcgaggaaaaactatgcacaaggccgtgcatttaaaaataaactccctaaggctggggtgaaacctgctacggtctgcgcaagttgactgttaatgaatttgattctcagacactttttcaaaaatggcaatggtatcagaattcctcaagcaggcctggtttattgaaaatgaagagcaggaatatgttcaaactgtgaagtcatccaaaggtggtcccggatcagcggtgagcccctatcctaccttcaatccatcctcggatgtcgctgccttgcataaggccataatggttaaaggtgtggatgaagcaaccatcattgacattctaactaagcgaaacaatgcacagcgtcaacagatcaaagcagcatatctccaggaaacaggaaagcccctggatgaaacactgaagaaagcccttacaggtcaccttgaggaggttgttttagctctgctaaaaactccag

SEQ ID NO: 310411 - DNA, 799 bp, Artificial Sequence
  derived and/or modified sequence
agtgtgaaatcttcagagaagaatttctctttagttctttgcaagaaggtagagataaagggaaggtgtgggaaggacttgtgaaatacatattcgaggaaaaactatgcacaaggccgtgcatttaaaaataaactccctaaggctggggtgaaacctgctacggtctgcgcaagttgactgttaatgaatttgattctcaggtacactttttcaaaaatggcaatggtatcagaattcctcaagcaggcctggtttattgaaaatgaagagcaggaatatgttcaaactgtgaagtcatccaaaggtggtcccggatcagcggtgagcccctatcctaccttcaatccatcctcggatgtcgctgccttgcataaggccataatggttaaaggtgtggatgaagcaaccatcattgacattctaactaagcgaaacaatgcacagcgtcaacagatcaaagcagcatatctccaggaaacaggaaagcccctggatgaaacactgaagaaagcccttacaggtcaccttgaggaggttgttttagctctgctaaaaactccagcgcaatttgatgctgatgaacttcgtgctgccatgaagggccttggaactgatgaagatactctaattgagattttggcatcaagaactaacaaagaaatcagagacattaacagggtctacagagaggaactgaagagagatctggccaaagacataacctcagacacatctggagattttcggaacgctttgctttctcttgctaagggtgaccgatctgaggactttggtg

SEQ ID NO: 310412 - DNA, 615 bp, Artificial Sequence
  derived and/or modified sequence
atgaacctgatactgcggtacacgttcagcaaaatggccatggtgagtgagttcctgaaacaggcttggttcatcgaaaatgaggaacaggaatacgtccagacagtaaaaagcagcaaaggcggtcccggatctgcagttagtccttaccccaccttcaaccctagctccgacgtcgcagctttgcacaaggcgataatggtaaagggggtcgatgaagctaccataattgatattctgacaaagagaaataatgctcagagacagcaaattaaggccgcttaccttcaagaaaccgggaagcccttagacgagaccctgaagaaggccctaacaggccacttagaggaggtcgtgctagctcttctcaaaacacccgctcaattcgacgcagatgaactgcgggctgcgatgaagggcttaggaactgacgaagatacactaattgagatcctggcaagtagaacaaacaaagagattcgagatattaacagagtctatcgtgaagagctgaaacgggatctcgcaaaggatattacttcagatacatctggcgactttcgaaatgccttactgtctttggctaaaggcgatagatctgaagattttggctag

SEQ ID NO: 310413 - DNA, 615 bp, Artificial Sequence
  derived and/or modified sequence
atgaacctgatcctgagatacaccttcagcaagatggccatggtgagcgagttcctgaagcaggcctggttcatcgagaacgaggagcaggagtacgtgcagaccgtgaagagcagcaagggcggccccggcagcgccgtgagcccctaccccaccttcaaccccagcagcgacgtggccgccctgcacaaggccatcatggtgaagggcgtggacgaggccaccatcatcgacatcctgaccaagagaaacaacgcccagagacagcagatcaaggccgcctacctgcaggagaccggcaagcccctggacgagaccctgaagaaggccctgaccggccacctggaggaggtggtgctggccctgctgaagacccccgcccagttcgacgccgacgagctgagagccgccatgaagggcctgggcaccgacgaggacaccctgatcgagatcctggccagcagaaccaacaaggagatcagagacatcaacagagtgtacagagaggagctgaagagagacctggccaaggacatcaccagcgacaccagcggcgacttcagaaacgccctgctgagcctggccaagggcgacagaagcgaggacttcggctag

SEQ ID NO: 310414 - protein, 346 aa, Artificial Sequence
  derived and/or modified sequence
MAMVSEFLKQAWFIENEEQEYVQTVKSSKGGPGSAVSPYPTFNPSSDVAALHKAIMVKGVDEATIIDILTKRNNAQRQQIKAAYLQETGKPLDETLKKALTGHLEEVVLALLKTPAQFDADELRAAMKGLGTDEDTLIEILASRTNKEIRDINRVYREELKRDLAKDITSDTSGDFRNALLSLAKGDRSEDFGVNEDLADSDARALYEAGERRKGTDVNVFNTILTTRSYPQLRRVFQKYTKYSKHDMNKVLDLELKGDIEKCLTAIVKCATSKPAFFAEKLHQAMKGVGTRHKALIRIMVSRSEIDMNDIKAFYQKMYGISLCQAILDETKGDYEKILVALCGGN

SEQ ID NO: 310415 - DNA, 1041 bp, Artificial Sequence
  derived and/or modified sequence
atggccatggtctcagagttcctcaaacaggcatggtttattgaaaacgaagagcaggaatatgtgcagacggtgaagtcatccaagggcgggcccggtagcgccgtgtccccttatccaaccttcaatcctagctctgacgtggcggctcttcacaaggctataatggtgaaaggggtggacgaggccactatcatcgatattctcaccaagcgcaacaatgcacaacggcaacagattaaagcagcctacctgcaggagactggcaagcctttagatgagacactcaagaaggcactcaccggccacctggaagaggtggtgttagccttactgaaaaccccagctcaattcgacgccgatgagctgagagctgcgatgaagggattaggcactgatgaggacactctgatcgaaattctggcaagcagaacgaacaaggagattcgggatattaatagagtgtacagagaggagctgaagagagacctggccaaggacattacatccgatactagcggagactttcgcaatgctctgctcagcctggctaagggggatcgatccgaggattttggcgtcaacgaggatctggcggattctgatgcaagggctctctatgaggccggagaaagacggaaagggacagacgtgaacgtttttaacaccatactgacaactagatcctacccacagcttcggagggtttttcagaagtatactaagtactccaagcatgacatgaacaaagtgctagacctagaactgaagggcgacattgaaaagtgcttgaccgcgattgtgaagtgcgcaacaagcaagccagccttcttcgcggagaagctgcatcaggcaatgaagggggtgggaactaggcacaaagctctaattcggataatggtctctcgtagcgagatcgatatgaatgatatcaaggccttctaccagaagatgtatggcatctccctctgccaggcgatcttggacgaaactaaaggcgactacgaaaaaattctcgtggcactatgcggcggaaattag

SEQ ID NO: 310416 - DNA, 1041 bp, Artificial Sequence
  derived and/or modified sequence
atggccatggtatcagaattcttaaagcaggcctggtttatcgaaaacgaggagcaggaatacgtgcagacagtcaagtcctcaaaaggggggccaggaagcgctgtgagtccctaccctaccttcaacccaagttccgatgttgccgccttgcataaggctattatggtcaaaggtgtcgatgaagctaccatcattgatatactcacaaagcgtaacaacgcgcagagacaacagataaaagccgcctacttacaagagacggggaagccattagatgagacactgaagaaggccctgaccgggcacctggaagaggtcgtactggctctcctcaaaacccctgcacagttcgatgcagatgaattaagagccgcgatgaaaggcctgggaactgatgaggatactttaatcgagattctcgcatcccgtacaaataaggagataagagacatcaatcgagtctatagagaggagctgaagcgtgatctcgccaaggatataacaagtgacaccagcggcgattttcgtaatgctcttctgtctctggcgaagggagatcgatccgaagattttggagtcaatgaggacctagcggattctgatgcaagggccctttatgaggcaggagaacggcggaagggcaccgatgtcaatgtcttcaataccatcctgacgacgcggagctatcctcaactccggcgggttttccagaaatatacaaaatactccaaacacgatatgaataaggtgctggatttggaactgaagggcgacatcgagaagtgtcttaccgctatcgtgaagtgcgctacaagcaaaccagcctttttcgctgaaaagcttcatcaggcgatgaagggagtgggcactaggcacaaagccctgattcgcatcatggtgtcacggtctgagattgatatgaatgacatcaaagctttctaccagaaaatgtacggtatatccctatgtcaagccatcctggatgagaccaaaggggactatgaaaaaatcttagttgccctgtgtggcgggaattag

SEQ ID NO: 310417 - DNA, 348 bp, Artificial Sequence
  derived and/or modified sequence
atggccatggtgtcggaattcctcaagcaggcctggtttattgagaacgaggagcaagaatacgtgcaaaccgtgaaaagctctaaaggcggaccaggatctgctgtctccccctaccccacctttaatccctcttcagacgtcgccgctctccacaaagcaatcatggtgaagggcgtggacgaggcaaccatcattgatatcttaaccaagcgcaacaacgcgcaaaggcagcagatcaaggctgcgtacctgcaggagacaggcaaaccgctagatgagactctgaagaaggccttgacaggccaccttgaggaagtagtgttagccctgctaaaaaccccgtag

SEQ ID NO: 310418 - DNA, 1041 bp, Artificial Sequence
  derived and/or modified sequence
atggccatggtgtctgagttcctgaagcaggcctggttcattgaaaatgaggagcaggagtatgtgcagacagtgaagagcagcaaaggaggccctggcagcgctgtgagcccctaccccaccttcaaccccagcagtgatgtggccgccctgcacaaggccatcatggtgaagggcgtggatgaggccaccatcatcgacatcctgaccaagaggaacaatgcccagaggcagcagatcaaggccgcctacctgcaggagaccgggaagcccctggatgagaccctgaagaaggccctgaccggccacctggaggaggtggtgctggccctgctgaagaccccagcccagtttgatgctgatgagctgcgggccgccatgaagggcctgggcacagatgaggacaccctcatcgagatcctggccagcaggaccaacaaggagatccgggacatcaacagagtgtaccgggaggagctgaagagggacctggccaaggacatcaccagtgacaccagcggggacttcagaaatgccctgctgagcctggccaagggggacagaagtgaggactttggagtgaatgaagacctggccgacagtgatgcccgggccctgtatgaagctggggagaggaggaagggcacagatgtgaatgtgttcaacaccatcctgaccaccaggagctacccccagctgcggcgggtcttccagaagtacaccaagtacagcaagcatgacatgaacaaggtgctggacctggagctgaagggggacatcgagaagtgcctgacagccatcgtgaagtgtgccaccagcaagccagccttctttgctgagaagctgcaccaggccatgaagggcgtgggcaccaggcacaaggccctgatccgcatcatggtgagccgctcagaaattgacatgaatgacatcaaggccttctaccagaagatgtatggcatcagcctgtgccaggccatcctggatgagaccaagggggactatgagaagatcctggtggccctgtgtggcggcaactag

SEQ ID NO: 310419 - DNA, 348 bp, Artificial Sequence
  derived and/or modified sequence
atggccatggtgtctgagttcctgaagcaggcctggttcattgaaaatgaggagcaggagtatgtgcagacagtgaagagcagcaaaggaggccctggcagcgctgtgagcccctaccccaccttcaaccccagcagtgatgtggccgccctgcacaaggccatcatggtgaagggcgtggatgaggccaccatcatcgacatcctgaccaagaggaacaatgcccagaggcagcagatcaaggccgcctacctgcaggagaccgggaagcccctggatgagaccctgaagaaggccctgaccggccacctggaggaggtggtgctggccctgctgaagaccccctag

SEQ ID NO: 310420 - DNA, 1041 bp, Artificial Sequence
  derived and/or modified sequence
atggccatggtgagcgagttcctgaagcaggcctggttcatcgagaacgaggagcaagaatacgtgcaaactgtgaaatccagtaaaggtggcccggggagcgccgttagcccttaccctaccttcaatccaagcagtgacgttgcagcgctgcataaagcaataatggtgaagggggtggatgaggcaacgataattgacattctgactaagcgcaacaacgcccaacgtcagcaaataaaagcagcctatctgcaggagaccggcaaacctctcgatgaaacattaaagaaagctttaaccgggcaccttgaggaggtagttctggctctgctgaaaaccccggcccagtttgacgccgatgagctacgggcagccatgaaaggcctaggaaccgacgaagacaccttaattgagattctggcgtctcggacaaacaaagagatcagggatataaacagagtataccgggaggaactcaagagagacttagcaaaagatatcaccagcgataccagcggggatttcaggaacgctctattgagccttgctaagggggatcggtctgaagacttcggcgtcaacgaagatctcgcagattcagacgctagagccctctatgaagctggggagagacggaaaggcacagacgtgaacgtttttaacacaatcctgacaactcgcagttatccacaactgcgcagagtgtttcaaaagtatactaaatactcgaaacatgatatgaacaaggtcttggacctagagctgaagggagacattgagaagtgcttgaccgcaattgttaaatgtgctacaagcaagccagctttcttcgcagagaaattgcatcaagcaatgaaaggggtggggaccagacacaaggcattaattcgcattatggtgagccgctctgagatcgacatgaacgacatcaaggctttttaccagaagatgtacggaattagtctgtgccaggccattcttgacgagaccaaaggagattacgagaagatccttgtggccctgtgcggaggaaattag

SEQ ID NO: 310421 - DNA, 1041 bp, Artificial Sequence
  derived and/or modified sequence
atggccatggtgagcgagttcctgaagcaggcctggttcatcgagaatgaggaacaagaatatgtgcaaactgtgaagtcttccaagggaggacctgggtccgccgtttccccatatcccaccttcaatccaagttccgatgtagctgctctccataaagctatcatggtgaaaggggtggatgaggccacaatcattgacattctgaccaaacgcaataatgcccagcgacagcaaattaaagcagcctacctgcaggaaactggtaaaccattggacgaaaccctgaagaaggccctgactggccacctggaagaggtggttctcgcactgctgaagaccccagcccagttcgatgctgacgaacttagggcagccatgaaaggactggggaccgatgaggataccctcattgagattctcgctagccgcactaacaaggagatccgcgacattaaccgcgtgtacagggaggagctgaaacgtgatctcgctaaagatatcacatccgatacctctggtgacttccggaacgccctgctctctctcgcaaaaggtgataggtccgaggatttcggggtgaatgaggacctcgccgatagtgacgccagggccctgtacgaagcgggagaaagaagaaagggtactgacgtcaatgtgttcaataccatactgaccaccaggtcatatccccaattgaggcgggttttccagaaatatactaagtattctaagcacgatatgaacaaagtgttggacctcgaactcaaaggagacattgagaaatgtctgacagccatcgtcaagtgcgctacttctaaaccagcattcttcgctgaaaagcttcaccaggcgatgaagggagttggaactcggcacaaagcccttattcgtattatggtgtctcgttctgaaattgacatgaatgacatcaaagctttctatcaaaaaatgtacggtatcagcctgtgccaggcaatcctcgacgagacaaaaggcgattatgagaagattctcgtggctttgtgcgggggaaattag

SEQ ID NO: 310422 - DNA, 348 bp, Artificial Sequence
  derived and/or modified sequence
atggccatggtgagcgagttcctgaagcaggcctggttcatcgagaatgaggagcaggagtacgtgcagaccgtcaaatcaagcaagggcggccctggctcagccgtgtctccataccccacctttaatccatctagcgacgtagccgctctgcataaagctatcatggttaagggagtggacgaggcaactatcatcgacatcttgacaaagcgcaataatgcccaacggcagcagatcaaggccgcatacctccaggaaacaggaaagccgctggacgaaactctgaaaaaagccctaaccgggcacttggaagaagttgtactggccctcctgaagactccttag

SEQ ID NO: 310423 - DNA, 1041 bp, Artificial Sequence
  derived and/or modified sequence
atggctatggttagcgaatttctgaagcaggcctggttcatagaaaacgaggaacaggaatacgtgcagaccgtaaaatcctctaaaggcggtccgggttctgcagtcagtccttatccaacatttaatccctcttccgatgtggccgcactgcataaggctattatggtaaagggtgtcgacgaggctactataatcgacatccttaccaaacgcaacaatgctcagcgtcagcagatcaaggccgcttaccttcaggagactggtaagcccctggacgagactttaaagaaagctctgactgggcacctggaagaggttgtgttggcactcctgaaaactcctgcccaattcgacgcagacgagctccgcgcagcaatgaagggactcggcactgacgaagacacactcattgaaatcctcgctagcagaaccaacaaagaaatccgtgacatcaatcgcgtatatcgggaggagctgaaacgagacctcgccaaagacattactagcgacactagcggcgattttaggaatgctctactgagtctggccaagggtgatagatccgaggattttggtgttaacgaggatctggcagacagcgacgcccgagccctctacgaagctggggagagaagaaagggcaccgacgtgaacgtgttcaatacgattctgactacccgtagctacccccagttacggagagtctttcagaagtacacaaaatactcaaaacacgacatgaataaggtgcttgacctggagctgaagggggatatcgagaagtgtctaactgccattgtgaagtgcgccacatcaaagccagcattctttgcagaaaaactgcatcaggcaatgaaaggagtaggtacgagacataaagctcttatccgcatcatggtgagcagaagcgaaattgatatgaacgatatcaaggccttctaccagaaaatgtacggtatttcactgtgtcaggctattctcgatgagacaaagggtgactatgagaagatcctggtcgctctgtgtggcggaaattag

SEQ ID NO: 310424 - DNA, 1041 bp, Artificial Sequence
  derived and/or modified sequence
atggccatggtgtctgagtttcttaagcaagcttggtttatagagaacgaagagcaggagtacgtccagacagtgaagagctctaagggcggacccggttctgcggttagcccgtacccaacctttaacccctcctccgatgtggccgctctccacaaagccataatggtcaagggggtggatgaagctacgatcattgacattctgaccaagcgaaacaacgcccaacgacagcagatcaaggcagcctatctgcaggagactgggaagccactggatgagaccctgaaaaaggcgctgacagggcatctggaggaggttgttcttgccctcctaaagacaccggcacaattcgacgcagatgagctcagggccgcaatgaaaggcctcggcaccgacgaggacacgctgatcgaaatcttagcaagccgtactaataaagagatcagagacatcaaccgcgtgtacagagaagagctcaagcgcgaccttgctaaagatatcacttcagacacatccggagacttccgcaatgccctgctatccctggcaaagggtgacagatccgaagactttggtgtgaatgaagacttggcagatagcgacgcccgtgcgctgtacgaggcaggcgagaggcgcaagggcacagacgtgaatgttttcaacactattctgacaacaagaagttacccccagctcagacgagtgtttcagaaatacaccaaatacagtaaacacgacatgaacaaagtgctcgacctagagcttaagggcgatattgagaagtgtctaacggcgattgttaaatgcgcgaccagcaaaccagcattctttgccgaaaaattacaccaggcaatgaaaggcgtcggaactagacacaaggcactcatcaggatcatggtttctaggtctgagatcgatatgaatgatatcaaggcgttctatcagaaaatgtacggcatttccctttgccaagctattctggatgaaactaagggggattacgagaagattctagtggcactctgcggtggtaactag

SEQ ID NO: 310425 - DNA, 348 bp, Artificial Sequence
  derived and/or modified sequence
atggccatggtgtcagagtttctcaagcaagcatggtttatagagaacgaggagcaagagtatgtacaaactgtcaaatccagcaagggaggacccggtagtgcggttagtccctatccgacattcaacccctcatctgatgtggccgcactccataaggcaattatggtaaagggggtagatgaagcgactataattgatattctcacaaagcgcaataacgcccagagacagcagattaaagcggcatatctgcaggagacaggaaagcccctggacgagacacttaaaaaggcacttaccggccacctcgaagaggttgttctggccctgttaaagacaccatag

SEQ ID NO: 310426 - DNA, 1041 bp, Artificial Sequence
  derived and/or modified sequence
atggccatggtgagcgagttcctgaagcaggcctggttcatcgagaacgaggagcaggagtacgtgcagaccgtgaagagcagcaagggcggccccggcagcgccgtgagcccctaccccaccttcaaccccagcagcgacgtggccgccctgcacaaggccatcatggtgaagggcgtggacgaggccaccatcatcgacatcctgaccaagagaaacaacgcccagagacagcagatcaaggccgcctacctgcaggagaccggcaagcccctggacgagaccctgaagaaggccctgaccggccacctggaggaggtggtgctggccctgctgaagacccccgcccagttcgacgccgacgagctgagagccgccatgaagggcctgggcaccgacgaggacaccctgatcgagatcctggccagcagaaccaacaaggagatcagagacatcaacagagtgtacagagaggagctgaagagagacctggccaaggacatcaccagcgacaccagcggcgacttcagaaacgccctgctgagcctggccaagggcgacagaagcgaggacttcggcgtgaacgaggacctggccgacagcgacgccagagccctgtacgaggccggcgagagaagaaagggcaccgacgtgaacgtgttcaacaccatcctgaccaccagaagctacccccagctgagaagagtgttccagaagtacaccaagtacagcaagcacgacatgaacaaggtgctggacctggagctgaagggcgacatcgagaagtgcctgaccgccatcgtgaagtgcgccaccagcaagcccgccttcttcgccgagaagctgcaccaggccatgaagggcgtgggcaccagacacaaggccctgatcagaatcatggtgagcagaagcgagatcgacatgaacgacatcaaggccttctaccagaagatgtacggcatcagcctgtgccaggccatcctggacgagaccaagggcgactacgagaagatcctggtggccctgtgcggcggcaactag

SEQ ID NO: 310427 - DNA, 348 bp, Artificial Sequence
  derived and/or modified sequence
atggccatggtgagcgagttcctgaagcaggcctggttcatcgagaacgaggagcaggagtacgtgcagaccgtgaagagcagcaagggcggccccggcagcgccgtgagcccctaccccaccttcaaccccagcagcgacgtggccgccctgcacaaggccatcatggtgaagggcgtggacgaggccaccatcatcgacatcctgaccaagagaaacaacgcccagagacagcagatcaaggccgcctacctgcaggagaccggcaagcccctggacgagaccctgaagaaggccctgaccggccacctggaggaggtggtgctggccctgctgaagaccccctag

SEQ ID NO: 310428 - DNA, 402 bp, Artificial Sequence
  derived and/or modified sequence
atgagaagcagcatcaccgccccctgcggcgccgtggccgccgacctgagcaccagcagaagcggcgccagcctgaccgccatgagccccttcagcgccaccagagagaagagccacagctggctgagcaccggctggttcaccatggtgatcgccgtggagctgtgcgaccacgtgcacgtgtacggcatggtgccccccaactactgcagccagagacccagactgcagagaatgccctaccactactacgagcccaagggccccgacgagtgcgtgacctacatccagaacgagcacagcagaaagggcaaccaccacagattcatcaccgagaagagagtgttcagcagctgggcccagctgtacggcatcaccttcagccaccccagctggacctag

SEQ ID NO: 310429 - DNA, 402 bp, Artificial Sequence
  derived and/or modified sequence
atgagaagttcaatcacagcaccatgcggagctgtcgccgcagatctgagcaccagccggagcggcgcgtcactgacagctatgtccccatttagtgctacacgggagaagtctcactcctggctgtctaccgggtggtttacaatggtgatcgcagtcgagctgtgtgaccacgtccacgtctatgggatggtgcccccaaactattgttcccaaagaccgaggttgcagcgaatgccatatcattactacgaacccaagggcccggacgagtgcgtgacttatatccagaacgagcattccagaaaaggtaaccatcaccgcttcattaccgagaagagggtgttcagcagctgggctcagctgtatggaataacatttagtcacccctcttggacgtag

SEQ ID NO: 310430 - DNA, 402 bp, Artificial Sequence
  derived and/or modified sequence
atgaggagcagcatcacagccccctgtggggctgtggccgctgacctgagcaccagccgcagcggggccagcctgacagccatgagccccttcagcgccacccgggagaagagccacagctggctgagcacaggctggttcaccatggtgattgctgtggagctgtgtgaccacgtgcacgtgtatggcatggtgccccccaactactgcagccagaggccccggctgcagaggatgccctaccactactatgagcccaagggcccagatgaatgtgtgacctacatccagaatgagcacagcaggaaaggaaaccaccaccgcttcatcacagagaagagggtcttcagctcctgggcccagctgtatggcatcaccttcagccaccccagctggacctag

SEQ ID NO: 310431 - DNA, 402 bp, Artificial Sequence
  derived and/or modified sequence
atgcggagcagcatcaccgccccctgcggcgccgtggccgccgacctatccactagtcgcagcggggcgtcattgacggccatgagcccgtttagtgcaaccagggagaagtcccactcctggcttagcactggctggttcaccatggtaatcgccgtcgagctgtgcgatcacgtacatgtgtacggaatggtcccacctaactactgttcgcagcggcctagacttcagcgaatgccatatcattactacgaacctaaaggcccagacgagtgcgtgacttatatacaaaacgagcacagtcggaagggcaaccaccaccgcttcataaccgagaagcgcgtgttcagctcctgggcccagctttatggcataacattttcgcaccctagttggacttag

SEQ ID NO: 310432 - DNA, 402 bp, Artificial Sequence
  derived and/or modified sequence
atgaggagctctataaccgctccatgcggagccgtggccgcagacctctccacctcccgctccggagcttcgctgactgctatgtcaccgttttccgctacacgcgagaaatctcatagctggctgtctacaggctggtttaccatggtaatcgccgtagaactgtgcgatcatgtgcacgtatatgggatggtgccgcctaactattgctcacagcgaccccgactgcagaggatgccgtaccattactatgagcctaagggacccgatgagtgcgtgacctacatccagaatgaacactctcgaaagggaaatcaccacaggtttataaccgaaaaacgggtatttagtagctgggcccagctctatggcattactttcagtcatccatcctggacctag

SEQ ID NO: 310433 - DNA, 1079 bp, Artificial Sequence
  derived and/or modified sequence
agtttcttccctctgcactcctgcccgccctgcccccggcctgtctgctggaggtgtgaacccacatccctgcccccagggccacctgcaggacgccgacacctacccctcagcagacgccggagagaaatgagtagcaacaaagagcagcggtcagcagtgttcgtgatcctctttgccctcatcaccatcctcatcctctacagctccaacagtgccaatgaggtcttccattacggctccctgcggggccgtagccgccgacctgtcaacctcaagaagtggagcatcactgacggctatgtccccattctcggcaacaagggagaagtctcattcgtggttgagcacaggctggtttaccatggtgatcgcggtggagttgtgtgaccacgtgcatgtctatggcatggtcccccccaactactgcagccagcggccccgcctccagcgcatgccctaccactactacgagcccaaggggccggacgaatgtgtcacctacatccagaatgagcacagtcgcaagggcaaccaccaccgcttcatcaccgagaaaagggtcttctcatcgtgggcccagctgtatggcatcaccttctcccacccctcctggacctaggccacccagcctgtgggacctcaggagggtcagaggagaagcagcctccgcccagccgctaggccagggaccatcttctggccaatcaaggcttgctggagtgtctcccagccaatcagggccttgaggaggatgtatcctccagccaatcagggcctggggaatctgttggcgaatcagggatttgggagtctatgcggttaatcaggggtgtctttcttgtgcagtcagggtctgcgcacagtcaatcagggtagagggggtatttctgagtcaatctgaggctaaggacatgtcctttcccatgaggccttggttcagagccccaggaatggaccccccaatcactccccactctcctgggataatggggtcctgtcccaaggagctgggaacttggtgttgccccctcaatttccagcaccagaaagagagattgtgtgggggtagaagctgt

SEQ ID NO: 310434 - protein, 837 aa, Artificial Sequence
  derived and/or modified sequence
MNHLEGSAEVEVTDEAAGGEVNESVEADLEHPEVEEEQQQPPQQQHYVGRHQRGRALEDLRAQLGQEEEERGECLARSASTESGFHNHTDTAEGDVIAAARDGYDAERAQDPEDESAYAVQYRPEAEEYTEQAEAEHAEATHRRALPNHLHFHSLEHEEAMNAAYSGYVYTHRLFHRGEDEPYSEPYADYGGLQEHVYEEIGDAPELDARDGLRLYEQERDEAAAYRQEALGARLHHYDERSDGESDSPEKEAEFAPYPRMDSYEQEEDIDQIVAEVKQSMSSQSLDKAAEDMPEAEQDLERPPTPAGGRPDSPGLQAPAGQQRAVGPAGGGEAGQRYSKEKRDAISLAIKDIKEAIEEVKTRTIRSPYTPDEPKEPIWVMRQDISPTRDCDDQRPMDGDSPSPGSSSPLGAESSSTSLHPSDPVEASTNKESRKSLASFPTYVEVPGPCDPEDLIDGIIFAANYLGSTQLLSDKTPSKNVRMMQAQEAVSRIKMAQKLAKSRKKAPEGESQPMTEVDLFISTQRIKVLNADTQETMMDHPLRTISYIADIGNIVVLMARRRMPRSNSQENVEASHPSQDGKRQYKMICHVFESEDAQLIAQSIGQAFSVAYQEFLRANGINPEDLSQKEYSDLLNTQDMYNDDLIHFSKSENCKDVFIEKQKGEILGVVIVESGWGSILPTVIIANMMHGGPAEKSGKLNIGDQIMSINGTSLVGLPLSTCQSIIKGLKNQSRVKLNIVRCPPVTTVLIRRPDLRYQLGFSVQNGIICSLMRGGIAERGGVRVGHRIIEINGQSVVATPHEKIVHILSNAVGEIHMKTMPAAMYRLLTAQEQPVYI

SEQ ID NO: 310435 - DNA, 2514 bp, Artificial Sequence
  derived and/or modified sequence
atgaatcatttggagggctctgcggaggtggaggtgaccgatgaggctgctggcggggaggttaatgagtcagtggaggccgatctggaacaccccgaagtggaagaagaacaacaacagccgcctcaacaacagcactatgtggggcggcaccagcgcggccgagccttggaggacctgcgcgcacagctcgggcaagaggaagaagagcggggagaatgcttagccaggtctgccagcacagaatcaggcttccacaaccatactgacactgcagagggagatgtgatcgctgctgccagagacggttacgatgccgagcgggcccaggatcccgaagacgagagcgcttatgcagttcagtacagacctgaggcagaagagtacaccgaacaggccgaagctgagcatgccgaggcgacacaccggcgcgctctgcccaaccacctgcatttccacagcctggaacatgaggaggctatgaacgcggcttacagcggttatgtgtatactcacagattgtttcaccggggtgaggatgagccctactccgagccatatgcagattatgggggactgcaggagcacgtgtatgaggaaatcggcgacgcgcccgagctcgatgctcgggatggcctgcggctctatgagcaagaacgcgatgaggccgccgcctatagacaggaggccttgggtgcgaggctccatcattatgacgaaaggtcagacggagagtctgatagccccgagaaggaggcagaatttgcaccttacccgcgcatggattcctacgagcaggaggaggacattgaccaaatcgtggcagaagtgaagcagtcgatgtctagccaaagccttgataaggccgccgaggacatgccggaggctgaacaggatctcgaacgaccgcccacccctgccgggggtagacctgacagtcccgggctgcaagctcctgctgggcagcagagggccgtcgggcccgccggaggtggcgaggcaggacagcgatacagcaaggagaagagggatgctatctctctggccattaaagatattaaggaggcaatcgaggaagtgaaaactcgaaccattcggtctccctacaccccagatgagcccaaagaacccatctgggtaatgagacaagacatatccccgacccgggattgtgatgaccaacggccaatggacggggatagcccttcacccgggagcagtagccctctgggcgccgaatccagctccacaagtctgcacccgtcagaccctgttgaagcatccaccaataaagaaagccgcaaaagcctggcaagttttcctacctacgtggaggtccccggtccgtgtgaccctgaagatctgattgacggcattattttcgccgctaactatctcggctcaacgcagctgctgtccgataagacaccaagtaagaacgttcgcatgatgcaagcacaggaggcagtttctcggattaaaatggctcagaagctcgctaagtcccgaaaaaaggcccccgagggtgagtcccagcccatgactgaggtagacttattcatttcaacacagaggatcaaagttctgaatgccgacactcaggagacaatgatggaccatcccctcaggacgatctcctacatagccgatatcgggaacattgttgtactcatggcccggcgtagaatgccacggtcaaattcgcaagagaacgtggaggccagtcatccttctcaggacggaaaacgccagtacaaaatgatatgccacgtgttcgaatcagaagatgcccaactcattgcccagtctattggtcaggctttctcagtagcataccaagagtttctgcgtgccaatggcattaatcccgaggatctgagtcagaaggaatattccgatctccttaacacgcaggacatgtacaacgacgacctgattcatttctctaaaagtgaaaattgcaaagatgtgttcattgagaagcaaaagggtgaaattttaggtgtcgtcatcgttgagtctggctgggggtctatcctgcctaccgtcatcattgccaatatgatgcatggcgggcctgccgaaaaatccggcaaactgaatatcggcgatcagatcatgtcaatcaacggaacctcgttggttgggctcccattatccacatgtcaatcgattatcaaaggcctaaagaaccagagcagggtcaagctgaatattgtgcggtgtccgccagtaaccaccgtgctgatacggcggccagacctgcggtatcagcttggcttctcggtgcaaaacggaatcatctgtagtttaatgcgcggaggcatcgcagaacgaggaggagtccgggtcggccacagaataattgaaatcaatggccagagtgtcgtggctaccccccatgagaaaattgtgcatatcctctcaaatgcagttggcgagattcatatgaaaacaatgcccgccgccatgtatcgactgctgaccgcccaggaacaaccggtttacatctag

SEQ ID NO: 310436 - DNA, 2514 bp, Artificial Sequence
  derived and/or modified sequence
atgaaccacctggagggcagcgctgaggtggaggtgacagatgaggccgccggcggggaggtgaatgaatctgtggaggccgacctggagcaccctgaggtggaggaggagcagcagcagcccccccagcagcagcactacgtgggccgccaccagaggggccgggccctggaggacctgcgggcccagctgggccaggaggaggaggagagaggagaatgtctggcccggagcgccagcacagaaagtggcttccacaaccacacagacacagcagaaggagatgtgattgctgctgccagagatggctatgatgctgagcgggcccaggaccctgaagatgagagcgcctatgctgtgcagtacagacctgaggccgaggagtacacagagcaggccgaggccgagcacgccgaggccacccacagaagagccctgcccaaccacctgcacttccacagcctggagcacgaggaggccatgaatgctgcctacagcggctacgtgtacacccacaggctcttccacagaggagaagatgagccctacagcgagccctatgctgactatggaggcctgcaggagcacgtgtatgaggagattggagatgcccctgagctggatgccagagatggcctgcggctgtatgagcaggagagagatgaagctgctgcctaccggcaggaggccctgggcgcccggctgcaccactatgatgagaggagtgatggagagagtgacagccctgagaaggaggccgagtttgccccctaccccaggatggacagctatgagcaggaggaggacatcgaccagatcgtggccgaggtgaagcagagcatgagcagccagagcctggacaaggctgctgaggacatgcctgaggccgagcaggacctggagaggcctcccaccccagctgggggccgcccagacagccctggcctgcaggccccagctggccagcagagagctgtgggccctgctgggggcggggaggccggccagcgctacagcaaggagaagagagatgccatcagcctggccatcaaggacatcaaggaggccatcgaggaggtgaagaccaggaccatccgcagcccctacaccccagatgagcccaaggagcccatctgggtgatgaggcaggacatcagccccacccgggactgtgatgaccagaggcccatggatggagacagccccagccctggcagcagcagccccctgggcgctgagagcagcagcaccagcctgcaccccagcgaccctgtggaggccagcaccaacaaggagagcaggaagagcctggccagcttccccacctacgtggaggtgcccggcccctgtgaccctgaggacctgattgatggcatcatctttgctgccaactacctgggcagcacccagctgctgagtgacaagacccccagcaagaatgtgaggatgatgcaggcccaggaggccgtgagccgcatcaagatggcccagaagctggccaagagcaggaagaaggcccctgagggggagagccagcccatgacagaggtggacctcttcatcagcacccagaggatcaaggtgctgaatgctgacacccaggagaccatgatggaccaccccctgcggaccatctcctacatcgctgacatcggcaacatcgtggtgctgatggcccggcggaggatgcccaggagcaacagccaggagaatgtggaggccagccaccccagccaggacggcaagaggcagtacaagatgatctgccacgtgtttgaaagtgaagatgcccagctgattgcccagagcatcggccaggccttctctgtggcctaccaggagttcctgcgggccaacggcatcaaccctgaggacctgagccagaaggagtacagcgacctgctgaacacccaggacatgtacaatgatgacctgatccacttcagcaagtctgagaactgcaaggatgtgttcatcgagaagcagaagggggagatcctgggcgtggtgattgtggagagcggctggggcagcatcctgcccaccgtcatcatcgccaacatgatgcacggcggccctgctgagaagagcggcaagctgaacatcggggaccagatcatgagcatcaatggcaccagcctggtgggcctgcccctgagcacctgccagagcatcatcaagggcctgaagaaccagagccgggtgaagctgaacatcgtgcgctgcccccctgtgaccaccgtgctgatcagaagaccagacctgcgctaccagctgggcttctctgtgcagaatggcatcatctgcagcctgatgaggggcggcattgctgagcggggcggcgtgcgggtgggccaccgcatcatcgagatcaatggccagagcgtggtggccacccctcatgagaagatcgtgcacatcctgagcaatgctgtgggggagatccacatgaagaccatgcctgctgccatgtaccgcctgctgacagcccaggagcagcctgtgtacatctag

SEQ ID NO: 310437 - DNA, 2514 bp, Artificial Sequence
  derived and/or modified sequence
atgaaccacctggagggcagcgccgaggtggaggtgaccgacgaggcggccggaggggaagttaacgagtcagtagaggccgacctggagcatccagaggtcgaagaagagcagcagcagccaccacaacaacaacattacgtgggtaggcatcagcgaggcagagcactggaggatctgagagcccagttagggcaggaagaggaggagaggggtgagtgcctcgctcggagcgcaagtacagaatctggcttccacaatcatacagacacagccgagggagatgtgattgctgccgcccgggatgggtacgatgccgaacgcgctcaagacccagaagacgaatccgcctacgcagtgcaatatcgccctgaagctgaggaatataccgagcaggcagaagcggaacacgctgaagcaactcataggcgggccctgccaaaccacctgcatttccactctcttgaacacgaggaggccatgaatgccgcgtattctggatatgtctacacccaccgattgttccatcggggcgaggatgagccgtactcggagccctatgctgactatgggggattacaagagcacgtgtacgaggagataggagatgctccagaactggatgcaagggacggtttgcgtctctacgagcaggaaagggacgaggccgcagcatatagacaggaagcacttggcgcacgactgcaccactacgatgaaagatctgatggagaatcagactctcccgaaaaggaagctgaatttgcgccctaccctaggatggactcctacgaacaagaggaggacattgaccagatcgtggcagaggtgaagcagtcaatgagcagtcagagtctagataaggctgctgaagacatgcctgaagccgagcaggatctggaaaggccccctacccctgcaggagggagaccagatagccccggcctgcaggcgccggccgggcagcagagagccgttggtcctgccgggggaggtgaagctggccagaggtatagtaaagagaagcgagatgccatcagcctggccataaaggatatcaaagaggccattgaggaggtcaaaacaaggacaatacggagcccttacacccccgatgaacccaaggagcccatctgggtaatgcgacaggatatctcccctactagagactgtgatgatcagcggccaatggatggggactccccctcccccggcagtagttccccactgggagctgagagttcatcaacaagcctgcatcccagcgaccctgtcgaggcttcaacaaataaagagtctcgtaaaagccttgcctcctttcctacctatgtagaggtgcccggtccttgcgaccccgaggatctgatcgacggtatcattttcgccgccaactacttgggtagtactcagcttctaagcgataagactccttctaaaaacgtcaggatgatgcaggcacaggaggcagtgagcaggattaagatggcacagaaactggcgaaaagtcgtaaaaaagcccccgagggggaatcgcaacccatgaccgaagtagatctcttcattagcactcagaggatcaaggttcttaatgcggacacccaagaaactatgatggatcatcccctcagaacaattagctacatcgctgacatcgggaacatcgtcgtgctgatggcacgacgacgcatgcctagatctaattcgcaagagaacgtagaggctagccaccccagccaggacggcaagaggcaatataaaatgatttgtcatgtgtttgagtctgaagacgctcaactgatcgcccaaagtatcgggcaggcgttttcggtcgcctaccaggaattcttgagagctaatggcatcaatcccgaggacctgagtcaaaaagagtactctgacctgcttaatactcaggacatgtataacgatgatctcattcatttctccaaatccgaaaattgtaaagacgtgttcatcgaaaagcaaaaaggcgaaatactgggggttgtgatagtggagtccggttggggctctatccttcctactgttatcattgcaaatatgatgcacggaggacccgcagagaaatcagggaagctaaatatcggcgatcaaatcatgtccatcaacggcacctctttggtaggactccctctttctacctgccagagtattataaagggtctcaaaaatcaatctcgggttaagctcaacattgtgaggtgcccacctgtgaccaccgttttgatcaggcggcctgaccttaggtaccagcttggctttagtgtccaaaacggcataatttgcagcctcatgagaggaggaatcgccgaacgaggaggtgtccgggtgggccatcgaatcatcgagatcaacggccagtccgtggtagcaactccacacgagaaaatcgtgcatattctgagcaatgctgtgggggagattcacatgaaaactatgcccgcggccatgtaccgcctgctcacggcccaagagcagccggtctacatttag

SEQ ID NO: 310438 - DNA, 2514 bp, Artificial Sequence
  derived and/or modified sequence
atgaatcacttggagggctccgcagaggtggaagtgacagacgaggcagcaggcggtgaggtgaacgaatccgttgaggccgatctggagcaccctgaagtcgaagaggaacagcagcagcctcctcagcagcagcattatgtgggacgtcaccaacgagggcgtgctctcgaggacctcagagcgcagcttgggcaggaagaggaagaaagaggagaatgtctggctcgttcggctagcactgaaagtggctttcacaatcacaccgacaccgccgagggggacgtgattgccgctgccagagatggttacgacgctgagcgggcacaggaccctgaggacgagagcgcttatgcggtgcagtataggccagaagccgaggaatatactgagcaggccgaggccgagcacgccgaggccactcacagaagggcgctaccaaaccacctgcacttccacagtctggagcacgaagaggcaatgaatgccgcttattctggttacgtgtacactcaccggttgtttcatcggggagaggacgagccctactctgaaccttatgctgactatggaggcctccaggagcacgtctacgaggaaatcggcgacgcccctgagctggacgcacgggacggactgagactgtacgaacaggaacgggacgaagccgctgcctatcgccaggaggctctgggcgctcgcctccatcattacgatgaaagatctgacggagaatctgactcacccgagaaggaagctgagtttgccccataccctaggatggactcttacgagcaggaggaagacatagaccagattgttgccgaagtcaagcagagtatgagttcccagagcctcgacaaggcagcggaggacatgccagaagctgaacaagatttggagcggcctccaacccccgcagggggacggccagacagtcccggactgcaggccccagccggacagcaacgcgctgtgggtccagcgggtggcggtgaggccggtcagagatacagtaaagagaagagagatgctatcagtcttgccataaaagatatcaaggaagcaatcgaggaggttaagactagaacaattaggtctccatatacccccgacgagccaaaggagcccatttgggttatgaggcaagacatttcgcctacacgtgactgcgacgaccagcggccaatggatggcgacagcccttcgccaggaagttcttcaccgctgggagctgaaagctcctccacttccctacatccaagtgaccccgtggaagcttccacgaataaagagtctcgcaaaagccttgcctctttccccacctatgtggaggtgcccggtccatgtgatccagaggatctgatcgacgggattatctttgcagccaactatctgggcagcacccaacttttatccgataagacaccttccaaaaacgttaggatgatgcaggctcaagaagctgtcagtcggataaagatggcacaaaaactggccaagtcccggaaaaaggcacctgagggcgagagccaaccaatgaccgaagtggatctgttcatctccacccagagaatcaaggtgctgaatgcagacactcaggagacgatgatggaccatcccctgaggactatctcctacattgccgatatcggcaatattgtggtgttgatggcacgaagacgaatgccgagatccaattcccaggaaaatgtggaggccagtcacccaagccaggatggcaagcgccagtataaaatgatctgtcacgtgttcgagtcagaggatgctcagcttattgctcagagtataggccaggccttttctgttgcctaccaggagtttttgagggcaaatggcataaacccggaagacctttcccagaaggaatattcagatctcctgaatactcaagacatgtacaacgatgacttgattcacttctctaagtccgagaattgcaaagacgtgttcatcgaaaaacagaaaggagagattcttggggtggtcatcgtggaaagtgggtggggcagtattctgcctaccgtgattatcgctaacatgatgcacggaggacctgcagagaagtctggaaagctgaatatcggtgatcaaatcatgtccatcaatggtacttccctcgtcggccttcccctttctacctgccaaagcatcatcaaagggctgaaaaatcagtcccgggtcaaactgaatattgtgaggtgtccccctgtcactactgtgttgatcagaaggccagatctcaggtatcagctgggattctctgtgcagaacggtattatctgctccttgatgcggggaggcatcgctgagcgcggtggcgtccgagtgggccatagaatcatcgaaattaatggtcagtccgtagtcgctactcctcatgaaaaaatcgttcatatcctgagcaacgccgtgggagagattcacatgaaaaccatgccggctgccatgtacaggctccttaccgctcaagaacagcctgtgtacatctag

SEQ ID NO: 310439 - DNA, 3776 bp, Artificial Sequence
  derived and/or modified sequence
ggcggcggcggcggcggcggcagctgcggcgggagaagatggtggcgctggaggcagcagcggctggagcggagctttattcccaggcttggcaccagcgctgtcactagcgccgcctgctcccgcgggcccgcggacccagctgtcaggcaagcccagtggagcaaaatgagagcgcagtgagccgggcccagcttctctcctagccgttccgactcccaccatgaaccacttggaggggtctgcggaggtggaggtgaccgacgaggcggcaggtggggaggtgaacgagtcggtggaggccgacctggagcaccccgaggtggaagaggaacagcagcagccgccgcagcagcagcactatgtgggccgccaccagcgcgggcgagccctcgaggacctccgcgcccagctcggccaggaggaagaggagcgcggggaatgcctggcgcgctcagccagcacggagagcggcttccacaaccacacggacaccgccgagggcgacgtgatcgccgcggcccgcgacggctacgatgcggagcgcgcgcaggaccccgaggacgagagcgcctatgctgtgcagtaccggcccgaggccgaggagtacacggagcaggcagaggccgagcacgccgaggccacgcaccgccgcgcgctgcccaaccacctgcacttccactcgctggagcacgaggaagccatgaatgcggcctactcaggctacgtctacacgcaccggctcttccaccgcggtgaggacgagccctactccgagccctatgccgactacggcggcctccaggagcacgtgtacgaggagataggggacgcgcccgagctggacgcacgcgacggcctgcggctctacgagcaggagcgcgacgaggcggccgcgtaccgccaggaggccctgggcgcgcggctgcaccattacgacgagcgctccgacggcgagtccgacagccccgagaaggaggccgagttcgcgccctacccgcgcatggacagctacgagcaggaggaggacatcgaccagatagtggccgaggtgaagcagagcatgagctcgcagagcctcgacaaggcagccgaggacatgcctgaggccgagcaggacctggagcgtccccctaccccggccgggggtcgccccgacagccccgggctgcaggcgccggcggggcagcagcgggcggtgggccccgcgggcggcggcgaggcggggcagcggtacagcaaggagaagcgcgatgccatctcgctggccatcaaggacatcaaggaggccatcgaggaggtgaaaaccaggaccatccgttcgccttacacccccgacgagcccaaagagcccatctgggtcatgcgccaggacattagccccaccagggactgtgacgaccagaggccgatggacggagattctccgtctcctggcagctcctcccccttgggtgcagagtcatcaagcacatctcttcaccccagtgaccctgtggaagcgtccactaataaagagtcaagaaaaagcttggcttcattcccaacctacgttgaagttccgggaccctgcgaccccgaagacttgatcgatggaatcatttttgccgccaattaccttggctccactcagctgctctcagacaaaactccttccaaaaacgtgcgcatgatgcaggcccaggaagccgtaagcaggatcaagatggcccagaaattagccaaaagcaggaagaaggctcctgaaggcgaatctcagccaatgactgaagtggatctcttcatttctacccagagaatcaaagtgctgaacgccgacacacaggagacaatgatggaccaccctctgaggaccatttcctacattgcggacattgggaacatcgttgtgctgatggcccgccggcggatgcctcgctccaactcccaggagaacgtggaagcgtcccacccatcccaggatgggaaaaggcagtacaagatgatctgccacgtcttcgagtctgaggatgctcagctgattgcacagtccatcggacaggcatttagcgtggcataccaggaattcctcagggccaatgggattaaccccgaagatctcagccagaaggagtatagtgacctgctcaatacccaggacatgtacaacgatgacctgatccacttctccaagtcggaaaactgtaaagatgttttcatagagaagcagaaaggagaaatcctaggtgtggtgattgtggagtctggctggggatccatcctccccaccgtgatcattgccaacatgatgcatggtggccctgcggagaaatctgggaagctgaatatcggtgaccagatcatgtccattaatggcaccagcctggtgggcctgcctctgtccacctgccagagcattattaagggcttaaagaatcagtcccgagtcaagctgaatatcgtgagatgtcctccggtgaccaccgtgttaatcagaagaccagaccttcgctaccagctcggtttcagcgtccagaatggaattatctgcagcctcatgcgagggggaatagctgagagaggaggcgtccgtgtggggcaccggatcattgaaatcaatggacagagcgtcgtggccaccccccacgagaagatcgtccacattctctccaatgctgttggggagattcatatgaagacaatgccagccgcgatgtacaggctgctgacggcccaggagcagcctgtttacatctgaccgcggccacacgcggtggcatgcatggaggactctcctcttcgtggttgtgtttctcgtgctgcatccctgtgtccactgagactttcccctctcgcgcccagcatttggttttacacaggaagagaagaatccacaaggacctctttactctctccgatttgcttttttttttttttttttttcaataccagggaagtttcgtatgcactcccttgaggatggagagcagccagcacccacctggtactgacccaggaccatcctggagggctttctgggtgtgtccagggggtgggctgtcactgcttgagggagaatcctcccttcccaggaggtgcagacttcttaaaaggagctcgcggggcagcaaagcagctgattcagcagtgcctaaaacccagttgctgatccctgctctctgagtttatctgtgggaatgtggtagtacccagggccagcccacgtcattaaggttatgcactgcctgccatgtagttggggcaccatacattatttcttcccagaatctctgagccaaccttaaacctcttctattgctagttctaatttcaacgtatgtgtgttttctaatacgagccttctcaccccaggataaaaggggaaataactgccttgggcaaggacaccatagtgtcacagagagcttggcaattcatggggcatctgaagctttaccaggttgtcctcaagttatcaaccattagataaacacaggcaggtactgtctgcttctctctctctcacacacacacacacacacacagtcccatttgcatatcacccttccctgctcccaccaccagtgagacaagctgaagattaggcacacagatcccctggaaacccacctctctggaaggccccttccctggcaggtggccaggcaggcgggggctgctcagcctcatcctgagagacctgccctctctgcgctgaggcccagcccctccagcaccactttggcttaaagcatcctcctcctggactcccctccctgccgaacacacatcccagg

SEQ ID NO: 310440 - DNA, 2514 bp, Artificial Sequence
  derived and/or modified sequence
atgaaccacctggagggcagcgccgaggtggaggtgaccgacgaggccgccggcggcgaggtgaacgagagcgtggaggccgacctggagcaccccgaggtggaggaggagcagcagcagcccccccagcagcagcactacgtgggcagacaccagagaggcagagccctggaggacctgagagcccagctgggccaggaggaggaggagagaggcgagtgcctggccagaagcgccagcaccgagagcggcttccacaaccacaccgacaccgccgagggcgacgtgatcgccgccgccagagacggctacgacgccgagagagcccaggaccccgaggacgagagcgcctacgccgtgcagtacagacccgaggccgaggagtacaccgagcaggccgaggccgagcacgccgaggccacccacagaagagccctgcccaaccacctgcacttccacagcctggagcacgaggaggccatgaacgccgcctacagcggctacgtgtacacccacagactgttccacagaggcgaggacgagccctacagcgagccctacgccgactacggcggcctgcaggagcacgtgtacgaggagatcggcgacgcccccgagctggacgccagagacggcctgagactgtacgagcaggagagagacgaggccgccgcctacagacaggaggccctgggcgccagactgcaccactacgacgagagaagcgacggcgagagcgacagccccgagaaggaggccgagttcgccccctaccccagaatggacagctacgagcaggaggaggacatcgaccagatcgtggccgaggtgaagcagagcatgagcagccagagcctggacaaggccgccgaggacatgcccgaggccgagcaggacctggagagaccccccacccccgccggcggcagacccgacagccccggcctgcaggcccccgccggccagcagagagccgtgggccccgccggcggcggcgaggccggccagagatacagcaaggagaagagagacgccatcagcctggccatcaaggacatcaaggaggccatcgaggaggtgaagaccagaaccatcagaagcccctacacccccgacgagcccaaggagcccatctgggtgatgagacaggacatcagccccaccagagactgcgacgaccagagacccatggacggcgacagccccagccccggcagcagcagccccctgggcgccgagagcagcagcaccagcctgcaccccagcgaccccgtggaggccagcaccaacaaggagagcagaaagagcctggccagcttccccacctacgtggaggtgcccggcccctgcgaccccgaggacctgatcgacggcatcatcttcgccgccaactacctgggcagcacccagctgctgagcgacaagacccccagcaagaacgtgagaatgatgcaggcccaggaggccgtgagcagaatcaagatggcccagaagctggccaagagcagaaagaaggcccccgagggcgagagccagcccatgaccgaggtggacctgttcatcagcacccagagaatcaaggtgctgaacgccgacacccaggagaccatgatggaccaccccctgagaaccatcagctacatcgccgacatcggcaacatcgtggtgctgatggccagaagaagaatgcccagaagcaacagccaggagaacgtggaggccagccaccccagccaggacggcaagagacagtacaagatgatctgccacgtgttcgagagcgaggacgcccagctgatcgcccagagcatcggccaggccttcagcgtggcctaccaggagttcctgagagccaacggcatcaaccccgaggacctgagccagaaggagtacagcgacctgctgaacacccaggacatgtacaacgacgacctgatccacttcagcaagagcgagaactgcaaggacgtgttcatcgagaagcagaagggcgagatcctgggcgtggtgatcgtggagagcggctggggcagcatcctgcccaccgtgatcatcgccaacatgatgcacggcggccccgccgagaagagcggcaagctgaacatcggcgaccagatcatgagcatcaacggcaccagcctggtgggcctgcccctgagcacctgccagagcatcatcaagggcctgaagaaccagagcagagtgaagctgaacatcgtgagatgcccccccgtgaccaccgtgctgatcagaagacccgacctgagataccagctgggcttcagcgtgcagaacggcatcatctgcagcctgatgagaggcggcatcgccgagagaggcggcgtgagagtgggccacagaatcatcgagatcaacggccagagcgtggtggccaccccccacgagaagatcgtgcacatcctgagcaacgccgtgggcgagatccacatgaagaccatgcccgccgccatgtacagactgctgaccgcccaggagcagcccgtgtacatctag

SEQ ID NO: 310441 - protein, 1837 aa, Artificial Sequence
  derived and/or modified sequence
MGAMTQLLAGVFLAFLALATEGGVLKKVIRHKRQSGVNATLPEENQPVVFNHVYNIKLPVGSQCSVDLESASGEKDLAPPSEPSESFQEHTVDGENQIVFTHRINIPRRACGCAAAPDVKELLSRLEELENLVSSLREQCTAGAGCCLQPATGRLDTRPFCSGRGNFSTEGCGCVCEPGWKGPNCSEPECPGNCHLRGRCIDGQCICDDGFTGEDCSQLACPSDCNDQGKCVNGVCICFEGYAGADCSREICPVPCSEEHGTCVDGLCVCHDGFAGDDCNKPLCLNNCYNRGRCVENECVCDEGFTGEDCSELICPNDCFDRGRCINGTCYCEEGFTGEDCGKPTCPHACHTQGRCEEGQCVCDEGFAGVDCSEKRCPADCHNRGRCVDGRCECDDGFTGADCGELKCPNGCSGHGRCVNGQCVCDEGYTGEDCSQLRCPNDCHSRGRCVEGKCVCEQGFKGYDCSDMSCPNDCHQHGRCVNGMCVCDDGYTGEDCRDRQCPRDCSNRGLCVDGQCVCEDGFTGPDCAELSCPNDCHGQGRCVNGQCVCHEGFMGKDCKEQRCPSDCHGQGRCVDGQCICHEGFTGLDCGQHSCPSDCNNLGQCVSGRCICNEGYSGEDCSEVSPPKDLVVTEVTEETVNLAWDNEMRVTEYLVVYTPTHEGGLEMQFRVPGDQTSTIIQELEPGVEYFIRVFAILENKKSIPVSARVATYLPAPEGLKFKSIKETSVEVEWDPLDIAFETWEIIFRNMNKEDEGEITKSLRRPETSYRQTGLAPGQEYEISLHIVKNNTRGPGLKRVTTTRLDAPSQIEVKDVTDTTALITWFKPLAEIDGIELTYGIKDVPGDRTTIDLTEDENQYSIGNLKPDTEYEVSLISRRGDMSSNPAKETFTTGLDAPRNLRRVSQTDNSITLEWRNGKAAIDSYRIKYAPISGGDHAEVDVPKSQQATTKTTLTGLRPGTEYGIGVSAVKEDKESNPATINAATELDTPKDLQVSETAETSLTLLWKTPLAKFDRYRLNYSLPTGQWVGVQLPRNTTSYVLRGLEPGQEYNVLLTAEKGRHKSKPARVKASTAKEPEIGNLNVSDITPESFNLSWMATDGIFETFTIEIIDSNRLLETVEYNISGAERTAHISGLPPSTDFIVYLSGLAPSIRTKTISATATTEALPLLENLTISDINPYGFTVSWMASENAFDSFLVTVVDSGKLLDPQEFTLSGTQRKLELRGLITGIGYEVMVSGFTQGHQTKPLRAEIVTEAEPEVDNLLVSDATPDGFRLSWTADEGVFDNFVLKIRDTKKQSEPLEITLLAPERTRDITGLREATEYEIELYGISKGRRSQTVSAIATTAMGSPKEVIFSDITENSATVSWRAPTAQVESFRITYVPITGGTPSMVTVDGTKTQTRLVKLIPGVEYLVSIIAMKGFEESEPVSGSFTTALDGPSGLVTANITDSEALARWQPAIATVDSYVISYTGEKVPEITRTVSGNTVEYALTDLEPATEYTLRIFAEKGPQKSSTITAKFTTDLDSPRDLTATEVQSETALLTWRPPRASVTGYLLVYESVDGTVKEVIVGPDTTSYSLADLSPSTHYTAKIQALNGPLRSNMIQTIFTTIGLLYPFPKDCSQAMLNGDTTSGLYTIYLNGDKAEALEVFCDMTSDGGGWIVFLRRKNGRENFYQNWKAYAAGFGDRREEFWLGLDNLNKITAQGQYELRVDLRDHGETAFAVYDKFSVGDAKTRYKLKVEGYSGTAGDSMAYHNGRSFSTFDKDTDSAITNCALSYKGAFWYRNCHRVNLMGRYGDNNHSQGVNWFHWKGHEHSIQFAEMKLRPSNFRNLEGRRKRA

SEQ ID NO: 310442 - protein, 1838 aa, Artificial Sequence
  derived and/or modified sequence
MGAMTQLLAGVFLAFLALATEGGVLKKVIRHKRQSGVNATLPEENQPVVFNHVYNIKLPVGSQCSVDLESASGEKDLAPPSEPSESFQEHTVDGENQIVFTHRINIPRRACGCAAAPDVKELLSRLEELENLVSSLREQCTAGAGCCLQPATGRLDTRPFCSGRGNFSTEGCGCVCEPGWKGPNCSEPECPGNCHLRGRCIDGQCICDDGFTGEDCSQLACPSDCNDQGKCVNGVCICFEGYAGADCSREICPVPCSEEHGTCVDGLCVCHDGFAGDDCNKPLCLNNCYNRGRCVENECVCDEGFTGEDCSELICPNDCFDRGRCINGTCYCEEGFTGEDCGKPTCPHACHTQGRCEEGQCVCDEGFAGVDCSEKRCPADCHNRGRCVDGRCECDDGFTGADCGELKCPNGCSGHGRCVNGQCVCDEGYTGEDCSQLRCPNDCHSRGRCVEGKCVCEQGFKGYDCSDMSCPNDCHQHGRCVNGMCVCDDGYTGEDCRDRQCPRDCSNRGLCVDGQCVCEDGFTGPDCAELSCPNDCHGQGRCVNGQCVCHEGFMGKDCKEQRCPSDCHGQGRCVDGQCICHEGFTGLDCGQHSCPSDCNNLGQCVSGRCICNEGYSGEDCSEVSPPKDLVVTEVTEETVNLAWDNEMRVTEYLVVYTPTHEGGLEMQFRVPGDQTSTIIQELEPGVEYFIRVFAILENKKSIPVSARVATYLPAPEGLKFKSIKETSVEVEWDPLDIAFETWEIIFRNMNKEDEGEITKSLRRPETSYRQTGLAPGQEYEISLHIVKNNTRGPGLKRVTTTRLDAPSQIEVKDVTDTTALITWFKPLAEIDGIELTYGIKDVPGDRTTIDLTEDENQYSIGNLKPDTEYEVSLISRRGDMSSNPAKETFTTGLDAPRNLRRVSQTDNSITLEWRNGKAAIDSYRIKYAPISGGDHAEVDVPKSQQATTKTTLTGLRPGTEYGIGVSAVKEDKESNPATINAATELDTPKDLQVSETAETSLTLLWKTPLAKFDRYRLNYSLPTGQWVGVQLPRNTTSYVLRGLEPGQEYNVLLTAEKGRHKSKPARVKASTAKEPEIGNLNVSDITPESFNLSWMATDGIFETFTIEIIDSNRLLETVEYNISGAERTAHISGLPPSTDFIVYLSGLAPSIRTKTISATATTEPKPQLGTLIFSNITPKSFNMSWTTQAGLFAKIVINVSDAHSLHESQQFTVSGDAKQAHITGLVENTGYDVSVAGTTLAGDPTRPLTAFVITEAEPEVDNLLVSDATPDGFRLSWTADEGVFDNFVLKIRDTKKQSEPLEITLLAPERTRDITGLREATEYEIELYGISKGRRSQTVSAIATTAMGSPKEVIFSDITENSATVSWRAPTAQVESFRITYVPITGGTPSMVTVDGTKTQTRLVKLIPGVEYLVSIIAMKGFEESEPVSGSFTTALDGPSGLVTANITDSEALARWQPAIATVDSYVISYTGEKVPEITRTVSGNTVEYALTDLEPATEYTLRIFAEKGPQKSSTITAKFTTDLDSPRDLTATEVQSETALLTWRPPRASVTGYLLVYESVDGTVKEVIVGPDTTSYSLADLSPSTHYTAKIQALNGPLRSNMIQTIFTTIGLLYPFPKDCSQAMLNGDTTSGLYTIYLNGDKAEALEVFCDMTSDGGGWIVFLRRKNGRENFYQNWKAYAAGFGDRREEFWLGLDNLNKITAQGQYELRVDLRDHGETAFAVYDKFSVGDAKTRYKLKVEGYSGTAGDSMAYHNGRSFSTFDKDTDSAITNCALSYKGAFWYRNCHRVNLMGRYGDNNHSQGVNWFHWKGHEHSIQFAEMKLRPSNFRNLEGRRKRA

SEQ ID NO: 310443 - DNA, 5514 bp, Artificial Sequence
  derived and/or modified sequence
atgggcgccatgacccagctgctggccggcgtgttcctggccttcctggccctggccaccgagggcggcgtgctgaagaaggtgatcagacacaagagacagagcggcgtgaacgccaccctgcccgaggagaaccagcccgtggtgttcaaccacgtgtacaacatcaagctgcccgtgggcagccagtgcagcgtggacctggagagcgccagcggcgagaaggacctggccccccccagcgagcccagcgagagcttccaggagcacaccgtggacggcgagaaccagatcgtgttcacccacagaatcaacatccccagaagagcctgcggctgcgccgccgcccccgacgtgaaggagctgctgagcagactggaggagctggagaacctggtgagcagcctgagagagcagtgcaccgccggcgccggctgctgcctgcagcccgccaccggcagactggacaccagacccttctgcagcggcagaggcaacttcagcaccgagggctgcggctgcgtgtgcgagcccggctggaagggccccaactgcagcgagcccgagtgccccggcaactgccacctgagaggcagatgcatcgacggccagtgcatctgcgacgacggcttcaccggcgaggactgcagccagctggcctgccccagcgactgcaacgaccagggcaagtgcgtgaacggcgtgtgcatctgcttcgagggctacgccggcgccgactgcagcagagagatctgccccgtgccctgcagcgaggagcacggcacctgcgtggacggcctgtgcgtgtgccacgacggcttcgccggcgacgactgcaacaagcccctgtgcctgaacaactgctacaacagaggcagatgcgtggagaacgagtgcgtgtgcgacgagggcttcaccggcgaggactgcagcgagctgatctgccccaacgactgcttcgacagaggcagatgcatcaacggcacctgctactgcgaggagggcttcaccggcgaggactgcggcaagcccacctgcccccacgcctgccacacccagggcagatgcgaggagggccagtgcgtgtgcgacgagggcttcgccggcgtggactgcagcgagaagagatgccccgccgactgccacaacagaggcagatgcgtggacggcagatgcgagtgcgacgacggcttcaccggcgccgactgcggcgagctgaagtgccccaacggctgcagcggccacggcagatgcgtgaacggccagtgcgtgtgcgacgagggctacaccggcgaggactgcagccagctgagatgccccaacgactgccacagcagaggcagatgcgtggagggcaagtgcgtgtgcgagcagggcttcaagggctacgactgcagcgacatgagctgccccaacgactgccaccagcacggcagatgcgtgaacggcatgtgcgtgtgcgacgacggctacaccggcgaggactgcagagacagacagtgccccagagactgcagcaacagaggcctgtgcgtggacggccagtgcgtgtgcgaggacggcttcaccggccccgactgcgccgagctgagctgccccaacgactgccacggccagggcagatgcgtgaacggccagtgcgtgtgccacgagggcttcatgggcaaggactgcaaggagcagagatgccccagcgactgccacggccagggcagatgcgtggacggccagtgcatctgccacgagggcttcaccggcctggactgcggccagcacagctgccccagcgactgcaacaacctgggccagtgcgtgagcggcagatgcatctgcaacgagggctacagcggcgaggactgcagcgaggtgagcccccccaaggacctggtggtgaccgaggtgaccgaggagaccgtgaacctggcctgggacaacgagatgagagtgaccgagtacctggtggtgtacacccccacccacgagggcggcctggagatgcagttcagagtgcccggcgaccagaccagcaccatcatccaggagctggagcccggcgtggagtacttcatcagagtgttcgccatcctggagaacaagaagagcatccccgtgagcgccagagtggccacctacctgcccgcccccgagggcctgaagttcaagagcatcaaggagaccagcgtggaggtggagtgggaccccctggacatcgccttcgagacctgggagatcatcttcagaaacatgaacaaggaggacgagggcgagatcaccaagagcctgagaagacccgagaccagctacagacagaccggcctggcccccggccaggagtacgagatcagcctgcacatcgtgaagaacaacaccagaggccccggcctgaagagagtgaccaccaccagactggacgcccccagccagatcgaggtgaaggacgtgaccgacaccaccgccctgatcacctggttcaagcccctggccgagatcgacggcatcgagctgacctacggcatcaaggacgtgcccggcgacagaaccaccatcgacctgaccgaggacgagaaccagtacagcatcggcaacctgaagcccgacaccgagtacgaggtgagcctgatcagcagaagaggcgacatgagcagcaaccccgccaaggagaccttcaccaccggcctggacgcccccagaaacctgagaagagtgagccagaccgacaacagcatcaccctggagtggagaaacggcaaggccgccatcgacagctacagaatcaagtacgcccccatcagcggcggcgaccacgccgaggtggacgtgcccaagagccagcaggccaccaccaagaccaccctgaccggcctgagacccggcaccgagtacggcatcggcgtgagcgccgtgaaggaggacaaggagagcaaccccgccaccatcaacgccgccaccgagctggacacccccaaggacctgcaggtgagcgagaccgccgagaccagcctgaccctgctgtggaagacccccctggccaagttcgacagatacagactgaactacagcctgcccaccggccagtgggtgggcgtgcagctgcccagaaacaccaccagctacgtgctgagaggcctggagcccggccaggagtacaacgtgctgctgaccgccgagaagggcagacacaagagcaagcccgccagagtgaaggccagcaccgccaaggagcccgagatcggcaacctgaacgtgagcgacatcacccccgagagcttcaacctgagctggatggccaccgacggcatcttcgagaccttcaccatcgagatcatcgacagcaacagactgctggagaccgtggagtacaacatcagcggcgccgagagaaccgcccacatcagcggcctgccccccagcaccgacttcatcgtgtacctgagcggcctggcccccagcatcagaaccaagaccatcagcgccaccgccaccaccgaggccctgcccctgctggagaacctgaccatcagcgacatcaacccctacggcttcaccgtgagctggatggccagcgagaacgccttcgacagcttcctggtgaccgtggtggacagcggcaagctgctggacccccaggagttcaccctgagcggcacccagagaaagctggagctgagaggcctgatcaccggcatcggctacgaggtgatggtgagcggcttcacccagggccaccagaccaagcccctgagagccgagatcgtgaccgaggccgagcccgaggtggacaacctgctggtgagcgacgccacccccgacggcttcagactgagctggaccgccgacgagggcgtgttcgacaacttcgtgctgaagatcagagacaccaagaagcagagcgagcccctggagatcaccctgctggcccccgagagaaccagagacatcaccggcctgagagaggccaccgagtacgagatcgagctgtacggcatcagcaagggcagaagaagccagaccgtgagcgccatcgccaccaccgccatgggcagccccaaggaggtgatcttcagcgacatcaccgagaacagcgccaccgtgagctggagagcccccaccgcccaggtggagagcttcagaatcacctacgtgcccatcaccggcggcacccccagcatggtgaccgtggacggcaccaagacccagaccagactggtgaagctgatccccggcgtggagtacctggtgagcatcatcgccatgaagggcttcgaggagagcgagcccgtgagcggcagcttcaccaccgccctggacggccccagcggcctggtgaccgccaacatcaccgacagcgaggccctggccagatggcagcccgccatcgccaccgtggacagctacgtgatcagctacaccggcgagaaggtgcccgagatcaccagaaccgtgagcggcaacaccgtggagtacgccctgaccgacctggagcccgccaccgagtacaccctgagaatcttcgccgagaagggcccccagaagagcagcaccatcaccgccaagttcaccaccgacctggacagccccagagacctgaccgccaccgaggtgcagagcgagaccgccctgctgacctggagaccccccagagccagcgtgaccggctacctgctggtgtacgagagcgtggacggcaccgtgaaggaggtgatcgtgggccccgacaccaccagctacagcctggccgacctgagccccagcacccactacaccgccaagatccaggccctgaacggccccctgagaagcaacatgatccagaccatcttcaccaccatcggcctgctgtaccccttccccaaggactgcagccaggccatgctgaacggcgacaccaccagcggcctgtacaccatctacctgaacggcgacaaggccgaggccctggaggtgttctgcgacatgaccagcgacggcggcggctggatcgtgttcctgagaagaaagaacggcagagagaacttctaccagaactggaaggcctacgccgccggcttcggcgacagaagagaggagttctggctgggcctggacaacctgaacaagatcaccgcccagggccagtacgagctgagagtggacctgagagaccacggcgagaccgccttcgccgtgtacgacaagttcagcgtgggcgacgccaagaccagatacaagctgaaggtggagggctacagcggcaccgccggcgacagcatggcctaccacaacggcagaagcttcagcaccttcgacaaggacaccgacagcgccatcaccaactgcgccctgagctacaagggcgccttctggtacagaaactgccacagagtgaacctgatgggcagatacggcgacaacaaccacagccagggcgtgaactggttccactggaagggccacgagcacagcatccagttcgccgagatgaagctgagacccagcaacttcagaaacctggagggcagaagaaagagagcctag

SEQ ID NO: 310444 - DNA, 5517 bp, Artificial Sequence
  derived and/or modified sequence
atgggcgccatgacccagctgctggccggcgtgttcctggccttcctggccctggccaccgagggcggcgtgctgaagaaggtgatcagacacaagagacagagcggcgtgaacgccaccctgcccgaggagaaccagcccgtggtgttcaaccacgtgtacaacatcaagctgcccgtgggcagccagtgcagcgtggacctggagagcgccagcggcgagaaggacctggccccccccagcgagcccagcgagagcttccaggagcacaccgtggacggcgagaaccagatcgtgttcacccacagaatcaacatccccagaagagcctgcggctgcgccgccgcccccgacgtgaaggagctgctgagcagactggaggagctggagaacctggtgagcagcctgagagagcagtgcaccgccggcgccggctgctgcctgcagcccgccaccggcagactggacaccagacccttctgcagcggcagaggcaacttcagcaccgagggctgcggctgcgtgtgcgagcccggctggaagggccccaactgcagcgagcccgagtgccccggcaactgccacctgagaggcagatgcatcgacggccagtgcatctgcgacgacggcttcaccggcgaggactgcagccagctggcctgccccagcgactgcaacgaccagggcaagtgcgtgaacggcgtgtgcatctgcttcgagggctacgccggcgccgactgcagcagagagatctgccccgtgccctgcagcgaggagcacggcacctgcgtggacggcctgtgcgtgtgccacgacggcttcgccggcgacgactgcaacaagcccctgtgcctgaacaactgctacaacagaggcagatgcgtggagaacgagtgcgtgtgcgacgagggcttcaccggcgaggactgcagcgagctgatctgccccaacgactgcttcgacagaggcagatgcatcaacggcacctgctactgcgaggagggcttcaccggcgaggactgcggcaagcccacctgcccccacgcctgccacacccagggcagatgcgaggagggccagtgcgtgtgcgacgagggcttcgccggcgtggactgcagcgagaagagatgccccgccgactgccacaacagaggcagatgcgtggacggcagatgcgagtgcgacgacggcttcaccggcgccgactgcggcgagctgaagtgccccaacggctgcagcggccacggcagatgcgtgaacggccagtgcgtgtgcgacgagggctacaccggcgaggactgcagccagctgagatgccccaacgactgccacagcagaggcagatgcgtggagggcaagtgcgtgtgcgagcagggcttcaagggctacgactgcagcgacatgagctgccccaacgactgccaccagcacggcagatgcgtgaacggcatgtgcgtgtgcgacgacggctacaccggcgaggactgcagagacagacagtgccccagagactgcagcaacagaggcctgtgcgtggacggccagtgcgtgtgcgaggacggcttcaccggccccgactgcgccgagctgagctgccccaacgactgccacggccagggcagatgcgtgaacggccagtgcgtgtgccacgagggcttcatgggcaaggactgcaaggagcagagatgccccagcgactgccacggccagggcagatgcgtggacggccagtgcatctgccacgagggcttcaccggcctggactgcggccagcacagctgccccagcgactgcaacaacctgggccagtgcgtgagcggcagatgcatctgcaacgagggctacagcggcgaggactgcagcgaggtgagcccccccaaggacctggtggtgaccgaggtgaccgaggagaccgtgaacctggcctgggacaacgagatgagagtgaccgagtacctggtggtgtacacccccacccacgagggcggcctggagatgcagttcagagtgcccggcgaccagaccagcaccatcatccaggagctggagcccggcgtggagtacttcatcagagtgttcgccatcctggagaacaagaagagcatccccgtgagcgccagagtggccacctacctgcccgcccccgagggcctgaagttcaagagcatcaaggagaccagcgtggaggtggagtgggaccccctggacatcgccttcgagacctgggagatcatcttcagaaacatgaacaaggaggacgagggcgagatcaccaagagcctgagaagacccgagaccagctacagacagaccggcctggcccccggccaggagtacgagatcagcctgcacatcgtgaagaacaacaccagaggccccggcctgaagagagtgaccaccaccagactggacgcccccagccagatcgaggtgaaggacgtgaccgacaccaccgccctgatcacctggttcaagcccctggccgagatcgacggcatcgagctgacctacggcatcaaggacgtgcccggcgacagaaccaccatcgacctgaccgaggacgagaaccagtacagcatcggcaacctgaagcccgacaccgagtacgaggtgagcctgatcagcagaagaggcgacatgagcagcaaccccgccaaggagaccttcaccaccggcctggacgcccccagaaacctgagaagagtgagccagaccgacaacagcatcaccctggagtggagaaacggcaaggccgccatcgacagctacagaatcaagtacgcccccatcagcggcggcgaccacgccgaggtggacgtgcccaagagccagcaggccaccaccaagaccaccctgaccggcctgagacccggcaccgagtacggcatcggcgtgagcgccgtgaaggaggacaaggagagcaaccccgccaccatcaacgccgccaccgagctggacacccccaaggacctgcaggtgagcgagaccgccgagaccagcctgaccctgctgtggaagacccccctggccaagttcgacagatacagactgaactacagcctgcccaccggccagtgggtgggcgtgcagctgcccagaaacaccaccagctacgtgctgagaggcctggagcccggccaggagtacaacgtgctgctgaccgccgagaagggcagacacaagagcaagcccgccagagtgaaggccagcaccgccaaggagcccgagatcggcaacctgaacgtgagcgacatcacccccgagagcttcaacctgagctggatggccaccgacggcatcttcgagaccttcaccatcgagatcatcgacagcaacagactgctggagaccgtggagtacaacatcagcggcgccgagagaaccgcccacatcagcggcctgccccccagcaccgacttcatcgtgtacctgagcggcctggcccccagcatcagaaccaagaccatcagcgccaccgccaccaccgagcccaagccccagctgggcaccctgatcttcagcaacatcacccccaagagcttcaacatgagctggaccacccaggccggcctgttcgccaagatcgtgatcaacgtgagcgacgcccacagcctgcacgagagccagcagttcaccgtgagcggcgacgccaagcaggcccacatcaccggcctggtggagaacaccggctacgacgtgagcgtggccggcaccaccctggccggcgaccccaccagacccctgaccgccttcgtgatcaccgaggccgagcccgaggtggacaacctgctggtgagcgacgccacccccgacggcttcagactgagctggaccgccgacgagggcgtgttcgacaacttcgtgctgaagatcagagacaccaagaagcagagcgagcccctggagatcaccctgctggcccccgagagaaccagagacatcaccggcctgagagaggccaccgagtacgagatcgagctgtacggcatcagcaagggcagaagaagccagaccgtgagcgccatcgccaccaccgccatgggcagccccaaggaggtgatcttcagcgacatcaccgagaacagcgccaccgtgagctggagagcccccaccgcccaggtggagagcttcagaatcacctacgtgcccatcaccggcggcacccccagcatggtgaccgtggacggcaccaagacccagaccagactggtgaagctgatccccggcgtggagtacctggtgagcatcatcgccatgaagggcttcgaggagagcgagcccgtgagcggcagcttcaccaccgccctggacggccccagcggcctggtgaccgccaacatcaccgacagcgaggccctggccagatggcagcccgccatcgccaccgtggacagctacgtgatcagctacaccggcgagaaggtgcccgagatcaccagaaccgtgagcggcaacaccgtggagtacgccctgaccgacctggagcccgccaccgagtacaccctgagaatcttcgccgagaagggcccccagaagagcagcaccatcaccgccaagttcaccaccgacctggacagccccagagacctgaccgccaccgaggtgcagagcgagaccgccctgctgacctggagaccccccagagccagcgtgaccggctacctgctggtgtacgagagcgtggacggcaccgtgaaggaggtgatcgtgggccccgacaccaccagctacagcctggccgacctgagccccagcacccactacaccgccaagatccaggccctgaacggccccctgagaagcaacatgatccagaccatcttcaccaccatcggcctgctgtaccccttccccaaggactgcagccaggccatgctgaacggcgacaccaccagcggcctgtacaccatctacctgaacggcgacaaggccgaggccctggaggtgttctgcgacatgaccagcgacggcggcggctggatcgtgttcctgagaagaaagaacggcagagagaacttctaccagaactggaaggcctacgccgccggcttcggcgacagaagagaggagttctggctgggcctggacaacctgaacaagatcaccgcccagggccagtacgagctgagagtggacctgagagaccacggcgagaccgccttcgccgtgtacgacaagttcagcgtgggcgacgccaagaccagatacaagctgaaggtggagggctacagcggcaccgccggcgacagcatggcctaccacaacggcagaagcttcagcaccttcgacaaggacaccgacagcgccatcaccaactgcgccctgagctacaagggcgccttctggtacagaaactgccacagagtgaacctgatgggcagatacggcgacaacaaccacagccagggcgtgaactggttccactggaagggccacgagcacagcatccagttcgccgagatgaagctgagacccagcaacttcagaaacctggagggcagaagaaagagagcctag

SEQ ID NO: 310445 - DNA, 5514 bp, Artificial Sequence
  derived and/or modified sequence
atgggtgctatgacccagctgctcgctggcgtgtttttggcatttctggccttggccactgaggggggcgtcttaaaaaaggtgattcggcacaaaagacaaagcggggtgaatgctacactgcccgaggaaaaccagcctgtggtttttaaccacgtctataacataaagctgcctgtgggttctcaatgctccgttgacttggagtccgcttctggcgaaaaagatctagctccacctagtgaaccgtccgagtccttccaggagcatacagtggatggagaaaaccagatagtgtttacacatcgcatcaacatacctagaagagcttgcggatgcgctgctgcaccggacgtgaaggagctgttaagccggctagaggagctagagaatctggtgagctctctgcgggagcagtgcactgcaggggcgggatgctgtctgcaacccgccacagggcgtctggacacccgccccttttgctccgggcgtgggaatttctcaactgaagggtgtggatgtgtgtgcgaacctgggtggaaagggccaaattgctcggaacctgagtgcccgggaaattgccacttgcgcgggaggtgcatagacggacagtgtatttgcgacgacggatttaccggcgaggactgcagtcagctcgcatgtccaagcgactgcaacgatcagggaaagtgcgtgaacggagtgtgtatctgttttgaaggatacgcgggggctgattgttcacgagagatctgtcccgtgccgtgctcagaggaacacggcacttgtgtggatggactgtgcgtgtgtcatgatggctttgccggagacgattgcaacaagcctttatgtctgaacaactgctacaatcgcgggaggtgcgtcgagaatgaatgcgtttgcgacgaaggcttcacaggagaagactgctccgagctcatttgtccgaacgactgtttcgaccgaggccggtgcattaatgggacttgctactgtgaagagggatttaccggagaggactgcggtaagcctacatgcccccatgcttgtcacacacagggccgatgtgaagaaggacaatgtgtttgtgacgagggcttcgcaggtgtggactgtagcgagaaaagatgtcctgcagattgtcacaatcgtgggcgatgtgtcgacggaagatgcgagtgcgacgatggttttaccggtgctgactgcggggagctcaagtgccctaacggctgcagcggccatgggaggtgcgttaacggccagtgtgtgtgcgatgagggctatactggtgaagattgttctcagctgagatgtccaaacgactgccattcgaggggccgatgtgtcgaggggaagtgtgtgtgtgagcaggggtttaaaggctacgattgtagtgatatgagctgcccgaacgattgccaccagcacggaaggtgtgtgaacggcatgtgtgtatgcgacgacggatatactggagaagactgccgtgatcgacagtgtccccgcgattgttcaaaccgtggtctttgcgtagacggtcagtgtgtgtgtgaggatggctttaccggacctgactgcgctgagttgtcttgccctaatgactgtcacggacaggggcgttgtgttaacgggcagtgtgtgtgccacgaggggtttatgggtaaagactgcaaggaacaaagatgcccgtccgattgccacggtcagggccgctgcgttgacggtcagtgtatctgccacgaaggatttacgggcctggactgtgggcaacattcatgtcccagcgattgtaacaacctcggtcagtgtgtgtcaggtcgatgcatctgtaatgaggggtacagtggcgaagattgcagtgaggtatcccctccaaaggatcttgtagtaaccgaggttacagaggagacggtgaatctcgcttgggacaacgagatgcgcgttacggaatacctggtcgtgtacacgccaacgcatgagggggggttggagatgcagtttcgagtgcccggtgatcagacctcgaccattatacaggaacttgaacccggtgtggaatattttattcgggtctttgccatcctggaaaacaaaaaatctatcccagtcagcgctcgcgtcgccacgtacctccctgccccagagggactgaaatttaaatctatcaaggaaacctctgttgaggtggagtgggatcccctcgatatcgccttcgaaacatgggagataatattccgtaacatgaacaaagaggatgaaggggaaatcactaagagtcttagacgacccgaaacatcctatcggcaaaccggcttggcacctggccaggaatacgaaatttctctgcatatcgtgaaaaataacacccgaggcccgggactaaagagggtaacaacaacaagattagatgctccatcacaaatcgaggttaaagatgtcacagacactacagcgctgatcacatggttcaagcctttggcagagatagatggaatagaactaacttacggtattaaagacgtccctggggaccggactactatcgatcttaccgaggatgaaaatcagtactcaatagggaaccttaagccagatacagaatatgaggtatcactgattagtcggcggggtgatatgagttctaacccggcaaaggagaccttcaccacgggcctggatgccccacgcaacctgagacgggtctctcagactgataacagtatcacactggaatggaggaatggaaaagctgccatcgattcataccgcattaagtacgctcccatctcaggcggagaccacgctgaagttgatgtacccaaaagccaacaggcaaccaccaagaccaccctcactggtctaagacctgggaccgaatatggcataggggtgagcgcagtgaaagaggataaagagtctaacccagcaaccatcaacgctgctacagaactcgacacccccaaagacttgcaggtgagtgaaacagcagaaacatcactgaccctactctggaaaaccccactcgcaaagtttgacagatatcgccttaactattcgctccccacaggacaatgggtaggcgtccaactgccgcgtaatacgacatcctacgtgctcagaggactggaacctggacaagaatacaacgttttactcacagccgagaaggggaggcacaaaagtaagccggccagggttaaggcctccacggcgaaggagccggagattgggaatctcaatgtatccgacattactccagaatctttcaatctgagctggatggcgactgacggtatttttgagacattcaccatcgagatcattgactccaatcggctgctggaaaccgtggaatacaatatatcgggcgccgagcgcacggctcacatttccgggctgccaccaagtacagactttatcgtctatctttccggtctagccccaagcattagaaccaaaactattagtgctaccgctacaaccgaggccctgcccctgcttgaaaacctcactatcagcgatataaatccttacggctttacagtgtcatggatggcctctgagaacgcttttgactcctttctggtgacggtagtggactcaggcaagctcctggacccacaagaattcactttatccggaacacagagaaagctcgaactccgcggcctgatcacagggatcggctatgaggtcatggtgagcggtttcacccagggacaccaaacaaaacctctacgagccgagatagtgaccgaggcagagcctgaggtcgataacctgctcgttagcgacgcaactcccgacggctttcggctgtcctggacggctgatgaaggagtctttgataattttgtcctcaaaattagagataccaagaagcaaagcgagcctctggaaatcacacttctggcaccagagcgcacccgtgatatcacaggtctccgggaggccacagaatatgagatcgagttatatgggattagtaaaggcaggagaagccagacagtgagcgcaattgcaactacggccatgggctcacccaaagaagtcatcttttcagacatcaccgagaactccgctactgtgagctggagggccccaaccgctcaggtcgaatctttcaggattacatatgtgccgataactggaggtaccccctctatggtgactgtggacgggacgaagactcagacacgacttgtgaaactgatcccgggggtggaataccttgtttccattattgctatgaagggctttgaggaaagcgagcccgtgtccggttccttcactaccgctctcgacgggccttcaggcttggtgacggccaacataaccgacagcgaagccttggctcgctggcagccggctatcgccacagtcgattcatatgtgatttcatatacgggcgaaaaggtgcccgaaatcacaaggacggtgtccgggaacacggtagagtacgccctcactgacttggagcccgcaactgaatatacgttgcggatcttcgctgagaaggggccccaaaagagttccacaattacggctaagttcactaccgatcttgactccccgagagacctgactgcaacagaggttcagtctgagaccgcactcctgacttggagaccgcctcgcgctagtgtgaccggatatttgcttgtctacgagtctgttgatggcacagtaaaagaggtgattgtcggccccgatactacgtcttacagcctcgcagatttgtctcccagtacccattacacggctaagatccaggcactcaacggccctctccggtctaacatgatccaaaccatcttcactaccattggtttactgtatcccttccccaaagactgtagccaggcgatgttgaatggagacaccaccagtggcctgtacactatctacttgaatggcgacaaagccgaggccctggaggtgttctgtgatatgacatccgatggtggcggatggattgtcttcctgaggagaaaaaacggacgggagaacttttaccagaattggaaggcatatgcggcaggcttcggcgatcgccgtgaggagttttggcttggactggataatctcaataagatcaccgcgcagggccaatatgagttaagggtggacttgcgagatcatggcgaaacagcctttgcagtttacgataagtttagtgtaggagatgctaagacaaggtacaaactgaaggtggaaggctattcaggcaccgccggcgacagcatggcttaccacaatggccgtagtttctcaacttttgacaaagacactgatagtgccatcactaactgcgcactgagttataagggagccttttggtacaggaattgtcatagagtaaacctgatgggcaggtatggagacaacaatcattctcaaggcgtcaactggttccactggaagggacatgagcatagtatacagttcgctgagatgaaactacgcccctccaatttcaggaacctagaaggcaggagaaaacgggcctag

SEQ ID NO: 310446 - DNA, 5517 bp, Artificial Sequence
  derived and/or modified sequence
atgggggctatgacacagttgctggccggcgtgtttctggcctttctcgcactggcgacggaggggggtgttctgaagaaggtcatccgtcacaagcggcagtctggggtgaatgccaccctccccgaggagaatcagcctgtcgtctttaaccacgtgtacaatattaagctgcctgtgggatcacagtgctccgtggacttggaatctgcatccggagagaaggatctagctcctcccagcgagccctctgagagtttccaagaacacactgtcgacggcgaaaatcaaattgtcttcacccacagaattaacatcccacgccgcgcgtgcggctgcgccgctgcccccgacgtcaaggagctgttgtcccgtttagaggaactggagaacttagtcagttccttaagagagcagtgtaccgccggcgcggggtgttgtctccagccagctactggccgtctggacacaagaccgttttgttccggtcggggaaatttttcaacagaaggctgtggctgtgtctgtgagcccgggtggaagggccctaactgctcagaacccgaatgtccagggaattgccacttgaggggaagatgtattgacggacaatgtatctgcgatgacgggttcactggcgaagactgttcgcaactcgcctgtccgagcgattgcaacgatcaaggcaagtgcgtcaatggggtgtgcatttgtttcgagggctacgcgggtgccgattgtagccgagaaatctgcccagtcccttgcagtgaggagcatggaacttgtgtcgacggattgtgtgtgtgtcacgatggattcgccggtgacgactgtaacaaacctctgtgcctcaacaactgctacaacagagggcgatgtgtggagaatgaatgcgtgtgtgatgaaggctttaccggtgaggattgctcagagcttatctgtccgaacgattgtttcgatcggggccgctgtatcaatgggacctgttattgcgaggagggctttaccggagaggactgcggcaaacctacctgtcctcatgcctgccacacccaggggcggtgtgaggagggacagtgcgtgtgcgatgaggggtttgctggggtggactgctcagagaagcggtgtcctgctgattgtcataaccgaggtcggtgcgtcgacggccggtgcgaatgtgacgatggattcactggggccgattgcggtgaactcaagtgccctaatggctgttcaggacatggtaggtgtgtaaatggccagtgtgtatgtgatgaaggctacacgggcgaggactgcagccagctgcggtgtccaaacgactgtcatagcaggggaagatgcgtggaaggaaagtgtgtgtgcgagcagggattcaaaggctatgattgcagcgacatgtcttgtcctaatgactgccaccagcacggacgctgcgttaacgggatgtgcgtctgtgacgatggctataccggggaggactgcagagaccgccagtgtcccagggactgttctaacagaggcctgtgcgtcgacgggcagtgcgtgtgcgaggacggtttcacaggtcccgattgtgcagaattgagttgcccaaatgattgtcacggacagggacgctgtgtcaatgggcagtgtgtgtgccacgagggatttatgggcaaagactgcaaagagcagaggtgtccaagtgattgccacggtcaaggccgctgtgtggatgggcaatgtatttgtcacgagggttttaccggactcgactgtggacagcattcctgtcccagtgattgtaataacttaggccagtgcgtcagcggtagatgcatttgtaacgaagggtacagcggcgaggactgcagtgaagtgtcacctccaaaagatcttgtcgtgactgaggtgaccgaggaaacggtcaatctggcctgggacaacgagatgcgggtgaccgagtacctggttgtctataccccaactcacgaggggggcctcgagatgcaatttcgggtgccaggagaccagacatccaccattattcaggagctggagcccggagtcgagtacttcatcagggttttcgccatattagagaataaaaaatcgattcctgtcagtgcaagagtcgccacctacctacccgcacccgaggggcttaagttcaaatccattaaggagactagcgtggaagtcgaatgggatcctctagacattgcattcgaaacctgggagatcatattcaggaatatgaataaagaggacgaaggagagataacaaaaagcctcagacggcctgaaacgagctaccgacagaccgggctggccccaggccaggaatacgaaattagtctccacatagtaaagaacaatacaagaggacctggactgaaaagggtcaccacaacccgcctagatgcgcccagccaaattgaagttaaggacgtcaccgacaccacggcccttataacttggttcaaacccctggccgagattgatggtatcgagctgacctacggcatcaaagacgtgcccggcgatcgtacaaccatcgacctgacagaggatgagaaccagtatagtatcgggaaccttaagccagataccgagtacgaagtcagcttgatttccaggcggggggatatgtctagtaatccagctaaggagacgttcacgacagggctcgacgcgccgcgaaatcttagaagagtgagccagacagacaatagtatcacattggagtggcgtaacggtaaggccgccatcgattcttataggatcaaatacgcccccatctctggaggtgatcacgccgaggttgacgtgccaaagagtcagcaggcaaccactaagaccacactcacggggttgagaccagggaccgaatatgggattggggtgagcgccgtcaaggaagacaaggagagcaacccggccacgattaacgcggccaccgagcttgacacaccaaaagatttgcaggtaagtgagacagccgagactagcctgacactgctttggaagacccctctggctaagttcgacaggtaccgcttaaattactcactccctacagggcagtgggtgggggtccagctgccccgaaacacgacttcctacgttctccgcggactggagcccggccaggagtacaatgtgctgctgactgcagagaaaggcagacacaaatccaagcctgcccgcgtcaaggcatccaccgccaaggaaccggagatcgggaacttgaatgtgtctgatatcactcctgaatccttcaatttatcctggatggccacagacgggattttcgaaactttcaccatcgagatcatcgattctaaccgtcttctcgaaaccgtcgaatataacatctcgggggccgagaggacagctcacatatccggactcccgcccagcacagacttcattgtgtacctcagcgggttggctccatccatcagaaccaagacaatttctgcaacggccaccacagaaccaaaaccgcagttggggactctgattttctccaatattaccccgaaatcgtttaatatgtcgtggactacccaagctggcctgttcgccaagatcgtgatcaatgtcagtgatgctcatagcctccatgagtcgcagcaattcactgtgtcaggtgatgccaagcaagcccacatcacaggactggtggagaacactgggtacgatgtctctgtcgcgggcactaccctggcaggtgacccaacgcgacctctcactgctttcgtaattacagaggctgaacctgaggtggataatctgctggtcagcgacgccactccagatggctttaggttgtcatggactgcagacgaaggcgtattcgataactttgtactgaagattagagacaccaaaaaacagtcggagcccctggaaatcaccttactggcccccgaacggacccgcgacataactggcctcagagaagcaacagagtatgagatcgaactctacggaatttccaaagggcgccgctcgcaaactgtttcagcgatagcaaccacagctatgggatccccaaaggaagtgattttctctgacattaccgaaaatagcgccaccgtgtcttggcgcgcgccaactgctcaggttgagagcttcagaattacgtacgtccccattaccggcggcacgcccagtatggttaccgttgatggaaccaagacacagaccagactggtgaagctcattcccggggtagaatacctggtgagcatcattgccatgaaaggatttgaggagtcggaaccagtgagtggcagctttacaaccgccctggacggcccctccggacttgtgactgcgaacattaccgacagcgaagcgttggcgaggtggcagccagctatcgctacagttgattcttatgtcatctcttacaccggggagaaggtccctgagattaccagaaccgttagcggaaatactgtggagtacgcccttacagaccttgaacctgctacggaatataccctgcgcatcttcgccgagaaaggccctcaaaaaagcagcaccatcactgctaagtttacaactgatctggactctcctcgagacctaactgctaccgaagtgcagtccgaaaccgcactgctgacatggcgacctccgcgagcctccgtgactggctatctgctggtctacgagagcgtggatgggactgtcaaggaggtgattgtagggcctgatacaacctcatattctctcgccgatctgtccccgtctacccactataccgccaaaattcaggccctgaacgggcctctgcgctcaaacatgattcaaactatcttcacgaccataggactactctatccgtttccaaaagactgctcacaggccatgctgaatggagatactacttccggcctgtacacaatatatttgaacggagataaggctgaggccctggaggttttctgcgatatgaccagcgacggaggcgggtggatcgtctttctgcggaggaaaaacggacgggagaacttttaccagaactggaaggcttacgcggcggggttcggggatcgcagagaggagttctggctgggattggacaatctcaacaaaatcaccgcgcaaggccagtacgaacttcgggtggatctccgggatcatggtgagactgccttcgcagtctatgacaagttcagcgtgggggacgctaaaactaggtataagctaaaagtcgagggctacagtggcactgccggcgactctatggcgtatcacaatggcagaagtttcagcacattcgataaggacacagatagcgccatcaccaattgcgccttatcctacaagggagcattttggtaccgtaattgccacagagtcaatcttatgggccgatatggcgacaacaaccactcgcagggggtcaactggtttcactggaagggccacgaacacagtatacagtttgcggagatgaaactgcgtccttctaattttcgtaatcttgagggcagacggaagcgcgcttag

SEQ ID NO: 310447 - DNA, 5514 bp, Artificial Sequence
  derived and/or modified sequence
atgggcgccatgacccagctgctggccggggtcttcctggccttcctggccctggccacagagggcggcgtgctgaagaaggtgatccgccacaagaggcagagcggcgtgaatgccaccctgcctgaggagaaccagcctgtggtgttcaaccacgtgtacaacatcaagctgcctgtgggcagccagtgcagcgtggacctggagagcgccagcggggagaaggacctggcccctccttctgagcccagcgagagcttccaggagcacacagtggatggagagaaccagatcgtgttcacccaccgcatcaacatcccccggcgggcctgtggctgtgccgccgccccagatgtgaaggagctgctgagccggctggaggagctggagaacctggtgagcagcctgcgggagcagtgcacagctggggccggctgctgcctgcagcctgccaccggccgcctggacacccggcccttctgcagcggccggggcaacttcagcacagagggctgcggctgtgtgtgtgagcccggctggaagggccccaactgcagcgagccagaatgtcctggcaactgccacctgcggggccgctgcattgatggccagtgcatctgtgatgatggcttcaccggggaggactgcagccagctggcctgccccagcgactgcaatgaccagggcaaatgtgtgaatggagtgtgcatctgctttgagggctacgccggggctgactgcagccgggagatctgccctgtgccctgcagcgaggagcacggcacctgtgtggatggcctgtgtgtgtgccatgatggctttgctggagatgactgcaacaagcccctgtgcctgaacaactgctacaacagaggccgctgtgtggagaatgaatgtgtgtgtgatgagggcttcaccggggaggactgcagcgagctgatctgccccaatgactgctttgaccggggccgctgcatcaatggcacctgctactgtgaggagggcttcaccggggaggactgtgggaagcccacctgcccccacgcctgccacacccagggccgctgtgaggagggccagtgtgtgtgtgatgagggctttgctggggtggactgcagcgagaagcgctgcccagctgactgccacaacagaggccgctgtgtggatggccgctgtgaatgtgatgatggcttcaccggggctgactgtggggagctgaagtgccccaacggctgcagcggccacggccgctgtgtgaatggccagtgtgtgtgtgatgagggctacaccggggaggactgcagccagctgcgctgccccaatgactgccacagccggggccgctgtgtggagggcaaatgtgtgtgtgagcagggcttcaagggctatgactgcagcgacatgagctgccccaatgactgccaccagcacggccgctgtgtgaatggcatgtgtgtgtgtgatgatggctacaccggggaggactgccgggaccggcagtgcccccgggactgcagcaacagaggcctgtgtgtggatggccagtgtgtgtgtgaagatggcttcaccggccctgactgtgccgagctgagctgccccaatgactgccacggccagggccgctgtgtgaatggccagtgtgtgtgccacgagggcttcatgggcaaggactgcaaggagcagcgctgccccagcgactgccacggccagggccgctgtgtggatggccagtgcatctgccacgagggcttcaccggcctggactgtggccagcacagctgccccagcgactgcaacaacctgggccagtgtgtgtctggccgctgcatctgcaatgaaggctacagcggggaggactgcagcgaggtgtccccacccaaggacctggtggtgacagaggtgacagaggagaccgtgaacctggcctgggacaatgagatgagggtgacagagtacctggtggtgtacacccccacccatgagggcggcctggagatgcagttccgggtgcctggggaccagaccagcaccatcatccaggagctggagcccggggtggagtacttcatccgggtgtttgccatcctggagaacaagaagagcatccctgtgtctgcccgggtggccacctacctgcctgcccctgagggcctgaagttcaagagcatcaaggagacctctgtggaggtggagtgggaccccctggacatcgcctttgagacctgggagatcatcttcaggaacatgaacaaggaggatgaaggagagatcaccaagagcctgcggcggcctgagaccagctaccggcagacaggcctggcccctggccaggagtatgagatcagcctgcacatcgtgaagaacaacacccggggccctggcctgaagagggtgaccaccacccggctggatgcccccagccagatcgaggtgaaggatgtgacagacaccacagccctgatcacctggttcaagcccctggccgagattgatggcatcgagctgacctacggcatcaaggatgtgcctggggacaggaccaccatcgacctgacagaagatgagaaccagtacagcatcggcaacctgaagccagacacagaatatgaggtgtccctcatcagccggcggggggacatgagcagcaacccagccaaggagaccttcaccaccggcctggatgcccccaggaacctgcggcgggtgtcccagacagacaacagcatcaccctggagtggagaaatggcaaggccgccatcgacagctaccgcatcaagtatgcccccatctctggaggagaccacgccgaggtggatgtgcccaagagccagcaggccaccaccaagaccaccctgaccggcctgcggcctggaacagaatatggaattggagtgtctgctgtgaaggaggacaaggagagcaacccagccaccatcaatgctgccacagagctggacacccccaaggacctgcaggtgtctgaaacagctgagaccagcctgaccctgctgtggaagacccccctggccaagtttgaccgctaccgcctgaactacagcctgcccaccggccagtgggtgggcgtgcagctgcccaggaacaccaccagctatgtgctgcggggcctggagcccggccaggagtacaacgtgctgctgacagctgagaagggccgccacaagagcaagccagcccgggtgaaggccagcacagccaaggagcctgagatcggcaacctgaatgtgtctgacatcaccccagagagcttcaacctgtcctggatggccacagatggcatctttgagaccttcaccatcgagatcatcgacagcaaccggctgctggagaccgtggagtacaacatctctggagctgagaggacagcccacatcagcggcctgccccccagcacagacttcatcgtgtacctgagcggcctggcccccagcatccgcaccaagaccatcagcgccacagccaccacagaggccctgcccctgctggagaacctgaccatcagtgacatcaacccctacggcttcaccgtgtcctggatggcctctgaaaatgcctttgacagcttcctggtgacagtggtggacagcggcaagctgctggacccccaggagttcaccctgagcggcacccagaggaagctggagctgcggggcctcatcactggaattggctatgaggtgatggtgtctggcttcacccagggccaccagaccaagcccctgcgggcagaaattgtgacagaagctgagcctgaggtggacaacctgctggtgtctgatgccaccccagatggcttccggctgtcctggacagcagatgaaggagtgtttgacaactttgtgctgaagatccgggacaccaagaagcagagcgagcccctggagatcaccctgctggcccctgagaggacccgggacatcaccggcctgcgggaggccacagaatatgaaattgagctgtatggcatcagcaaaggaagaagaagccagacagtgtctgccatcgccaccacagccatgggcagccccaaggaggtgatcttcagtgacatcacagaaaattctgccaccgtgtcctggagggcccccacagcccaggtggagagcttccgcatcacctacgtgcccatcaccggcggcacccccagcatggtgacagtggatggcaccaagacccagacccggctggtgaagctgatccctggggtggagtacctggtgtccatcatcgccatgaagggctttgaggagagcgagcctgtgtctggcagcttcaccacagccctggatggccccagcggcctggtgacagccaacatcacagattctgaggccctggcccgctggcagcctgccatcgccaccgtggacagctatgtgatctcctacaccggggagaaggtgcctgagatcaccaggacagtgtctggcaacacagtggagtatgccctgacagacctggagcccgccacagagtacaccctgcgcatctttgctgagaagggcccccagaagagcagcaccatcacagccaagttcaccacagacctggacagcccccgggacctgacagccacagaggtgcagagcgagacagccctgctgacctggaggcctccccgggcctctgtgacaggctacctgctggtgtatgaatctgtggatggcaccgtgaaggaggtgattgtgggccctgacaccaccagctacagcctggccgacctgagccccagcacccactacacagccaagatccaggccctgaatggccccctgcggagcaacatgatccagaccatcttcaccaccatcggcctgctgtaccccttccccaaggactgcagccaggccatgctgaatggagacaccaccagcggcctgtacaccatctacctgaatggagacaaggccgaggccctggaggtgttctgtgacatgaccagtgatggcggcggctggatcgtgttcctgcggaggaagaatggccgggagaacttctaccagaactggaaggcctatgctgctggctttggagaccggcgggaggagttctggctgggcctggacaacctgaacaagatcacagcccagggccagtatgagctgcgggtggacctgcgggaccatggagaaacagcctttgctgtgtatgacaagttctctgtgggagatgccaagacccgctacaagctgaaggtggagggctacagcggcacagctggggacagcatggcctaccacaacggccgctccttcagcacctttgacaaggacacagattctgccatcaccaactgtgccctgagctacaagggggccttctggtacagaaactgccaccgggtgaacctgatgggccgctacggggacaacaaccacagccagggcgtgaactggttccactggaagggccacgagcacagcatccagtttgctgagatgaagctgcggcccagcaacttcaggaacctggagggccgcaggaagagggcctag

SEQ ID NO: 310448 - DNA, 5517 bp, Artificial Sequence
  derived and/or modified sequence
atgggcgccatgacccagctgctggccggggtcttcctggccttcctggccctggccacagagggcggcgtgctgaagaaggtgatccgccacaagaggcagagcggcgtgaatgccaccctgcctgaggagaaccagcctgtggtgttcaaccacgtgtacaacatcaagctgcctgtgggcagccagtgcagcgtggacctggagagcgccagcggggagaaggacctggcccctccttctgagcccagcgagagcttccaggagcacacagtggatggagagaaccagatcgtgttcacccaccgcatcaacatcccccggcgggcctgtggctgtgccgccgccccagatgtgaaggagctgctgagccggctggaggagctggagaacctggtgagcagcctgcgggagcagtgcacagctggggccggctgctgcctgcagcctgccaccggccgcctggacacccggcccttctgcagcggccggggcaacttcagcacagagggctgcggctgtgtgtgtgagcccggctggaagggccccaactgcagcgagccagaatgtcctggcaactgccacctgcggggccgctgcattgatggccagtgcatctgtgatgatggcttcaccggggaggactgcagccagctggcctgccccagcgactgcaatgaccagggcaaatgtgtgaatggagtgtgcatctgctttgagggctacgccggggctgactgcagccgggagatctgccctgtgccctgcagcgaggagcacggcacctgtgtggatggcctgtgtgtgtgccatgatggctttgctggagatgactgcaacaagcccctgtgcctgaacaactgctacaacagaggccgctgtgtggagaatgaatgtgtgtgtgatgagggcttcaccggggaggactgcagcgagctgatctgccccaatgactgctttgaccggggccgctgcatcaatggcacctgctactgtgaggagggcttcaccggggaggactgtgggaagcccacctgcccccacgcctgccacacccagggccgctgtgaggagggccagtgtgtgtgtgatgagggctttgctggggtggactgcagcgagaagcgctgcccagctgactgccacaacagaggccgctgtgtggatggccgctgtgaatgtgatgatggcttcaccggggctgactgtggggagctgaagtgccccaacggctgcagcggccacggccgctgtgtgaatggccagtgtgtgtgtgatgagggctacaccggggaggactgcagccagctgcgctgccccaatgactgccacagccggggccgctgtgtggagggcaaatgtgtgtgtgagcagggcttcaagggctatgactgcagcgacatgagctgccccaatgactgccaccagcacggccgctgtgtgaatggcatgtgtgtgtgtgatgatggctacaccggggaggactgccgggaccggcagtgcccccgggactgcagcaacagaggcctgtgtgtggatggccagtgtgtgtgtgaagatggcttcaccggccctgactgtgccgagctgagctgccccaatgactgccacggccagggccgctgtgtgaatggccagtgtgtgtgccacgagggcttcatgggcaaggactgcaaggagcagcgctgccccagcgactgccacggccagggccgctgtgtggatggccagtgcatctgccacgagggcttcaccggcctggactgtggccagcacagctgccccagcgactgcaacaacctgggccagtgtgtgtctggccgctgcatctgcaatgaaggctacagcggggaggactgcagcgaggtgtccccacccaaggacctggtggtgacagaggtgacagaggagaccgtgaacctggcctgggacaatgagatgagggtgacagagtacctggtggtgtacacccccacccatgagggcggcctggagatgcagttccgggtgcctggggaccagaccagcaccatcatccaggagctggagcccggggtggagtacttcatccgggtgtttgccatcctggagaacaagaagagcatccctgtgtctgcccgggtggccacctacctgcctgcccctgagggcctgaagttcaagagcatcaaggagacctctgtggaggtggagtgggaccccctggacatcgcctttgagacctgggagatcatcttcaggaacatgaacaaggaggatgaaggagagatcaccaagagcctgcggcggcctgagaccagctaccggcagacaggcctggcccctggccaggagtatgagatcagcctgcacatcgtgaagaacaacacccggggccctggcctgaagagggtgaccaccacccggctggatgcccccagccagatcgaggtgaaggatgtgacagacaccacagccctgatcacctggttcaagcccctggccgagattgatggcatcgagctgacctacggcatcaaggatgtgcctggggacaggaccaccatcgacctgacagaagatgagaaccagtacagcatcggcaacctgaagccagacacagaatatgaggtgtccctcatcagccggcggggggacatgagcagcaacccagccaaggagaccttcaccaccggcctggatgcccccaggaacctgcggcgggtgtcccagacagacaacagcatcaccctggagtggagaaatggcaaggccgccatcgacagctaccgcatcaagtatgcccccatctctggaggagaccacgccgaggtggatgtgcccaagagccagcaggccaccaccaagaccaccctgaccggcctgcggcctggaacagaatatggaattggagtgtctgctgtgaaggaggacaaggagagcaacccagccaccatcaatgctgccacagagctggacacccccaaggacctgcaggtgtctgaaacagctgagaccagcctgaccctgctgtggaagacccccctggccaagtttgaccgctaccgcctgaactacagcctgcccaccggccagtgggtgggcgtgcagctgcccaggaacaccaccagctatgtgctgcggggcctggagcccggccaggagtacaacgtgctgctgacagctgagaagggccgccacaagagcaagccagcccgggtgaaggccagcacagccaaggagcctgagatcggcaacctgaatgtgtctgacatcaccccagagagcttcaacctgtcctggatggccacagatggcatctttgagaccttcaccatcgagatcatcgacagcaaccggctgctggagaccgtggagtacaacatctctggagctgagaggacagcccacatcagcggcctgccccccagcacagacttcatcgtgtacctgagcggcctggcccccagcatccgcaccaagaccatcagcgccacagccaccacagagcccaagccccagctgggcaccctcatcttcagcaacatcacccccaagagcttcaacatgtcctggaccacccaggccggcctgtttgccaagatcgtcatcaacgtgtctgatgcccacagcctgcacgagagccagcagttcaccgtgtctggagatgccaagcaggcccacatcaccggcctggtggagaacacaggctatgatgtgtctgtggccggcaccaccctggccggggaccccacccggcccctgacagcctttgtgatcacagaggccgagcctgaggtggacaacctgctggtgtctgatgccaccccagatggcttccggctgtcctggacagcagatgagggcgtgtttgacaactttgtgctgaagatccgggacaccaagaagcagagcgagcccctggagatcaccctgctggcccctgagaggacccgggacatcaccggcctgcgggaggccacagaatatgaaattgagctgtatggcatcagcaagggccgccgcagccagacagtgtctgccatcgccaccacagccatgggcagccccaaggaggtgatcttcagtgacatcacagagaacagcgccaccgtgtcctggagggcccccacagcccaggtggagagcttccgcatcacctacgtgcccatcactggaggcacccccagcatggtgacagtggatggcaccaagacccagacccggctggtgaagctgatccctggggtggagtacctggtgtccatcatcgccatgaagggctttgaggagagcgagcctgtgtctggcagcttcaccacagccctggatggccccagcggcctggtgacagccaacatcacagacagcgaggccctggcccgctggcagcctgccatcgccaccgtggacagctatgtgatctcctacacaggagagaaggtgcctgagatcaccaggacagtgtctggcaacacagtggagtatgccctgacagacctggagcccgccacagagtacaccctgcgcatctttgctgagaagggcccccagaagagcagcaccatcacagccaagttcaccacagacctggacagcccccgggacctgacagccacagaggtgcagagcgagacagccctgctgacctggaggcctccccgggcctctgtgacaggctacctgctggtgtatgagagcgtggatggcaccgtgaaggaggtgattgtgggccctgacaccaccagctacagcctggccgacctgagccccagcacccactacacagccaagatccaggccctgaatggccccctgcggagcaacatgatccagaccatcttcaccaccatcggcctgctgtaccccttccccaaggactgcagccaggccatgctgaatggagacaccaccagcggcctgtacaccatctacctgaatggagacaaggccgaggccctggaggtgttctgtgacatgaccagtgatggcggcggctggatcgtgttcctgcggaggaagaatggaagagagaacttctaccagaactggaaggcctatgctgctggctttggagacagaagagaggagttctggctgggcctggacaacctgaacaagatcacagcccagggccagtatgagctgcgggtggacctgcgggaccacggggagacagcctttgctgtgtatgacaagttctctgtgggagatgccaagacccgctacaagctgaaggtggagggctacagcggcacagctggggacagcatggcctaccacaacggccgctccttcagcacctttgacaaggacacagacagcgccatcaccaactgtgccctgagctacaagggggccttctggtacagaaactgccaccgggtgaacctgatgggccgctatggagacaacaaccacagccagggcgtgaactggttccactggaagggccacgagcacagcatccagtttgctgagatgaagctgcggcccagcaacttcaggaacctggagggccgcaggaagagggcctag

SEQ ID NO: 310449 - DNA, 5514 bp, Artificial Sequence
  derived and/or modified sequence
atgggcgccatgacccagctgctggccggcgtgttcctggccttcttggctcttgccactgagggcggtgtactgaaaaaggtgattcgccacaaaaggcagagcggggtgaacgccactttacccgaggaaaatcagccagtggtgttcaaccatgtctacaacataaaactccccgtgggttcacagtgttcggtggatctcgaatccgcctccggcgaaaaggatttggccccaccatcggaaccaagtgagtcgttccaggaacacactgttgacggcgagaatcaaatcgtgtttacccacagaataaatataccacggagggcttgcggctgtgccgcggcccctgacgttaaggagctcttaagccgacttgaggagctcgagaaccttgtgtctagtctccgggaacagtgtactgccggcgcaggctgctgtcttcagcctgccactggacgcctggatactaggcccttttgttccggtcggggcaacttttccaccgaaggatgcggctgcgtgtgtgaacctggctggaaagggcccaattgctcagagccagaatgtccgggcaattgccacctccggggacggtgtatcgatggacagtgtatatgtgacgacgggtttacaggtgaggattgtagtcagctggcctgtcccagcgactgtaacgaccagggcaaatgcgtcaatggcgtgtgcatttgtttcgaaggctacgcaggggctgactgctcaagggagatttgtcctgttccttgctcggaggagcacggaacgtgcgtggacggtctgtgcgtttgccatgacgggttcgccggtgatgactgcaacaaacccctgtgcctaaataattgttataatcggggtaggtgcgttgaaaacgaatgcgtgtgcgacgaaggattcaccggggaggattgttccgagctcatctgccccaatgattgctttgacagaggaaggtgcataaatggtacatgctactgtgaggaaggatttactggcgaggattgcgggaaaccaacttgcccgcatgcatgtcacacccaaggacggtgcgaggaaggtcaatgtgtgtgtgatgaaggctttgctggagtggactgttccgaaaagagatgccctgccgactgtcacaatcgcggccgatgtgtggacggcaggtgtgagtgcgatgatggctttaccggcgccgactgtggagagcttaagtgccccaatgggtgctcaggccacggtaggtgtgtgaatgggcagtgtgtttgtgacgagggttacaccggcgaggactgctcacagctcagatgtcctaatgactgtcactctcgaggccggtgcgtagaaggaaagtgcgtatgcgagcaagggtttaaagggtacgattgttcagacatgtcgtgtcctaacgactgccaccagcacggtaggtgtgtgaatggtatgtgcgtctgcgacgatggctatactggggaagattgtcgggaccgccagtgcccaagggactgcagcaatcggggcttgtgcgtcgacggtcagtgtgtctgcgaagatgggtttacggggcccgattgcgctgaactgagctgcccaaatgactgccatggccaaggaagatgcgtgaacggccaatgtgtctgtcacgaaggctttatggggaaagactgcaaggagcaacgctgccctagcgactgccacggccaaggacggtgcgtggatggacagtgcatatgccacgaaggatttactgggcttgattgtgggcaacacagttgtccatccgactgtaataatttgggccagtgtgtatcaggtcgctgcatctgcaatgagggttattctggcgaagactgttctgaagtgagtcctcctaaggacctggtggtgacagaagtgaccgaggagacagtgaacctcgcgtgggacaatgaaatgagagtcaccgaatatttggttgtgtatacccctactcacgaaggcgggcttgaaatgcagttccgagtgccgggcgaccaaaccagcactatcattcaggaactcgagcccggcgttgaatattttattagggtttttgctattctggagaacaagaaaagcattccagtgtcagctcgagtagccacatatttgccagccccagaagggctgaagttcaagagtattaaggagacctcggtagaagtcgaatgggaccccctcgatattgcctttgaaacctgggagatcatttttaggaacatgaataaagaagatgagggtgaaataactaagtccttgcgacgccctgagacctcctatagacagaccggcctagcgccggggcaggagtatgagatttctctccatatcgtcaaaaataacacacggggcccaggtctcaaaagagtgacgaccaccaggttagacgcacctagtcaaatcgaggtcaaggacgtcaccgacacaactgcactgatcacttggttcaagcccttggccgaaattgatggtatcgaattgacttatggcatcaaggacgtacccggcgatcggaccaccattgatctcaccgaagacgagaatcaatactctatcggcaatctgaagccggataccgaatatgaagtgtcccttattagccgtagaggggacatgtcctccaaccccgccaaggagaccttcaccaccggtctcgatgcccccaggaaccttcggcgagtgtctcagacagataattctattaccctggagtggcggaatggaaaagcagccatagactcttaccgcattaagtacgccccaatttccgggggagaccacgctgaagtggacgtcccgaagtcccagcaggcgactacaaagacaactctgacaggtctgaggccaggtaccgaatacggtatcggcgtgtctgcagtaaaggaggataaagagtccaatcccgcgaccatcaatgccgccacagaactcgacacccccaaggatcttcaggtatcagaaaccgctgagacatcactgacactgctgtggaagacaccactggcaaaattcgatcgctacagactcaattatagtctccctacgggacagtgggttggagtacagctgcctaggaatacgactagctatgtcctcagggggctcgagcctggtcaggaatacaacgtgctgctcaccgccgagaaaggacggcataaaagcaaaccagcaagagtcaaagctagcacggccaaggagccagagattgggaatctgaatgtctctgatataacacctgagagctttaacctgtcctggatggccaccgacggtatcttcgagaccttcaccatagaaatcattgatagtaatcggctactcgagactgttgagtataatataagcggcgccgagcgaaccgctcacataagcggactgccaccaagcacggattttatcgtttacctgagcggcctagcacctagtatccggacaaagactatttctgcaaccgctaccaccgaagcccttccactgcttgaaaatttgactatctcagatatcaacccttacgggttcaccgttagctggatggccagcgagaacgcattcgattcattcctggtcaccgtggtggacagcggaaagttgcttgatccacaggagttcactttgagtgggacacaaagaaaactcgaattgcgaggtctaattacaggcataggatatgaggtgatggtgtccggcttcacacaaggccaccagacaaaacccctacgggctgagattgtcactgaggcggagcctgaggtggacaatctgctcgtgagtgatgccaccccagatggctttaggctttcttggaccgcggacgagggggtgtttgacaattttgtattgaagattagagatacaaaaaagcagagtgaacccctcgaaataaccctcctggctcccgagaggacccgggatatcactggcctgcgagaggcaaccgagtacgagatcgaactttatggaatttcgaaaggccgccgctcccagactgtcagtgctatagctaccacagccatgggctctcccaaggaggtgattttctcagatatcaccgaaaacagcgccaccgtgtcttggagggccccaacagcccaggtggagtcgttcagaataacatacgtacctatcactggcggaacacctagcatggttaccgtggacgggacgaagacacagactcgtctagttaagctgatcccaggggtcgagtatctcgtaagcatcatcgcaatgaaaggttttgaagagagcgagcccgtctcgggcagtttcaccacggcattggatggaccttctggattagtaaccgctaacatcactgacagcgaggctctggcccggtggcagcccgccatcgccactgtagactcatacgtgatcagttataccggagaaaaggtccccgagattactaggacagtgagcggcaatactgtggaatacgccttgacagatctcgaacctgccacggaatacaccctcaggatttttgctgagaagggaccccagaaaagttctacaattaccgccaagtttactacagacctggatagccctcgcgatctgaccgccacggaggtacagtcggagacggcactgctgacttggcgaccaccacgcgcttcggtgacagggtatctcctggtgtatgaatctgtcgacggaaccgtgaaagaagttatcgtcggaccagacacaacctcttattcgctggccgacctgtccccgagcactcactacactgccaagattcaggctctgaacggtccacttaggtccaacatgatccagacgattttcacaaccatcgggttgctttacccttttcctaaagactgttctcaggccatgttaaatggcgacaccacgtcgggcctatatactatttatcttaatggcgataaagccgaagcactcgaggtgttttgtgatatgacctccgatggcgggggctggatagtcttcttgcgccggaagaatgggcgcgagaatttttaccagaattggaaggcctatgctgccggcttcggcgatcgcagggaggagttctggctgggcctggataacttaaacaaaatcacagcccaaggccagtacgaacttcgcgtggatcttcgcgaccacggggaaacggcctttgcagtttacgataagttctccgtgggagacgcaaagacgaggtacaagctcaaggttgaaggctattccggcaccgcaggagacagcatggcttaccacaacggaaggagtttctcaaccttcgataaagacactgacagcgcgatcactaactgtgccctgagttacaaaggcgccttctggtacagaaactgccacagagtaaatctgatggggaggtatggggacaataaccatagtcagggtgtaaattggtttcactggaaggggcatgagcacagtatccagtttgctgaaatgaagcttaggcccagtaattttcgtaacctggaaggaagacggaagcgcgcctag

SEQ ID NO: 310450 - DNA, 5517 bp, Artificial Sequence
  derived and/or modified sequence
atgggcgccatgacccagctgctggccggcgtgttcctggccttcctggctctggccacggagggcggagttctaaaaaaagtgattcgccacaagagacaatcaggcgtgaacgcaacgcttcctgaagaaaaccagcctgtggtattcaaccacgtttacaacatcaagctgcctgtgggttcccagtgtagtgtagatttagagtcagcctccggagaaaaggacctcgcaccccccagcgaaccgtccgaaagcttccaggaacacacagtggacggggagaaccagattgtgttcacacatcgcattaacatcccccgccgcgcctgcgggtgcgccgccgctcccgacgtaaaggagctgttgtctaggctagaggagctcgagaatcttgtaagttctctccgggaacagtgcacggctggggccgggtgttgtttgcagcctgcgactgggcggctagatacccggcccttttgttcaggacgcggaaacttctctacagagggttgcggatgtgtgtgcgagccggggtggaagggacccaattgcagcgaacccgagtgtccagggaattgccacctgagaggcaggtgcattgatgggcagtgcatctgcgacgatggattcacaggggaggattgctcccaattggcatgtccgagcgactgtaatgaccaaggcaagtgcgtgaatggagtctgtatttgttttgaagggtatgctggagccgattgcagtcgggagatttgtccagtcccctgctccgaggaacacgggacgtgtgtggacggactgtgcgtgtgccacgatggattcgccggggatgattgcaacaaacctctgtgcctgaataactgttacaaccgaggtcgctgcgttgagaacgaatgcgtctgcgatgaagggttcaccggagaggactgctcagaacttatctgtcccaacgactgttttgaccgcggacgttgtatcaatggaacctgctactgcgaagagggatttacaggagaggattgtggcaaacccacgtgcccccacgcttgtcacacccagggacgatgtgaggaagggcagtgcgtttgcgatgagggattcgccggcgttgattgctccgaaaaacgctgtcccgcagattgccacaacagaggaagatgcgtggacgggagatgcgagtgtgacgacggattcaccggggccgattgcggtgagctaaagtgtcctaatgggtgttccggccatgggcggtgtgtcaacggacagtgcgtgtgcgacgaagggtatacaggagaagattgctcacagctccgttgccccaatgactgtcacagtcgtgggcgctgcgtcgagggcaagtgcgtctgtgaacagggatttaagggatacgattgctcagacatgtcgtgtcccaacgactgccatcagcacggacgttgcgtaaatggcatgtgcgtgtgtgacgacggttacacaggggaggattgtagggaccggcagtgccccagagattgttccaaccgtgggctgtgcgtcgatggtcagtgcgtgtgtgaggacggattcacgggccctgattgtgcagagctgagttgcccaaatgattgtcacggccaaggaaggtgtgtgaacggccagtgtgtctgtcacgaaggcttcatgggcaaagattgcaaagaacagcgctgcccgtcagactgccatggccagggtaggtgcgtggatggacaatgcatctgtcatgagggcttcaccggcctggactgcggacaacattcttgcccctctgactgcaacaacttagggcagtgcgtgagtggtcgctgcatctgtaacgaggggtacagcggagaggactgctccgaagtttcaccacctaaggacctggttgtgacggaggtgacggaagagactgtcaacctggcctgggataacgagatgagagtgacagagtacctggtggtgtacactcccactcacgaaggcggtctggagatgcagttcagggtgcctggcgaccagacatcgaccatcatccaggagctggagcccggagtcgaatacttcatccgcgtgtttgccattctggaaaataagaagtctattcccgtttccgcccgtgtggccacgtatttgccagctccggaaggtttaaaatttaaatccatcaaggaaacaagtgtggaagtcgaatgggatcctctagacatcgcatttgagacatgggagattatctttagaaacatgaacaaggaagatgagggggaaataacaaaatcccttagacgccctgaaactagctacaggcagactggattggcccctggacaggagtatgagatctctctgcatatcgtgaaaaataacacccgcggaccggggttgaagcgtgtgacaaccacacgcctggatgccccgtctcagatcgaagtcaaggacgtaacagataccactgcgctgattacttggtttaaacccttggccgaaattgatggaatagagctgacgtacggaataaaagatgtccccggggatcggactaccattgatttgaccgaagacgagaatcagtactccatcggcaacttaaagcctgacacagagtacgaagtcagcctgatcagtcgccgaggggatatgtcctcaaaccctgcgaaggagacgtttactactggcctggatgccccccgcaatctcagacgcgtaagccagacagacaattctatcacacttgagtggagaaatggaaaggctgcaatagattcgtataggattaaatacgcccctatatctggcggcgatcacgcagaggtggatgtgcctaagtcgcagcaggcaaccaccaagaccaccctgaccggtctcagacctggaacggaatacggcatcggggtttcagcagtgaaggaggacaaggaaagtaatccagcaacaatcaacgctgcaacagagctcgacactcctaaggacctgcaggtttctgaaacggctgaaaccagcttgacactgctctggaaaacacccctcgcaaagtttgatagatacagactcaattatagcctcccaaccggccagtgggttggggttcagctcccccgcaacaccacatcatacgtgcttagggggttggaacccggccaggagtataacgtcctgttgaccgccgagaagggccggcacaaaagtaagcctgccagggtgaaggcctctacagccaaggaaccagagattgggaacctgaacgttagtgatattactccagagtcattcaatttgtcttggatggcaaccgacggaatctttgaaaccttcactattgagattattgattccaataggctgctcgagacggttgaatacaacatctcaggcgcggagagaaccgcacacatctcgggattgccacccagtactgactttattgtttatctctccgggctggcgcccagtatcaggaccaaaaccatctccgcaaccgccacgacggaacctaagccccagctcgggacactcatttttagcaatatcacgccaaaaagtttcaatatgtcatggactacccaggcaggcctgtttgcaaagattgtgatcaatgtcagcgacgctcactcccttcacgagtctcagcaattcacagtgagtggcgatgccaaacaagcccacattaccggccttgttgagaatacaggatatgatgtgtcggtcgcgggcacaaccctagctggtgatcccaccagacctctgactgccttcgtgattacggaagctgagccagaggttgacaatttgttggtttccgacgctacacccgatgggtttaggctgagctggaccgccgatgagggcgtgttcgacaattttgtgctgaaaattcgcgacactaaaaagcagtcggaacctcttgagattacgctgcttgcccctgagcgtacaagagatatcactggtttgcgcgaggcaacagagtatgaaatcgaactgtacgggatctcaaagggcagaagatctcaaaccgtctctgctatagcgactaccgccatggggagccctaaagaagtgatctttagcgacatcaccgaaaacagcgctactgtgtcttggcgagctccgacagcacaggtggagtccttcagaataacctacgtacccattactggggggaccccatctatggtcactgtggacggcaccaagactcagacacgcctggtcaagctgattcctggagtggaatatctggtctccattatcgctatgaagggtttcgaggaatctgaacctgtaagtggaagttttaccacggcactggacggccctagcggacttgtaacagccaacataactgacagtgaggcgttagcaagatggcagcctgcaatagccacagttgacagctacgtaatcagctacacgggagagaaggtgccagagatcacaagaacagtatctgggaatacagtggaatatgccctgacagacttggaacccgctaccgagtacacgctgcgaatctttgcggagaagggcccacaaaagagcagcaccatcaccgctaagttcactaccgatctggactcccctcgagacctcaccgcgaccgaggtccagagcgaaacggcattgcttacgtggcgaccccctcgggccagcgttactggctatctgcttgtgtacgagtccgtcgacgggaccgtgaaggaggttatagtgggtcccgacaccacaagttacagccttgctgacttgtcaccatccacccactacacagccaagattcaagcattgaacggacccttgagatccaatatgatccagactattttcaccacaatcggactcttgtaccctttccccaaagactgcagtcaagcaatgttgaacggggacacgacttccggactttatactatatatctgaacggagacaaagcagaagcgctggaggtgttctgtgacatgacgagtgacggcggcgggtggatcgtcttcctgaggaggaaaaacgggcgcgagaatttttatcagaactggaaggcgtacgcagccggcttcggggaccgcagagaagagttctggttaggcctggataatctaaataaaattaccgctcagggccagtacgaactgcgggtggatctgagagatcacggcgaaaccgcttttgctgtttatgacaaattcagcgtcggagacgccaagactcggtacaagctgaaagttgaggggtacagcggcactgctggggatagcatggcctatcataatggacgtagctttagtacatttgacaaggatacagactctgcgatcactaactgtgccctgagttacaaaggtgctttttggtaccgcaactgccacagagttaatcttatgggacgctacggcgacaataatcatagccaaggcgtaaactggtttcactggaagggacacgagcattccattcaattcgctgagatgaagctccggcccagcaatttccggaacctcgaaggtcgcagaaaacgggcttag

SEQ ID NO: 310451 - DNA, 5514 bp, Artificial Sequence
  derived and/or modified sequence
atgggagcaatgacccagctgctggctggagtgtttctcgcgttcctggctctggcgactgaaggaggcgtgctgaaaaaggtcatcagacataagcgccagagtggagtcaatgcaacccttccagaggagaaccagccagtggtcttcaatcatgtttataacatcaagttgccggtaggatctcaatgcagtgtggacttggaatcggcctccggtgagaaggatcttgcccctccctccgagccttccgaaagcttccaggaacatacagtcgacggcgaaaaccagatcgtctttacgcaccggataaacatccccagaagagcttgcggttgcgcagcggctcccgacgtcaaagagcttttgtctcggttagaggagttggagaatctggttagttccctgcgggaacaatgtacagccggagcgggatgttgcttgcagcctgcaacgggcaggctggatacacgcccattttgctccgggagagggaatttctcgaccgaaggctgtgggtgcgtctgtgagccgggatggaaggggcctaactgtagcgagcctgaatgccccggaaattgccaccttaggggcaggtgcatcgatggccagtgtatctgcgatgatggtttcaccggagaagactgcagtcagctggcttgcccctccgactgtaatgatcagggcaaatgcgtcaatggagtgtgtatctgctttgaggggtacgctggagcagattgctcccgtgagatttgcccagttccgtgttctgaggaacacggaacctgtgtcgacggactttgcgtatgccatgacggatttgccggagacgactgcaacaagcctctctgtctgaacaattgctacaatagaggcaggtgcgttgaaaatgagtgtgtgtgcgacgaagggtttactggtgaagattgctcagaactaatatgccctaacgactgttttgataggggcagatgtattaatggaacatgctactgtgaggaaggatttaccggcgaggactgcggaaagccaacttgcccccacgcctgtcacactcaggggagatgcgaggaggggcagtgcgtttgtgacgagggcttcgcaggggtggactgcagcgagaagcgctgccccgctgattgccacaacagggggagatgtgtggatggacggtgcgagtgcgatgacggatttaccggtgctgactgtggcgaattaaagtgccccaatgggtgttccgggcatggacggtgcgtaaacggacagtgcgtttgtgacgaaggatatacgggcgaggattgttctcagctaaggtgcccaaatgactgtcacagcaggggtcgttgtgtggaaggcaagtgtgtgtgtgagcaggggttcaagggttacgattgcagcgatatgagctgccccaatgattgtcaccagcacggccgatgcgtcaatggcatgtgtgtttgcgacgatggatacaccggggaggactgtagagatcgacagtgcccccgagactgctcaaacaggggcctctgcgtggacgggcaatgtgtgtgtgaggacggatttactggccctgactgcgccgaactttcttgcccaaacgattgccacgggcagggacgctgcgtcaacggacagtgcgtctgccacgaaggcttcatgggaaaagattgcaaagaacagcggtgtccctcagactgccacggccagggtcgatgtgtggacgggcagtgcatctgccacgaggggttcactggattggattgcgggcagcacagttgtccgagcgattgcaacaatcttggccaatgcgtgtccgggagatgcatatgcaatgaaggctacagcggggaagactgcagtgaagtctcccccccaaaagacttagtggttacagaggtgactgaagaaacagttaatctggcctgggacaacgagatgagggtgacagaatacctcgttgtctacacccctacccacgaaggaggtttggagatgcaattcagagttcccggagaccagacctcaactatcatacaagagctggaacccggtgtggaatactttattagagtgttcgcaatactggaaaataagaaaagtatccccgtctccgccagagtggccacctatctgccagcaccagaaggccttaagttcaaaagcattaaagagacatcagttgaagtggagtgggaccccttggacattgcttttgagacttgggagattatctttcggaacatgaacaaggaggacgaaggagaaatcaccaaatctttgcgcagacccgagacctcctacagacagaccggtctggcacctggacaagaatatgaaatttccttgcacatcgtcaaaaacaatacccgcggtccgggattaaagagagtcaccactacccgattagatgcccctagccagatcgaagttaaagatgttactgatactacagctttgatcacttggttcaagcccctcgctgagatagacgggatcgagctgacatatggcatcaaagatgtgcctggggatagaacaaccattgatctgactgaagacgaaaatcaatacagcattggaaacttgaagcccgacactgagtacgaggtgtcactgatctcacgtaggggggacatgtcttccaacccagcgaaagaaacattcacaaccggcttggacgctccacgaaatttgcgccgagtgagccagacagataacagcatcacattggaatggagaaatggcaaagctgcaatcgatagttatcggattaagtatgctcccataagtgggggtgaccatgccgaggttgatgtgccaaagtctcaacaggcaacaaccaaaaccaccctcacagggctgcgtcctggaacagaatatggcatcggcgtgtcagctgtaaaagaggataaagaatccaacccagcaactatcaatgccgctacagagctcgacactcctaaggatctccaagtgtcagaaacggccgagaccagtctcacactgctgtggaagacccctctggcaaaattcgatagataccggctcaactactcccttcccacaggacagtgggttggcgttcagctgcctaggaataccacatcttatgtgcttaggggtctggaaccgggtcaggagtacaatgttcttcttaccgccgagaagggtcggcataagtccaagcccgctcgggtgaaagcttctaccgcaaaggaacccgagattggcaatctcaatgtcagtgacattacaccagagtctttcaacctcagttggatggccaccgatggcatcttcgagacattcacaatagagattatcgattccaatcgcctcctggaaacagtggagtacaatattagcggtgctgaacggaccgcacacatctccggactgcccccatcaactgacttcattgtatacctgtccggactagcaccgtctatcaggacaaagactatctccgccacggctaccactgaggctctgcccctactggaaaacttgacaatatccgacataaatccctacgggtttaccgtgtcctggatggcctctgaaaacgccttcgacagctttctggttacagtcgttgacagcggtaaactgctcgaccctcaggaattcaccctttcaggcacccagaggaaactggaattgagggggttaattaccggaatcgggtacgaggttatggtgtctggattcacacaggggcatcagactaagcctttacgagccgagatcgttacagaggcggaaccagaggtggataatttactcgtgtccgatgccacaccagatggtttccgcctaagttggacagcggacgagggtgttttcgataattttgtgttgaaaattcgcgatacaaagaagcaatccgagccgctggaaatcaccctcctggcccctgagcgtacccgcgacatcactggcttgagggaggcgactgagtacgagatcgaactgtatgggatcagtaaggggaggagatctcaaactgtgtctgccattgcaaccacagccatgggaagtccaaaagaggtcatcttctctgacataaccgagaactcagctacggtgagctggcgcgctcccaccgctcaggtggagtcttttcggattacctatgtccccatcactgggggaacaccaagcatggttaccgttgatggtacaaaaacacaaaccagattggttaagttaatcccgggagtggagtacctggtgtcaataatcgcaatgaagggatttgaggaatctgaacccgtctccggctctttcaccaccgccttggacgggccttcggggttagtgacggcaaacataactgacagcgaggccctggctagatggcaacccgctatagccactgtcgacagttatgtgatttcctacaccggcgaaaaggtgcccgagatcacccggaccgttagcggtaacaccgttgagtatgcccttaccgatctcgagcctgccactgaatatactctgaggatctttgctgagaaaggaccgcagaaatcctctactattacagccaagtttacgacggatcttgactcaccaagggatctcacagccacagaggttcaatccgagaccgcccttctgacctggcgccctcccagggcctctgtgaccgggtatctcctagtttacgagtctgtggatggaaccgtcaaagaagtcatcgtcggacctgacaccacgtcatatagcctcgccgaccttagtccttccactcactataccgcgaaaattcaggcactgaacggtccgctccgctccaacatgatccaaaccatcttcacaaccatcggactgttgtaccctttcccgaaggactgctcccaggccatgctgaatggtgacactacttccggcttatacaccatatatctcaatggagacaaggctgaggcattggaggtcttctgcgatatgacctctgacggcggtggttggattgtattcttacgacgcaagaacggacgagaaaatttttaccagaactggaaagcctatgctgccggttttggagacagaagagaagaattttggctcgggctggataatctcaacaagattaccgctcagggccagtatgaactgcgcgtcgacctacgcgatcacggcgagactgcatttgcagtgtatgataaattcagcgtcggggatgctaaaactcgctataagctaaaggtggaaggctattctggaactgcgggtgactcaatggcctatcataatggccgtagtttctcaacctttgacaaagacactgattccgcgatcaccaattgtgcactgtcctacaagggggctttctggtaccggaactgccacagggttaaccttatgggcaggtacggggataataatcatagccagggagtgaactggtttcattggaagggacacgaacactccatccaatttgcagagatgaaactcaggccaagcaatttcagaaacctcgaggggaggcgcaagcgcgcttat

SEQ ID NO: 310452 - DNA, 5516 bp, Artificial Sequence
  derived and/or modified sequence
atgggcgctatgacccaactcctggcaggtgtgttcctggcattcctagccctggcgacggagggcggagtgctgaagaaggtcatccggcacaagcgccagtctggcgtgaatgccaccctgccggaggagaaccaaccagtggtgttcaatcatgtatataatatcaaactgcctgtcggatcacagtgctccgtagatcttgagtcagctagcggtgagaaagacctcgctcctcctagcgagccttccgagtcctttcaggaacacactgttgacggtgaaaaccagattgtattcacccatagaatcaacataccaagacgggcatgtggatgcgcagccgctccagacgtaaaggagctgctaagtaggctggaggagctggaaaacctagtaagttccctgcgcgagcagtgcacggcgggagcaggatgctgcttacaaccggctacgggcagactagacacccgcccattttgttctggacgcggaaattttagtacggagggttgcgggtgcgtgtgtgaacctggctggaaaggtcccaattgttctgagcctgagtgcccaggtaattgtcatttaaggggaaggtgtatcgatggccagtgtatctgcgacgacggctttaccggggaagactgcagtcagctggcctgtccatccgattgcaacgatcagggcaaatgtgttaacggggtgtgcatttgtttcgagggctatgcaggagctgattgctcacgggaaatctgtcctgtgccttgctcagaggaacacgggacctgtgtggatgggctgtgcgtatgtcacgatggattcgctggagacgattgcaacaaacccctctgcctaaataattgttacaatcggggacggtgcgtggaaaatgaatgtgtgtgtgacgagggctttactggagaagattgcagcgaactaatatgtccaaacgattgcttcgaccgtggtcggtgcattaatggaacctgttactgcgaagaaggcttcacgggagaagattgcgggaaacccacatgtccacacgcctgtcatacgcagggcagatgcgaggaaggccagtgtgtgtgtgacgagggcttcgccggtgtggattgctctgagaagagatgccctgccgattgtcataatagggggcgttgtgtggacgggcgatgtgaatgcgacgacggcttcaccggagcagactgcggtgagctgaagtgcccaaatgggtgttcaggccatggcaggtgcgtcaacggacagtgtgtgtgtgatgagggctacaccggtgaggactgttctcagttgcggtgtccaaacgattgtcatagtcgaggccgttgcgtcgagggcaagtgcgtgtgtgagcaggggtttaagggatacgactgtagcgatatgtcttgcccaaatgattgccaccaacacggcagatgcgtgaacggtatgtgtgtttgcgatgatggctatacaggggaagattgcagggaccggcagtgtcccagggattgcagtaaccggggactatgtgtggacggccaatgcgtgtgcgaggatggttttactggacccgactgtgccgaactcagctgtccaaatgattgtcatggacagggcagatgcgtgaacgggcagtgtgtgtgtcacgaaggctttatgggcaaagattgcaaggaacaacgctgtccctcggattgccatggtcagggcagatgtgtggatggacagtgtatttgtcacgaaggctttacaggacttgactgcggtcaacatagctgcccttctgattgtaacaatctaggtcaatgtgtgtccggacgctgcatctgcaacgaaggttatagcggcgaggattgcagtgaggtgtcacctccaaaagatctggtagtgaccgaagtgaccgaggaaacggtcaatttggcctgggataacgaaatgcgggtgactgaatacctcgtagtttacacacctacccatgagggaggcttggagatgcaatttcgggtgccgggagaccaaacttctaccattatccaggaactggaacctggggtggaatatttcattagggttttcgcaattctggagaataagaagagtatccctgtttcggctcgggtcgcaacatacctgccagccccagaaggcctaaaattcaaaagcataaaggagacatctgttgaggttgaatgggatcccctcgatatcgcattcgagacatgggagataatattccgcaacatgaacaaagaggacgagggagagatcactaaaagtctgaggagacctgaaacaagctacaggcagacgggactggccccagggcaggagtacgagattagtctgcatatcgtgaaaaacaacacccgcggtcccggacttaagagggtgaccactacgaggttagacgccccttctcagattgaggtaaaggatgttactgatacgacagcactcattacgtggttcaagccacttgcagaaatcgatggaatagaacttacgtacggcatcaaggacgttcccggtgaccggaccaccattgacctgactgaggacgaaaatcagtactctattggcaacttgaaaccggacaccgagtacgaagtgtcgttgatcagccgcagaggagacatgtcttctaacccagcgaaggagacttttaccacaggtttggatgccccaaggaatctgcgccgagtgtctcaaaccgataacagtatcacactggaatggcgcaacggaaaggctgcaattgacagctaccgcatcaaatacgcccctatctccggcggagatcatgccgaagtggatgtgccgaaaagtcagcaagccacaacaaagaccaccctaacaggcctgcggcctggcactgagtacggtatcggcgtatccgcggttaaggaggacaaggagagcaacccagcaaccattaacgcagcgactgagctggacactccaaaagacctgcaggtgtcagaaacagcggaaactagcctgactctcttatggaagacgcccttggcaaagtttgatcgctaccgcctgaattattcactgcccaccgggcagtgggttggagtccaactgcctcgcaacactacttcatatgtcctcagaggactggagccaggtcaggagtataacgtgttgctgaccgccgagaaggggaggcacaaaagcaagcctgctcgtgttaaagctagcaccgccaaggagcccgagattggcaacctaaacgtttctgatatcactcccgaaagttttaatttgtcctggatggctacagatggcatcttcgaaacgttcacaattgagattatagacagcaacagactgcttgagaccgttgaatacaacattagcggtgccgaacgcaccgcgcacatcagcggcctgcccccaagtacagactttatcgtgtatttgtccggcctggccccaagcataaggacaaagactatatccgcaacagccaccacggagcccaaaccccaacttggcacactgatctttagcaacataaccccaaagtccttcaacatgtcatggacaacgcaagcgggactgtttgcgaagatagtgattaatgtatccgacgctcactccctccacgagagccagcaattcacagttagcggggacgccaaacaggcccacatcactgggctggtagagaacacaggatacgatgtcagtgtggccggaactacactggcaggtgacccgactcgcccactcaccgcatttgtgataacagaagccgagcccgaggtggataacctcctagtgtctgatgccacccccgatggttttcggctttcgtggaccgcggacgaaggagtgtttgacaattttgttctgaagattcgcgataccaagaagcagtctgagccactcgaaatcacactgctggcgcctgagcgcaccagagatatcaccggtctccgcgaggctacagaatacgagatagaactctatggcatcagcaaggggaggcgatcacagaccgtgagtgctatagccaccacagccatgggatcaccaaaggaggttatattcagcgatatcaccgagaattcagccacagtgtcatggcgggcacctacagctcaggtggaatccttcaggattacgtacgtgccaatcacggggggaacaccttcaatggtgactgtggacgggacaaagacccaaactagactcgtgaagctgatcccaggcgtggaatatctcgtgtctattattgctatgaagggcttcgaagagagcgagccagtttctggaagtttcacgactgcattggatggaccttctgggctggtcacagccaatattacggactcagaagctctcgcaagatggcagcctgccattgctaccgtggattcctacgtaattagctacaccggagagaaagtgcccgagatcactcgaacagtttccgggaacactgtagaatacgccttgacggacttagagccggctactgagtatactctgaggatctttgccgagaaaggaccccagaagtcttctactatcactgctaagtttacaacagaccttgacagcccacgggatctgaccgcgactgaagttcaatctgaaaccgccctgcttacttggagaccccctcgcgcatctgtcacaggttacctgcttgtgtacgaaagcgtggatggcaccgtaaaagaagtcatcgtggggccagacactacatcatactcccttgcagacttgtccccaagcacgcattacaccgcaaaaattcaggcactgaacgggcctctgaggtcaaacatgatccagacaatctttaccactatcgggttgttgtacccctttcccaaggactgttcacaggctatgttgaacggagacacaacatccggactctatacaatttatctcaatggtgacaaagcagaggccctggaagtgttctgcgatatgacaagtgacggcggaggatggattgtgttcctgcggagaaaaaatggcagagagaacttttaccagaattggaaagcctacgccgctgggttcggcgatagacgcgaggaattctggctaggactagataatttgaacaaaatcactgcccaggggcagtatgagttaagagtggacctcagggatcacggtgagacggcgtttgcggtttacgacaagttttccgtcggagatgccaagacccgctataagctcaaagtggaaggatactcaggcactgccggtgacagcatggcctaccataacggacggagcttctccactttcgacaaggataccgacagcgccatcactaattgcgccttatcgtataaaggcgcattttggtataggaattgccacagagtgaacctgatgggtaggtacggtgataacaatcactcgcagggggttaattggtttcactggaaggggcacgagcactcgatccagttcgccgagatgaaactacgcccttcaaacttccgaaacctggagggcagacggaagagagccta

SEQ ID NO: 310453 - DNA, 5514 bp, Artificial Sequence
  derived and/or modified sequence
atgggagcgatgacccagctgctggcgggtgtgtttctggctttcctggctctggctaccgagggtggcgtgcttaaaaaagtgatccgccataagagacagtccggtgtcaacgctacattgcccgaggaaaaccagcccgtggttttcaaccacgtgtacaacatcaaactgccagtgggctctcagtgctcagtggacctcgaatccgctagtggcgagaaggatctcgcgcctccgagcgagcctagcgagagtttccaggaacacactgtagacggcgaaaaccagattgtctttacgcaccgcatcaacattcccagacgagcatgcgggtgcgccgcagctccagacgttaaggaattgctcagtcgccttgaggaactggaaaacctggtgagcagcctgagagaacagtgtactgctggtgctgggtgctgtctgcagccggcaacgggaagattagatacccgtcctttctgttctggcagaggaaacttctcaaccgaaggatgtggatgcgtctgcgagcctgggtggaaaggcccaaattgttccgagcctgaatgcccagggaattgccatttacgggggcggtgtatcgacggacagtgcatctgcgatgacgggttcacaggcgaggattgctcccagctcgcttgtcccagcgattgtaacgatcagggaaaatgcgtaaacggcgtgtgcatttgctttgaaggttacgccggagctgactgctcccgcgaaatatgtccggtgccctgtagcgaagagcatggcacttgcgtggacgggctgtgcgtctgtcacgacggattcgctggtgatgactgcaacaagccactgtgcctcaataattgctacaaccgggggagatgtgtggagaacgaatgcgtctgtgacgaaggtttcactggtgaggattgttcggaactgatttgtccaaatgactgtttcgatcggggaaggtgcatcaacggaacatgttattgtgaagaggggttcacaggcgaggactgtggcaagccaacttgtccgcacgcgtgtcatacacagggacgctgtgaagagggacaatgcgtttgcgacgagggtttcgccggcgttgactgttctgagaagcggtgccccgctgactgccacaaccgggggcggtgtgtcgatggacggtgtgaatgcgacgacggctttaccggagcagactgtggagagctcaagtgccctaacggatgttccggacatgggcgctgcgtcaacggccagtgcgtgtgtgatgaggggtacacaggtgaagattgtagtcaattgcggtgtccgaacgattgccactcaagaggacgctgcgtggagggaaagtgcgtgtgcgagcaaggatttaaggggtacgattgttccgacatgtcatgtcccaatgactgccaccagcacggtaggtgtgtgaacggcatgtgcgtgtgcgatgacggctacaccggcgaggattgccgcgatagacagtgtcctcgtgattgctctaatcggggcctctgtgtggatggccagtgtgtttgtgaagacggctttacagggcccgactgcgcggagttaagctgcccaaatgattgccacggccaggggagatgcgtgaatggccagtgcgtgtgccacgaggggtttatggggaaggactgtaaagaacagagatgtcccagcgattgtcacggccaaggccggtgtgtggacggccaatgtatttgccacgaaggctttacgggactcgactgcgggcaacattcctgcccatcagactgcaacaatctcggacagtgcgtctcagggcgctgtatttgcaatgaggggtacagtggggaggattgttctgaagtatcgccccccaaggatctagtggtgaccgaagttacggaagagacggttaacctcgcatgggataatgaaatgagggtgaccgagtacctggtggtttacacccccactcatgaaggggggctggagatgcaattccgagtccccggcgaccagaccagcacaatcatccaggaattagaacctggcgttgagtatttcatccgcgtgttcgccatacttgagaacaaaaagtctatcccagtttctgccagggtggccacttacctgccagcccctgagggcctgaagtttaagtcaatcaaagagacttccgtcgaagtggaatgggatcccctcgatattgcctttgagacgtgggaaataatatttagaaatatgaacaaggaagatgagggagagatcacaaagtccctcaggcggccagagacatcttaccggcagacaggcctggctcccggacaagaatacgagatttccctacacatagtgaagaacaacacacgtggacccggtctcaagcgcgttaccacaacaaggctcgacgcccccagccaaatcgaggtgaaagacgtgaccgatactaccgcactgatcacatggtttaagcccctcgccgagatcgacggcatcgaactcacctatggcatcaaggacgtgccaggtgaccgcactaccattgacctgacagaagatgaaaatcagtatagcattggcaacctgaagcccgacaccgaatacgaggtaagtttgatatccagaaggggggatatgtcatctaaccctgccaaggaaaccttcaccaccgggctcgacgccccacgtaacctccgaagagtctcccagactgataatagtattacattggaatggagaaatggaaaagctgccattgacagctacagaataaaatatgctcctataagtggaggggaccacgcagaagtggacgtgccaaagagccaacaagccacgaccaagaccacccttaccggcttgcggcccggaaccgaatacggaataggtgtgagcgcagtgaaggaagataaagaatcaaatccagctactatcaatgcagctactgagctagacacccctaaggacctccaagtcagcgagacagctgagacctccctgacattactatggaaaaccccacttgcgaaattcgaccgttacaggctcaattatagtctaccaaccggccagtgggtgggagtccagctccctagaaatactacatcatatgtcctgcgcggcttagaacctggccaggagtataacgtcctgcttacagccgaaaagggccggcacaagtccaagcctgcaagagtgaaagcaagtactgcaaaagaacccgaaatcggaaacctgaatgtgtcggacataacaccggagtcctttaatctctcttggatggctaccgacggcatatttgagacatttaccatcgaaatcatagattccaaccgactgcttgagaccgttgaatataacatcagtggggccgaaagaacggcgcacatatccggtctcccacccagcactgatttcatcgtttacctgagtggcctagctcctagtatacggactaagactatcagcgcaacagcgaccactgaagctctccctctcttagaaaatttaaccataagcgatatcaatccttacgggttcaccgtgagctggatggcttctgaaaacgcctttgatagttttctggtgacagtcgtcgactctggtaaactgctcgacccccaggagtttacattgtctgggacccaaagaaaattggaactgagaggcttgattaccggcatcgggtacgaggttatggtgtcaggatttacccagggccatcagactaagcccctgagagcagagatcgtgacagaagctgaacctgaagtagataatctcctggtcagcgatgcgacgccggatggatttcggttgtcttggacagccgatgagggcgtgttcgataatttcgtgctgaagatacgcgacaccaaaaagcagtcggagccattggagattactttactcgctccggaacggacaagggatataaccggactaagggaagctacagagtacgaaatcgaactgtacggaatctctaagggccggaggtcacagactgttagtgcaatcgccaccaccgccatgggctcaccgaaggaggtcatattcagtgatattaccgagaatagtgccactgtgtcctggagggcaccgactgctcaggtggaaagcttccgaatcacctatgtgcctattacgggggggacaccttctatggttactgtggacggcaccaagacacagactaggctggtgaaattgatccctggagtggagtacctggtatccatcatagccatgaagggttttgaagaaagcgagcccgtgagtggctcgttcacaacagctctggatggcccatccgggttagtcacagcaaacattacagatagcgaagccctggcccggtggcagccagctattgccactgtcgattcatacgttatctcctatacaggcgagaaagtacccgaaatcactagaacggtgagtggtaacactgtagaatacgcgcttactgacctggaacccgccactgagtacactttaaggatattcgctgaaaaagggccgcagaagagctccaccatcacagctaaattcaccaccgatttagattctcctcgtgatctcaccgcgaccgaggttcagtccgaaactgcactattgacgtggcggcctccccgggcatcagtgaccggatatctgctcgtgtatgaatccgtcgatggcacggtcaaggaggtgatagtaggccctgatacaacatcctatagcctcgccgatctgtccccatctacacattacaccgctaaaattcaggctctaaatggcccattaaggagcaatatgattcagaccatttttaccaccatcggactcttgtatccttttcctaaggactgttcacaagccatgctgaacggtgacactacctcggggctgtacacaatctatttgaatggagataaggccgaggctttggaggtgttttgcgatatgacttccgatggcggcggctggatcgtgttcttaagaaggaaaaacggaagagagaatttctatcaaaattggaaagcctatgccgcaggattcggcgatcgaagagaggagttctggttgggcctcgataatctgaataaaattacagcccagggacagtacgaattgagagttgacttgcgtgaccatggggagaccgcttttgcagtgtacgacaaatttagcgtaggcgacgcaaaaacccgttataaactgaaagtggagggatattccggcacagccggcgacagtatggcctatcataatggcagatcgttcagtacctttgacaaagacactgactccgccattacgaactgtgcgctttcctacaaaggagccttctggtaccgaaactgtcaccgtgtgaaccttatgggcagatatggtgacaataaccacagccagggcgtcaactggttccactggaaagggcatgaacatagcattcagttcgcagaaatgaagttaagaccgtcgaacttccgcaaccttgaaggtaggaggaaacgcgcgtag

SEQ ID NO: 310454 - DNA, 5517 bp, Artificial Sequence
  derived and/or modified sequence
atgggcgctatgactcagttgctagctggagttttcctcgcatttcttgcactcgcgaccgagggaggtgtactgaaaaaagtgatcagacataagaggcagtccggcgtgaatgcaactttgcccgaggagaatcaaccggtggtgttcaaccatgtatataacattaagcttcctgtcggctcccagtgctctgtggacctagaatccgcatccggagagaaggacctggcccccccgtctgagccaagtgaatcctttcaggagcacaccgtggatggagagaaccagatcgttttcacccaccgaatcaatatacctcggcgggcatgcggctgcgccgccgccccagatgtgaaggagttgctgtctcgtctggaagagctcgagaacctcgtgtcttcgcttcgagaacaatgcactgcaggagcggggtgctgtttgcagcctgcaactggacggctcgatacccgcccattttgtagcggacgaggtaattttagcactgagggctgtgggtgcgtgtgcgagcccggctggaagggccccaactgtagcgaaccagaatgtcccggcaactgtcacctccggggtaggtgtattgacggacaatgcatttgtgatgatgggttcacaggcgaggattgctcgcagctcgcctgtccatccgattgcaatgatcagggcaaatgtgtgaacggagtgtgtatctgcttcgagggatatgctggggccgactgctcacgagagatctgcccagtgccctgctccgaagaacatggaacctgtgtcgacggcttgtgcgtttgccacgatggatttgctggggatgactgcaacaagccactctgcctgaataactgctacaaccggggacggtgcgttgaaaatgaatgtgtctgcgatgagggctttactggggaggactgcagcgagctgatttgtcctaacgattgtttcgatcgtggccgttgcatcaatgggacatgttattgcgaggaaggattcaccggggaagactgcgggaagccgacttgtccccatgcgtgccacacacaaggaagatgcgaggaaggccagtgcgtgtgcgatgaaggattcgcgggcgttgattgttccgagaaacgatgccccgcggattgtcacaatagaggtcgctgcgtcgacggcaggtgtgaatgtgacgatggttttacaggcgcagattgcggcgagctgaaatgtcctaacggatgttctggccatggtcgctgtgtgaacggacagtgtgtgtgcgacgagggctatacgggcgaagactgcagccaactcagatgcccaaacgactgccacagcagaggacggtgtgttgaaggaaaatgcgtttgcgagcagggttttaagggatacgattgctccgatatgtcttgcccaaatgactgtcaccaacatggacggtgtgtaaatggcatgtgtgtgtgcgacgacgggtatacaggcgaggactgtcgcgaccgccaatgcccgcgggactgttccaatcggggactgtgtgtggatggacagtgtgtgtgcgaagacggttttaccgggcccgactgcgcagagctgtcttgtcctaacgattgccacgggcaggggcgttgcgtcaacggccagtgtgtgtgccatgaaggcttcatgggtaaggactgtaaggaacaaaggtgcccctccgattgtcatgggcaggggagatgcgtcgatgggcaatgcatttgccatgagggatttaccgggttggactgcggccagcattcttgcccatctgactgtaacaacctcggtcaatgtgtgtccggtcgctgtatctgcaacgagggctacagcggcgaggactgcagcgaagtgtcaccgcccaaggatctggtcgttacggaggttaccgaggagactgtgaaccttgcatgggacaatgagatgagggtgacggagtaccttgtcgtgtacactccgactcacgaaggcggcctcgagatgcagttcagagtgcctggagatcagacgagcaccattatacaggaacttgagcccggagtcgagtattttatcagagtcttcgccattctcgagaacaaaaaatcaatacctgtcagtgcccgcgtcgccacatacttgccagcgccagagggcctcaagtttaagtctataaaagagaccagtgtggaggtagagtgggatcccttggacattgccttcgaaacctgggaaataatttttcgtaatatgaataaggaagacgaaggcgagatcacgaagtccctacgcagacctgaaacctcatatcggcaaactgggttagcccctggccaggagtatgaaatctccttgcacattgttaagaataacactcgtggcccagggctcaagagggtaacaacaacaagattagacgccccctctcagatcgaagtaaaggacgttactgataccactgcactcatcacttggtttaagcccctggctgaaattgacggtattgagctcacgtatggaataaaggatgtccccggcgacaggacgacgattgatcttactgaagacgaaaaccagtacagtattgggaacttgaaaccagacaccgagtatgaggtgtccttaatcagccgccgcggcgatatgtcctccaacccagcaaaggagactttcaccaccggactggatgcaccccgtaaccttcggcgcgtgtcacaaaccgataactcaattacccttgagtggagaaatggaaaagctgcaatcgactcttaccgcatcaaatacgccccaatctccgggggcgaccacgccgaggtcgatgttcccaaatcccaacaggctacaactaaaacaacccttactggactgagaccaggaaccgagtacgggatcggtgtttccgcagtgaaggaggacaaggagtccaaccctgccaccattaatgcggccacagaacttgacaccccaaaggatctgcaggtgtcagagactgccgaaactagcctgaccttattgtggaagacccctctagccaagtttgaccggtatagattgaactactcactgcccacaggtcaatgggttggtgtacaactgccaaggaataccacctcctatgtgctcagaggactggagcccggtcaggaatataatgttctactaaccgcggagaagggaaggcacaagagtaagcctgcccgagtaaaagcaagcactgctaaggaacctgagatcggtaatcttaacgtcagcgacataactccagagtcctttaatctcagctggatggcaaccgacggtatttttgagacgtttactatcgagatcattgatagtaacaggttgctggaaactgtggagtataatatctctggcgctgagcgtaccgcacacatttccgggctcccaccctcgaccgattttattgtatatctctctgggcttgcaccttcaatccggacaaaaaccatctccgccactgctactacagagccaaaacctcagctgggaaccctaatcttcagcaatatcacacctaagtccttcaatatgtcatggaccactcaggcaggtttgttcgccaagatagtgattaatgtgagtgatgcgcatagtttacatgaatcccaacaatttactgtgtccggcgatgccaaacaggcccatattacaggcttggtcgagaacactgggtatgatgtgagtgtggcaggcactacattagccggcgacccaacaagaccgctgaccgctttcgtcattaccgaggctgagcctgaggtcgataacctgctcgtatcagatgctaccccagatggttttcgtctctcttggactgctgacgaaggggtgtttgacaatttcgtgttgaaaatccgcgatacaaagaaacagtctgagccactggagatcaccctgctggcccccgagcgcacgagggacattaccgggttacgggaggccaccgagtacgagattgagctatatggtatatccaagggcagacggagccagactgtcagtgccatcgccacgaccgctatgggctcacccaaagaagtgatattttccgatatcacggagaacagtgccacggtgagttggagggcacctactgcgcaggtggaatcttttcgtatcacctacgtaccgatcacagggggtacacctagcatggtgacggttgatgggactaagacacagacgaggctggtgaagctgatccccggggtggagtacctggtctctatcatcgctatgaagggatttgaggagagcgaaccagtcagtggaagctttaccactgctttggacgggccttccggtctggtcactgctaatattaccgactcagaagctctcgctcgatggcagcctgcaatcgctactgtggatagctacgtgatttcttacaccggagagaaggtgccggaaattacccggactgttagtggaaacacggtggagtacgctctcacagatttagagcccgcaacagaatatacacttcgtatttttgctgaaaagggcccgcagaaatcaagtacaataacagcaaaattcactacagaccttgactctccaagagatctcactgccacagaggtccaaagcgaaactgcattactcacatggagaccacctagagctagcgtgacaggatacctcttggtgtacgagtctgtcgacggcaccgttaaagaagttattgtggggcctgatacaacatcttattccctggcagatttgtctccaagtacacattataccgcaaaaattcaagctcttaacggcccactcagatccaatatgatacagacaatttttacgaccatcggcctcttgtacccatttcctaaagactgtagtcaggccatgttgaacggcgataccacgagcggtctttataccatctacctgaacggtgacaaagcagaggccctggaagttttctgcgatatgacctctgacggtggaggatggatcgttttcctgcggcgcaagaacggacgtgagaacttctatcagaattggaaagcatacgccgctggatttggagacagacgggaggaattttggctgggcttagataacctcaacaaaatcaccgctcaaggccaatatgaactccgtgtggatctccgggatcatggcgaaaccgcttttgcagtctacgataaattcagcgtcggagacgctaaaactagatataaacttaaggtagaggggtacagtggaaccgcgggggattctatggcatatcacaacggacgatcattttcaacgttcgacaaggatacagactcagcgattacaaactgcgctctatcttataaaggcgctttctggtatcgcaactgccatcgggttaatctgatgggacgctacggagataataaccattcccagggcgtaaactggtttcattggaaagggcacgaacattcaattcagtttgccgaaatgaagctcagacctagcaatttcaggaatctagaaggacgtaggaagcgcgcctag

SEQ ID NO: 310455 - DNA, 5514 bp, Artificial Sequence
  derived and/or modified sequence
atgggtgctatgacacaattgctggcgggcgtgtttctcgcctttctggctcttgctactgaagggggcgtgttaaaaaaggtgatcagacataaaaggcagtccggcgttaatgccacactcccagaagagaatcagcccgttgtgtttaaccacgtgtacaatataaagctgcctgtgggctctcaatgcagtgtagatctcgaaagcgcttcaggagaaaaggatctggcccctcctagcgaacccagcgaatctttccaagagcacactgtggacggagagaaccagatcgtattcacacataggattaatatcccccgcagagcgtgtggatgcgccgcagcacctgacgttaaggaacttctgtcacggttagaggagttagaaaacttggtcagctctctacgcgagcagtgcaccgccggcgcaggctgttgtttacagcccgccacgggcagactggatacccgcccattctgtagcggccgggggaatttcagcactgaagggtgcggctgcgtttgtgaaccagggtggaagggacccaactgcagtgagccagagtgtcccggtaattgccatcttcgaggtcgttgcatagacggtcagtgcatatgtgacgatggctttacaggagaagattgtagtcagctcgcctgcccatccgattgcaatgaccagggaaagtgcgtgaatggtgtctgtatttgctttgagggttacgctggtgccgattgttcccgggagatttgtcccgtgccctgttccgaagagcacggcacctgtgtggacggcctatgtgtgtgccatgatggcttcgctggagatgactgtaataagccgttgtgcttgaacaattgttataataggggccgctgcgtggaaaatgagtgcgtttgtgacgaaggctttactggagaagactgttcagagctgatctgccctaacgattgcttcgacaggggtaggtgcataaatgggacttgttattgtgaggagggatttacgggggaggactgcggcaagccaacatgcccccacgcctgtcacacccaagggaggtgcgaagaagggcagtgtgtttgtgatgagggttttgcaggtgtggactgttccgaaaagagatgccccgcagactgtcacaaccgggggagatgcgtggatggtcggtgtgaatgtgatgatggctttacaggagcggactgtggcgagctaaaatgtcctaatggttgctctggccacggcagatgtgtgaatggacagtgtgtttgcgatgaaggatacacaggggaggattgctcacagctgcgctgtccgaacgactgtcacagcagggggaggtgtgtcgaaggaaaatgtgtctgcgaacagggtttcaagggctacgactgtagtgacatgagttgtcctaacgactgtcaccagcatggaagatgtgtgaacgggatgtgtgtatgtgatgatggctatacaggcgaggactgcagggatagacagtgcccaagagactgtagcaacagaggactgtgcgtggatgggcagtgcgtatgcgaagatggtttcacagggccagactgtgctgagctgagctgtcctaatgattgccacggccaagggcgatgcgtgaacgggcagtgtgtatgccacgaggggttcatgggaaaggattgtaaagaacagaggtgccctagcgattgtcatggacagggacgctgcgtcgatgggcagtgcatttgccacgaaggattcacaggcctggattgcggacaacactcgtgccccagcgattgcaataaccttggtcagtgtgtgtccggacgatgcatttgcaatgagggttacagcggcgaagattgcagtgaggttagcccaccaaaagacttagttgtgaccgaggtgacggaagagacagtaaaccttgcctgggataacgaaatgcgcgttacggaatacctcgtcgtttatacgccaactcatgaaggaggcctggaaatgcagttccgcgtgccaggggatcagactagcaccatcattcaggagctggagccaggagtggaatactttatccgcgtttttgctatactggagaataaaaaatccatccccgtgagcgcccgtgttgcaacatacctcccggcacccgaaggcttaaagttcaaaagtattaaggaaaccagtgttgaagtcgagtgggaccccctggacattgcctttgaaacgtgggaaataatctttagaaacatgaataaagaggacgagggagagattacaaagagcctgagaaggcctgagacgagctacaggcagaccggactggcacctggacaggagtacgagataagtctgcatattgtgaaaaacaatactcggggccctggcctgaagagggttacaacaacccgcctggacgccccatcccaaatagaggtgaaagacgtgactgatacaaccgcccttattacttggtttaagcccctcgcagagattgacggcatcgagcttacgtatggaattaaggatgtccccggagacagaactaccatagatctcactgaggatgaaaatcaatatagcattgggaacctaaaacctgatacggaatatgaggttagcctaattagtcgtcggggagatatgagctctaatccagcaaaagagaccttcacaaccggcttagacgccccaagaaatctcagacgggtaagccagactgacaattctataaccctggaatggagaaacggcaaggctgcaatcgattcgtataggattaaatatgcccccatcagcggaggggaccatgcagaagttgatgttcccaaatcacagcaggccactaccaaaacaactttaactggactgaggccgggtactgaatatgggatcggtgtctcagcagtaaaagaggataaggaatctaatccagccaccattaacgctgcaacagaactagacactcctaaagatcttcaggtctctgagacggccgaaacaagcctgaccctgttatggaaaacaccactagctaagtttgatcgataccgcctcaattattctctaccaacgggacaatgggtgggggtgcagctccctagaaatactacttcatacgtcctgcgaggactagagccgggccaggaatacaatgtgctgctgaccgccgagaagggacggcacaagtctaaaccagctcgcgtgaaggcttcaaccgctaaagaacccgagatagggaatctgaatgtttccgatatcaccccagaaagctttaacttatcctggatggcgacagacggaattttcgaaacttttaccattgagattatcgattccaacagactgctagagactgtcgagtacaacatatctggtgccgaacgtacagcacacatttccggcctgcccccctccacggattttattgtttatttgagtggcctagctccttccatcagaacaaagactatttctgcaaccgccacaaccgaggccctgcctcttttagagaacttgaccatatctgatatcaacccctatggcttcactgtcagctggatggccagtgagaatgcgtttgactcgtttctcgttacagtggtggattccggcaaactcctcgaccctcaagagttcaccctgagcggcacccagcgtaaattggaactccgcggtctgataacaggaatcggctatgaagtgatggtatctgggtttacccagggccaccagacgaagcccctgagggcagaaatcgtaacggaagctgagccagaagtggacaacttgttagtgtccgacgctactccagacggctttcggctatcatggactgctgatgaaggtgtgttcgacaatttcgtactaaagatccgcgatactaagaagcaaagtgaacccctggagataacgctcctggcccccgaaagaacgcgcgacatcacaggacttcgtgaagcgacagaatacgaaattgagttgtatggcatttccaaaggacgccgctctcaaaccgtgtctgctattgctacaacggctatgggaagcccaaaagaagtgatcttctcggacataaccgagaactccgcgaccgtatcctggagagctcctaccgctcaagttgaaagtttcagaatcacctatgtgcccattaccggagggacaccttcaatggtaactgttgacggtactaaaacgcagactagactcgttaaattaatcccgggcgtggaatatttagttagcatcatcgccatgaagggcttcgaggagagtgagccagtgagcggttcttttaccacagcgcttgatggcccctcaggactcgttaccgccaatataaccgactcagaggccctggcacggtggcagccagcaattgcgaccgtggacagctacgtcatcagttatacaggtgaaaaagtgccagaaattacccgcaccgtctcaggcaataccgtggaatatgccctgaccgaccttgaaccggccacagagtacactctgcgcatattcgccgagaagggtccgcaaaagtcctccacaatcaccgctaagttcaccacagacctggattctccaagagatctaactgccaccgaggttcaaagcgaaactgcattacttacatggcggcccccaagggcaagtgtcacgggctacctccttgtctacgaaagtgtcgatggcacagttaaggaagtgatcgtgggtcccgatactacttcctattctttagccgatctgtccccctccacccactacaccgcgaaaatccaagcactcaatggcccgctgagatcgaacatgatacagacaattttcaccactattggcctgttatacccctttcccaaagattgcagtcaggcaatgctgaacggtgacaccacgagtggcctatatacaatttatctgaatggagataaggccgaagctctggaagttttttgcgacatgactagtgacgggggcggttggattgtgtttctgcggaggaaaaacggacgtgaaaatttctatcaaaactggaaggcatacgcggctggatttggtgatcgccgggaagaattctggttgggactggataacctgaacaaaataacagcacaggggcaatatgaactgagggtagacctaagagaccacggggagacagcattcgccgtatacgacaaattttcagtgggagatgctaaaacaagatacaagctgaaggtggaaggctactcagggaccgcaggcgacagtatggcctaccacaatggcagatcattctctacgttcgataaggacacagactcagctatcactaattgtgctctaagttataaaggagccttctggtaccgcaactgccacagagtcaatcttatgggaaggtatggagacaacaatcattcacagggggtgaattggttccactggaaagggcacgaacactctattcaatttgctgagatgaaattgagaccttcaaattttcggaatctagagggcagacgtaaacgggcttag

SEQ ID NO: 310456 - DNA, 5517 bp, Artificial Sequence
  derived and/or modified sequence
atgggagccatgactcaactgctggcgggggtgttcctagcttttttagctttagcaaccgaggggggagtactaaaaaaagtcattcgccataagagacagagcggagtcaacgctacacttcccgaggagaaccagcccgttgtgttcaatcatgtgtacaacattaagttgcccgttggaagccagtgttcagtagacctggaaagcgcctctggagagaaagatctggcccctcccagcgagccgagcgaatcattccaagagcataccgtggatggcgagaaccagatcgtcttcactcaccgtataaacattccaaggagagcctgtgggtgcgccgccgctcccgatgtgaaagaattactttcccgcctggaggagctggaaaatttagtgagcagcctgcgagagcaatgtacggcaggggctgggtgctgcctacaacctgcaacgggccggctagatactagacccttttgtagcggacggggcaactttagcacagaaggctgtgggtgtgtctgcgagccagggtggaaggggccaaactgcagcgagcctgagtgtcccggaaactgccatctccgcggacgatgcattgacggccagtgcatttgcgacgacggattcaccggggaagattgtagccagttggcgtgtccatccgattgtaatgaccaggggaagtgtgttaacggcgtctgtatttgttttgagggatatgctggggccgattgctccagagagatctgtccagtaccatgctccgaagaacatggaacctgtgtcgatgggctatgcgtctgccacgatggttttgctggagatgattgcaataagccactctgcttgaataattgttacaataggggaaggtgcgtggaaaatgaatgcgtctgtgacgagggctttactggtgaggactgctccgaactgatctgtccaaatgactgttttgaccgcggacggtgcatcaatggtacatgttactgcgaagaaggatttaccggcgaggattgtggaaaacctacatgcccacacgcttgccatactcagggaagatgtgaggagggtcagtgcgtctgtgatgaaggatttgcaggagtcgattgttccgagaaaaggtgtcccgcagattgtcataaccgagggagatgcgttgacgggagatgcgagtgtgatgatggatttacaggtgcggattgtggcgagctaaaatgccccaatggctgtagtggacatggcagatgtgtgaatggtcaatgtgtgtgcgacgaaggatacaccggggaggactgttctcagctgcgatgcccaaatgactgtcactcgaggggtaggtgcgtcgaggggaaatgcgtgtgcgaacaaggatttaagggatacgattgttcagatatgtcctgccctaatgactgccaccaacatgggagatgtgttaatgggatgtgcgtgtgtgatgacggctatactggtgaggattgtcgagaccgccagtgccccagagattgctctaatagagggctgtgtgttgatgggcaatgcgtatgcgaagatggctttacaggacccgactgcgctgaactctcatgtcctaacgactgccacgggcagggaagatgtgtgaacggtcaatgtgtgtgccatgagggcttcatgggcaaggattgtaaagaacagagatgtccttcagattgccatggccagggccgatgcgtggatggccaatgtatctgtcatgaggggtttaccgggctcgattgcggccagcacagctgccccagcgactgtaataatctcggccagtgcgtctccggacggtgtatttgcaatgagggatattctggcgaagattgttctgaggttagccctcccaaagatctggtggtaaccgaggtaacagaagagaccgtcaacttagcctgggacaacgaaatgcgagtcactgaatatctagtagtatacacccctactcacgagggcggactcgagatgcaatttagggtgccgggggatcagacgtctaccataatccaggaactggaaccaggcgtcgagtatttcattagagtgtttgccatcctcgaaaacaaaaagtctatccctgtctcagcacgagtcgcaacctatttacccgcccccgagggattaaaatttaaatccataaaagaaactagcgtggaggtcgagtgggatccgctggacatcgcatttgagacatgggagattatcttccgaaatatgaacaaagaagacgaaggtgagatcacaaagagtctccgcaggcctgagacctcctaccggcaaactggcctcgcaccaggacaggagtatgaaatctctctgcacattgtcaagaacaacaccagaggacccgggctgaagagagtaaccactaccagactagatgcaccctctcagatcgaagtgaaggatgtgactgatactaccgccttaataacttggtttaagcccctggctgagattgatgggatagaattaacctatggcattaaagatgtgcccggtgacagaacaacaattgacttaaccgaagatgagaaccagtatagcattggtaacctgaaacctgacaccgaatatgaagtgagcctgatctcccgccgaggggacatgagtagcaacccagcaaaggagacttttactaccggcctcgacgcccctagaaacctcaggcgggtgtctcagacagacaattcgatcactctcgaatggcggaacggcaaggctgcaattgatagctatagaatcaagtatgcacctatctccggtggagatcatgcagaggtagacgtccccaaaagtcagcaagcaacgacgaagaccacgctcaccggcctcagacctggaaccgaatacggcattggcgtatcagctgttaaggaagataaagagagcaatcctgccactattaacgctgccaccgaattggatacccctaaggatttgcaggtaagtgaaacagcagaaacttcactcacactcctatggaagacgccactggccaagtttgatcgatatcgccttaactattcattacccaccgggcagtgggtcggtgttcaactccccagaaacactacttcatatgttctgagaggtctggagccaggacaagaatacaatgtacttctgacagccgagaaagggaggcataaatccaaacctgccagagtcaaagccagtactgccaaagagcccgagataggcaatctgaatgttagcgacataacaccggagtcattcaatctttcctggatggcaaccgatggaatcttcgaaacatttactatcgaaatcatagactccaatagattattagaaaccgttgaatacaatatcagtggggctgaacggactgcacacatttccggtttgccaccctccacagactttattgtatacctctctggactggctccaagtatccgtactaagacaatttcagctaccgccactaccgagcctaaacctcaactgggtactctaatcttcagcaatatcacgcccaaatcttttaatatgtcctggaccacacaggcaggcctctttgctaaaattgttatcaacgtgagcgacgcacattccttacatgagtctcagcagtttaccgtgagcggcgacgccaaacaggcacacatcaccgggctggtggagaatacaggctacgacgtgtctgtcgctggaacaactctcgctggggatcccactcgacccctgactgcctttgttatcaccgaagccgaacctgaagtggataaccttctcgtctctgacgctacccccgatggattccgcctaagttggacagccgacgaaggagtgttcgacaatttcgttctaaaaatccgcgatacaaaaaaacagtcagagccattggagattacgcttctggcacccgaacgcactcgagatattacaggactcagagaagcgacagaatacgaaatcgaattgtatggtatcagcaaaggccgcaggtctcaaacggtgtctgccatagcgaccacagcgatgggatctcctaaggaagtaatcttctctgacatcacagaaaattcagctacagtatcgtggcgtgctcccactgcacaggtggagtcatttcgaattacttatgtccctattacgggaggcactcccagtatggtgaccgttgacggaaccaagacccagaccagactcgtgaagctcattcctggcgtcgagtacctagtgtctattatcgcaatgaaaggtttcgaagagagcgaacccgtttccgggtccttcacaactgctttggatggaccatcaggcctcgtgaccgccaatattaccgactctgaagcattggcccgctggcagccagcgattgctaccgtcgatagctatgttatctcttacacaggcgaaaaggtccccgaaattacaagaaccgttagcggcaacaccgttgagtacgccctaacggatttagagcccgccactgaatatacacttcgtatttttgctgaaaagggcccgcagaaatcaagtacaataacagcaaaattcactacagaccttgactctccaagagatctcactgccacagaggtccaaagcgaaactgcattactcacatggagaccacctagagctagcgtgacaggatacctcttggtgtacgagtctgtcgacggcaccgttaaagaagttattgtggggcctgatacaacatcttattccctggcagatttgtctccaagtacacattataccgcaaaaattcaagctcttaacggcccactcagaagcaatatgattcagacaatttttaccacaataggccttctttatccttttcctaaagactgcagccaggcgatgctgaacggagatacaacgagcgggctctacactatctatttaaacggagacaaagccgaagccctcgaggtcttttgcgacatgacaagtgatggcggcggttggattgtgttcttgagaagaaaaaatggccgggagaatttctaccaaaactggaaagcctatgcagcggggtttggtgatcggcgggaagagttctggcttggactagataatttaaataagatcaccgctcaaggccaatatgaactccgtgtggatctccgggatcatggcgaaaccgcttttgcagtctacgataaattcagcgtcggagacgctaaaactagatataaacttaaggtagaggggtacagtggaaccgcgggggattctatggcatatcacaacggacgatcattttcaacgttcgacaaggatacagactcagcgattacaaactgcgctctatcttataaaggcgctttctggtatcgcaactgccatcgggttaatctgatgggacgctacggagataataaccattcacagggcgtaaattggttccattggaaaggacacgagcactcaatccaattcgcagaaatgaaattgaggccatcaaattttaggaacttagagggccggagaaaaagggcgtag

SEQ ID NO: 310457 - DNA, 6506 bp, Artificial Sequence
  derived and/or modified sequence
attacagaggaaggagctcgctatataagccagccaaagttggctgcaccggccacagcctgcctactgtcacccgcctctcccgcgcgcagatacacgcccccgcctccgtgggcacaaaggcagcgctgctggggaactcgggggaacgcgcacgtgggaaccgccgcagctccacactccaggtacttcttccaaggacctaggtctctcgcccatcggaaagaaaataattctttcaagaagatcagggacaactgatttgaagtctactctgtgcttctaaatccccaattctgctgaaagtgagataccctagagccctagagccccagcagcacccagccaaacccacctccaccatgggggccatgactcagctgttggcaggtgtctttcttgctttccttgccctcgctaccgaaggtggggtcctcaagaaagtcatccggcacaagcgacagagtggggtgaacgccaccctgccagaagagaaccagccagtggtgtttaaccacgtttacaacatcaagctgccagtgggatcccagtgttcggtggatctggagtcagccagtggggagaaagacctggcaccgccttcagagcccagcgaaagctttcaggagcacacagtggatggggaaaaccagattgtcttcacacatcgcatcaacatcccccgccgggcctgtggctgtgccgcagcccctgatgttaaggagctgctgagcagactggaggagctggagaacctggtgtcttccctgagggagcaatgtactgcaggagcaggctgctgtctccagcctgccacaggccgcttggacaccaggcccttctgtagcggtcggggcaacttcagcactgaaggatgtggctgtgtctgcgaacctggctggaaaggccccaactgctctgagcccgaatgtccaggcaactgtcaccttcgaggccggtgcattgatgggcagtgcatctgtgacgacggcttcacgggcgaggactgcagccagctggcttgccccagcgactgcaatgaccagggcaagtgcgtaaatggagtctgcatctgtttcgaaggctacgccggggctgactgcagccgtgaaatctgcccagtgccctgcagtgaggagcacggcacatgtgtagatggcttgtgtgtgtgccacgatggctttgcaggcgatgactgcaacaagcctctgtgtctcaacaattgctacaaccgtggacgatgcgtggagaatgagtgcgtgtgtgatgagggtttcacgggcgaagactgcagtgagctcatctgccccaatgactgcttcgaccggggccgctgcatcaatggcacctgctactgcgaagaaggcttcacaggtgaagactgcgggaaacccacctgcccacatgcctgccacacccagggccggtgtgaggaggggcagtgtgtatgtgatgagggctttgccggtgtggactgcagcgagaagaggtgtcctgctgactgtcacaatcgtggccgctgtgtagacgggcggtgtgagtgtgatgatggtttcactggagctgactgtggggagctcaagtgtcccaatggctgcagtggccatggccgctgtgtcaatgggcagtgtgtgtgtgatgagggctatactggggaggactgcagccagctacggtgccccaatgactgtcacagtcggggccgctgtgtcgagggcaaatgtgtatgtgagcaaggcttcaagggctatgactgcagtgacatgagctgccctaatgactgtcaccagcacggccgctgtgtgaatggcatgtgtgtttgtgatgacggctacacaggggaagactgccgggatcgccaatgccccagggactgcagcaacaggggcctctgtgtggacggacagtgcgtctgtgaggacggcttcaccggccctgactgtgcagaactctcctgtccaaatgactgccatggccagggtcgctgtgtgaatgggcagtgcgtgtgccatgaaggatttatgggcaaagactgcaaggagcaaagatgtcccagtgactgtcatggccagggccgctgcgtggacggccagtgcatctgccacgagggcttcacaggcctggactgtggccagcactcctgccccagtgactgcaacaacttaggacaatgcgtctcgggccgctgcatctgcaacgagggctacagcggagaagactgctcagaggtgtctcctcccaaagacctcgttgtgacagaagtgacggaagagacggtcaacctggcctgggacaatgagatgcgggtcacagagtaccttgtcgtgtacacgcccacccacgagggtggtctggaaatgcagttccgtgtgcctggggaccagacgtccaccatcatccaggagctggagcctggtgtggagtactttatccgtgtatttgccatcctggagaacaagaagagcattcctgtcagcgccagggtggccacgtacttacctgcacctgaaggcctgaaattcaagtccatcaaggagacatctgtggaagtggagtgggatcctctagacattgcttttgaaacctgggagatcatcttccggaatatgaataaagaagatgagggagagatcaccaaaagcctgaggaggccagagacctcttaccggcaaactggtctagctcctgggcaagagtatgagatatctctgcacatagtgaaaaacaatacccggggccctggcctgaagagggtgaccaccacacgcttggatgcccccagccagatcgaggtgaaagatgtcacagacaccactgccttgatcacctggttcaagcccctggctgagatcgatggcattgagctgacctacggcatcaaagacgtgccaggagaccgtaccaccatcgatctcacagaggacgagaaccagtactccatcgggaacctgaagcctgacactgagtacgaggtgtccctcatctcccgcagaggtgacatgtcaagcaacccagccaaagagaccttcacaacaggcctcgatgctcccaggaatcttcgacgtgtttcccagacagataacagcatcaccctggaatggaggaatggcaaggcagctattgacagttacagaattaagtatgcccccatctctggaggggaccacgctgaggttgatgttccaaagagccaacaagccacaaccaaaaccacactcacaggtctgaggccgggaactgaatatgggattggagtttctgctgtgaaggaagacaaggagagcaatccagcgaccatcaacgcagccacagagttggacacgcccaaggaccttcaggtttctgaaactgcagagaccagcctgaccctgctctggaagacaccgttggccaaatttgaccgctaccgcctcaattacagtctccccacaggccagtgggtgggagtgcagcttccaagaaacaccacttcctatgtcctgagaggcctggaaccaggacaggagtacaatgtcctcctgacagccgagaaaggcagacacaagagcaagcccgcacgtgtgaaggcatccactgccaaagaacctgaaattggaaacttaaatgtttctgacataactcccgagagcttcaatctctcctggatggctaccgatgggatcttcgagacctttaccattgaaattattgattccaataggttgctggagactgtggaatataatatctctggtgctgaacgaactgcccatatctcagggctaccccctagtactgattttattgtctacctctctggacttgctcccagcatccggaccaaaaccatcagtgccacagccacgacagaggccctgccccttctggaaaacctaaccatttccgacattaatccctacgggttcacagtttcctggatggcatcggagaatgcctttgacagctttctagtaacggtggtggattctgggaagctgctggacccccaggaattcacactttcaggaacccagaggaagctggagcttagaggcctcataactggcattggctatgaggttatggtctctggcttcacccaagggcatcaaaccaagcccttgagggctgagattgttacagaagccgaaccggaagttgacaaccttctggtttcagatgccaccccagacggtttccgtctgtcctggacagctgatgaaggggtcttcgacaattttgttctcaaaatcagagataccaaaaagcagtctgagccactggaaataaccctacttgcccccgaacgtaccagggacataacaggtctcagagaggctactgaatacgaaattgaactctatggaataagcaaaggaaggcgatcccagacagtcagtgctatagcaacaacagccatgggctccccaaaggaagtcattttctcagacatcactgaaaattcggctactgtcagctggagggcacccacagcccaagtggagagcttccggattacctatgtgcccattacaggaggtacaccctccatggtaactgtggacggaaccaagactcagaccaggctggtgaaactcatacctggcgtggagtaccttgtcagcatcatcgccatgaagggctttgaggaaagtgaacctgtctcagggtcattcaccacagctctggatggcccatctggcctggtgacagccaacatcactgactcagaagccttggccaggtggcagccagccattgccactgtggacagttatgtcatctcctacacaggcgagaaagtgccagaaattacacgcacggtgtccgggaacacagtggagtatgctctgaccgacctcgagcctgccacggaatacacactgagaatctttgcagagaaagggccccagaagagctcaaccatcactgccaagttcacaacagacctcgattctccaagagacttgactgctactgaggttcagtcggaaactgccctccttacctggcgacccccccgggcatcagtcaccggttacctgctggtctatgaatcagtggatggcacagtcaaggaagtcattgtgggtccagataccacctcctacagcctggcagacctgagcccatccacccactacacagccaagatccaggcactcaatgggcccctgaggagcaatatgatccagaccatcttcaccacaattggactcctgtaccccttccccaaggactgctcccaagcaatgctgaatggagacacgacctctggcctctacaccatttatctgaatggtgataaggctgaggcgctggaagtcttctgtgacatgacctctgatgggggtggatggattgtgttcctgagacgcaaaaacggacgcgagaacttctaccaaaactggaaggcatatgctgctggatttggggaccgcagagaagaattctggcttgggctggacaacctgaacaaaatcacagcccaggggcagtacgagctccgggtggacctgcgggaccatggggagacagcctttgctgtctatgacaagttcagcgtgggagatgccaagactcgctacaagctgaaggtggaggggtacagtgggacagcaggtgactccatggcctaccacaatggcagatccttctccacctttgacaaggacacagattcagccatcaccaactgtgctctgtcctacaaaggggctttctggtacaggaactgtcaccgtgtcaacctgatggggagatatggggacaataaccacagtcagggcgttaactggttccactggaagggccacgaacactcaatccagtttgctgagatgaagctgagaccaagcaacttcagaaatcttgaaggcaggcgcaaacgggcataaattccagggaccactgggtgagagaggaataaggcccagagcgaggaaaggattttaccaaagcatcaatacaaccagcccaaccatcggtccacacctgggcatttggtgagagtcaaagctgaccatggatccctggggccaacggcaacagcatgggcctcacctcctctgtgatttctttctttgcaccaaagacatcagtctccaacatgtttctgttttgttgtttgattcagcaaaaatctcccagtgacaacatcgcaatagttttttacttctcttaggtggctctgggaatgggagaggggtaggatgtacaggggtagtttgttttagaaccagccgtattttacatgaagctgtataattaattgtcattatttttgttagcaaagattaaatgtgtcattggaagccatccctttttttacatttcatacaacagaaaccagaaaagcaatactgtttccattttaaggatatgattaatattattaatataataatgatgatgatgatgatgaaaactaaggatttttcaagagatctttctttccaaaacatttctggacagtacctgattgtattttttttttaaataaaagcacaagtacttttgagtttgtt

SEQ ID NO: 310458 - DNA, 5517 bp, Artificial Sequence
  derived and/or modified sequence
atgggggccatgactcagctgttggcaggtgtctttcttgctttccttgccctcgctaccgaaggtggggtcctcaagaaagtcatccggcacaagcgacagagtggggtgaacgccaccctgccagaagagaaccagccagtggtgtttaaccacgtttacaacatcaagctgccagtgggatcccagtgttcggtggatctggagtcagccagtggggagaaagacctggcaccgccttcagagcccagcgaaagctttcaggagcacacagtggatggggaaaaccagattgtcttcacacatcgcatcaacatcccccgccgggcctgtggctgtgccgcagcccctgatgttaaggagctgctgagcagactggaggagctggagaacctggtgtcttccctgagggagcaatgtactgcaggagcaggctgctgtctccagcctgccacaggccgcttggacaccaggcccttctgtagcggtcggggcaacttcagcactgaaggatgtggctgtgtctgcgaacctggctggaaaggccccaactgctctgagcccgaatgtccaggcaactgtcaccttcgaggccggtgcattgatgggcagtgcatctgtgacgacggcttcacgggcgaggactgcagccagctggcttgccccagcgactgcaatgaccagggcaagtgcgtaaatggagtctgcatctgtttcgaaggctacgccggggctgactgcagccgtgaaatctgcccagtgccctgcagtgaggagcacggcacatgtgtagatggcttgtgtgtgtgccacgatggctttgcaggcgatgactgcaacaagcctctgtgtctcaacaattgctacaaccgtggacgatgcgtggagaatgagtgcgtgtgtgatgagggtttcacgggcgaagactgcagtgagctcatctgccccaatgactgcttcgaccggggccgctgcatcaatggcacctgctactgcgaagaaggcttcacaggtgaagactgcgggaaacccacctgcccacatgcctgccacacccagggccggtgtgaggaggggcagtgtgtatgtgatgagggctttgccggtgtggactgcagcgagaagaggtgtcctgctgactgtcacaatcgtggccgctgtgtagacgggcggtgtgagtgtgatgatggtttcactggagctgactgtggggagctcaagtgtcccaatggctgcagtggccatggccgctgtgtcaatgggcagtgtgtgtgtgatgagggctatactggggaggactgcagccagctacggtgccccaatgactgtcacagtcggggccgctgtgtcgagggcaaatgtgtatgtgagcaaggcttcaagggctatgactgcagtgacatgagctgccctaatgactgtcaccagcacggccgctgtgtgaatggcatgtgtgtttgtgatgacggctacacaggggaagactgccgggatcgccaatgccccagggactgcagcaacaggggcctctgtgtggacggacagtgcgtctgtgaggacggcttcaccggccctgactgtgcagaactctcctgtccaaatgactgccatggccagggtcgctgtgtgaatgggcagtgcgtgtgccatgaaggatttatgggcaaagactgcaaggagcaaagatgtcccagtgactgtcatggccagggccgctgcgtggacggccagtgcatctgccacgagggcttcacaggcctggactgtggccagcactcctgccccagtgactgcaacaacttaggacaatgcgtctcgggccgctgcatctgcaacgagggctacagcggagaagactgctcagaggtgtctcctcccaaagacctcgttgtgacagaagtgacggaagagacggtcaacctggcctgggacaatgagatgcgggtcacagagtaccttgtcgtgtacacgcccacccacgagggtggtctggaaatgcagttccgtgtgcctggggaccagacgtccaccatcatccaggagctggagcctggtgtggagtactttatccgtgtatttgccatcctggagaacaagaagagcattcctgtcagcgccagggtggccacgtacttacctgcacctgaaggcctgaaattcaagtccatcaaggagacatctgtggaagtggagtgggatcctctagacattgcttttgaaacctgggagatcatcttccggaatatgaataaagaagatgagggagagatcaccaaaagcctgaggaggccagagacctcttaccggcaaactggtctagctcctgggcaagagtatgagatatctctgcacatagtgaaaaacaatacccggggccctggcctgaagagggtgaccaccacacgcttggatgcccccagccagatcgaggtgaaagatgtcacagacaccactgccttgatcacctggttcaagcccctggctgagatcgatggcattgagctgacctacggcatcaaagacgtgccaggagaccgtaccaccatcgatctcacagaggacgagaaccagtactccatcgggaacctgaagcctgacactgagtacgaggtgtccctcatctcccgcagaggtgacatgtcaagcaacccagccaaagagaccttcacaacaggcctcgatgctcccaggaatcttcgacgtgtttcccagacagataacagcatcaccctggaatggaggaatggcaaggcagctattgacagttacagaattaagtatgcccccatctctggaggggaccacgctgaggttgatgttccaaagagccaacaagccacaaccaaaaccacactcacaggtctgaggccgggaactgaatatgggattggagtttctgctgtgaaggaagacaaggagagcaatccagcgaccatcaacgcagccacagagttggacacgcccaaggaccttcaggtttctgaaactgcagagaccagcctgaccctgctctggaagacaccgttggccaaatttgaccgctaccgcctcaattacagtctccccacaggccagtgggtgggagtgcagcttccaagaaacaccacttcctatgtcctgagaggcctggaaccaggacaggagtacaatgtcctcctgacagccgagaaaggcagacacaagagcaagcccgcacgtgtgaaggcatccactgccaaagaacctgaaattggaaacttaaatgtttctgacataactcccgagagcttcaatctctcctggatggctaccgatgggatcttcgagacctttaccattgaaattattgattccaataggttgctggagactgtggaatataatatctctggtgctgaacgaactgcccatatctcagggctaccccctagtactgattttattgtctacctctctggacttgctcccagcatccggaccaaaaccatcagtgccacagccacgacagaaccaaagccacagttgggcacgctaatctttagcaatattactccaaaaagcttcaacatgtcatggaccactcaagctgggctttttgcaaagattgttatcaatgtgagtgacgctcactcactgcatgagtcccagcaattcacagtctcaggagatgcaaagcaagctcacatcacaggcttggtggagaacactggctatgacgtcagtgtggcaggaaccaccttggctggggatcccaccagacccctcactgcctttgtcattacagaagccgaaccggaagttgacaaccttctggtttcagatgccaccccagacggtttccgtctgtcctggacagctgatgaaggggtcttcgacaattttgttctcaaaatcagagataccaaaaagcagtctgagccactggaaataaccctacttgcccccgaacgtaccagggacataacaggtctcagagaggctactgaatacgaaattgaactctatggaataagcaaaggaaggcgatcccagacagtcagtgctatagcaacaacagccatgggctccccaaaggaagtcattttctcagacatcactgaaaattcggctactgtcagctggagggcacccacagcccaagtggagagcttccggattacctatgtgcccattacaggaggtacaccctccatggtaactgtggacggaaccaagactcagaccaggctggtgaaactcatacctggcgtggagtaccttgtcagcatcatcgccatgaagggctttgaggaaagtgaacctgtctcagggtcattcaccacagctctggatggcccatctggcctggtgacagccaacatcactgactcagaagccttggccaggtggcagccagccattgccactgtggacagttatgtcatctcctacacaggcgagaaagtgccagaaattacacgcacggtgtccgggaacacagtggagtatgctctgaccgacctcgagcctgccacggaatacacactgagaatctttgcagagaaagggccccagaagagctcaaccatcactgccaagttcacaacagacctcgattctccaagagacttgactgctactgaggttcagtcggaaactgccctccttacctggcgacccccccgggcatcagtcaccggttacctgctggtctatgaatcagtggatggcacagtcaaggaagtcattgtgggtccagataccacctcctacagcctggcagacctgagcccatccacccactacacagccaagatccaggcactcaatgggcccctgaggagcaatatgatccagaccatcttcaccacaattggactcctgtaccccttccccaaggactgctcccaagcaatgctgaatggagacacgacctctggcctctacaccatttatctgaatggtgataaggctgaggcgctggaagtcttctgtgacatgacctctgatgggggtggatggattgtgttcctgagacgcaaaaacggacgcgagaacttctaccaaaactggaaggcatatgctgctggatttggggaccgcagagaagaattctggcttgggctggacaacctgaacaaaatcacagcccaggggcagtacgagctccgggtggacctgcgggaccatggggagacagcctttgctgtctatgacaagttcagcgtgggagatgccaagactcgctacaagctgaaggtggaggggtacagtgggacagcaggtgactccatggcctaccacaatggcagatccttctccacctttgacaaggacacagattcagccatcaccaactgtgctctgtcctacaaaggggctttctggtacaggaactgtcaccgtgtcaacctgatggggagatatggggacaataaccacagtcagggcgttaactggttccactggaagggccacgaacactcaatccagtttgctgagatgaagctgagaccaagcaacttcagaaatcttgaaggcaggcgcaaacgggcataa

SEQ ID NO: 310459 - protein, 1746 aa, Artificial Sequence
  derived and/or modified sequence
MGAMTQLLAGVFLAFLALATEGGVLKKVIRHKRQSGVNATLPEENQPVVFNHVYNIKLPVGSQCSVDLESASGEKDLAPPSEPSESFQEHTVDGENQIVFTHRINIPRRACGCAAAPDVKELLSRLEELENLVSSLREQCTAGAGCCLQPATGRLDTRPFCSGRGNFSTEGCGCVCEPGWKGPNCSEPECPGNCHLRGRCIDGQCICDDGFTGEDCSQLACPSDCNDQGKCVNGVCICFEGYAGADCSREICPVPCSEEHGTCVDGLCVCHDGFAGDDCNKPLCLNNCYNRGRCVENECVCDEGFTGEDCSELICPNDCFDRGRCINGTCYCEEGFTGEDCGKPTCPHACHTQGRCEEGQCVCDEGFAGVDCSEKRCPADCHNRGRCVDGRCECDDGFTGADCGELKCPNGCSGHGRCVNGQCVCDEGYTGEDCSQLRCPNDCHSRGRCVEGKCVCEQGFKGYDCSDMSCPNDCHQHGRCVNGMCVCDDGYTGEDCRDRQCPRDCSNRGLCVDGQCVCEDGFTGPDCAELSCPNDCHGQGRCVNGQCVCHEGFMGKDCKEQRCPSDCHGQGRCVDGQCICHEGFTGLDCGQHSCPSDCNNLGQCVSGRCICNEGYSGEDCSEVSPPKDLVVTEVTEETVNLAWDNEMRVTEYLVVYTPTHEGGLEMQFRVPGDQTSTIIQELEPGVEYFIRVFAILENKKSIPVSARVATYLPAPEGLKFKSIKETSVEVEWDPLDIAFETWEIIFRNMNKEDEGEITKSLRRPETSYRQTGLAPGQEYEISLHIVKNNTRGPGLKRVTTTRLDAPSQIEVKDVTDTTALITWFKPLAEIDGIELTYGIKDVPGDRTTIDLTEDENQYSIGNLKPDTEYEVSLISRRGDMSSNPAKETFTTGLDAPRNLRRVSQTDNSITLEWRNGKAAIDSYRIKYAPISGGDHAEVDVPKSQQATTKTTLTGLRPGTEYGIGVSAVKEDKESNPATINAATELDTPKDLQVSETAETSLTLLWKTPLAKFDRYRLNYSLPTGQWVGVQLPRNTTSYVLRGLEPGQEYNVLLTAEKGRHKSKPARVKASTAKEPEIGNLNVSDITPESFNLSWMATDGIFETFTIEIIDSNRLLETVEYNISGAERTAHISGLPPSTDFIVYLSGLAPSIRTKTISATATTEAEPEVDNLLVSDATPDGFRLSWTADEGVFDNFVLKIRDTKKQSEPLEITLLAPERTRDITGLREATEYEIELYGISKGRRSQTVSAIATTAMGSPKEVIFSDITENSATVSWRAPTAQVESFRITYVPITGGTPSMVTVDGTKTQTRLVKLIPGVEYLVSIIAMKGFEESEPVSGSFTTALDGPSGLVTANITDSEALARWQPAIATVDSYVISYTGEKVPEITRTVSGNTVEYALTDLEPATEYTLRIFAEKGPQKSSTITAKFTTDLDSPRDLTATEVQSETALLTWRPPRASVTGYLLVYESVDGTVKEVIVGPDTTSYSLADLSPSTHYTAKIQALNGPLRSNMIQTIFTTIGLLYPFPKDCSQAMLNGDTTSGLYTIYLNGDKAEALEVFCDMTSDGGGWIVFLRRKNGRENFYQNWKAYAAGFGDRREEFWLGLDNLNKITAQGQYELRVDLRDHGETAFAVYDKFSVGDAKTRYKLKVEGYSGTAGDSMAYHNGRSFSTFDKDTDSAITNCALSYKGAFWYRNCHRVNLMGRYGDNNHSQGVNWFHWKGHEHSIQFAEMKLRPSNFRNLEGRRKRA

SEQ ID NO: 310460 - DNA, 5241 bp, Artificial Sequence
  derived and/or modified sequence
atgggcgccatgacccagctgctggccggcgtgttcctggccttcctggccctggccaccgagggcggcgtgctgaagaaggtgatcagacacaagagacagagcggcgtgaacgccaccctgcccgaggagaaccagcccgtggtgttcaaccacgtgtacaacatcaagctgcccgtgggcagccagtgcagcgtggacctggagagcgccagcggcgagaaggacctggccccccccagcgagcccagcgagagcttccaggagcacaccgtggacggcgagaaccagatcgtgttcacccacagaatcaacatccccagaagagcctgcggctgcgccgccgcccccgacgtgaaggagctgctgagcagactggaggagctggagaacctggtgagcagcctgagagagcagtgcaccgccggcgccggctgctgcctgcagcccgccaccggcagactggacaccagacccttctgcagcggcagaggcaacttcagcaccgagggctgcggctgcgtgtgcgagcccggctggaagggccccaactgcagcgagcccgagtgccccggcaactgccacctgagaggcagatgcatcgacggccagtgcatctgcgacgacggcttcaccggcgaggactgcagccagctggcctgccccagcgactgcaacgaccagggcaagtgcgtgaacggcgtgtgcatctgcttcgagggctacgccggcgccgactgcagcagagagatctgccccgtgccctgcagcgaggagcacggcacctgcgtggacggcctgtgcgtgtgccacgacggcttcgccggcgacgactgcaacaagcccctgtgcctgaacaactgctacaacagaggcagatgcgtggagaacgagtgcgtgtgcgacgagggcttcaccggcgaggactgcagcgagctgatctgccccaacgactgcttcgacagaggcagatgcatcaacggcacctgctactgcgaggagggcttcaccggcgaggactgcggcaagcccacctgcccccacgcctgccacacccagggcagatgcgaggagggccagtgcgtgtgcgacgagggcttcgccggcgtggactgcagcgagaagagatgccccgccgactgccacaacagaggcagatgcgtggacggcagatgcgagtgcgacgacggcttcaccggcgccgactgcggcgagctgaagtgccccaacggctgcagcggccacggcagatgcgtgaacggccagtgcgtgtgcgacgagggctacaccggcgaggactgcagccagctgagatgccccaacgactgccacagcagaggcagatgcgtggagggcaagtgcgtgtgcgagcagggcttcaagggctacgactgcagcgacatgagctgccccaacgactgccaccagcacggcagatgcgtgaacggcatgtgcgtgtgcgacgacggctacaccggcgaggactgcagagacagacagtgccccagagactgcagcaacagaggcctgtgcgtggacggccagtgcgtgtgcgaggacggcttcaccggccccgactgcgccgagctgagctgccccaacgactgccacggccagggcagatgcgtgaacggccagtgcgtgtgccacgagggcttcatgggcaaggactgcaaggagcagagatgccccagcgactgccacggccagggcagatgcgtggacggccagtgcatctgccacgagggcttcaccggcctggactgcggccagcacagctgccccagcgactgcaacaacctgggccagtgcgtgagcggcagatgcatctgcaacgagggctacagcggcgaggactgcagcgaggtgagcccccccaaggacctggtggtgaccgaggtgaccgaggagaccgtgaacctggcctgggacaacgagatgagagtgaccgagtacctggtggtgtacacccccacccacgagggcggcctggagatgcagttcagagtgcccggcgaccagaccagcaccatcatccaggagctggagcccggcgtggagtacttcatcagagtgttcgccatcctggagaacaagaagagcatccccgtgagcgccagagtggccacctacctgcccgcccccgagggcctgaagttcaagagcatcaaggagaccagcgtggaggtggagtgggaccccctggacatcgccttcgagacctgggagatcatcttcagaaacatgaacaaggaggacgagggcgagatcaccaagagcctgagaagacccgagaccagctacagacagaccggcctggcccccggccaggagtacgagatcagcctgcacatcgtgaagaacaacaccagaggccccggcctgaagagagtgaccaccaccagactggacgcccccagccagatcgaggtgaaggacgtgaccgacaccaccgccctgatcacctggttcaagcccctggccgagatcgacggcatcgagctgacctacggcatcaaggacgtgcccggcgacagaaccaccatcgacctgaccgaggacgagaaccagtacagcatcggcaacctgaagcccgacaccgagtacgaggtgagcctgatcagcagaagaggcgacatgagcagcaaccccgccaaggagaccttcaccaccggcctggacgcccccagaaacctgagaagagtgagccagaccgacaacagcatcaccctggagtggagaaacggcaaggccgccatcgacagctacagaatcaagtacgcccccatcagcggcggcgaccacgccgaggtggacgtgcccaagagccagcaggccaccaccaagaccaccctgaccggcctgagacccggcaccgagtacggcatcggcgtgagcgccgtgaaggaggacaaggagagcaaccccgccaccatcaacgccgccaccgagctggacacccccaaggacctgcaggtgagcgagaccgccgagaccagcctgaccctgctgtggaagacccccctggccaagttcgacagatacagactgaactacagcctgcccaccggccagtgggtgggcgtgcagctgcccagaaacaccaccagctacgtgctgagaggcctggagcccggccaggagtacaacgtgctgctgaccgccgagaagggcagacacaagagcaagcccgccagagtgaaggccagcaccgccaaggagcccgagatcggcaacctgaacgtgagcgacatcacccccgagagcttcaacctgagctggatggccaccgacggcatcttcgagaccttcaccatcgagatcatcgacagcaacagactgctggagaccgtggagtacaacatcagcggcgccgagagaaccgcccacatcagcggcctgccccccagcaccgacttcatcgtgtacctgagcggcctggcccccagcatcagaaccaagaccatcagcgccaccgccaccaccgaggccgagcccgaggtggacaacctgctggtgagcgacgccacccccgacggcttcagactgagctggaccgccgacgagggcgtgttcgacaacttcgtgctgaagatcagagacaccaagaagcagagcgagcccctggagatcaccctgctggcccccgagagaaccagagacatcaccggcctgagagaggccaccgagtacgagatcgagctgtacggcatcagcaagggcagaagaagccagaccgtgagcgccatcgccaccaccgccatgggcagccccaaggaggtgatcttcagcgacatcaccgagaacagcgccaccgtgagctggagagcccccaccgcccaggtggagagcttcagaatcacctacgtgcccatcaccggcggcacccccagcatggtgaccgtggacggcaccaagacccagaccagactggtgaagctgatccccggcgtggagtacctggtgagcatcatcgccatgaagggcttcgaggagagcgagcccgtgagcggcagcttcaccaccgccctggacggccccagcggcctggtgaccgccaacatcaccgacagcgaggccctggccagatggcagcccgccatcgccaccgtggacagctacgtgatcagctacaccggcgagaaggtgcccgagatcaccagaaccgtgagcggcaacaccgtggagtacgccctgaccgacctggagcccgccaccgagtacaccctgagaatcttcgccgagaagggcccccagaagagcagcaccatcaccgccaagttcaccaccgacctggacagccccagagacctgaccgccaccgaggtgcagagcgagaccgccctgctgacctggagaccccccagagccagcgtgaccggctacctgctggtgtacgagagcgtggacggcaccgtgaaggaggtgatcgtgggccccgacaccaccagctacagcctggccgacctgagccccagcacccactacaccgccaagatccaggccctgaacggccccctgagaagcaacatgatccagaccatcttcaccaccatcggcctgctgtaccccttccccaaggactgcagccaggccatgctgaacggcgacaccaccagcggcctgtacaccatctacctgaacggcgacaaggccgaggccctggaggtgttctgcgacatgaccagcgacggcggcggctggatcgtgttcctgagaagaaagaacggcagagagaacttctaccagaactggaaggcctacgccgccggcttcggcgacagaagagaggagttctggctgggcctggacaacctgaacaagatcaccgcccagggccagtacgagctgagagtggacctgagagaccacggcgagaccgccttcgccgtgtacgacaagttcagcgtgggcgacgccaagaccagatacaagctgaaggtggagggctacagcggcaccgccggcgacagcatggcctaccacaacggcagaagcttcagcaccttcgacaaggacaccgacagcgccatcaccaactgcgccctgagctacaagggcgccttctggtacagaaactgccacagagtgaacctgatgggcagatacggcgacaacaaccacagccagggcgtgaactggttccactggaagggccacgagcacagcatccagttcgccgagatgaagctgagacccagcaacttcagaaacctggagggcagaagaaagagagcctag

SEQ ID NO: 310461 - DNA, 5241 bp, Artificial Sequence
  derived and/or modified sequence
atgggcgcaatgacccagttgctggccggtgtgttcctggccttcttggcactggctaccgaggggggagtgttgaagaaggttattagacataagcgacagtctggagtcaacgccactctgcctgaggagaaccagcctgtagtttttaatcacgtgtataatattaagctccctgttgggagtcaatgcagcgtggacctggagtctgctagcggagagaaggacctggcaccacccagtgaaccgtctgagagctttcaggagcatactgtcgacggcgagaatcagattgtttttacccaccggattaacatcccgagacgcgcttgtggatgcgccgctgccccggacgtaaaggaactcctatcaagactggaagagctggagaatttggtgtcctcgctgagggagcagtgtactgccggggctggctgttgtctacaacccgctaccggtagactggatacacgcccattctgttccggtcgtggcaacttttcaacagagggatgcggctgcgtctgtgagccgggttggaagggtccgaactgttcggaacctgaatgcccgggcaattgccacctgcgcggacgatgcatcgatggccagtgcatttgcgacgacggcttcactggagaggattgcagccagctcgcctgtccttccgattgtaacgaccaaggaaagtgtgtgaatggcgtgtgtatttgctttgaagggtatgcgggtgcagactgctcccgggagatctgcccagttccctgcagcgaggagcacggtacatgtgtagatggcctgtgtgtgtgtcatgatggctttgccggtgatgattgcaataaacccctgtgcctgaataactgttacaaccgtggcagatgtgtcgaaaatgaatgtgtttgtgatgagggcttcacaggagaggattgctccgagcttatttgtcccaacgactgcttcgacaggggccgctgtattaacgggacatgttactgtgaagaaggctttacaggcgaggactgtggtaagccaacctgtccgcatgcttgccatacccagggcagatgtgaggagggacagtgcgtctgtgatgagggatttgcgggagtggattgctccgaaaaaaggtgtccagccgattgccacaatcggggtcggtgtgttgacggccgatgcgaatgtgatgatggttttacaggcgcggattgcggagaactgaagtgtcccaatgggtgcagcggacacgggcggtgcgtcaacggtcagtgcgtgtgtgatgagggttacaccggagaagattgcagccagcttcgttgtcctaacgactgccactcccgcgggcgctgcgtcgagggaaaatgcgtgtgcgagcagggcttcaaagggtatgactgcagcgacatgagctgcccgaacgactgccatcagcatgggaggtgcgtgaacggaatgtgcgtttgcgacgacggttataccggagaagattgccgcgataggcagtgtcctcgtgactgcagtaaccggggcctgtgtgtggacgggcagtgtgtctgtgaggatggcttcacaggccccgactgtgctgaactgtcgtgcccaaacgattgtcacggtcaaggtcgttgtgtaaatggacagtgcgtctgtcatgagggatttatgggtaaagattgtaaagaacagagatgccctagcgattgtcatggtcagggtaggtgtgtggacggccaatgcatatgccacgaaggcttcactggcttagactgcggacaacactcttgcccctctgactgtaataacttaggacagtgcgtgtctgggaggtgcatatgcaacgagggctactcaggtgaggactgctctgaggtatccccgcctaaggatctcgtggtgacagaagttacagaggaaactgtgaatttagcatgggacaatgaaatgagagtgacggagtatctggttgtgtacaccccaactcatgaagggggactggagatgcagtttagagtccccggagatcagactagcaccattattcaggagctcgagccaggggtagagtacttcatcagagtgttcgccatcttagaaaataaaaaaagcattcccgtgtctgcacgcgtagccacctatctgcccgcccccgagggactaaagttcaaaagtataaaggagacttcagttgaagtggagtgggatcctctggatatcgcttttgagacctgggagattatatttcgtaatatgaacaaagaggacgagggtgagatcacaaagagcctaaggcgaccagaaactagctacaggcaaactggactggcaccaggccaggagtatgagattagtctacacatcgtgaaaaacaacacgcggggacccggactgaagcgtgtcaccactacccggctcgatgccccctcacaaatcgaggttaaggacgttacagatacaactgccctgatcacatggttcaaaccactcgccgaaatcgacggcattgagcttacatatggaataaaagatgtgcccggagaccggacaaccattgatcttaccgaagacgagaatcagtacagtattggcaacctcaagcctgataccgagtatgaagtgagcctgatcagtagaagaggcgacatgagctccaatcccgctaaagagaccttcaccacggggcttgatgcacctcgcaacctgagacgcgtgagccagactgacaattctatcacccttgagtggagaaacggaaaggccgccatagactcataccggataaaatacgcaccaatttctggaggggatcacgcagaggtggatgtcccaaagtctcagcaggccactaccaaaaccacattgacaggactgaggcccggaaccgagtacggtattggcgtatccgccgtaaaggaggataaggagtctaaccccgccacaataaacgccgctactgaactggacacccctaaggaccttcaggtcagcgaaacagctgaaacttcgctgacattactttggaagacccctctggctaagttcgacagataccggcttaattactccttgccaacagggcaatgggtgggcgtgcagctgcctaggaatactactagttacgtgttaagggggttggagccaggccaggaatataacgttttgctcactgccgaaaaggggcgccataaatccaagccagcacgggtgaaagcctccacagccaaggagccagaaattggcaatctcaatgtgtccgatataactccagagtccttcaatctgagttggatggcgaccgacggcatctttgaaaccttcaccattgagattatcgacagcaaccgcctcctcgaaaccgtggagtacaacatctctggggccgaaaggacggcacatatctcaggcttgcctcctagtactgattttatcgtctacctgagcgggctcgcaccaagcatccggacaaaaaccatttccgccactgctactacggaggccgagccggaagtggacaatcttttggtctctgatgccacacccgacggcttccggctaagctggactgctgatgagggggtctttgacaactttgttttgaagattagggataccaagaaacaatcagagcctttagaaataacacttctggcccctgaacgaactcgcgacatcactggactcagagaagccactgagtacgagatcgagctgtacggaatttctaagggcaggagatctcaaaccgtgtctgccattgctacgaccgccatgggtagcccgaaggaagtgatattttctgatattaccgaaaattctgcgacagtgagttggagagccccgaccgcccaggtagagtcctttcgtatcacgtacgtgcctatcacggggggcactcctagtatggtcactgtggatggcacaaaaacacagacccgactcgtgaaactgatacctggggtggagtatctagtatcaatcatcgccatgaaaggatttgaagagagtgagcccgtgagcggaagttttaccacagctctggacggcccaagcggactggttactgcaaacatcaccgattccgaggcactcgcccgctggcagcccgcaatagctacagtggatagttatgtgatcagctacaccggagaaaaggtacccgagatcacgcgaactgtgagcggaaataccgttgagtacgctcttacggaccttgagcctgctactgagtacaccttgcggattttcgcagagaaggggccccaaaaatccagcactatcacagccaaatttacaactgatctcgacagcccccgggacctgactgccacagaagtccagagcgaaactgccctattaacatggaggcccccgagggcttccgtgaccgggtatctccttgtctatgagtccgttgatgggacggtcaaggaggttatcgtgggacctgatactacgtcctactctttagctgacctatctccctccacacattatactgctaagatacaggcattaaatggacccctgcgtagtaatatgattcaaactatctttaccacaatcggcctactgtatcctttcccgaaggattgcagccaagccatgttaaacggcgacaccacttccggcctttataccatctatctcaacggtgacaaggcagaggccctggaggtcttctgtgatatgacttccgacggaggcgggtggattgtgtttctgcggcgcaaaaatggacgggaaaacttttatcaaaattggaaggcctacgcagcagggtttggcgaccgacgagaggagttctggctgggactggacaacctgaacaaaattaccgcccagggacagtacgagcttcgggtggacttgagggatcatggcgagaccgccttcgccgtgtacgacaagtttagcgttggggacgcaaagacgcggtataagctgaaggtcgagggctattctggaactgcaggtgactccatggcataccacaatggacgatcatttagcactttcgacaaggacactgactcggccatcactaactgtgcgctgtcctacaaaggagccttctggtaccgcaactgtcacagggtgaacttgatgggcagatacggtgataataaccatagccaaggtgtgaattggtttcattggaagggtcatgagcacagtatccagttcgcagagatgaaacttcgccccagcaattttaggaatctggaagggagacgaaagcgcgcttag

SEQ ID NO: 310462 - DNA, 5241 bp, Artificial Sequence
  derived and/or modified sequence
atgggcgccatgacccagctgctggccggggtcttcctggccttcctggccctggccacagagggcggcgtgctgaagaaggtgatccgccacaagaggcagagcggcgtgaatgccaccctgcctgaggagaaccagcctgtggtgttcaaccacgtgtacaacatcaagctgcctgtgggcagccagtgcagcgtggacctggagagcgccagcggggagaaggacctggcccctccttctgagcccagcgagagcttccaggagcacacagtggatggagagaaccagatcgtgttcacccaccgcatcaacatcccccggcgggcctgtggctgtgccgccgccccagatgtgaaggagctgctgagccggctggaggagctggagaacctggtgagcagcctgcgggagcagtgcacagctggggccggctgctgcctgcagcctgccaccggccgcctggacacccggcccttctgcagcggccggggcaacttcagcacagagggctgcggctgtgtgtgtgagcccggctggaagggccccaactgcagcgagccagaatgtcctggcaactgccacctgcggggccgctgcattgatggccagtgcatctgtgatgatggcttcaccggggaggactgcagccagctggcctgccccagcgactgcaatgaccagggcaaatgtgtgaatggagtgtgcatctgctttgagggctacgccggggctgactgcagccgggagatctgccctgtgccctgcagcgaggagcacggcacctgtgtggatggcctgtgtgtgtgccatgatggctttgctggagatgactgcaacaagcccctgtgcctgaacaactgctacaacagaggccgctgtgtggagaatgaatgtgtgtgtgatgagggcttcaccggggaggactgcagcgagctgatctgccccaatgactgctttgaccggggccgctgcatcaatggcacctgctactgtgaggagggcttcaccggggaggactgtgggaagcccacctgcccccacgcctgccacacccagggccgctgtgaggagggccagtgtgtgtgtgatgagggctttgctggggtggactgcagcgagaagcgctgcccagctgactgccacaacagaggccgctgtgtggatggccgctgtgaatgtgatgatggcttcaccggggctgactgtggggagctgaagtgccccaacggctgcagcggccacggccgctgtgtgaatggccagtgtgtgtgtgatgagggctacaccggggaggactgcagccagctgcgctgccccaatgactgccacagccggggccgctgtgtggagggcaaatgtgtgtgtgagcagggcttcaagggctatgactgcagcgacatgagctgccccaatgactgccaccagcacggccgctgtgtgaatggcatgtgtgtgtgtgatgatggctacaccggggaggactgccgggaccggcagtgcccccgggactgcagcaacagaggcctgtgtgtggatggccagtgtgtgtgtgaagatggcttcaccggccctgactgtgccgagctgagctgccccaatgactgccacggccagggccgctgtgtgaatggccagtgtgtgtgccacgagggcttcatgggcaaggactgcaaggagcagcgctgccccagcgactgccacggccagggccgctgtgtggatggccagtgcatctgccacgagggcttcaccggcctggactgtggccagcacagctgccccagcgactgcaacaacctgggccagtgtgtgtctggccgctgcatctgcaatgaaggctacagcggggaggactgcagcgaggtgtccccacccaaggacctggtggtgacagaggtgacagaggagaccgtgaacctggcctgggacaatgagatgagggtgacagagtacctggtggtgtacacccccacccatgagggcggcctggagatgcagttccgggtgcctggggaccagaccagcaccatcatccaggagctggagcccggggtggagtacttcatccgggtgtttgccatcctggagaacaagaagagcatccctgtgtctgcccgggtggccacctacctgcctgcccctgagggcctgaagttcaagagcatcaaggagacctctgtggaggtggagtgggaccccctggacatcgcctttgagacctgggagatcatcttcaggaacatgaacaaggaggatgaaggagagatcaccaagagcctgcggcggcctgagaccagctaccggcagacaggcctggcccctggccaggagtatgagatcagcctgcacatcgtgaagaacaacacccggggccctggcctgaagagggtgaccaccacccggctggatgcccccagccagatcgaggtgaaggatgtgacagacaccacagccctgatcacctggttcaagcccctggccgagattgatggcatcgagctgacctacggcatcaaggatgtgcctggggacaggaccaccatcgacctgacagaagatgagaaccagtacagcatcggcaacctgaagccagacacagaatatgaggtgtccctcatcagccggcggggggacatgagcagcaacccagccaaggagaccttcaccaccggcctggatgcccccaggaacctgcggcgggtgtcccagacagacaacagcatcaccctggagtggagaaatggcaaggccgccatcgacagctaccgcatcaagtatgcccccatctctggaggagaccacgccgaggtggatgtgcccaagagccagcaggccaccaccaagaccaccctgaccggcctgcggcctggaacagaatatggaattggagtgtctgctgtgaaggaggacaaggagagcaacccagccaccatcaatgctgccacagagctggacacccccaaggacctgcaggtgtctgaaacagctgagaccagcctgaccctgctgtggaagacccccctggccaagtttgaccgctaccgcctgaactacagcctgcccaccggccagtgggtgggcgtgcagctgcccaggaacaccaccagctatgtgctgcggggcctggagcccggccaggagtacaacgtgctgctgacagctgagaagggccgccacaagagcaagccagcccgggtgaaggccagcacagccaaggagcctgagatcggcaacctgaatgtgtctgacatcaccccagagagcttcaacctgtcctggatggccacagatggcatctttgagaccttcaccatcgagatcatcgacagcaaccggctgctggagaccgtggagtacaacatctctggagctgagaggacagcccacatcagcggcctgccccccagcacagacttcatcgtgtacctgagcggcctggcccccagcatccgcaccaagaccatcagcgccacagccaccacagaggccgagcctgaggtggacaacctgctggtgtctgatgccaccccagatggcttccggctgtcctggacagcagatgagggcgtgtttgacaactttgtgctgaagatccgggacaccaagaagcagagcgagcccctggagatcaccctgctggcccctgagaggacccgggacatcaccggcctgcgggaggccacagaatatgaaattgagctgtatggcatcagcaagggccgccgcagccagacagtgtctgccatcgccaccacagccatgggcagccccaaggaggtgatcttcagtgacatcacagagaacagcgccaccgtgtcctggagggcccccacagcccaggtggagagcttccgcatcacctacgtgcccatcactggaggcacccccagcatggtgacagtggatggcaccaagacccagacccggctggtgaagctgatccctggggtggagtacctggtgtccatcatcgccatgaagggctttgaggagagcgagcctgtgtctggcagcttcaccacagccctggatggccccagcggcctggtgacagccaacatcacagacagcgaggccctggcccgctggcagcctgccatcgccaccgtggacagctatgtgatctcctacacaggagagaaggtgcctgagatcaccaggacagtgtctggcaacacagtggagtatgccctgacagacctggagcccgccacagagtacaccctgcgcatctttgctgagaagggcccccagaagagcagcaccatcacagccaagttcaccacagacctggacagcccccgggacctgacagccacagaggtgcagagcgagacagccctgctgacctggaggcctccccgggcctctgtgacaggctacctgctggtgtatgagagcgtggatggcaccgtgaaggaggtgattgtgggccctgacaccaccagctacagcctggccgacctgagccccagcacccactacacagccaagatccaggccctgaatggccccctgcggagcaacatgatccagaccatcttcaccaccatcggcctgctgtaccccttccccaaggactgcagccaggccatgctgaatggagacaccaccagcggcctgtacaccatctacctgaatggagacaaggccgaggccctggaggtgttctgtgacatgaccagtgatggcggcggctggatcgtgttcctgcggaggaagaatggaagagagaacttctaccagaactggaaggcctatgctgctggctttggagacagaagagaggagttctggctgggcctggacaacctgaacaagatcacagcccagggccagtatgagctgcgggtggacctgcgggaccacggggagacagcctttgctgtgtatgacaagttctctgtgggagatgccaagacccgctacaagctgaaggtggagggctacagcggcacagctggggacagcatggcctaccacaacggccgctccttcagcacctttgacaaggacacagacagcgccatcaccaactgtgccctgagctacaagggggccttctggtacagaaactgccaccgggtgaacctgatgggccgctatggagacaacaaccacagccagggcgtgaactggttccactggaagggccacgagcacagcatccagtttgctgagatgaagctgcggcccagcaacttcaggaacctggagggccgcaggaagagggcctag

SEQ ID NO: 310463 - DNA, 5241 bp, Artificial Sequence
  derived and/or modified sequence
atgggcgccatgacccagctgctggccggcgtgttcctggccttccttgcgctcgccacagaaggaggcgtcttgaagaaggtgatccggcacaaacgccagtcaggagtgaatgccaccctgccagaggagaaccagccggtcgtgttcaatcacgtgtataacatcaaactgcccgtagggtcccagtgctcagtggatctcgaatccgcctcaggcgaaaaggatctggcaccgccctctgaaccctcagagtcattccaagaacatacggtggatggcgagaatcaaattgtgttcacacaccggataaatattcctagaagggcctgtggatgcgccgctgctcccgacgtaaaggagctgctgtctcgtttggaggaactcgaaaacttagtctcatcactcagagagcagtgcactgcaggcgccggttgctgtcttcagccagccaccggaaggctagatactaggccattttgcagcgggagggggaacttctcaactgagggatgtggctgtgtctgtgagcctggatggaaggggccaaactgcagcgagccagagtgcccaggcaactgccacctccgaggaagatgtattgacggtcagtgcatctgtgatgatgggttcacaggtgaggattgctcacaactggcatgccctagcgattgtaacgaccagggcaaatgtgtgaacggtgtgtgtatctgtttcgaagggtacgctggggcggattgctccagggaaatctgcccggtgccttgcagcgaggaacatgggacatgtgtggacggcctttgtgtttgtcacgatggattcgccggcgacgattgtaataaacccctctgcttgaataattgttacaacagggggcgctgtgtagaaaacgaatgcgtttgtgacgagggctttactggcgaggactgctccgaactgatttgtcccaacgattgctttgaccgaggaaggtgcatcaatggtacttgttattgtgaggaaggttttactggcgaggattgtggcaaaccaacctgtccccacgcctgccacacgcaagggaggtgcgaagaagggcaatgtgtgtgtgacgagggtttcgccggagtggattgtagcgaaaagcgttgccctgctgattgccacaaccgcgggcggtgcgtggacgggaggtgcgagtgcgacgatggcttcaccggtgccgactgtggggaattgaaatgccccaacgggtgctcagggcatggtagatgtgtgaacggccagtgtgtttgtgacgagggatatactggcgaggactgctctcaactgcgctgtccgaacgattgccactcacgtggccggtgcgttgaagggaagtgtgtatgcgaacaggggttcaaggggtatgactgctccgacatgagctgtcccaacgattgccatcagcatggtaggtgtgtgaacgggatgtgcgtctgcgacgacgggtacactggcgaggattgtcgcgacaggcagtgcccaagggattgctccaatcgtggcctgtgtgtcgatggtcagtgtgtttgcgaagatggttttactggtccagactgtgctgagctttcctgccccaatgactgccatggccagggccggtgcgtgaacgggcaatgtgtctgccacgaagggttcatggggaaagattgcaaggagcaaagatgtccgtcagattgccacggtcaaggccgctgtgtggatggccagtgtatctgtcatgaagggtttaccgggctcgactgcgggcagcatagctgccctagcgactgtaataatctgggtcagtgtgtcagcgggcgctgcatctgtaacgagggatactctggagaggattgctcggaagtgagccctccaaaggatctggtggtgacagaagtgaccgaagagaccgtaaacctggcgtgggacaacgaaatgcgtgtgactgagtacctggtcgtgtacactcccacacacgagggagggctggagatgcaatttagagttccgggggatcaaacctccactattatccaggaactcgagcctggagtggagtactttataagagtctttgccattttagagaataagaagtctatcccggtttctgccagagttgcaacataccttcctgctcctgaaggattaaagttcaaatccattaaggagactagcgtcgaggtagagtgggaccccctggacatagcctttgaaacctgggaaattatatttcgtaatatgaacaaggaggacgaaggggaaatcaccaaatcgttaagacgccctgagacgtcgtaccgccagacgggcctggccccagggcaggagtatgagataagcctgcatatagtgaaaaacaatacaaggggacccggccttaaaagagtgaccaccacgcgtctcgacgctcctagccaaattgaagtgaaggacgtaactgacactaccgccctcatcacatggttcaagcccctcgctgagattgatggcatcgagctgacttatggcatcaaggacgtacctggcgaccgaacaaccatcgacctgacggaggacgaaaaccagtactcaatcggaaacttgaagccggacactgaatacgaagtcagtctgatcagccggcggggcgatatgtccagcaatccagcaaaagagaccttcacaacaggtcttgacgcgccaaggaatctgaggcgggtcagccaaacagacaactccatcacactcgaatggaggaatggtaaggccgctattgattcttaccggatcaagtacgctccaatttcggggggcgatcatgccgaggttgacgtgcccaaaagccagcaggctacaactaagaccacattgactggcctgaggccaggcacggagtacgggatcggggtgtctgccgtaaaggaggacaaggagtccaatccagctactataaacgccgccacagaacttgacacgcccaaagatttgcaggtgtcggaaactgcagagacatccttgacactcctgtggaagaccccactcgcaaagttcgaccggtaccgactgaactactctctgcccacggggcaatgggtgggggttcagctcccacgcaataccacaagctacgtgttgcgaggcctggagccaggccaggagtataatgtgctgctgacggcggagaaggggagacataagtccaagcccgcaagagtgaaagccagcactgccaaagaaccggagatcggcaatctgaacgtatccgacattacccctgagtcgtttaatttgtcctggatggctaccgacgggatcttcgaaacattcacgatagagatcattgactctaatcgccttcttgaaaccgtagagtacaacatctcaggtgccgagagaacagcccacatttccggactgccaccctccactgatttcatcgtgtatctgtctggcttggccccctccatacgaactaaaaccatctccgctacagcgacaaccgaggcagaaccagaagttgacaacctcctggtgagcgatgctaccccggatgggtttcgtctatcatggaccgccgacgaaggcgtctttgataactttgtactgaaaatccgcgatacgaagaaacaaagtgaacctcttgaaatcactttattggccccagaacgcactagggacattactggactgagagaggccaccgaatatgaaattgagctctatggaatctcaaaaggtagaaggagccagaccgtttctgctatagcaacaacggcgatggggtcaccaaaagaagtaattttctcagacattactgaaaatagcgccactgtatcctggcgggctcccactgcacaggtggagtcttttcggattacatatgttcctataaccggcggaacaccatccatggtaaccgtggatggtactaagactcagacccgactcgtgaagcttataccgggggtagaatacttggtatcgataatcgcaatgaaggggtttgaggaatcagagccagtgtcaggaagcttcacaacagccctggacggacccagcggcttggtcaccgctaatatcaccgacagtgaagcccttgctagatggcagcccgccatagctactgttgattcgtacgtcatcagttataccggcgagaaagtccccgagatcactaggaccgtgtcaggtaataccgtcgagtatgctcttactgacctcgaacccgctacagaatatacactgcgtatattcgcagaaaagggaccccagaaatcctccacaatcactgcaaaattcaccacagacttggattcccctcgggatcttacggccaccgaggtgcagtcagaaacggcccttctcacttggagacctccacgtgcctctgtgacaggttaccttcttgtgtatgaatccgttgatggaacagtgaaggaggttattgtggggcctgacacaacttcctacagtctcgccgacctgagcccttcgacccactacactgccaaaattcaggctttgaacgggcctctccgcagcaatatgattcagactattttcaccaccatcggcctgttgtaccctttccctaaagactgctctcaagccatgctcaacggcgatactaccagcggactttatacaatctatctcaatggggacaaggcagaggcgctcgaggtattttgtgacatgacaagcgatggaggaggatggattgtttttcttcgacgcaaaaacggtcgggagaatttctaccaaaattggaaagcttatgccgccgggtttggcgaccgtagagaggaattttggcttggcctggataacttgaataaaatcaccgctcaggggcagtatgaactgcgagtagacctgcgggaccacggggagacagcattcgctgtgtacgacaaattttccgttggcgatgccaaaaccaggtacaagctgaaggtggaaggctactcagggacggcaggtgactccatggcttatcataacggacgctcctttagcacattcgataaggatactgactcagcgatcacaaactgtgccctgtcatacaagggcgctttttggtacaggaactgccaccgagtcaacctaatgggaaggtacggcgataacaatcactcccaaggggtgaactggtttcattggaaagggcatgaacactccatccagtttgctgagatgaagttgcggccatcaaacttccgaaacctcgaagggcgtagaaagcgagcatag

SEQ ID NO: 310464 - DNA, 5240 bp, Artificial Sequence
  derived and/or modified sequence
atgggtgccatgacacaattgctggcaggcgtttttctggcctttcttgcgctggcaactgagggcggtgtcctgaagaaggtgattagacataaaagacagtctggggtcaacgctactctcccagaggaaaatcagcccgtggtgttcaatcacgtgtataatatcaaactccctgtcggctctcaatgctctgttgacttagaatcagcttctggagaaaaagacttggcccctccttccgaaccctcagaatcattccaggaacataccgtcgatggcgagaatcagatcgtttttacccatcggatcaacataccgagacgagcttgcggttgtgcggcagctcccgatgtgaaggagttacttagcaggctggaagaactggagaatctggtgtcttcgctgcgcgagcagtgtactgccggagccggatgctgtttgcagcccgcaacaggcagattggacacccgcccattttgctctgggcgaggaaacttctctactgaaggttgcggctgtgtttgcgaaccgggatggaaaggaccaaattgcagcgagccagaatgtcctggtaactgccatctccgaggcaggtgtatcgatggacaatgcatctgtgatgatggatttacaggggaagactgctctcagctggcatgtccaagtgactgcaatgaccagggaaaatgcgtgaatggcgtgtgtatctgcttcgagggctacgccggtgcagactgctcacgagaaatttgccctgtaccatgcagtgaagagcatggcacctgcgttgacggcctttgcgtgtgccatgatggttttgcgggagacgattgcaataaaccactgtgtctaaacaactgctataaccggggtaggtgtgtagaaaatgagtgcgtgtgcgatgaagggtttacaggagaggattgcagtgagctaatatgccctaacgattgttttgataggggcaggtgcattaatggcacttgctactgtgaagaagggttcactggggaggactgcggtaagcccacctgtcctcacgcctgtcatacgcaagggagatgcgaggaaggtcagtgtgtgtgtgacgaggggtttgctggtgtcgactgttcagaaaagagatgccctgccgattgccacaatagaggcaggtgcgtcgacggaaggtgtgaatgtgacgatgggttcacaggcgctgactgcggcgaactcaagtgtcccaatggctgttccgggcacggaagatgcgtcaatggtcaatgcgtgtgtgacgaagggtataccggcgaggattgcagtcagctgcgttgtcccaatgactgccattccagggggaggtgcgtggaggggaagtgcgtgtgcgagcagggattcaaaggttatgactgcagtgatatgtcatgccctaatgactgccatcagcacgggagatgcgtgaatggtatgtgcgtgtgtgacgacggctacactggggaggactgtagggaccgacagtgcccacgggattgcagtaatcgcggtctctgcgtcgacggacagtgtgtgtgtgaggacggattcactgggcctgattgtgccgagttatcatgtccgaacgattgccacggccaaggacgctgcgtgaacgggcaatgcgtgtgtcatgagggctttatgggcaaggattgcaaagaacaaagatgtccttccgattgccatgggcaggggaggtgcgtcgatgggcagtgtatttgtcatgaggggttcactgggctggactgcggacagcactcctgccccagtgactgcaataaccttggacagtgcgtttccggccgatgcatatgtaacgagggatacagcggagaggattgttccgaggtgagtccacctaaagacctcgtggttacggaggtgactgaggaaactgtgaatctggcatgggataacgaaatgcgggtgacagagtacctggtggtttacacgcctacccacgaggggggtctggaaatgcagtttcgggtccctggcgatcaaacctcgaccatcatccaagagctggaacccggtgtggagtattttatacgtgtgtttgccattctggaaaataagaaatctattcccgtgtccgcacgcgttgccacttacttgcctgctccagagggacttaagtttaaatctataaaagaaacttcggtggaggtcgaatgggatccccttgacattgcgtttgagacttgggaaatcatcttcagaaatatgaataaggaagacgaaggcgagatcacaaagtcacttcgacgtcccgagactagctaccgccagaccggcttggcaccgggacaggaatacgagatttccctgcacatcgttaagaataacacccgaggacccggattaaaaagggtgaccacaacccggttggatgctcccagccagattgaggtaaaggacgtgacagataccacggctctaatcacctggttcaaaccacttgctgagattgacggtattgagcttacatacggcattaaggacgtgcctggagacagaactaccatagacttgacagaggatgaaaatcagtactctattgggaatctaaaacccgacaccgaatacgaggtttccctgatctccaggaggggagatatgagcagcaatcctgctaaggaaactttcacgaccgggctggacgcaccccgtaacctccgcagggtgtcccagaccgataatagcattacgctggagtggaggaacggcaaagccgctatcgacagctatcgtatcaagtatgctccaatcagtggcggagaccacgctgaggttgacgtgcctaaatctcagcaggcgactaccaagacaacacttactggactccggcctgggactgagtacggaatcggcgtctccgccgtcaaggaagacaaagagagcaaccctgctactattaacgccgctaccgagctggacacacctaaggacctccaagttagtgagacggccgagacttccctgactctgttatggaaaacaccgttggcgaagttcgatagatataggttaaattatagcttgcccaccgggcagtgggtaggcgttcaactccctagaaacactacaagttacgttctgcgcggacttgaacccggacaggagtataacgttctcctgactgccgagaagggtcgtcacaagagtaagcctgctagggtgaaggcttctaccgcgaaggaaccagagatcggcaaccttaatgtgtctgatattactccggagtcctttaatctgtcttggatggctacagatggtattttcgagacgttcactattgaaatcatcgattccaaccgcctcctagaaacggtagaatataacattagtggggctgagagaactgcccacattagtggattgccgccatccacagattttattgtgtatctttcaggtctcgcacctagcattcgcacaaagactatttctgcaacagctactactgaggcggagcctgaggtggataacctcctggttagcgatgctacgccggacgggtttaggctgagctggaccgccgatgagggcgtgttcgataactttgtcctaaagattcgtgatacaaagaagcaaagcgagcctctggagatcactcttttggcgcctgaacggaccagagacattacgggccttagggaggccaccgagtatgagatcgagctgtacggcatcagcaaaggtagaaggtcccaaactgtgagtgcaatcgcgaccacggctatgggctctcccaaggaggtaatttttagcgatattaccgaaaactctgccaccgtgtcctggcgagcaccaacggctcaggtggagagtttccggattacatatgttcctataaccggaggtactccaagtatggtaacagtcgatgggacgaagactcagactagactagttaagctaattccgggtgtggaatatttggttagtattatcgctatgaaaggcttcgaggagagtgaaccagtcagtggctcttttaccaccgcgctggacggaccttcaggcctcgttaccgccaacatcaccgacagcgaggccttggctcgctggcagccagcaattgcaactgtggattcatacgttatatcctacactggtgagaaagtaccagaaatcactagaaccgtttctggtaatacggtggaatatgctctgactgacctggagcccgcaactgaatatacacttcggatttttgcggaaaagggaccgcagaagtcttccaccattacagctaagttcaccacagacctggatagccctcgggacctcaccgccacggaggttcaaagtgaaactgccctgctcacctggaggccgcctagagcaagcgtaactggctatttgctcgtttatgaatccgtcgatggaacagtcaaggaagttatcgtgggcccagacacgaccagttattcgctggctgacctgtcaccctccactcattacaccgccaagattcaagcactcaacggacccctacgctccaacatgatacagacaatattcaccactattggcctgctatatccatttccaaaggattgttcacaggcgatgcttaacggcgacacaacttctggactatatactatctacctcaatggtgacaaggcggaagccctggaagtcttctgcgacatgacctccgatggtggagggtggattgtgttccttcgaaggaagaacggacgggaaaatttttaccaaaattggaaggcttacgccgctggctttggtgatcgcagagaagaattctggttgggtctcgataacctcaacaaaattaccgctcaaggccagtatgagctgcgcgttgatttacgggaccatggggaaacggcgtttgccgtctacgataagtttagtgtgggggatgccaaaacaaggtacaagctgaaagttgagggatattccgggaccgccggtgactctatggcttaccacaacggtcggtccttctccacattcgataaggataccgattccgcaattaccaactgcgctctgagttacaagggggcattctggtatcgcaactgtcaccgggttaatctgatgggtcgatacggggacaacaatcactcccagggagttaactggttccactggaaagggcatgagcatagcatacagttcgctgagatgaagctgcgaccatctaacttcagaaatctggaaggcagacgtaaacgggcata

SEQ ID NO: 310465 - DNA, 5241 bp, Artificial Sequence
  derived and/or modified sequence
atgggcgctatgacacagctgttagcaggcgtgtttctggcatttttggctctggccaccgaaggtggtgtacttaagaaggtgattagacacaaaaggcagagcggtgttaacgccaccctccccgaagaaaaccagcccgtcgtgttcaaccatgtgtacaacatcaagctcccggtgggttcccagtgctcagtggacttggaatccgcatcaggcgaaaaagaccttgctcctccctcagagcccagcgagagctttcaagagcacacagtcgatggagaaaaccagatcgtgttcacacacaggatcaacattccacggcgggcctgcgggtgtgccgccgcccccgatgtaaaggaacttctgagtagactcgaggaactggagaacctggtcagctcattaagggagcagtgtaccgctggcgccgggtgctgccttcagccagccactggccgactggataccaggccattctgttccggccgcgggaacttttccactgaaggctgcgggtgcgtttgtgaaccgggatggaaaggaccaaattgcagtgaacccgagtgtccgggcaattgtcacctgagaggccggtgtatagacgggcagtgcatttgcgatgatggctttaccggagaagattgctcgcagctcgcctgtccttctgactgcaatgatcagggcaaatgcgtcaacggcgtgtgtatttgctttgagggatacgcgggagccgactgcagtagggaaatttgcccagttccctgctccgaagagcacggtacatgtgttgatggcctgtgtgtttgtcacgacggtttcgccggcgacgattgcaacaagccgctgtgtctgaataactgctataaccgcggccggtgcgttgagaatgagtgcgtctgcgatgaggggtttactggggaagattgctcagagctgatctgtcccaatgattgcttcgataggggaaggtgcataaatgggacatgctattgtgaagagggattcactggagaagattgcggcaagcctacctgtcctcatgcctgccacacacaagggagatgcgaggaaggccagtgtgtgtgcgatgaggggtttgcgggagtagactgtagcgaaaaacggtgcccagccgattgtcacaatcgcggtagatgcgtggacggaagatgtgagtgtgatgacgggtttaccggagcagattgtggtgagctgaaatgcccaaacggctgctctggccatggtcgatgcgtaaatggtcagtgcgtgtgtgatgaggggtatacgggcgaggattgctctcaactgagatgcccaaacgactgccacagtagagggaggtgcgttgagggtaagtgtgtgtgtgagcaaggatttaagggatatgattgtagtgacatgtcgtgccctaacgactgccatcagcacggccgatgtgtaaatggtatgtgcgtgtgcgacgatggatacacaggcgaagactgtagggacagacagtgtccaagggactgctccaatagagggttatgtgtggacggccagtgtgtttgcgaggatgggttcaccggccctgattgtgccgaactgtcctgcccaaatgattgccatggtcagggaaggtgtgttaacggccagtgcgtgtgccatgaaggctttatgggtaaagactgtaaggaacagcggtgtcctagtgattgtcacgggcaggggcgatgcgtcgacgggcagtgtatttgccacgagggtttcactggattagattgcggacagcatagctgcccatccgactgtaataatctgggacagtgcgtgagcggaaggtgcatatgcaacgaaggctattctggtgaggattgttcggaggtgtctccgcccaaagatctagtcgttacagaagtcacagaggaaactgtgaaccttgcatgggacaacgaaatgagagtgactgagtacctagtggtatacacgcccacacatgaggggggcttggagatgcagtttagagttcctggggaccagacatccaccattattcaggaactggagcctggagtggaatatttcatacgggttttcgccatcctggagaacaagaagagtatccctgtcagcgcgagggtggccacctatctccccgcccccgaaggcttaaagttcaagtcgattaaagagacttctgtggaggtggagtgggacccactcgatattgccttcgagacatgggagattatcttcagaaatatgaacaaggaagacgagggtgagatcaccaagagccttagacggccggaaaccagttaccgccagacaggcctggcgcctggccaagagtacgaaatcagtctgcacattgtaaagaataacacccgggggccaggactgaagcgcgttacgaccaccagactggacgctccaagtcagattgaggtcaaggatgttaccgataccacagcattgatcacctggtttaagccactggctgagatagatggaatagaactgacttatggcataaaagatgttcctggcgacagaaccaccatagacttaaccgaagacgagaatcagtacagcatcggcaacctcaagcctgacacggagtacgaggtttcactgatatctcggcgaggcgatatgtcttccaatccggccaaagagacattcaccacaggtcttgacgctccaaggaatctgaggagggtgtcacagacggataattccattacccttgaatggagaaatgggaaggctgctatcgacagttaccgcattaaatacgcccccattagcgggggagatcacgctgaggtggacgtgcccaaatcccaacaggcaacaaccaaaaccactctgacgggtctgcgccccggcactgaatatggcatcggggtgtctgccgtgaaggaagacaaggagagtaatccagctaccatcaacgcagccaccgaactcgacactccaaaagatctacaggtctcagagacagccgagacttccctgacactgttatggaagacccctcttgccaaattcgaccgctatagactcaattactctttgcctaccggccagtgggtcggcgtccaacttcctaggaatactacgagctatgtgctacggggactggaacccggccaggagtacaacgtgctgcttactgccgagaagggaagacataagtcaaaaccagctcgggtcaaggcctcaactgctaaggaaccagagatcgggaatttgaacgtgtcagatattactcctgagtcctttaatctatcttggatggccacagacggaatatttgaaacttttacaatcgagatcatagactcaaatagattgcttgagactgttgagtacaacatttccggcgcggagagaacagctcacatctcgggcttaccaccctctactgatttcattgtctatctctcaggcctagcgccgtcgatccgcaccaaaacgatatccgccactgccacgaccgaggctgagcccgaagtggataatcttttagtttctgacgccactcctgacggctttagattatcttggacggccgacgaaggtgtctttgacaactttgtcctgaaaattagggatacaaagaagcagagtgagcctctagagataaccctgctggctcctgagagaactcgcgacatcacaggtctgcgagaggccactgaatacgagattgagctttacggcataagtaagggccgtcgttcgcagaccgtgagcgcgattgccaccacggctatggggtctcctaaagaagtcatcttcagtgacattacggagaattctgcaaccgtgtcatggagggctccaacggcccaggtagaaagctttcggataacctatgtgccaatcactggaggaaccccttccatggtgactgtggacggaactaaaactcaaaccaggctggttaagcttatcccaggtgtggaatacctggtgtctatcatcgcaatgaaaggttttgaagaaagcgaacccgtatcagggtcctttactaccgcactcgacggacctagcggcttggtgacagctaatataactgattcagaggctttggcccggtggcaacctgcgatcgccacagtagactcttacgttatatcttatacgggggagaaagttccggagatcactcggactgtttcaggtaacacggtcgaatacgctctgacggatttagaacccgctacagaatacaccctgagaatcttcgccgaaaaaggacctcaaaaaagttcaacgatcaccgcaaagttcactacagacctggattcccccagggaccttaccgccacagaggttcagagcgagaccgcattactgacatggaggcctccccgggcctcggtgactggatacctgctggtttacgagtctgtcgacgggaccgtgaaggaggtgatagtgggcccagatacaacaagttattcacttgctgacctgtccccaagcactcattacaccgccaaaattcaggctcttaatggccccctgagatcgaacatgatacagaccatattcaccactatcggactgctgtaccccttcccgaaagattgtagccaggcgatgttgaacggagacacaacgtctggtctctacaccatttatctgaacggcgataaagcggaggctctggaggtgttctgcgacatgacctccgatgggggcggctggatcgttttcttgagacgcaaaaatggccgggagaacttttatcaaaattggaaagcttacgccgccggtttcggcgaccgcagggaagagttttggctagggctggacaacctcaataaaatcactgcccaaggacaatacgaactgcgagttgatcttcgagaccacggcgaaacagcgtttgctgtctatgacaagttctcagtgggggatgccaagaccagatacaaactgaaggtcgagggatactcaggcaccgcaggagacagtatggcctatcataatggacggagttttagcacatttgataaggatacagacagcgcgatcaccaattgcgccctgagctataaaggcgccttttggtaccggaactgtcaccgcgtgaacctgatggggagatatggagataacaaccacagtcagggcgtaaactggtttcactggaaaggtcacgagcattccatacagtttgctgaaatgaaactgaggcccagtaattttaggaacctagaggggaggagaaagagagcctag

SEQ ID NO: 310466 - DNA, 5241 bp, Artificial Sequence
  derived and/or modified sequence
atgggcgctatgacgcagttgttggccggtgtatttttagcattcctagccctggccaccgagggcggcgtcttaaaaaaggtaataaggcataagcgacaatcaggggttaatgcaactctccctgaggagaatcagccagtcgtgttcaaccatgtttataatatcaaattgcctgtagggtctcagtgcagcgtggacctggagtccgcatcaggggagaaagatctcgccccaccatccgagccttccgaaagcttccaggagcatacagtggacggggaaaatcaaatagtttttacacatcggattaacataccacgacgagcctgtggttgtgcggctgctccagatgtgaaggaattgttgagtcgtctggaggagctcgaaaatttagtgtccagcttaagagaacaatgcaccgctggtgcgggctgctgccttcaacctgcaacagggcgcctcgatacccgtcccttttgttcaggcaggggcaactttagtacagaggggtgcggttgtgtatgcgaacctggatggaagggccccaattgctccgaacccgagtgtccagggaactgccacctccgcggaaggtgtatagatggacagtgtatttgcgacgacggctttacgggcgaagactgttcccaattagcctgcccttccgactgtaatgatcaggggaaatgtgtcaacggagtatgtatctgcttcgaagggtacgctggtgcagattgttcccgagaaatatgccctgtaccttgttcagaggaacatgggacctgtgtggatggcttatgtgtttgccatgacgggttcgcgggcgacgattgcaacaagcccctatgcttaaataactgctacaatcggggtcggtgtgtggaaaacgagtgtgtgtgcgacgaaggttttacaggcgaggattgtagtgaactcatctgtcctaacgattgtttcgatagagggaggtgtattaatggcacttgctattgtgaggaggggtttacaggcgaggattgcggaaagcctacatgccctcatgcttgtcatacccagggccggtgtgaagagggccagtgcgtgtgtgacgaagggtttgctggagtggattgttcagagaagcgatgtcctgcagattgtcataatagagggaggtgcgtagatggaagatgcgagtgcgatgacggatttacaggggcggattgcggagagttaaagtgcccaaatggatgcagcggccatggaaggtgcgttaatggccaatgtgtgtgtgacgaaggctacaccggggaagattgctcccagctgagatgtccaaacgactgtcactcccgaggccggtgcgtagagggaaagtgtgtgtgcgaacagggctttaaaggttacgactgcagcgatatgagttgccctaacgattgtcatcaacacggtaggtgtgttaacgggatgtgcgtgtgtgatgacggatacaccggggaagattgcagagataggcaatgccccagggattgttccaatagaggcctgtgcgtggacggccaatgtgtttgcgaggacggttttacaggtcccgactgcgctgaactgagttgtcccaacgactgtcacggacagggcagatgtgtgaacggccaatgcgtgtgtcatgagggatttatgggaaaagactgtaaagaacagagatgtcctagcgattgccatgggcaggggcgttgcgtagacggacaatgcatctgtcatgaaggttttaccggcctggactgcggacaacattcatgcccttctgattgtaataacctgggtcaatgcgtgagtggaaggtgtatttgcaatgaaggttattcaggagaggattgttctgaagtgagtccacccaaggacctggtcgtaactgaggtgacggaggagacagtcaatttagcgtgggataatgagatgcgagtgacagaatatctggttgtgtataccccgacccacgaaggcggccttgagatgcagtttcgagtcccaggtgatcaaacttctactataattcaggaactggaacccggcgtcgaatacttcattagagtcttcgctattttagaaaacaagaagtcaatcccagtctcagccagggtcgcgacatatctgcccgctcctgaagggctcaaatttaaatcaattaaggagactagtgtagaagtagagtgggatcctctggatattgcattcgaaacttgggagataatttttaggaacatgaacaaggaggacgagggagagattacaaaaagtttacggcgaccagagacaagttacagacaaacagggcttgcgcccggtcaggagtacgagatcagcctccacattgtgaaaaacaataccaggggcccaggactaaagagggtgacaaccaccaggctcgatgcaccctctcagatcgaagttaaagatgtgactgacaccactgctctgattacttggttcaagcctctcgctgagatagacggaattgaattgacctacgggattaaagacgtcccaggtgacaggaccactatcgatttaaccgaagatgaaaaccagtactccatcggcaacctgaaacctgacaccgagtacgaagtgagtctcatctcaagacggggagacatgtcctccaatcctgcgaaagagacatttaccaccggcctagatgctcctagaaatctacggagggtatctcagactgacaattctatcacactcgagtggaggaacggcaaggcggcgatcgatagttaccggatcaaatatgctccaatttctggaggagaccacgctgaagtggatgtaccaaagtcccaacaggccaccaccaaaacaactctgacaggtttacggccgggtacagaatacggtatcggagtgagtgcagtaaaagaagataaagaaagcaaccccgctacaatcaatgcagcgacagaactggatacccctaaggacctgcaggtctctgaaaccgcagaaacaagcttgacactgctgtggaaaacccctctggccaagtttgatcgctaccgcctgaactactccctccctactgggcagtgggtgggtgtgcaactccctagaaataccaccagttacgtcctcagaggtctggaaccgggacaggaatataatgtgctgcttactgcagagaaaggcagacataaaagtaaacctgcaagagttaaagcctccacagctaaagaaccagaaattggtaatcttaacgtttctgacatcaccccagaaagtttcaaccttagctggatggctaccgatgggatcttcgaaacattcaccatcgagatcatcgattccaatagacttctagagactgtcgaatacaacatctccggagcagagcgaactgcccacatctctggcctcccaccaagcaccgatttcatagtgtacctctcagggttggcaccttccatccgcaccaaaactatctccgcgaccgcaaccactgaagccgaacccgaggtggataacctcctggtgagcgatgcaacgccggacggatttagactgagctggacagccgatgaaggagttttcgacaatttcgtgctaaagattcgcgacacaaaaaagcagagcgagccactcgaaatcactcttctggctccagaacgcactagagatattacaggactccgggaggccacagagtatgagatcgaactatacggaatttcaaagggtcgaaggtcacagactgttagtgctatcgcaactacagcaatggggtcgcctaaggaggttatcttttctgatatcactgagaattccgccactgtgtcatggagagcccccacagcgcaggttgaatcatttaggattacttacgtgcctataaccggtggtaccccctctatggtgaccgttgatgggacaaagactcaaacccgactcgtgaaactgatccctggagtagagtatttggtgtccataatcgccatgaaaggttttgaggaaagtgagccagtctccgggtctttcactaccgctctggatggcccttccggcctggtgacagcaaatatcaccgatagcgaggcactggcaagatggcaaccagcgattgccacagttgactcttacgtgatctcttacactggagagaaagtaccagagattacacggaccgtgtcaggaaacacagtggaatatgcactaactgacctcgaaccagccacagaatacaccctgcgcatattcgccgaaaagggacctcagaaatcgagtacgataacagctaagtttactacagatttggattctcctcgagatcttactgccacagaggttcagtcagagacagctctcctgacctggagaccacctagagctagcgttactggttacctgttagtgtatgagtccgtagacggcaccgtgaaagaagtaatcgttggacccgatacaacctcttactccttggccgatttgtcaccctcgacacattatacagctaaaatacaggctttgaatggaccgctaagatctaatatgatacagaccatattcactactattggcttactgtacccatttcctaaagattgctctcaggccatgctgaacggcgataccacctccggcttgtatacaatttacttgaacggcgataaagcagaagctctcgaagtgttctgcgatatgacctccgatggtggcgggtggatagttttcctgcgtcggaaaaatggtcgtgagaacttttatcagaactggaaagcatatgcagcaggatttggggaccgaagggaggaattttggctgggactggataatctcaataaaattaccgcccagggacaatacgagctgagagtcgatctgcgcgaccatggagagaccgccttcgccgtgtacgacaaattttctgtaggcgacgccaaaacccgatacaagctcaaagtggaaggctactccggaactgctggtgacagtatggcctaccacaatggaagatctttcagtactttcgacaaagatacggattctgcaatcacaaactgcgcactctcgtataaaggggccttttggtacaggaactgccacagagtaaacctgatggggagatatggagataacaaccacagtcagggcgtaaactggtttcactggaaaggtcacgagcattccatacagtttgctgaaatgaaactgaggcccagtaattttaggaacctagaggggaggagaaagagagcctag

SEQ ID NO: 310467 - DNA, 6233 bp, Artificial Sequence
  derived and/or modified sequence
attacagaggaaggagctcgctatataagccagccaaagttggctgcaccggccacagcctgcctactgtcacccgcctctcccgcgcgcagatacacgcccccgcctccgtgggcacaaaggcagcgctgctggggaactcgggggaacgcgcacgtgggaaccgccgcagctccacactccaggtacttcttccaaggacctaggtctctcgcccatcggaaagaaaataattctttcaagaagatcagggacaactgatttgaagtctactctgtgcttctaaatccccaattctgctgaaagtgagataccctagagccctagagccccagcagcacccagccaaacccacctccaccatgggggccatgactcagctgttggcaggtgtctttcttgctttccttgccctcgctaccgaaggtggggtcctcaagaaagtcatccggcacaagcgacagagtggggtgaacgccaccctgccagaagagaaccagccagtggtgtttaaccacgtttacaacatcaagctgccagtgggatcccagtgttcggtggatctggagtcagccagtggggagaaagacctggcaccgccttcagagcccagcgaaagctttcaggagcacacagtggatggggaaaaccagattgtcttcacacatcgcatcaacatcccccgccgggcctgtggctgtgccgcagcccctgatgttaaggagctgctgagcagactggaggagctggagaacctggtgtcttccctgagggagcaatgtactgcaggagcaggctgctgtctccagcctgccacaggccgcttggacaccaggcccttctgtagcggtcggggcaacttcagcactgaaggatgtggctgtgtctgcgaacctggctggaaaggccccaactgctctgagcccgaatgtccaggcaactgtcaccttcgaggccggtgcattgatgggcagtgcatctgtgacgacggcttcacgggcgaggactgcagccagctggcttgccccagcgactgcaatgaccagggcaagtgcgtaaatggagtctgcatctgtttcgaaggctacgccggggctgactgcagccgtgaaatctgcccagtgccctgcagtgaggagcacggcacatgtgtagatggcttgtgtgtgtgccacgatggctttgcaggcgatgactgcaacaagcctctgtgtctcaacaattgctacaaccgtggacgatgcgtggagaatgagtgcgtgtgtgatgagggtttcacgggcgaagactgcagtgagctcatctgccccaatgactgcttcgaccggggccgctgcatcaatggcacctgctactgcgaagaaggcttcacaggtgaagactgcgggaaacccacctgcccacatgcctgccacacccagggccggtgtgaggaggggcagtgtgtatgtgatgagggctttgccggtgtggactgcagcgagaagaggtgtcctgctgactgtcacaatcgtggccgctgtgtagacgggcggtgtgagtgtgatgatggtttcactggagctgactgtggggagctcaagtgtcccaatggctgcagtggccatggccgctgtgtcaatgggcagtgtgtgtgtgatgagggctatactggggaggactgcagccagctacggtgccccaatgactgtcacagtcggggccgctgtgtcgagggcaaatgtgtatgtgagcaaggcttcaagggctatgactgcagtgacatgagctgccctaatgactgtcaccagcacggccgctgtgtgaatggcatgtgtgtttgtgatgacggctacacaggggaagactgccgggatcgccaatgccccagggactgcagcaacaggggcctctgtgtggacggacagtgcgtctgtgaggacggcttcaccggccctgactgtgcagaactctcctgtccaaatgactgccatggccagggtcgctgtgtgaatgggcagtgcgtgtgccatgaaggatttatgggcaaagactgcaaggagcaaagatgtcccagtgactgtcatggccagggccgctgcgtggacggccagtgcatctgccacgagggcttcacaggcctggactgtggccagcactcctgccccagtgactgcaacaacttaggacaatgcgtctcgggccgctgcatctgcaacgagggctacagcggagaagactgctcagaggtgtctcctcccaaagacctcgttgtgacagaagtgacggaagagacggtcaacctggcctgggacaatgagatgcgggtcacagagtaccttgtcgtgtacacgcccacccacgagggtggtctggaaatgcagttccgtgtgcctggggaccagacgtccaccatcatccaggagctggagcctggtgtggagtactttatccgtgtatttgccatcctggagaacaagaagagcattcctgtcagcgccagggtggccacgtacttacctgcacctgaaggcctgaaattcaagtccatcaaggagacatctgtggaagtggagtgggatcctctagacattgcttttgaaacctgggagatcatcttccggaatatgaataaagaagatgagggagagatcaccaaaagcctgaggaggccagagacctcttaccggcaaactggtctagctcctgggcaagagtatgagatatctctgcacatagtgaaaaacaatacccggggccctggcctgaagagggtgaccaccacacgcttggatgcccccagccagatcgaggtgaaagatgtcacagacaccactgccttgatcacctggttcaagcccctggctgagatcgatggcattgagctgacctacggcatcaaagacgtgccaggagaccgtaccaccatcgatctcacagaggacgagaaccagtactccatcgggaacctgaagcctgacactgagtacgaggtgtccctcatctcccgcagaggtgacatgtcaagcaacccagccaaagagaccttcacaacaggcctcgatgctcccaggaatcttcgacgtgtttcccagacagataacagcatcaccctggaatggaggaatggcaaggcagctattgacagttacagaattaagtatgcccccatctctggaggggaccacgctgaggttgatgttccaaagagccaacaagccacaaccaaaaccacactcacaggtctgaggccgggaactgaatatgggattggagtttctgctgtgaaggaagacaaggagagcaatccagcgaccatcaacgcagccacagagttggacacgcccaaggaccttcaggtttctgaaactgcagagaccagcctgaccctgctctggaagacaccgttggccaaatttgaccgctaccgcctcaattacagtctccccacaggccagtgggtgggagtgcagcttccaagaaacaccacttcctatgtcctgagaggcctggaaccaggacaggagtacaatgtcctcctgacagccgagaaaggcagacacaagagcaagcccgcacgtgtgaaggcatccactgccaaagaacctgaaattggaaacttaaatgtttctgacataactcccgagagcttcaatctctcctggatggctaccgatgggatcttcgagacctttaccattgaaattattgattccaataggttgctggagactgtggaatataatatctctggtgctgaacgaactgcccatatctcagggctaccccctagtactgattttattgtctacctctctggacttgctcccagcatccggaccaaaaccatcagtgccacagccacgacagaagccgaaccggaagttgacaaccttctggtttcagatgccaccccagacggtttccgtctgtcctggacagctgatgaaggggtcttcgacaattttgttctcaaaatcagagataccaaaaagcagtctgagccactggaaataaccctacttgcccccgaacgtaccagggacataacaggtctcagagaggctactgaatacgaaattgaactctatggaataagcaaaggaaggcgatcccagacagtcagtgctatagcaacaacagccatgggctccccaaaggaagtcattttctcagacatcactgaaaattcggctactgtcagctggagggcacccacagcccaagtggagagcttccggattacctatgtgcccattacaggaggtacaccctccatggtaactgtggacggaaccaagactcagaccaggctggtgaaactcatacctggcgtggagtaccttgtcagcatcatcgccatgaagggctttgaggaaagtgaacctgtctcagggtcattcaccacagctctggatggcccatctggcctggtgacagccaacatcactgactcagaagccttggccaggtggcagccagccattgccactgtggacagttatgtcatctcctacacaggcgagaaagtgccagaaattacacgcacggtgtccgggaacacagtggagtatgctctgaccgacctcgagcctgccacggaatacacactgagaatctttgcagagaaagggccccagaagagctcaaccatcactgccaagttcacaacagacctcgattctccaagagacttgactgctactgaggttcagtcggaaactgccctccttacctggcgacccccccgggcatcagtcaccggttacctgctggtctatgaatcagtggatggcacagtcaaggaagtcattgtgggtccagataccacctcctacagcctggcagacctgagcccatccacccactacacagccaagatccaggcactcaatgggcccctgaggagcaatatgatccagaccatcttcaccacaattggactcctgtaccccttccccaaggactgctcccaagcaatgctgaatggagacacgacctctggcctctacaccatttatctgaatggtgataaggctgaggcgctggaagtcttctgtgacatgacctctgatgggggtggatggattgtgttcctgagacgcaaaaacggacgcgagaacttctaccaaaactggaaggcatatgctgctggatttggggaccgcagagaagaattctggcttgggctggacaacctgaacaaaatcacagcccaggggcagtacgagctccgggtggacctgcgggaccatggggagacagcctttgctgtctatgacaagttcagcgtgggagatgccaagactcgctacaagctgaaggtggaggggtacagtgggacagcaggtgactccatggcctaccacaatggcagatccttctccacctttgacaaggacacagattcagccatcaccaactgtgctctgtcctacaaaggggctttctggtacaggaactgtcaccgtgtcaacctgatggggagatatggggacaataaccacagtcagggcgttaactggttccactggaagggccacgaacactcaatccagtttgctgagatgaagctgagaccaagcaacttcagaaatcttgaaggcaggcgcaaacgggcataaattccagggaccactgggtgagagaggaataaggcccagagcgaggaaaggattttaccaaagcatcaatacaaccagcccaaccatcggtccacacctgggcatttggtgagagtcaaagctgaccatggatccctggggccaacggcaacagcatgggcctcacctcctctgtgatttctttctttgcaccaaagacatcagtctccaacatgtttctgttttgttgtttgattcagcaaaaatctcccagtgacaacatcgcaatagttttttacttctcttaggtggctctgggaatgggagaggggtaggatgtacaggggtagtttgttttagaaccagccgtattttacatgaagctgtataattaattgtcattatttttgttagcaaagattaaatgtgtcattggaagccatccctttttttacatttcatacaacagaaaccagaaaagcaatactgtttccattttaaggatatgattaatattattaatataataatgatgatgatgatgatgaaaactaaggatttttcaagagatctttctttccaaaacatttctggacagtacctgattgtattttttttttaaataaaagcacaagtacttttgagtttgtt

SEQ ID NO: 310468 - protein, 276 aa, Artificial Sequence
  derived and/or modified sequence
MNSKRMLLLVLFAFSLMLVERYFRNHQVEELRLSDWFHPRKRPDVITKTDWLAPVLWEGTFDRRVLEKHYRRRNITVGLAVFATGRFAEEYLRPFLHSANKHFMTGYRVIFYIMVDAFFKLPDIEPSPLRTFKAFKVGTERWWLDGPLVHVKSLGEHIASHIQDEVDFLFSMAANQVFQNEFGVETLGPLVAQLHAWWYFRNTKNFPYERRPTSAACIPFGQGDFYYGNLMVGGTPHNILDFIKEYLNGVIHDIKNGLNSTYEKHLNKYFYLNKPT

SEQ ID NO: 310469 - DNA, 831 bp, Artificial Sequence
  derived and/or modified sequence
atgaacagcaaacgaatgctcttgttggtgttgttcgcattctccttaatgctggtcgaaaggtacttccggaaccaccaagttgaggagctgcgcttgagcgactggtttcacccccgcaagcgaccagacgtaatcactaagacagactggctagcccccgtcttatgggagggcacttttgataggagagtccttgagaagcattacaggcgccggaacatcacagtgggactggcggtcttcgccaccggcaggttcgccgaagagtatctgcgtccattcctgcacagtgcaaataagcatttcatgactggttatcgtgtgatcttctacatcatggtggacgcctttttcaagctcccagatatcgagccatctccccttaggacctttaaagcattcaaggttggcactgaacgatggtggctcgacgggccactggtgcacgttaaatccctcggcgaacatatagcgtcccacatccaggatgaagtagatttcctcttcagtatggcagccaatcaggtattccagaatgagtttggcgtggaaacgttgggtcccctggtggcccaactacatgcctggtggtatttcaggaatacgaaaaattttccttacgaaaggagaccaaccagtgctgcttgcatccctttcgggcaaggagatttttactacggaaatctcatggttgggggtacaccacacaacattcttgattttataaaggaatatctgaacggggttattcacgacataaagaacggcctcaactccacgtacgagaaacacctgaacaagtacttctacctaaataagccaacgtag

SEQ ID NO: 310470 - DNA, 1526 bp, Artificial Sequence
  derived and/or modified sequence
attctcctagatcaagaagacttcctcatcaagacctcattctatttgcacagccctgcagtggagagatttattgcgtttctttcatgcaatcaacgcagactttgatgtgaacacggggagagacagtgcacgtgcagctgacccacggggaacagtcagccccgggcacttgaaggagaacagaggcttccctaactcaagtcgctgtctcctgccagctgaacattctagaagcaacctctaaggagagaatgaattctaaaagaatgctgttattggttttatttgctttttcactgatgttggttgagcgttatttcaggaatcaccaagtagaagaacttcggctctcagactggtttcatcctagaaaacgccctgatgttataacgaaaacagactggctcgctcctgtcctatgggaagggactttcgacaggcgggtcctggaaaaacattacagaaggcggaatatcactgtgggcctggccgtctttgctactggcaggtttgcagaggagtacctgaggccgttcctacactccgcaaataagcacttcatgacaggctaccgagtgatcttctacatcatggtggacgccttcttcaagctgcctgacatagagcccagtcctcttcgaacgttcaaagcatttaaagtgggcaccgagaggtggtggctcgatggccccctggtgcatgtgaagagcctgggtgaacacatcgccagtcacatccaggacgaggtggacttcctcttcagcatggctgccaaccaggtcttccagaatgagttcggggtggagaccctgggcccgttggtggcccagctccacgcctggtggtatttcagaaacaccaagaacttcccttatgagaggaggccgacctcagcagcttgcatcccgtttggacagggagatttctattatggcaacttgatggttggtggcacaccccataatattttagacttcatcaaagaatatctgaacggagttattcatgacatcaaaaatggactcaatagcacttatgaaaagcaccttaacaaatatttttacctcaataaacccacctagctgttatcaccagcatacagctgggatcttgcattttctcctcctccacagatccaatacgtcaaggtcgcacatgattcccagaggaaattatgaattacgccatgaggtttatgacgaataaatgaatcacggcaatttcttataaatgagggaagtcttaagaccttccattttttagagacatacaaatttacatccttcccaaataaatgtttcttcttgccattttgagccatcttatttggctaatgtaggataaagaataaaaggataattacttaatgttaatacacagtaatgttattatctatgtattgtagacaatgtgaaaatacatttgacatagaatgaatatttttaatggagaaagactctagttgagaaaaaacattcataaaatggaaaagtagttcacgcaaaggaaaaaataaatgccag

SEQ ID NO: 310471 - DNA, 831 bp, Artificial Sequence
  derived and/or modified sequence
atgaacagcaagaggatgctgctgctggtgctgtttgccttcagcctgatgctggtggagcgctacttcaggaaccaccaggtggaggagctgcggctgagtgactggttccaccccaggaagaggccagatgtgatcaccaagacagactggctggcccctgtgctgtgggagggcacctttgacagaagagtgctggagaagcactacagaagaagaaacatcaccgtgggcctggccgtgtttgccaccggccgctttgctgaggagtacctgcggcccttcctgcacagcgccaacaagcacttcatgacaggctacagagtcatcttctacatcatggtggatgccttcttcaagctgcctgacatcgagcccagccccctgcggaccttcaaggccttcaaggtgggcacagagcgctggtggctggatggccccctggtgcacgtgaagagcctgggggagcacatcgccagccacatccaggatgaggtggacttcctgttctccatggccgccaaccaggtgttccagaatgaatttggagtggagaccctgggccccctggtggcccagctgcacgcctggtggtacttcaggaacaccaagaacttcccctatgaaagaagacccaccagcgctgcctgcatccccttcggccagggcgacttctactacggcaacctgatggtgggcggcaccccccacaacatcctggacttcatcaaggagtacctgaatggagtcatccatgacatcaagaatggcctgaacagcacctatgagaagcacctgaacaagtacttctacctgaacaagcccacctag

SEQ ID NO: 310472 - DNA, 831 bp, Artificial Sequence
  derived and/or modified sequence
atgaacagcaagcggatgctgctgctggtgctgttcgccttcagcctcatgttggtggaacggtatttcagaaaccatcaggtagaggaactacgcttaagcgattggttccaccccagaaagaggccagatgtgatcacgaagactgattggctcgcccccgtcctttgggaaggcactttcgacagaagggtactggagaaacactacaggagaaggaatattactgtcggcttggccgtgttcgcaaccgggcggtttgcggaagagtaccttcgcccctttctgcattctgccaacaaacattttatgacaggctaccgcgtgatcttttacattatggtagatgctttttttaagttacctgatatcgaaccttctccattgcggacgttcaaagccttcaaagtcgggaccgagcgttggtggttggacggaccgctggttcatgtaaagtcactcggcgaacacattgctagtcacatccaagacgaagtcgacttcttgttctctatggccgccaatcaagtctttcagaacgaattcggtgtggagacgcttggccccctagtcgcccagctgcacgcatggtggtactttcgaaatacaaagaacttcccctatgagcggcgccccactagtgctgcgtgtatcccctttggccaaggtgacttctactatggaaatctgatggtgggagggacgccccataatatcctggattttataaaggaatacctgaatggggtgatccatgacattaaaaatggactgaatagcacttatgaaaaacatctgaataaatacttttaccttaataagcctacatag

SEQ ID NO: 310473 - DNA, 831 bp, Artificial Sequence
  derived and/or modified sequence
atgaacagcaagaggatgctgttactggtgctgttcgccttttcactaatgctggttgaacgctatttccgaaatcaccaggtggaggaacttcggctctctgattggtttcacccaagaaagagacccgatgtgattacgaaaactgactggttagcacccgttctttgggaaggcacattcgataggcgcgtgcttgagaagcactatcgaagaagaaacatcaccgtggggctagcagtctttgccaccggccgttttgccgaagaatacctgaggccctttctgcatagcgctaataagcactttatgactggatacagggtgatcttctacattatggtggacgccttcttcaaactcccagatatcgagccctcacctttaaggacttttaaagcctttaaggtcgggacagagagatggtggctggacggacccctggtgcatgtgaagagtctgggggaacatatcgccagccatatacaggacgaagtggatttcctgttctccatggctgccaatcaagtgttccagaacgagtttggtgtggaaaccttaggtccgttggtggcccaactccacgcttggtggtactttcgcaacacgaagaattttccttatgagcggcgaccgacttcggcagcctgcatcccttttggacagggcgatttctactatgggaacctaatggtggggggtacacctcacaatattctggatttcattaaggagtacctgaacggtgtgattcacgacatcaaaaatggtctcaattccacgtacgaaaagcatctgaacaaatacttttacctgaacaagcctacatag

SEQ ID NO: 310474 - DNA, 831 bp, Artificial Sequence
  derived and/or modified sequence
atgaacagcaagagaatgctgctgctggtgctgttcgccttcagcctgatgctggtggagagatacttcagaaaccaccaggtggaggagctgagactgagcgactggttccaccccagaaagagacccgacgtgatcaccaagaccgactggctggcccccgtgctgtgggagggcaccttcgacagaagagtgctggagaagcactacagaagaagaaacatcaccgtgggcctggccgtgttcgccaccggcagattcgccgaggagtacctgagacccttcctgcacagcgccaacaagcacttcatgaccggctacagagtgatcttctacatcatggtggacgccttcttcaagctgcccgacatcgagcccagccccctgagaaccttcaaggccttcaaggtgggcaccgagagatggtggctggacggccccctggtgcacgtgaagagcctgggcgagcacatcgccagccacatccaggacgaggtggacttcctgttcagcatggccgccaaccaggtgttccagaacgagttcggcgtggagaccctgggccccctggtggcccagctgcacgcctggtggtacttcagaaacaccaagaacttcccctacgagagaagacccaccagcgccgcctgcatccccttcggccagggcgacttctactacggcaacctgatggtgggcggcaccccccacaacatcctggacttcatcaaggagtacctgaacggcgtgatccacgacatcaagaacggcctgaacagcacctacgagaagcacctgaacaagtacttctacctgaacaagcccacctag

SEQ ID NO: 310475 - protein, 523 aa, Artificial Sequence
  derived and/or modified sequence
MQKERELQETIYFKNTWPACMFLIVAPLSVLYNWKDELDTWGYFRVTVLHGNRKDNELIRVKQRKCEIALTTYETLRLCLDELNSLEWSAVIVDEAHRIKNPKARVTEVMKALKCNVRIGLTGTILQNNMKELWCVMDWAVPGLLGSGTYFKKQFSDPVEHGQRHTATKRELATGRKAMQRLAKKMSGWFLRRTKTLIKDQLPKKEDRMVYCSLTDFQKAVYQTVLETEDVTLILQSSEPCTCRSGQKRRNCCYKTNSHGETVKTLYLSYLTVLQKVANHVALLQAASTSKQQETLIKRICDQVFSRFPDFVQKSKDAAFETLSDPKYSGKMKVLQQLLNHCRKNRDKVLLFSFSTKLLDVLQQYCMASGLDYRRLDGSTKSEERLKIVKEFNSTQDVNICLVSTMAGGLGLNFVGANVVVLFDPTWNPANDLQAIDRAYRIGQCRDVKVLRLISLGTVEEIMYLRQIYKQQLHCVVVGSENAKRYFEAVQGSKEHQGELFGIHNLFKFRSQGSCLTKDILEV

SEQ ID NO: 310476 - protein, 365 aa, Artificial Sequence
  derived and/or modified sequence
MKELWCVMDWAVPGLLGSGTYFKKQFSDPVEHGQRHTATKRELATGRKAMQRLAKKMSGWFLRRTKTLIKDQLPKKEDRMVYCSLTDFQKAVYQTVLETEDVTLILQSSEPCTCRSGQKRRNCCYKTNSHGETVKTLYLSYLTVLQKVANHVALLQAASTSKQQETLIKRICDQVFSRFPDFVQKSKDAAFETLSDPKYSGKMKVLQQLLNHCRKNRDKVLLFSFSTKLLDVLQQYCMASGLDYRRLDGSTKSEERLKIVKEFNSTQDVNICLVSTMAGGLGLNFVGANVVVLFDPTWNPANDLQAIDRTQTHCRRERDAEPLSSAPGLQNGSENAVPYPWWCCVTGASISCWRCEICRIQDVLE

SEQ ID NO: 310477 - protein, 531 aa, Artificial Sequence [sequence omitted]

SEQ ID NO: 310478 - DNA, 764 bp, Artificial Sequence
  derived and/or modified sequence
cagcaagcgacctgtcaggcggccgtggactcagactccggagatgaagcccctgctcctggccgtcagccttggcctcattgctgccctgcaggcccaccacctcctggcctcagacgaggagattcaggatgtgtcagggacgtggtatctgaaggccatgacggtggacagggagttccctgagatgaatctggaatcggtgacacccatgaccctcacgaccctggaagggggcaacctggaagccaaggtcaccatgctgataagtggccggtgccaggaggtgaaggccgtcctggagaaaactgacgagccgggaaaatacacggccgacgggggcaagcacgtggcatacatcatcaggtcgcacgtgaaggaccactacatcttttactgtgagggcgagctgcacgggaagccggtccgaggggtgaagctcgtgggcagagaccccaagaacaacctggaagccttggaggactttgagaaagccgcaggagcccgcggactcagcacggagagcatcctcatccccaggcagagcgaaacctgctctccagggagcgattaggggcaggggacaccttggctcctcagcagcccaaggacggcaccatccagcacctccgtcattcacagggacatggaaaaagctccccacccctgcagaacgcggctggctgcaccccttcctaccaccccccgccttccccctgccctgcgccccctctcctggttctccataaagagcttcagcagtt

SEQ ID NO: 310479 - DNA, 3352 bp, Artificial Sequence
  derived and/or modified sequence
gctgccgacccggggcctctgtccttgggtcccagttatgcaacagtcagtcgaggctgtggggctggcccaggggctttatctgtctccctctccaacttttgccaagttacccttctgggcttccgccagccaggagcccacactccctcagccctcccacacgctcctctcacctcctagctgggcttcgctgacttgaacctggccgagtttgcgggctcgggctccacggtgcgctgctgcctgctcgagggatatgacacgaagaacactcgccaggacaactccatccttaaggtcaccattggtatgttcctgctctctggagatccctgcttcaagacgccaccatcgactgccaagtccatctccatcccaggccaggattcctccctgcagctgacgtgtaagggtggtgggaccagcagtgggggcagcagcaccaactccctgactgggtcccggccccccaaggctcggcccactattctcagctcagggctgccagaggaacccgaccagaacctgtccagccctgaggaggtgttccactctggccactcccgcaactccagctatgccagccagcagtccaagatctccggctacagcacagagcactcgcgctcctccagcctctcagacctgacgcaccgccgcaacacgtccaccagcagcagcgcctctgggggccttggcatgaccgtggagggccctgagggcagtgagcgggagcaccggcccccggagaagccgccgcggccaccccggcccctgcatctgtccgatcgctctttcaggcggaagaaggactcggtggagagccacccgacctgggtggacgacacgcggatcgatgcggatgccatcgtggagaagatcgtgcagagccaggatttcacagatggcagcaacaccgaggacagcaacctccggctgttcgtgagccgcgatggctctgccacgctgagcggcatccagcttgccaccagggtctcttctggggtctacgagccagttgtgattgaaagccattgaggagcaggtgtccgggctggagaagagtcctgctttctctggagtccagacctgtatcattccatgaggaactttccccttcagatcacctctgcgccacatctcatccatgcctcctccatgcactccagtccacactccccgtagcatcattccattgcccctcccatccatgctgggaccctcctggcccaccaaggcccaggcaccactgtgaatattctcctctgaaccactagagggcaggccaggcaggccaggcgggcccgtgcagcttgtgggcaagaaggagctggcaaggaccggcgctgctggagactgacccagccctctggctgaggacatgcagcggctcctaaatgtagagatgcctgtggctgagggggcctctctacctgtgtccccactcactccaggagcactggctttggtcacgtcttagcagcagggccttgctccgttgttcccttgccctggtggtgggggggccagaccacctccggaatcctgccacctgtgactgtctgactgcttagtgcttcagctgtcccttccttgtgtcctgggggacctgctggcggcctcttcctgggagccatgacctcagaccccacccacactccagatcgagacccctgcctccccccggcaaatgtcctcccgctgccttgcagcctgcactttgcacatgctcacccccagcacagtcccactggcccctcacctccccttccctgagctccttcccaaggactcctggtcactgcctgctgtgcagtcagaggcccagggtccagcagcccggcgggaacgggtgctgcctcttcctccagttagctccagctcaggtctgagacccgtgctgagaaaggtctgagcaccgaccgtgccctctgcccagggctgggtcctgagcagctggttttcctgcaggaaggttggagcaagcaaagtccttctctgccctcagggtcagctgcccagactggggcggatgccagagaggcaggtgggctgtggctggactggtccggagctggcttccttaccagaaaagcctcagccttcctctggaagcatcccccgttctgggcaagggggaagggctcctttaaggggtgtgctttcccagtggggagcagtctggccctgccccctactaaagcctctgctctcagcactttcccccaagtccttgtaacttgcttgaaggtgggttctggctgccagccagtccctggacaaactctcctgccccttttaaatttcactcattttgtataaacccagcaggctggtgtttacttagccctgtagcttttttcattttttctttccgtctttcttcttgagttcacggttcaatattgcctcctcgccctggtgaggggaggtgctgcttttctgccccacctgccggctggttccagcagcgctggggcccagctggggggccgggatgggggcttctctctctgggaggggtgcaggtgccctccccaggctgggagggttccttccctagctccccatctgcccccgctggtgagagttgggcttcttggtcttggaactccctggcattgggaacagagcatttccagcatttgttgttgttttactcacctaacccttagaaaatgaatgttagaaggtgcctgccgaggcgggacagagtgttcgctcgcgctggagaaggctctgctcagccctgagagtcccttcctgccccaccgatactggcactttaaaaaggaagctgaccgcacagtgtccagacgaattggcccccagaagatggggagttctgtcctgcccttctgtgtctgcgtgacctcacccagcctaggagggaggtgcattcagggtagatttgcctctcattcaaagttctggggctttgggtggaaaacagccagctttggcgctgttggggagactcctccagaccaggaaccccagaaggagacagagcctgccacatcctcccacgccaggccctgggccagggtgattggactgagaatttggccacaaccaaattgatgctggctggaaccagaggccagaaagcctggccttgtccccatgtgggagccctgtcctcagccctcttgtccccttgagctcagtgaattcccaccaggtgcccacagctcctggacttcaaattctatatattgagagagttggagagtatatcagagatatttttggaaaggagttggtctatgcaatgtcagtttggaatcttcttgaaagtttaatgtttttattaggagatttaaagaaaataaaggtctacaatatc

SEQ ID NO: 310480 - protein, 124 aa, Artificial Sequence
  derived and/or modified sequence
  misc_feature (1)..(1): Xaa can be any naturally occurring amino acid
XSACIGNCSTALEELTDDMTEDFLPVLREYILYSDSMKSVLKKRDQVQAEYEAKLEAVALRKEDRPKVPADVEKCQDRMECFNADLKADMERWQNNKRQDFRQLLMGMADKNIQYYEKSIADLK

SEQ ID NO: 310481 - protein, 500 aa, Artificial Sequence
  derived and/or modified sequence
MDSSSFIQFDVPEYSSTVLSQLNELRLQGKLCDIIVHIQGQPFRAHKAVLAASSPYFRDHSALSTMSGLSISVIKNPNVFEQLLSFCYTGRMSLQLKDVVSFLTAASFLQMQCVIDKCTQILESIHSKISVGDVDSVTVGAEENPESRNGVKDSSFFANPVEISPPYCSQGRQPTASSDLRMETTPSKALRSRLQEEGHSDRGSSGSVSEYEIQIEGDHEQGDLLVRESQITEVKVKMEKSDRPSCSDSSSLGDDGYHTEMVDGEQVVAVNVGSYGSVLQHAYSYSQAASQPTNVSEAFGSLSNSSPSRSMLSCFRGGRARQKRALSVHLHSDLQGLVQGSDSEAMMNNPGYESSPRERSARGHWYPYNERLICIYCGKSFNQKGSLDRHMRLHMGITPFVCKFCGKKYTRKDQLEYHIRGHTDDKPFRCEICGKCFPFQGTLNQHLRKNHPGVAEVRSRIESPERTDVYVEQKLENDASASEMGLDSRMEIHTVSDAPD

SEQ ID NO: 310482 - DNA, 1515 bp, Artificial Sequence
  derived and/or modified sequence
atgagcgtggagatggacagcagcagcttcatccagttcgacgtgcccgagtacagcagcaccgtgctgagccagctgaacgagctgagactgcagggcaagctgtgcgacatcatcgtgcacatccagggccagcccttcagagcccacaaggccgtgctggccgccagcagcccctacttcagagaccacagcgccctgagcaccatgagcggcctgagcatcagcgtgatcaagaaccccaacgtgttcgagcagctgctgagcttctgctacaccggcagaatgagcctgcagctgaaggacgtggtgagcttcctgaccgccgccagcttcctgcagatgcagtgcgtgatcgacaagtgcacccagatcctggagagcatccacagcaagatcagcgtgggcgacgtggacagcgtgaccgtgggcgccgaggagaaccccgagagcagaaacggcgtgaaggacagcagcttcttcgccaaccccgtggagatcagccccccctactgcagccagggcagacagcccaccgccagcagcgacctgagaatggagaccacccccagcaaggccctgagaagcagactgcaggaggagggccacagcgacagaggcagcagcggcagcgtgagcgagtacgagatccagatcgagggcgaccacgagcagggcgacctgctggtgagagagagccagatcaccgaggtgaaggtgaagatggagaagagcgacagacccagctgcagcgacagcagcagcctgggcgacgacggctaccacaccgagatggtggacggcgagcaggtggtggccgtgaacgtgggcagctacggcagcgtgctgcagcacgcctacagctacagccaggccgccagccagcccaccaacgtgagcgaggccttcggcagcctgagcaacagcagccccagcagaagcatgctgagctgcttcagaggcggcagagccagacagaagagagccctgagcgtgcacctgcacagcgacctgcagggcctggtgcagggcagcgacagcgaggccatgatgaacaaccccggctacgagagcagccccagagagagaagcgccagaggccactggtacccctacaacgagagactgatctgcatctactgcggcaagagcttcaaccagaagggcagcctggacagacacatgagactgcacatgggcatcacccccttcgtgtgcaagttctgcggcaagaagtacaccagaaaggaccagctggagtaccacatcagaggccacaccgacgacaagcccttcagatgcgagatctgcggcaagtgcttccccttccagggcaccctgaaccagcacctgagaaagaaccaccccggcgtggccgaggtgagaagcagaatcgagagccccgagagaaccgacgtgtacgtggagcagaagctggagaacgacgccagcgccagcgagatgggcctggacagcagaatggagatccacaccgtgagcgacgcccccgactag

SEQ ID NO: 310483 - DNA, 1515 bp, Artificial Sequence
  derived and/or modified sequence
atgtccgttgagatggattcctcatccttcattcagttcgacgtgcccgaatattcctccacagttttgtcccaactcaatgaacttagattgcaagggaaactgtgcgatattattgtgcatatccaaggtcaacctttccgggcccacaaggctgtccttgcagcaagcagtccttatttcagggatcactctgcgctcagcaccatgagcggcctttctatttcagtgataaaaaatcctaatgtgtttgaacagctattaagcttttgttacaccgggcggatgtctctgcagttgaaggatgtggttagttttttgacagccgctagctttctgcagatgcagtgcgtgatcgataagtgcacacagattttagaaagtattcatagcaaaatctcagttggagatgtggactctgtaactgtcggcgctgaagaaaacccggaaagcaggaacggggtgaaagacagttcgttctttgccaatccagtcgaaataagccccccttattgttcccagggtcgtcaaccaactgcctcatccgatctgcggatggagactactccctctaaagcactccgttctcgcctccaggaagagggccatagtgatagggggagtagcggatccgtttccgaatacgaaatccagatagagggcgaccatgagcagggggatctgcttgtccgggaatctcagataacagaggtgaaggtcaagatggagaaaagtgaccggccctcatgttcagatagctcttcactgggagacgatggttatcacactgagatggtcgatggggagcaagtagtggccgtcaacgtggggagctacgggtcagtgcttcagcatgcatacagttactcccaggcagccagccaaccgacgaacgtgtccgaggcttttggatctctatctaatagttctccgtccagaagtatgctgtcatgttttcgggggggcagggctcgacagaaacgagctctgtctgtccacctccactccgatctgcagggactggtacaggggtcagattctgaagcgatgatgaataaccccggctatgaaagttcacctcgagagcgatctgcaagaggccattggtatccttacaacgaacggctgatttgcatttattgcggaaagagcttcaaccagaaaggttccttagaccgccatatgaggctgcacatgggcataacgcctttcgtctgtaagttctgcgggaagaagtatactaggaaagatcagctcgaatatcacatcagagggcacactgacgacaaaccgtttcgctgtgaaatctgcggaaagtgcttcccttttcagggaacacttaaccaacacctgaggaagaaccacccaggagtcgccgaggtgcgctctcgcatcgagtctcctgaaaggaccgatgtctatgtcgagcaaaagctcgagaatgatgctagcgcttctgaaatgggcctggactctcgtatggaaatccacactgtctccgatgcccccgattag

SEQ ID NO: 310484 - DNA, 1515 bp, Artificial Sequence
  derived and/or modified sequence
atgtctgtggagatggacagcagcagcttcatccagtttgatgtgcctgagtacagcagcacagtgctgagccagctgaatgagctgcggctgcagggcaagctgtgtgacatcatcgtgcacatccagggccagcccttccgggcccacaaggctgtgctggccgccagcagcccctacttccgggaccacagcgccctgagcaccatgagcggcctgagcatcagcgtcatcaagaaccccaacgtgtttgagcagctgctgtccttctgctacacaggccgcatgagcctgcagctgaaggatgtggtgtccttcctgacagctgccagcttcctgcagatgcagtgtgtgattgacaagtgcacccagatcctggagagcatccacagcaagatctctgtgggagatgtggacagcgtgacagtgggcgcagaagaaaatcctgagagcagaaatggagtgaaggacagcagcttctttgccaaccctgtggagatcagccccccctactgcagccagggccggcagcccacagccagcagtgacctgaggatggagaccacccccagcaaggccctgcggagccggctgcaggaggagggccacagcgaccggggcagcagcggctctgtgtctgaatatgagatccagattgaaggagaccacgagcagggcgacctgctggtgcgggagagccagatcacagaggtgaaggtgaagatggagaagagtgaccggcccagctgcagcgacagcagcagcctgggagatgatggctaccacacagagatggtggatggagagcaggtggtggccgtgaatgtgggcagctatggctctgtgctgcagcacgcctacagctacagccaggccgccagccagcccaccaacgtgtctgaggccttcggcagcctgagcaacagcagccccagccgctccatgctgagctgcttccggggcggccgggcccggcagaagagggccctgtctgtgcacctgcacagcgacctgcagggcctggtgcagggcagtgacagcgaggccatgatgaacaaccctggctatgagagcagcccccgggagaggtctgcccggggccactggtacccctacaatgaaagactcatctgcatctactgcggcaagagcttcaaccagaagggcagcctggacagacacatgaggctgcacatgggcatcaccccatttgtgtgcaagttctgtgggaagaagtacaccaggaaggaccagctggagtaccacatccggggccacacagatgacaagcccttccgctgtgagatctgtgggaagtgcttccccttccagggcaccctgaaccagcacctgaggaagaaccaccctggggtggccgaggtgcgcagcagaattgagagccctgagaggacagatgtgtatgtggagcagaagctggagaatgatgccagcgccagcgagatgggcctggacagcaggatggagatccacacagtgtctgatgccccagactag

SEQ ID NO: 310485 - DNA, 1515 bp, Artificial Sequence
  derived and/or modified sequence
atgagcgtggagatggacagcagcagcttcatccagttcgacgtgccagagtacagcagtaccgtcctgagccagctcaacgaattgcgtcttcaagggaagctgtgcgacatcatcgtgcacattcagggacagcctttccgagcccacaaggccgttttggccgcttccagcccatacttcagagatcacagcgcactttccacaatgagcggactcagtatatctgttataaagaatccaaatgtattcgagcagttactgagcttttgctataccggtcgcatgagtctacagctcaaggatgtggtgagctttctcacagctgcctcctttctgcagatgcaatgcgtgatcgacaagtgtacccagatcttggaatcaatccactccaagatcagtgtgggggatgtggacagtgtgacagttggagcagaggaaaaccccgagagtagaaacggcgtgaaggatagctcgttttttgccaacccagtcgagatcagccctccttattgtagtcagggccggcagccaaccgcttccagtgatttaaggatggaaaccacgccttctaaagccctacgctctcgtctacaggaggagggacattccgatcgcggatcaagcggctcagtgtccgaatatgaaattcaaatcgagggggatcacgaacagggcgatctgctggttagagagagccagattactgaggtgaaggtcaaaatggaaaagagcgacagacccagctgctccgacagctcgagtctgggagatgacgggtatcacacagagatggtggatggggagcaggtggtagccgtcaacgtcggcagctacggcagcgtattgcaacacgcctattcatacagtcaagcagcatctcagcccactaatgttagcgaggcttttggcagcctgtctaacagtagccctagtagatccatgttatcctgttttagggggggccgggccaggcagaaaagggccctgtcggttcacctgcatagcgacctgcaagggcttgtgcagggctccgacagcgaggccatgatgaacaaccctggatacgagtccagccctcgcgaacgatctgccaggggccattggtatccgtacaacgagagactaatctgtatatattgcgggaagtcttttaaccagaaaggctccttggaccgccacatgcggctgcatatggggattacaccattcgtctgtaaattctgcggtaagaaatacactagaaaagatcagttagaataccacatcagggggcacacagatgacaagcctttcagatgcgagatttgcgggaagtgcttcccttttcagggcaccctgaatcagcacctgcggaagaatcaccccggagtggctgaagttaggagtcgcatcgagagcccagagagaactgatgtctatgtggagcagaagctggagaatgatgcttctgcttcggagatgggacttgatagcaggatggaaattcatacggtttcagatgccccggattag

SEQ ID NO: 310486 - DNA, 1515 bp, Artificial Sequence
  derived and/or modified sequence
atgagtgttgagatggattcatcatcgttcatccagttcgacgtgccagagtacagctcgactgtgctttctcagctgaacgagctgaggctgcagggtaagttgtgtgacattattgtgcacattcagggtcagccctttcgcgcacacaaggcagtactcgccgcttcttccccctacttcagagaccatagcgcactgtccacgatgtccgggttgtcaatttcggttataaaaaaccccaatgtgttcgagcaattgctgtcgttctgctacaccgggaggatgtctctccagctgaaagatgtggttagttttctcactgccgcatctttcctgcagatgcagtgtgttattgacaagtgcactcagattctggagtccatccactcaaaaatttcagtcggcgacgtagatagtgtgaccgttggtgcagaggagaatccggagtctcgcaacggagtcaaagattcctcgtttttcgccaatcccgtggagatttctcccccatattgctctcaggggcgtcagcccacggcctcttccgatctgaggatggagacgaccccatctaaggctctccgctcccgtcttcaggaggaaggacactccgaccgcggtagtagtggcagtgtaagcgagtatgagattcagatagaaggggatcacgagcagggtgacctgctggtgcgagagagccaaattaccgaggtaaaagttaaaatggaaaagtccgacagaccaagctgcagtgattcctccagcttgggagatgacgggtaccacaccgagatggtggacggggaacaagtggtggctgtgaatgttgggtcctacgggagcgttctccaacacgcttattcatactctcaggcagcgagccagcccactaatgtctccgaggcctttgggtccctctcaaactccagcccatcccgcagcatgctcagttgtttccggggtggcagggctcggcaaaagcgggctctgagtgtacatcttcactccgacctgcaaggactggtgcaggggagcgactccgaagcgatgatgaacaaccctggatatgagagctccccccgtgaaagatccgcacgcggtcactggtacccttacaacgagaggctcatttgtatttactgcggtaagagcttcaatcagaagggctctctagatagacatatgcgtttacatatggggatcacccccttcgtgtgtaaattctgtgggaaaaagtatacgaggaaagaccagctggagtaccatatccggggacatacagatgacaaacctttccgatgcgaaatctgcggaaagtgcttccctttccagggcacgctcaaccaacacttgagaaagaatcaccctggagtagcagaggtccgttcaaggatcgagtccccggaacggactgatgtgtatgtggagcagaaactcgagaatgacgcaagtgcttccgagatggggcttgattccaggatggaaattcataccgtaagcgatgcacctgactag

SEQ ID NO: 310487 - DNA, 426 bp, Artificial Sequence
  derived and/or modified sequence
atgggcaaaggcatccccctgaacgatcaggacagaatcccttggttatgtaatctgcacgatatcctgctgagagacgtggcctctgggcaacgggtcgttttggcttgctccgctctcaagaagacttatcgcgatattctgacacagggcaaggacggggtggccctgaagtgtgaggagagtggcaaggaagccaaacaggccgagatgcagctgctggtggtccacctgtccggcagcttcgaggtcataagcggccggctgctgaagagagaaggccattttatgccacctgagctgctccaaagtcagtttgaaaccctggagccccctgctgcgcctgaaaattttatacaaatctctgtggacaagaatgtgtctgaaattatcgcaaccattatggaaaccttgaagatgaagtag

SEQ ID NO: 310488 - DNA, 426 bp, Artificial Sequence
  derived and/or modified sequence
atgggcaagggcatccccctgaatgaccaggaccgcatcccctggctgtgcaacctgcatgacatcctgctgagagatgtggccagcggccagagggtggtgctggcctgcagcgccctgaagaagacctacagagacatcctgacccagggcaaggatggagtggccctgaagtgtgaggagagcggcaaggaggccaagcaggccgagatgcagctgctggtggtgcacctgagcggcagctttgaggtgatcagcggccgcctgctgaagcgggagggccacttcatgcctcctgagctgctgcagagccagtttgagaccctggagcccccagctgcccctgagaacttcatccagatctctgtggacaagaatgtgtctgagatcatcgccaccatcatggagaccctgaagatgaagtag

SEQ ID NO: 310489 - DNA, 426 bp, Artificial Sequence
  derived and/or modified sequence
atgggcaagggcatccccctgaacgaccaggaccggatcccctggctctgcaacctgcatgatatcctgttgcgtgatgtggccagcgggcagcgggtggttctggcctgcagcgccctgaaaaaaacttaccgcgacattctgactcagggcaaggatggggtcgccttgaagtgcgaagaatcaggcaaagaggctaaacaggccgagatgcagcttctcgtagtccacctaagcggatctttcgaggttataagtggccgactcctgaaaagagagggacacttcatgcctcctgagctcctccagtcccaatttgaaactttggagccgcctgccgctccagagaacttcattcaaatatcggtcgacaagaatgtgtcagagatcatcgcgacgatcatggagactctcaaaatgaagtag

SEQ ID NO: 310490 - DNA, 426 bp, Artificial Sequence
  derived and/or modified sequence
atgggtaagggtattcctctcaacgatcaggatagaattccatggctctgtaatttgcatgacatcctcttacgggacgtagcttctggccaaagggttgtcctcgcatgcagcgccctcaagaagacataccgcgacattctgactcaggggaaggatggagtagcactgaaatgtgaggaatcaggcaaggaggccaaacaggctgaaatgcagttactcgtcgttcatttaagcgggagcttcgaggtgataagcgggagactgctgaagagggagggccatttcatgccgcctgagctgctgcaaagccagttcgaaacattagagccacccgctgcccctgagaacttcatccagatttctgtcgacaagaatgtctcggagattatcgccaccatcatggaaacattgaaaatgaaatag

SEQ ID NO: 310491 - DNA, 426 bp, Artificial Sequence
  derived and/or modified sequence
atgggcaagggcatccccctgaacgaccaggacagaatcccctggctgtgcaacctgcacgacatcctgctgagagacgtggccagcggccagagagtggtgctggcctgcagcgccctgaagaagacctacagagacatcctgacccagggcaaggacggcgtggccctgaagtgcgaggagagcggcaaggaggccaagcaggccgagatgcagctgctggtggtgcacctgagcggcagcttcgaggtgatcagcggcagactgctgaagagagagggccacttcatgccccccgagctgctgcagagccagttcgagaccctggagccccccgccgcccccgagaacttcatccagatcagcgtggacaagaacgtgagcgagatcatcgccaccatcatggagaccctgaagatgaagtag

SEQ ID NO: 310492 - protein, 19 aa, Artificial Sequence
  derived and/or modified sequence
FAELVYTGFWHSPECEFVR

SEQ ID NO: 310493 - DNA, 1847 bp, Artificial Sequence
  derived and/or modified sequence
gccggcgcgcccctgggagggtgagccggcgccgggcccaggcccggacctggtgggaggcggggggaggtggggacgaggcctggggaggcgggccccgcccatctgcaggtggctgtgaacgctgagcggctccaggcgggggccgggcccgggggcggggtctgtggcgcgcgtccccgccacgtgtccccggtcaccggccctgcccccgggccctgtgcttataacctgggatgggcacccctgccagtcctgctctgccgcctgccaccgctgcccgagcccgagtggttcactgcactgtgaaaacagattccagacgccgggaactcacgcctccaatcccagacgctatgtccagcaaaggctccgtggttctggcctacagtggcggcctggacacctcgtgcatcctcgtgtggctgaaggaacaaggctatgacgtcattgcctatctggccaacattggccagaaggaagacttcgaggaagccaggaagaaggcactgaagcttggggccaaaaaggtgttcattgaggatgtcagcagggagtttgtggaggagttcatctggccggccatccagtccagcgcactgtatgaggaccgctacctcctgggcacctctcttgccaggccctgcatcgcccgcaaacaagtggaaatcgcccagcgggagggggccaagtatgtgtcccacggcgccacaggaaaggggaacgatcaggtccggtttgagctcagctgctactcactggccccccagataaaggtcattgctccctggaggatgcctgaattctacaaccggttcaagggccgcaatgacctgatggagtacgcaaagcaacacgggattcccatcccggtcactcccaagaacccgtggagcatggatgagaacctcatgcacatcagctacgaggctggaatcctggagaaccccaagaaccaagcgcctccaggtctctacacgaagacccaggacccagccaaagcccccaacacccctgacattctcgagatcgagttcaaaaaaggggtccctgtgaaggtgaccaacgtcaaggatggcaccacccaccagacctccttggagctcttcatgtacctgaacgaagtcgcgggcaagcatggcgtgggccgtattgacatcgtggagaaccgcttcattggaatgaagtcccgaggtatctacgagaccccagcaggcaccatcctttaccatgctcatttagacatcgaggccttcaccatggaccgggaagtgcgcaaaatcaaacaaggcctgggcttgaaatttgctgagctggtgtataccggtttctggcacagccctgagtgtgaatttgtccgccactgcatcgccaagtcccaggagcgagtggaagggaaagtgcaggtgtccgtcctcaagggccaggtgtacatcctcggccgggagtccccactgtctctctacaatgaggagctggtgagcatgaacgtgcagggtgattatgagccaactgatgccaccgggttcatcaacatcaattccctcaggctgaaggaatatcatcgtctccagagcaaggtcactgccaaatagacccgtgtacaatgaggagctggggcctcctcaatttgcagatcccccaagtacaggcgctaattgttgtgataatttgtaattgtgacttgttctccccggctggcagcgtagtggggctgccaggccccagctttgttccctggtccccctgaagcctgcaaacgttgtcatcgaagggaagggtggggggcagctgcggtggggagctataaaaatgacaattaaaagagacactagtcttttatttct

SEQ ID NO: 310494 - DNA, 1564 bp, Artificial Sequence
  derived and/or modified sequence
gcttataacctgggatgggcacccctgccagtcctgctctgccgcctgccaccgctgcccgagcccgacgctatgtccagcaaaggctccgtggttctggcctacagtggcggcctggacacctcgtgcatcctcgtgtggctgaaggaacaaggctatgacgtcattgcctatctggccaacattggccagaaggaagacttcgaggaagccaggaagaaggcactgaagcttggggccaaaaaggtgttcattgaggatgtcagcagggagtttgtggaggagttcatctggccggccatccagtccagcgcactgtatgaggaccgctacctcctgggcacctctcttgccaggccctgcatcgcccgcaaacaagtggaaatcgcccagcgggagggggccaagtatgtgtcccacggcgccacaggaaaggggaacgatcaggtccggtttgagctcagctgctactcactggccccccagataaaggtcattgctccctggaggatgcctgaattctacaaccggttcaagggccgcaatgacctgatggagtacgcaaagcaacacgggattcccatcccggtcactcccaagaacccgtggagcatggatgagaacctcatgcacatcagctacgaggctggaatcctggagaaccccaagaaccaagcgcctccaggtctctacacgaagacccaggacccagccaaagcccccaacacccctgacattctcgagatcgagttcaaaaaaggggtccctgtgaaggtgaccaacgtcaaggatggcaccacccaccagacctccttggagctcttcatgtacctgaacgaagtcgcgggcaagcatggcgtgggccgtattgacatcgtggagaaccgcttcattggaatgaagtcccgaggtatctacgagaccccagcaggcaccatcctttaccatgctcatttagacatcgaggccttcaccatggaccgggaagtgcgcaaaatcaaacaaggcctgggcttgaaatttgctgagctggtgtataccggtttctggcacagccctgagtgtgaatttgtccgccactgcatcgccaagtcccaggagcgagtggaagggaaagtgcaggtgtccgtcctcaagggccaggtgtacatcctcggccgggagtccccactgtctctctacaatgaggagctggtgagcatgaacgtgcagggtgattatgagccaactgatgccaccgggttcatcaacatcaattccctcaggctgaaggaatatcatcgtctccagagcaaggtcactgccaaatagacccgtgtacaatgaggagctggggcctcctcaatttgcagatcccccaagtacaggcgctaattgttgtgataatttgtaattgtgacttgttctccccggctggcagcgtagtggggctgccaggccccagctttgttccctggtccccctgaagcctgcaaacgttgtcatcgaagggaagggtggggggcagctgcggtggggagctataaaaatgacaattaaaagagacactagtcttttatttcta

SEQ ID NO: 310495 - DNA, 1565 bp, Artificial Sequence
  derived and/or modified sequence
cgagcccgtggttcactgcactgtgaaaacagattccagacgccgggaactcacgcctccaatcccagacgctatgtccagcaaaggctccgtggttctggcctacagtggcggcctggacacctcgtgcatcctcgtgtggctgaaggaacaaggctatgacgtcattgcctatctggccaacattggccagaaggaagacttcgaggaagccaggaagaaggcactgaagcttggggccaaaaaggtgttcattgaggatgtcagcagggagtttgtggaggagttcatctggccggccatccagtccagcgcactgtatgaggaccgctacctcctgggcacctctcttgccaggccctgcatcgcccgcaaacaagtggaaatcgcccagcgggagggggccaagtatgtgtcccacggcgccacaggaaaggggaacgatcaggtccggtttgagctcagctgctactcactggccccccagataaaggtcattgctccctggaggatgcctgaattctacaaccggttcaagggccgcaatgacctgatggagtacgcaaagcaacacgggattcccatcccggtcactcccaagaacccgtggagcatggatgagaacctcatgcacatcagctacgaggctggaatcctggagaaccccaagaaccaagcgcctccaggtctctacacgaagacccaggacccagccaaagcccccaacacccctgacattctcgagatcgagttcaaaaaaggggtccctgtgaaggtgaccaacgtcaaggatggcaccacccaccagacctccttggagctcttcatgtacctgaacgaagtcgcgggcaagcatggcgtgggccgtattgacatcgtggagaaccgcttcattggaatgaagtcccgaggtatctacgagaccccagcaggcaccatcctttaccatgctcatttagacatcgaggccttcaccatggaccgggaagtgcgcaaaatcaaacaaggcctgggcttgaaatttgctgagctggtgtataccggtttctggcacagccctgagtgtgaatttgtccgccactgcatcgccaagtcccaggagcgagtggaagggaaagtgcaggtgtccgtcctcaagggccaggtgtacatcctcggccgggagtccccactgtctctctacaatgaggagctggtgagcatgaacgtgcagggtgattatgagccaactgatgccaccgggttcatcaacatcaattccctcaggctgaaggaatatcatcgtctccagagcaaggtcactgccaaatagacccgtgtacaatgaggagctggggcctcctcaatttgcagatcccccaagtacaggcgctaattgttgtgataatttgtaattgtgacttgttctccccggctggcagcgtagtggggctgccaggccccagctttgttccctggtccccctgaagcctgcaaacgttgtcatcgaagggaagggtggggggcagctgcggtggggagctataaaaatgacaattaaaagagacactagtcttttatttcta

SEQ ID NO: 310496 - DNA, 1973 bp, Artificial Sequence
  derived and/or modified sequence
ctgctctgccgcctgccaccgctgcccgagcccggtgggcggcggcactgcgtgctggggaagcacagattcttgtgccctctgtgaccttgagcctgccactgacctctctgagccctgctggctgcctccccaataggaatgacaactcctacttcatgaggttgtagtgggggctcaggggcacagggagatcccgctgaggctcccagggccctgcctggtgcttggcaaggagcagttctgatgggggatgtgtcagctgccagaggctcagagccaaggcccctcccacatctcctgcctgcgtgcattcctcacatcctggccttgggccaaactgctcagcctcagccgccttccctcgatgctggaggatcaggtccaagagatgcctctccccgaccagcctaggactgcagtcagcattcccaggccccagtgtggtctgtggggctgtgtgcagagtgtgcgagacgctatgtccagcaaaggctccgtggttctggcctacagtggcggcctggacacctcgtgcatcctcgtgtggctgaaggaacaaggctatgacgtcattgcctatctggccaacattggccagaaggaagacttcgaggaagccaggaagaaggcactgaagcttggggccaaaaaggtgttcattgaggatgtcagcagggagtttgtggaggagttcatctggccggccatccagtccagcgcactgtatgaggaccgctacctcctgggcacctctcttgccaggccctgcatcgcccgcaaacaagtggaaatcgcccagcgggagggggccaagtatgtgtcccacggcgccacaggaaaggggaacgatcaggtccggtttgagctcagctgctactcactggccccccagataaaggtcattgctccctggaggatgcctgaattctacaaccggttcaagggccgcaatgacctgatggagtacgcaaagcaacacgggattcccatcccggtcactcccaagaacccgtggagcatggatgagaacctcatgcacatcagctacgaggctggaatcctggagaaccccaagaaccaagcgcctccaggtctctacacgaagacccaggacccagccaaagcccccaacacccctgacattctcgagatcgagttcaaaaaaggggtccctgtgaaggtgaccaacgtcaaggatggcaccacccaccagacctccttggagctcttcatgtacctgaacgaagtcgcgggcaagcatggcgtgggccgtattgacatcgtggagaaccgcttcattggaatgaagtcccgaggtatctacgagaccccagcaggcaccatcctttaccatgctcatttagacatcgaggccttcaccatggaccgggaagtgcgcaaaatcaaacaaggcctgggcttgaaatttgctgagctggtgtataccggtttctggcacagccctgagtgtgaatttgtccgccactgcatcgccaagtcccaggagcgagtggaagggaaagtgcaggtgtccgtcctcaagggccaggtgtacatcctcggccgggagtccccactgtctctctacaatgaggagctggtgagcatgaacgtgcagggtgattatgagccaactgatgccaccgggttcatcaacatcaattccctcaggctgaaggaatatcatcgtctccagagcaaggtcactgccaaatagacccgtgtacaatgaggagctggggcctcctcaatttgcagatcccccaagtacaggcgctaattgttgtgataatttgtaattgtgacttgttctccccggctggcagcgtagtggggctgccaggccccagctttgttccctggtccccctgaagcctgcaaacgttgtcatcgaagggaagggtggggggcagctgcggtggggagctataaaaatgacaattaaaagagacactagtcttttatttcta

SEQ ID NO: 310497 - DNA, 807 bp, Artificial Sequence
  derived and/or modified sequence
cccggtaaggagccctcggcccctctcgctgcccactccctagccgagagcacccgcttcccgggcccagaggaggaggcgtagaagacgcccgccccggggcccgcggaggcagagggcggaccccgatcgccactcgccggggactgggaccgaggcaggagggaaggggctcccgatgctcaaacgcctggcaccggattccagacgctatgtccagcaaaggctccgtggttctggcctacagtggcggcctggacacctcgtgcatcctcgtgtggctgaaggaacaaggctatgacgtcattgcctatctggccaacattggccagaaggaagacttcgaggaagccaggaagaaggcactgaagcttggggccaaaaaggtgttcattgaggatgtcagcagggagtttgtggaggagttcatctggccggccatccagtccagcgcactgtatgaggaccgctacctcctgggcacctctcttgccaggccctgcatcgcccgcaaacaagtggaaatcgcccagcgggagggggccaagtatgtgtcccacggcgccacaggaaaggggaacgatcaggtccggtttgagctcagctgctactcactggccccccagataaaggtcattgctccctggaggatgcctgaattctacaaccggttcaagggccgcaatgacctgatggagtacgcaaagcaacacgggattcccatcccggtcactcccaagaacccgtggagcatggatgagaacctcatgcacatcagctacgaggctggaatcctggagaacccca

SEQ ID NO: 310498 - DNA, 545 bp, Artificial Sequence
  derived and/or modified sequence
gacgctatgtccagcaaaggctccgtggttctggcctacagtggcggcctggacacctcgtgcatcctcgtgtggctgaaggaacaaggctatgacgtcattgcctatctggccaacattggccagaaggaagacttcgaggaagccaggaagaaggcactgaagcttggggccaaaaaggtgttcattgaggatgtcagcagggagtttgtggaggagttcatctggccggccatccagtccagcgcactgtatgaggaccgctacctcctgggcacctctcttgccaggccctgcatcgcccgcaaacaagtggaaatcgcccagcgggagggggccaagtatgtgtcccacggcgccacaggaaaggtcattgctccctggaggatgcctgaattctacaaccggttcaagggccgcaatgacctgatggagtacgcaaagcaacacgggattcccatcccggtcactcccaagaacccgtggagcatggatgagaacctcatgcacatcagctacgaggctggaatcctggagaaccccaa

SEQ ID NO: 310499 - protein, 116 aa, Artificial Sequence
  derived and/or modified sequence
MKPKITRPPINVKIIEGLKAVLPCTTMGNPKPSVSWIKGDSPLRENSRIAVLESGSLRIHNVQKEDAGQYRCVAKNSLGTAYSKVVKLEVEGAKGIHTQFVASALQLRSFLSCPQI

SEQ ID NO: 310500 - DNA, 570 bp, Artificial Sequence
  derived and/or modified sequence
atggctggcaacggtagggaggaccctcagcggacacttcaaatccgcgacgcattcgcagtccgcgcgcggatgcagcaggcatctcagcatgccctcggcccgcatggtttatgccagactgccacatcccgcgagtccgcagctgtcacgctcaccacactgcctagtgaacttctactggataggctgcacccaaatcctatgtatcagcgaatgccgttgttactgaaccccaagttactctctctggagtacccccgcaacaacatcgagtatgtacgggatatcggagaaggggcattcgggagagtattccaggcccgggcgccagggttactgccctatgagcccttcaccatggtagcagtgaaaatgcttaaagaggaagcctccgcagatatgcaggctgactttcaacgggaggctgccctgatggcagaattcgacaaccccaatatcgtaaaactgctcggtatgaaaattcaggtgagaatctgcataagcagtgagaacaggggatttccaagttttagccccctggtgcgagccttttccttctctccgtag

SEQ ID NO: 310501 - DNA, 570 bp, Artificial Sequence
  derived and/or modified sequence
atggcaggcaacggtagggaggatccgcagaggacattgcaaattcgcgatgctttcgccgtgcgtgctaggatgcagcaggcatcccagcacgctctgggccctcatggattatgtcagactgccacgagtagagagtcagcggccgtgacactgactacgctcccatccgagctgctgctggaccggctccaccctaacccgatgtaccagaggatgcccctgctgctgaatcctaagctgttatcccttgaatatcctaggaacaacatagaatatgtgcgtgacattggagaaggggcttttggtcgagtgttccaggctcgcgcacccggcctgttgccgtacgaaccttttacaatggtggcagtgaagatgctcaaggaagaggcatccgccgatatgcaggctgacttccaacgggaggctgccctgatggctgaattcgacaatccgaatattgttaagttacttggtatgaaaattcaggtgcgaatttgtatttccagcgaaaaccggggcttcccgtcgttcagcccattggtgagagctttttctttctcaccttag

SEQ ID NO: 310502 - DNA, 570 bp, Artificial Sequence
  derived and/or modified sequence
atggctggaaatggaagagaggacccccagaggaccctgcagatcagagatgcctttgctgtgcgggccaggatgcagcaggccagccagcacgccctgggcccccacggcctgtgccagacagccaccagccgggagagcgctgctgtgaccctgaccaccctgcccagcgagctgctgctggaccggctgcaccccaaccccatgtaccagaggatgcccctgctgctgaaccccaagctgctgagcctggagtaccccaggaacaacattgaatatgtgcgggacattggagagggcgccttcggccgggtcttccaggcccgggcccctggcctgctgccctatgagcccttcaccatggtggccgtgaagatgctgaaggaggaggccagcgctgacatgcaggccgacttccagcgggaggccgccctgatggccgagtttgacaaccccaacatcgtgaagctgctgggcatgaagatccaggtgcgcatctgcatcagcagtgaaaatagaggcttccccagcttcagccccctggtgcgggccttctccttcagcccctag

SEQ ID NO: 310503 - DNA, 1221 bp, Artificial Sequence
  derived and/or modified sequence
ccctacccattagccccaagatcatagaaaaatcttccaagctggaaactggttgacaatgatcctgactttcagtaggtgtgttttttaaactctgtatacctttttcctctacctgtgttgttatttgaatatgaagttgggagaagacatatcagagattcccaatctaatacgttttaaatttgacgtttttttcccttagactagcattaattgtgtttcacaacaaaacgagatagcatttcatctcacgggacagtacactagatttcatgaggtctcatattatttacagtaaaaagtttctttcataaacgcgcttttttcaagaacaatttaccatgatgatgtcttgaaaacacagaatttaggctctgccacaaatttgctttaacatgtaatgattcatcaagttttgttctccatatactattttagagagtactgcttggcagtaaaggagctcttctgcgcaaaagaatggctggtaatggaagagaagacccacagaggactctacagatccgagatgcatttgctgtccgtgccagaatgcagcaagcttcccagcatgcattgggaccccacggcctgtgccagactgccacatctagagaatcagcagcagtaaccctcaccacactgccttctgagctcttactagatagacttcatcccaaccccatgtaccagaggatgccgctccttctgaaccccaaattgctcagcctggagtatccaaggaataacattgaatatgtgagagacatcggagagggagcgtttggaagggtgtttcaagcaagggcaccaggcttacttccctatgaacctttcactatggtggcagtaaagatgctcaaagaagaagcctcggcagatatgcaagcggactttcagagggaggcagccctcatggcagaatttgacaaccctaacattgtgaagctattaggtatgaaaatacaagtgaggatatgtatttcatcagaaaacagaggctttccaagtttttctccccttgttcgtgctttttccttttctccttgatcagtgagacgtttcagttccttttcaaatttagcttcttcaccttggtctatcccaaccctataggacattcatggcttaatggattatccctctttaaattcatcacttcaatttgtctctgtctttgctgcctcctatttataaaaatgtttaaaatgtccccat

SEQ ID NO: 310504 - DNA, 570 bp, Artificial Sequence
  derived and/or modified sequence
atggccggcaacggccgggaggacccccagcggaccctgcagatccgcgacgccttcgccgtgagagcgcggatgcagcaggcttcccagcacgctctgggccctcatggtctttgccagactgctacctcccgagaaagcgctgctgtaactttgaccaccctgccatctgaactgctgttggaccgactgcacccaaatccaatgtatcaacgcatgccactgctccttaacccaaaattgctaagtttggagtatccacggaacaatatcgaatacgtgcgtgatataggcgagggtgccttcggcagagtgttccaggcgcgggcacccgggctcctgccatatgagcctttcacaatggtggctgttaagatgcttaaggaagaagcttcagctgacatgcaagctgattttcaacgggaagccgctctgatggcagagtttgacaacccaaatattgtaaaactgctgggtatgaagatccaggtgaggatctgcatcagtagcgagaaccgcggttttccaagcttcagtcccctggtgagggccttcagcttcagtccatag

SEQ ID NO: 310505 - DNA, 570 bp, Artificial Sequence
  derived and/or modified sequence
atggccggcaacggccgggaggacccccagcggaccctgcagatcagggacgccttcgctgttcgcgcccgcatgcagcaagcctctcagcacgctctggggccacatggactgtgccagacggctactagtcgggagagcgcagccgtgacgttgactactcttccttcagaactgctgcttgatagactgcatcctaaccccatgtaccagcgcatgcctcttctgctgaaccctaagctgctcagcctcgagtacccccggaataatattgaatacgtgcgggacattggggaaggagctttcgggcgagtttttcaggccagggcccccggcctgctgccttatgaaccattcacaatggtggccgtcaaaatgttgaaagaagaggccagcgccgacatgcaagccgacttccagcgggaggccgccctcatggcagagttcgacaaccctaacattgttaagcttttggggatgaaaatacaggtacgcatctgcatctcttctgagaatcgaggcttcccttcattctcccccctggtgagagcttttagcttttcaccatag

SEQ ID NO: 310506 - DNA, 570 bp, Artificial Sequence
  derived and/or modified sequence
atggctggaaatgggcgtgaggatccccagcggacacttcagattagagatgccttcgccgtgagggcgcgaatgcagcaggcttcacagcatgcattgggaccacacggtttatgccaaaccgcaacttccagggagtccgccgctgtcactctaaccacactgccttcagagctactactagacaggctgcacccaaatcctatgtatcagcgtatgcccttgctgctcaaccccaaactcctgagcttggagtatcctcgcaataacatcgagtatgtgcgggatatcggagaaggagcttttgggagagtttttcaagcccgtgccccaggattactcccttatgagccctttactatggtcgcggtaaaaatgctgaaagaggaagcgtctgctgatatgcaggctgattttcagcgagaagcagcattgatggcggagttcgataatcccaatattgtgaagttgctgggcatgaaaattcaggtgcgcatttgcatcagtagcgagaacagagggtttccctcattctctccccttgtgagagccttctcgttctcaccctag

SEQ ID NO: 310507 - DNA, 570 bp, Artificial Sequence
  derived and/or modified sequence
atggctgggaatgggagagaggatcctcagagaacacttcaaattcgtgatgccttcgcggtcagggccaggatgcaacaggcctctcaacacgcactagggccacacggtctctgtcagactgccacctcccgcgaatcagcagctgtgaccctgacaacactcccgagcgagcttctgctcgaccgactccatcccaatcctatgtaccagcgcatgcccctgcttctcaaccccaagctattgtcacttgagtacccccgtaataatattgagtatgtgcgggacattggagaaggggctttcggacgagttttccaggcccgtgccccaggcctgctcccatacgagccgtttacaatggtggcggttaagatgttgaaggaggaggccagcgcagacatgcaggctgatttccaacgggaggccgctctgatggcggagttcgataatcctaacatagtcaagcttctgggaatgaaaattcaagtacggatctgcattagtagcgaaaaccggggatttcctagctttagccctttggttcgagccttttccttctccccttag

SEQ ID NO: 310508 - DNA, 570 bp, Artificial Sequence
  derived and/or modified sequence
atggccggcaacggcagagaggacccccagagaaccctgcagatcagagacgccttcgccgtgagagccagaatgcagcaggccagccagcacgccctgggcccccacggcctgtgccagaccgccaccagcagagagagcgccgccgtgaccctgaccaccctgcccagcgagctgctgctggacagactgcaccccaaccccatgtaccagagaatgcccctgctgctgaaccccaagctgctgagcctggagtaccccagaaacaacatcgagtacgtgagagacatcggcgagggcgccttcggcagagtgttccaggccagagcccccggcctgctgccctacgagcccttcaccatggtggccgtgaagatgctgaaggaggaggccagcgccgacatgcaggccgacttccagagagaggccgccctgatggccgagttcgacaaccccaacatcgtgaagctgctgggcatgaagatccaggtgagaatctgcatcagcagcgagaacagaggcttccccagcttcagccccctggtgagagccttcagcttcagcccctag

SEQ ID NO: 310509 - DNA, 159 bp, Artificial Sequence
  derived and/or modified sequence
atgaagctttgcgttaccgtgctgtcactgcttgtcctggtagctgccttttgttcactcgcactatccgcgccgtctaacaaacctctggaagccagtaagtccgccctgactcccgtaagcccaggctctaggagtacctgcatgacatggaattag

SEQ ID NO: 310510 - RNA, 159 nt, Artificial Sequence
  derived and/or modified sequence
augaagcuuugcguuaccgugcugucacugcuuguccugguagcugccuuuuguucacucgcacuauccgcgccgucuaacaaaccucuggaagccaguaaguccgcccugacucccguaagcccaggcucuaggaguaccugcaugacauggaauuag

SEQ ID NO: 310511 - protein, 822 aa, Artificial Sequence
  derived and/or modified sequence
MSSWIRWHGPAMARLWGFCWLVVGFWRAAFACPTSCKCSASRIWCSDPSPGIVAFPRLEPNSVDPENITEIFIANQKRLEIINEDDVEAYVGLRNLTIVDSGLKFVAHKAFLKNSNLQHINFTRNKLTSLSRKHFRHLDLSELILVGNPFTCSCDIMWIKTLQEAKSSPDTQDLYCLNESSKNIPLANLQIPNCGLPSANLAAPNLTVEEGKSITLSCSVAGDPVPNMYWDVGNLVSKHMNETSHTQGSLRITNISSDDSGKQISCVAENLVGEDQDSVNLTVHFAPTITFLESPTSDHHWCIPFTVKGNPKPALQWFYNGAILNESKYICTKIHVTNHTEYHGCLQLDNPTHMNNGDYTLIAKNEYGKDEKQISAHFMGWPGIDDGANPNYPDVIYEDYGTAANDIGDTTNRSNEIPSTDVTDKTGREHLSVYAVVVIASVVGFCLLVMLFLLKLARHSKFGMKGPASVISNDDDSASPLHHISNGSNTPSSSEGGPDAVIIGMTKIPVIENPQYFGITNSQLKPDTFVQHIKRHNIVLKRELGEGAFGKVFLAECYNLCPEQDKILVAVKTLKDASDNARKDFHREAELLTNLQHEHIVKFYGVCVEGDPLIMVFEYMKHGDLNKFLRAHGPDAVLMAEGNPPTELTQSQMLHIAQQIAAGMVYLASQHFVHRDLATRNCLVGENLLVKIGDFGMSRDVYSTDYYRVGGHTMLPIRWMPPESIMYRKFTTESDVWSLGVVLWEIFTYGKQPWYQLSNNEVIECITQGRVLQRPRTCPQEVYELMLGCWQREPHMRKNIKGIHTLLQNLAKASPVYLDILG

SEQ ID NO: 310512 - DNA, 2469 bp, Artificial Sequence
  derived and/or modified sequence
atgtcatcatggattcgttggcacggtccagcaatggccaggctgtggggcttttgctggcttgttgtgggattctggcgggcagcatttgcctgcccaacgtcttgtaagtgttcagcttcccgtatttggtgtagcgatccctcaccaggaatcgtggcttttccacgtctggagcccaactccgtcgaccctgagaacattaccgaaatcttcatcgccaaccagaagaggctcgagattatcaatgaggatgacgttgaagcctatgttggcttacgcaatcttaccatcgtggacagcggcttgaaatttgttgcacacaaggcgttcttgaagaactctaatctccaacatattaattttaccagaaacaagctcactagtctctcgaggaaacactttcggcacctagatctgtctgagctgattctcgtcgggaatccctttacatgctcctgcgatatcatgtggatcaagaccctgcaggaggccaaatccagccctgacactcaggacttatactgcctgaacgaaagctctaagaacatccccctggctaatcttcagattccaaactgcgggctgccctccgcgaatctcgccgcccctaacctgacggtcgaggaaggtaagtctataaccctttcctgttcagtggctggcgatcctgtgccgaacatgtattgggatgtgggaaacctagtgagcaaacacatgaatgagacgagtcatactcagggttcactgcgaataactaatatatcctcagatgatagtggcaagcagatatcatgcgttgcagaaaatttagtcggcgaagatcaggattctgtgaatctcactgtacattttgcccccaccataactttcctggagagtcccacatccgaccatcactggtgtatcccctttaccgtgaaagggaacccaaagcctgcattacagtggttctataatggcgcgattttgaacgaatctaaatacatatgtaccaaaatccacgttaccaaccacactgaataccacggctgcctccagctggacaatccaacccacatgaataacggagattacaccctcattgccaaaaatgagtacggcaaggacgagaagcagataagcgcacacttcatgggttggccagggattgacgacggtgccaaccccaactaccctgacgtgatatatgaagactatggaacggccgcaaatgatattggcgacactaccaaccgatccaacgagataccctcgacagatgtcactgacaagacaggtagggagcatcttagcgtgtatgcagtggtggtgatcgcctcagtggtcggcttttgcttactggtgatgcttttcctcctcaaattagcccggcattctaagttcgggatgaaaggacccgcttccgtcatttccaatgacgacgattctgcttcacctctgcaccatatcagtaatgggtcaaatacaccatcctccagtgagggaggcccggacgccgtgatcattggtatgacaaaaattcccgtaatcgagaaccctcagtatttcggcatcacaaattctcagctgaaaccggataccttcgtgcaacacatcaaaaggcacaacattgtgctgaagcgagaactgggggagggcgcttttgggaaagtgtttctggctgagtgctataatttgtgtccagaacaggataagattctggtcgccgttaagacgctcaaagacgcctctgataacgctagaaaagatttccatagggaggcagaactcctcactaacctgcagcacgagcatatcgtcaagttctacggtgtgtgcgttgagggcgacccactgattatggtctttgagtatatgaagcacggcgatttaaacaagttcctaagagcccacggacccgatgcagtgctcatggccgaggggaatccgcccaccgaactgacacagagccaaatgcttcatatagcccaacaaatcgccgccggcatggtttaccttgcgtcccagcattttgtccatcgagacctggcgacaaggaactgtcttgtgggcgaaaacttgctggtgaagattggggacttcgggatgtcaagagacgtgtacagcaccgattactacagggttggcgggcataccatgctgcctatccggtggatgcctccggagagtataatgtaccgaaaatttacaacggaatcagacgtttggtccctgggagttgtgttgtgggaaatctttacgtacggcaagcagccctggtaccagctctctaacaacgaagtgatcgaatgtatcactcagggacgggtactccaacgtccacgcacctgcccccaggaggtctacgagttgatgctgggctgctggcagcgggaaccccatatgaggaagaatattaaggggattcacacactgctccaaaacttagcaaaggcgagccctgtataccttgatattctaggttag

SEQ ID NO: 310513 - DNA, 2469 bp, Artificial Sequence
  derived and/or modified sequence
atgagctcatggataaggtggcatggcccagccatggccagattgtggggcttttgctggttggttgtcggattctggcgtgccgctttcgcctgtcccacttcttgcaaatgctcagcatccagaatttggtgctccgacccatctcctggaatcgtggcgttccctcggctcgaaccgaattccgtggaccctgagaacataacagagatctttatagctaatcagaagcgtctggagattatcaacgaagacgatgtggaagcctacgtggggttacggaaccttacaatcgtggactcaggcctaaagtttgtggctcataaggcctttctgaaaaactctaatctccagcatatcaacttcacccggaacaaactgacatccttaagtcgcaaacactttcgacacctggatctcagcgaactaatactcgttgggaacccatttacttgcagctgtgacatcatgtggataaagacactgcaggaggctaaatctagtcccgatacccaagatctgtactgcctgaacgaatcgtcaaaaaacatcccactcgccaacctgcagattccaaattgtgggttgccttcagctaacttagctgcaccaaatcttaccgtagaagaggggaagagcatcacattaagttgttctgtcgccggtgaccctgtccctaacatgtattgggacgttgggaacctggtgtcaaagcacatgaacgaaaccagtcatacccagggctcactgagaatcacaaacatctcctcagacgattcagggaaacagatttcttgcgtggccgaaaacctggtcggagaagatcaagactccgtgaaccttaccgtgcactttgctccgaccataacatttctggagagccctacatcagaccatcactggtgcatcccattcactgtgaaaggaaatcctaaacccgcactgcaatggttctacaatggcgcaatattaaacgaatctaaatatatttgcaccaagattcatgtgactaatcacacagaatatcacggatgtctccaattggataatccaactcacatgaataatggagactacacactgattgccaagaacgaatacggaaaagacgaaaagcagatctccgcccattttatgggatggccggggattgatgacggagcaaaccctaattatcccgatgtcatctacgaagattacggcaccgcagctaatgacataggagacaccaccaaccgcagtaacgaaattccctccacagatgttaccgacaagacgggccgcgagcacctctctgtgtatgctgttgtggtcatcgcaagcgttgtgggtttctgccttctggtcatgttgttcctcttgaaactggcccgacactcaaagttcggaatgaaggggccagccagtgtgatctctaatgacgatgattcggcttcacccctgcaccacatctccaacggctcaaacactccttcaagctccgaaggcggacccgatgcggttatcattgggatgacaaagatccccgtgatcgaaaacccccagtactttgggatcactaactcccagctcaaaccagacactttcgtgcaacacataaaacgccacaacatcgtgctgaaaagggagctgggtgagggcgcttttggtaaagtgtttttggccgaatgctacaacctgtgcccagaacaggacaagatcctggtcgcggttaaaacattaaaggacgcgtctgacaacgccagaaaggatttccatcgcgaggccgagctattaaccaacctccagcatgagcacatagtcaagttttatggtgtgtgcgtcgagggtgacccccttatcatggtcttcgagtatatgaagcacggcgacttgaacaagtttctgcgcgcacacggccccgatgcagttctgatggctgaagggaatcccccaacggaactgactcagtcacaaatgcttcatatcgcccagcagattgccgcgggaatggtgtacctggccagccagcatttcgtgcaccgggacttagctacacgtaactgcctagtcggcgaaaacctgctggtcaaaattggggactttggaatgagtcgggacgtgtactcaacggattactacagagtaggcggtcacactatgctaccaatcagatggatgccccccgagtctattatgtatagaaaattcaccacggagtcagacgtgtggagcctgggcgtggtcctgtgggaaatctttacgtacgggaaacagccatggtaccagttatcaaacaacgaagtgatcgagtgtatcactcagggaagagtgctgcagcgccctaggacctgtccccaggaggtgtacgaactgatgcttggatgctggcaaagggaacctcacatgaggaagaacatcaagggcattcacacgttgctgcagaatttagctaaggcatcacctgtgtatctcgatatccttggttag

SEQ ID NO: 310514 - DNA, 2469 bp, Artificial Sequence
  derived and/or modified sequence
atgagctcctggatccgctggcacggccctgccatggcccggctgtggggcttctgctggctggtggtgggcttctggagggctgcctttgcctgccccaccagctgcaagtgcagcgccagccgcatctggtgcagcgaccccagccctggcatcgtggccttcccccggctggagcccaacagcgtggaccctgagaacatcacagagatcttcatcgccaaccagaagaggctggagatcatcaatgaagatgatgtggaggcctacgtgggcctgaggaacctgaccatcgtggacagcggcctgaagtttgtggcccacaaggccttcctgaagaacagcaacctgcagcacatcaacttcaccaggaacaagctgaccagcctgagcaggaagcacttccgccacctggacctgtctgagctgatcctggtgggcaaccccttcacctgcagctgtgacatcatgtggatcaagaccctgcaggaggccaagagcagcccagacacccaggacctgtactgcctgaatgaaagcagcaagaacatccccctggccaacctgcagatccccaactgtggcctgcccagcgccaacctggccgcccccaacctgactgtggaggagggcaagagcatcaccctgagctgcagcgtggccggggaccctgtgcccaacatgtactgggatgtgggcaacctggtgtccaagcacatgaatgagaccagccacacccagggcagcctgcgcatcaccaacatcagcagtgatgacagcggcaagcagatcagctgtgtggccgagaacctggtgggggaggaccaggacagcgtgaacctgactgtgcactttgcccccaccatcaccttcctggagagccccaccagtgaccaccactggtgcatccccttcaccgtgaagggcaaccccaagccagccctgcagtggttctacaacggggccatcctgaatgaaagcaagtacatctgcaccaagatccacgtgaccaaccacacagagtaccacggctgcctgcagctggacaaccccacccacatgaacaacggggactacaccctcatcgccaagaatgaatatggcaaggatgagaagcagatcagcgcccacttcatgggctggccaggcattgatgatggagccaaccccaactacccagatgtgatctatgaggactatggaacagctgccaatgacattggagacaccaccaacagaagcaatgagatccccagcacagatgtgacagacaagacaggccgggagcacctgtctgtgtatgctgtggtggtgattgcctctgtggtgggcttctgcctgctggtgatgctgttcctgctgaagctggcccggcacagcaagtttggcatgaagggccctgccagcgtcatcagcaatgatgatgattctgccagccccctgcaccacatcagcaatggcagcaacacccccagcagcagcgagggcggcccagatgctgtgatcatcggcatgaccaagatccctgtgattgagaacccccagtacttcggcatcaccaacagccagctgaagccagacacctttgtgcagcacatcaagaggcacaacatcgtgctgaagcgggagctgggggagggcgccttcggcaaggtgttcctggccgagtgctacaacctgtgcccagagcaggacaagatcctggtggccgtgaagaccctgaaggatgccagtgacaatgccaggaaggacttccaccgggaggccgagctgctgaccaacctgcagcacgagcacatcgtgaagttctacggcgtgtgtgtggagggggaccccctcatcatggtgtttgagtacatgaagcacggggacctgaacaagttcctgcgggcccacggcccagatgctgtgctgatggccgagggcaaccccccaacagagctgacccagagccagatgctgcacatcgcccagcagattgctgctggcatggtgtacctggccagccagcactttgtgcaccgggacctggccaccaggaactgcctggtgggggagaacctgctggtgaagatcggggactttggcatgagcagagatgtgtacagcacagactactacagagtgggcggccacaccatgctgcccatccgctggatgcctcctgagagcatcatgtacaggaagttcaccacagaaagtgatgtgtggagcctgggcgtggtgctgtgggagatcttcacctacggcaagcagccctggtaccagctgagcaacaatgaggtgattgagtgcatcacccagggccgggtgctgcagaggcccaggacctgcccccaggaggtgtatgagctgatgctgggctgctggcagcgggagccccacatgaggaagaacatcaagggcatccacaccctgctgcagaacctggccaaggccagccctgtgtacctggacatcctgggctag

SEQ ID NO: 310515 - DNA, 2469 bp, Artificial Sequence
  derived and/or modified sequence
atgagcagctggatccggtggcacggccccgccatggcccggctgtggggcttctgttggctcgttgtggggttctggcgcgcagcgtttgcctgtccaacatcatgcaaatgcagcgcatcccgaatatggtgtagcgacccatcacctgggattgtggccttcccacgcctcgaaccaaattctgttgatccggaaaatatcaccgaaattttcatcgccaatcagaagcggcttgaaataatcaacgaggacgatgtcgaagcctacgtgggcctgaggaaccttacaatagtggacagcggactcaagtttgtcgctcacaaggcatttctcaaaaatagtaacctacaacacataaatttcacccggaataagctgacctcactgtccaggaagcacttccgccatttggacctctcggagctgattcttgtggggaacccatttacctgctcttgtgacatcatgtggataaaaacactccaggaagctaagagctcgccagacacacaagatctttactgcctaaatgagtcatccaaaaatataccattagccaaccttcagatccctaattgtggtctccccagcgccaacttagccgcgcctaacctaacagttgaggagggaaaatctatcaccctgtcttgcagtgttgccggggatcccgtgcctaacatgtattgggacgtggggaacctggtgagtaagcacatgaacgagacgtcccacacacagggttcactcaggatcaccaacatctccagcgatgactcgggcaagcagatctcatgtgtggccgaaaatctcgtgggcgaggaccaggacagcgtcaatctcactgtccacttcgcccccacgatcacctttttggagagcccgacgtccgaccaccactggtgtatacctttcacggtgaaaggcaacccgaagccagcgctgcagtggttttacaacggcgccatattaaatgagagcaagtacatctgtaccaagattcacgttactaatcacactgaatatcacgggtgcctgcaattagacaatccgacccacatgaataacggagactatactcttatcgccaagaatgagtatggtaaggatgagaaacagatcagcgcgcatttcatgggctggcctggcatcgatgatggtgccaacccaaactatcctgacgtgatatatgaggattatgggacagcagctaacgacatcggggacaccactaatcggtcaaatgagatccctagcacagacgtgaccgataagactggacgcgaacacctgtcagtttacgccgttgttgtcatagcctccgtggtgggattctgcctacttgttatgttgttcttgctcaagctggctcggcactccaaattcgggatgaaaggacccgcctctgtgatcagcaacgatgatgactccgcaagtcccctgcatcatattagcaacggatccaatacgccctccagctcagagggagggcctgacgctgtgatcataggtatgaccaagatcccagtgatcgaaaatcctcagtactttggtatcactaattcccaactgaagcctgatactttcgtgcaacacataaagcgtcacaatattgtgctcaagcgagagctgggagagggcgcgttcgggaaggtgtttctagcggagtgttataacctgtgtccagaacaggacaaaatcctggtggctgtcaagaccctcaaggatgcatcagataatgcacgaaaggatttccatagggaggctgagctcttgaccaacctgcagcatgaacacatcgtgaagttctacggagtgtgtgtagagggcgatccgctcataatggtgttcgagtacatgaaacacggcgacctcaataaatttctgagggcgcacggacctgatgcggtgcttatggctgaggggaacccacccaccgagcttacccagtctcagatgttgcatattgcccagcagatcgccgccgggatggtgtacctggcttcccagcactttgtccacagagacctggcaacccgaaattgcctggtgggggaaaacctcctcgttaaaatcggtgactttggcatgagtcgggacgtgtatagcacagattattatagagtgggagggcatacgatgcttcctatacgctggatgcccccagaatcaatcatgtatcgcaagtttacgacagaatccgacgtgtggtccctgggtgtggtattatgggaaatcttcacatatggaaaacagccttggtatcagttaagcaacaatgaagttattgagtgcattacacagggacgggtgctacagcgaccccggacctgcccacaggaagtctacgaactaatgctggggtgctggcaaagagagcctcacatgaggaaaaacattaaaggcatccacacgctgctgcagaatctcgccaaagccagtcctgtgtacctcgacattctgggctag

SEQ ID NO: 310516 - DNA, 2469 bp, Artificial Sequence
  derived and/or modified sequence
atgagcagctggatccggtggcacggccccgccatggcccggctgtgggggttctgctggctggttgtgggattttggcgggccgcattcgcttgtcccacctcatgcaaatgctctgcctctcgcatttggtgttcagacccctcccctgggattgtcgccttccctaggctcgagcccaactccgtcgacccagagaacattaccgaaatattcatcgccaaccaaaaacgcttggagatcatcaacgaggacgatgtggaagcttatgtggggctccgcaatcttactatcgtcgacagcggattgaagttcgttgctcacaaagctttcctcaagaactcaaacctccaacacataaacttcacacggaataagctcacctcactctcacggaagcactttcgtcatctcgatctgtccgaactgatcctggtgggcaatcctttcacgtgttcctgtgacattatgtggatcaaaacattacaagaggccaagtccagtcccgacacccaggatctgtattgcctcaacgagtctagcaaaaatattcctttagcgaatctgcagataccaaattgtggtttgccgagtgccaacctggccgccccaaaccttactgtggaggaggggaagtctatcacactgtcgtgttccgtggccggggatcccgtccccaacatgtattgggatgtgggcaacctggtatcaaagcatatgaacgaaacctcgcatacccaaggctcacttaggattactaacatctcctccgacgacagcggcaaacaaatcagctgcgtcgccgagaatctggtcggtgaagaccaagatagtgttaacctgacagtgcacttcgctcccaccattacttttctggaatcacctacctcggaccaccattggtgtattcctttcaccgtgaaaggcaaccctaagccggctttacagtggttttacaatggtgcaatcctgaacgaatccaaatacatttgcactaagattcatgtcacgaaccacaccgaatatcatggatgtctccagttggataaccccacccacatgaataacggcgactataccctaatcgctaagaatgagtacggcaaagacgaaaagcagatctccgctcacttcatgggatggcccggtatagatgacggtgcaaaccccaattacccggatgtgatatacgaggactacggcacagctgcaaacgacattggcgatacaacaaacagatctaatgagattccttctaccgacgttacagacaagaccggacgggaacacctaagtgtttacgccgtggtagtgatcgcaagtgttgtgggattttgtctcctggtcatgctgttcctgctcaagctggcccggcattccaagtttgggatgaagggcccagcttccgttatctcaaatgatgacgacagcgccagtcccctacaccatatctctaacggctccaacacaccgtcatcatcagagggaggacctgacgctgttattataggaatgacaaaaattccagtgatagagaacccacagtattttggaattacaaacagccaactcaaacccgacacctttgtgcagcatatcaaacggcacaacatagtgctcaaacgtgagttaggggagggggcctttggaaaagtattcctagctgagtgctacaatttgtgccctgagcaagacaagattctagttgccgtgaaaaccctgaaggatgcctctgataatgctcggaaggattttcatcgggaggccgagctgttgacaaacctacagcacgaacatatagtgaaattttacggagtctgtgtggaaggagaccccttgatcatggtattcgagtacatgaaacatggggatctaaataagtttttacgggcccacgggcctgacgctgttctgatggctgaggggaacccacctacagaacttactcagtcccagatgcttcacattgcacagcagatagcagccggcatggtttatctggcctcacagcattttgtacaccgggatcttgccacccgaaactgcctggtgggagaaaaccttctggttaagatcggagactttggtatgtctagggatgtctattcaacagactactatcgcgtcgggggccatacaatgctgcccatacggtggatgccacctgaatctattatgtaccgaaaattcactacagagagcgacgtgtggtcactgggggtcgtcctctgggagatatttacttatgggaaacagccatggtaccagttatccaataatgaagttattgagtgtatcacacagggccgagttctccaacggccacgaacctgtcctcaggaagtgtatgagctgatgctgggatgctggcaacgtgagccgcatatgcggaaaaacatcaaagggatacacacacttctgcagaaccttgctaaagcatctcccgtgtacctcgatatactgggctag

SEQ ID NO: 310517 - DNA, 3708 bp, Artificial Sequence
  derived and/or modified sequence
cccccattcgcatctaacaaggaatctgcgccccagagagtcccgggagcgccgccggtcggtgcccggcgcgccgggccatgcagcgacggccgccgcggagctccgagcagcggtagcgcccccctgtaaagcggttcgctatgccggggccactgtgaaccctgccgcctgccggaacactcttcgctccggaccagctcagcctctgataagctggactcggcacgcccgcaacaagcaccgaggagttaagagagccgcaagcgcagggaaggcctccccgcacgggtgggggaaagcggccggtgcagcgcggggacaggcactcgggctggcactggctgctagggatgtcgtcctggataaggtggcatggacccgccatggcgcggctctggggcttctgctggctggttgtgggcttctggagggccgctttcgcctgtcccacgtcctgcaaatgcagtgcctctcggatctggtgcagcgacccttctcctggcatcgtggcatttccgagattggagcctaacagtgtagatcctgagaacatcaccgaaattttcatcgcaaaccagaaaaggttagaaatcatcaacgaagatgatgttgaagcttatgtgggactgagaaatctgacaattgtggattctggattaaaatttgtggctcataaagcatttctgaaaaacagcaacctgcagcacatcaattttacccgaaacaaactgacgagtttgtctaggaaacatttccgtcaccttgacttgtctgaactgatcctggtgggcaatccatttacatgctcctgtgacattatgtggatcaagactctccaagaggctaaatccagtccagacactcaggatttgtactgcctgaatgaaagcagcaagaatattcccctggcaaacctgcagatacccaattgtggtttgccatctgcaaatctggccgcacctaacctcactgtggaggaaggaaagtctatcacattatcctgtagtgtggcaggtgatccggttcctaatatgtattgggatgttggtaacctggtttccaaacatatgaatgaaacaagccacacacagggctccttaaggataactaacatttcatccgatgacagtgggaagcagatctcttgtgtggcggaaaatcttgtaggagaagatcaagattctgtcaacctcactgtgcattttgcaccaactatcacatttctcgaatctccaacctcagaccaccactggtgcattccattcactgtgaaaggcaaccccaaaccagcgcttcagtggttctataacggggcaatattgaatgagtccaaatacatctgtactaaaatacatgttaccaatcacacggagtaccacggctgcctccagctggataatcccactcacatgaacaatggggactacactctaatagccaagaatgagtatgggaaggatgagaaacagatttctgctcacttcatgggctggcctggaattgacgatggtgcaaacccaaattatcctgatgtaatttatgaagattatggaactgcagcgaatgacatcggggacaccacgaacagaagtaatgaaatcccttccacagacgtcactgataaaaccggtcgggaacatctctcggtctatgctgtggtggtgattgcgtctgtggtgggattttgccttttggtaatgctgtttctgcttaagttggcaagacactccaagtttggcatgaaaggcccagcctccgttatcagcaatgatgatgactctgccagcccactccatcacatctccaatgggagtaacactccatcttcttcggaaggtggcccagatgctgtcattattggaatgaccaagatccctgtcattgaaaatccccagtactttggcatcaccaacagtcagctcaagccagacacatttgttcagcacatcaagcgacataacattgttctgaaaagggagctaggcgaaggagcctttggaaaagtgttcctagctgaatgctataacctctgtcctgagcaggacaagatcttggtggcagtgaagaccctgaaggatgccagtgacaatgcacgcaaggacttccaccgtgaggccgagctcctgaccaacctccagcatgagcacatcgtcaagttctatggcgtctgcgtggagggcgaccccctcatcatggtctttgagtacatgaagcatggggacctcaacaagttcctcagggcacacggccctgatgccgtgctgatggctgagggcaacccgcccacggaactgacgcagtcgcagatgctgcatatagcccagcagatcgccgcgggcatggtctacctggcgtcccagcacttcgtgcaccgcgatttggccaccaggaactgcctggtcggggagaacttgctggtgaaaatcggggactttgggatgtcccgggacgtgtacagcactgactactacagggtcggtggccacacaatgctgcccattcgctggatgcctccagagagcatcatgtacaggaaattcacgacggaaagcgacgtctggagcctgggggtcgtgttgtgggagattttcacctatggcaaacagccctggtaccagctgtcaaacaatgaggtgatagagtgtatcactcagggccgagtcctgcagcgaccccgcacgtgcccccaggaggtgtatgagctgatgctggggtgctggcagcgagagccccacatgaggaagaacatcaagggcatccataccctccttcagaacttggccaaggcatctccggtctacctggacattctaggctagggcccttttccccagaccgatccttcccaacgtactcctcagacgggctgagaggatgaacatcttttaactgccgctggaggccaccaagctgctctccttcactctgacagtattaacatcaaagactccgagaagctctcgagggaagcagtgtgtacttcttcatccatagacacagtattgacttctttttggcattatctctttctctctttccatctcccttggttgttcctttttctttttttaaattttctttttcttttttttttcgtcttccctgcttcacgattcttaccctttcttttgaatcaatctggcttctgcattactattaactctgcatagacaaaggccttaacaaacgtaatttgttatatcagcagacactccagtttgcccaccacaactaacaatgccttgttgtattcctgcctttgatgtggatgaaaaaaagggaaaacaaatatttcacttaaactttgtcacttctgctgtacagatatcgagagtttctatggattcacttctatttatttattattattactgttcttattgtttttggatggcttaagcctgtgtataaaaaagaaaacttgtgttcaatctgtgaagcctttatctatgggagattaaaaccagagagaaagaagatttattatgaaccgcaatatgggaggaacaaagacaaccactgggatcagctggtgtcagtccctacttaggaaatactcagcaactgttagctgggaagaatgtattcggcaccttcccctgaggacctttctgaggagtaaaaagactactggcctctgtgccatggatgattcttttcccatcaccagaaatgatagcgtgcagtagagagcaaagatggctt

SEQ ID NO: 310518 - DNA, 5560 bp, Artificial Sequence
  derived and/or modified sequence
aagacggattctcagacaaggcttgcaaatgccccgcagccatcatttaactgcacccgcagaatagttacggtttgtcacccgaccctcccggatcgcctaatttgtccctagtgagaccccgaggctctgcccgcgcctggcttcttcgtagctggatgcatatcgtgctccgggcagcgcgggcgcagggcacgcgttcgcgcacaccctagcacacatgaacacgcgcaagagctgaaccaagcacggtttccatttcaaaaagggagacagcctctaccgcgattgtagaagagactgtggtgtgaattagggaccgggaggcgtcgaacggaggaacggttcatcttagagactaattttctggagtttctgcccctgctctgcgtcagccctcacgtcacttcgccagcagtagcagaggcggcggcggcggctcccggaattgggttggagcaggagcctcgctggctgcttcgctcgcgctctacgcgctcagtccccggcggtagcaggagcctggacccaggcgccgccggcgggcgtgaggcgccggagcccggcctcgaggtgcataccggacccccattcgcatctaacaaggaatctgcgccccagagagtcccgggagcgccgccggtcggtgcccggcgcgccgggccatgcagcgacggccgccgcggagctccgagcagcggtagcgcccccctgtaaagcggttcgctatgccggggccactgtgaaccctgccgcctgccggaacactcttcgctccggaccagctcagcctctgataagctggactcggcacgcccgcaacaagcaccgaggagttaagagagccgcaagcgcagggaaggcctccccgcacgggtgggggaaagcggccggtgcagcgcggggacaggcactcgggctggcactggctgctagggatgtcgtcctggataaggtggcatggacccgccatggcgcggctctggggcttctgctggctggttgtgggcttctggagggccgctttcgcctgtcccacgtcctgcaaatgcagtgcctctcggatctggtgcagcgacccttctcctggcatcgtggcatttccgagattggagcctaacagtgtagatcctgagaacatcaccgaaattttcatcgcaaaccagaaaaggttagaaatcatcaacgaagatgatgttgaagcttatgtgggactgagaaatctgacaattgtggattctggattaaaatttgtggctcataaagcatttctgaaaaacagcaacctgcagcacatcaattttacccgaaacaaactgacgagtttgtctaggaaacatttccgtcaccttgacttgtctgaactgatcctggtgggcaatccatttacatgctcctgtgacattatgtggatcaagactctccaagaggctaaatccagtccagacactcaggatttgtactgcctgaatgaaagcagcaagaatattcccctggcaaacctgcagatacccaattgtggtttgccatctgcaaatctggccgcacctaacctcactgtggaggaaggaaagtctatcacattatcctgtagtgtggcaggtgatccggttcctaatatgtattgggatgttggtaacctggtttccaaacatatgaatgaaacaagccacacacagggctccttaaggataactaacatttcatccgatgacagtgggaagcagatctcttgtgtggcggaaaatcttgtaggagaagatcaagattctgtcaacctcactgtgcattttgcaccaactatcacatttctcgaatctccaacctcagaccaccactggtgcattccattcactgtgaaaggcaaccccaaaccagcgcttcagtggttctataacggggcaatattgaatgagtccaaatacatctgtactaaaatacatgttaccaatcacacggagtaccacggctgcctccagctggataatcccactcacatgaacaatggggactacactctaatagccaagaatgagtatgggaaggatgagaaacagatttctgctcacttcatgggctggcctggaattgacgatggtgcaaacccaaattatcctgatgtaatttatgaagattatggaactgcagcgaatgacatcggggacaccacgaacagaagtaatgaaatcccttccacagacgtcactgataaaaccggtcgggaacatctctcggtctatgctgtggtggtgattgcgtctgtggtgggattttgccttttggtaatgctgtttctgcttaagttggcaagacactccaagtttggcatgaaaggcccagcctccgttatcagcaatgatgatgactctgccagcccactccatcacatctccaatgggagtaacactccatcttcttcggaaggtggcccagatgctgtcattattggaatgaccaagatccctgtcattgaaaatccccagtactttggcatcaccaacagtcagctcaagccagacacatttgttcagcacatcaagcgacataacattgttctgaaaagggagctaggcgaaggagcctttggaaaagtgttcctagctgaatgctataacctctgtcctgagcaggacaagatcttggtggcagtgaagaccctgaaggatgccagtgacaatgcacgcaaggacttccaccgtgaggccgagctcctgaccaacctccagcatgagcacatcgtcaagttctatggcgtctgcgtggagggcgaccccctcatcatggtctttgagtacatgaagcatggggacctcaacaagttcctcagggcacacggccctgatgccgtgctgatggctgagggcaacccgcccacggaactgacgcagtcgcagatgctgcatatagcccagcagatcgccgcgggcatggtctacctggcgtcccagcacttcgtgcaccgcgatttggccaccaggaactgcctggtcggggagaacttgctggtgaaaatcggggactttgggatgtcccgggacgtgtacagcactgactactacagggtcggtggccacacaatgctgcccattcgctggatgcctccagagagcatcatgtacaggaaattcacgacggaaagcgacgtctggagcctgggggtcgtgttgtgggagattttcacctatggcaaacagccctggtaccagctgtcaaacaatgaggtgatagagtgtatcactcagggccgagtcctgcagcgaccccgcacgtgcccccaggaggtgtatgagctgatgctggggtgctggcagcgagagccccacatgaggaagaacatcaagggcatccataccctccttcagaacttggccaaggcatctccggtctacctggacattctaggctagggcccttttccccagaccgatccttcccaacgtactcctcagacgggctgagaggatgaacatcttttaactgccgctggaggccaccaagctgctctccttcactctgacagtattaacatcaaagactccgagaagctctcgagggaagcagtgtgtacttcttcatccatagacacagtattgacttctttttggcattatctctttctctctttccatctcccttggttgttcctttttctttttttaaattttctttttcttttttttttcgtcttccctgcttcacgattcttaccctttcttttgaatcaatctggcttctgcattactattaactctgcatagacaaaggccttaacaaacgtaatttgttatatcagcagacactccagtttgcccaccacaactaacaatgccttgttgtattcctgcctttgatgtggatgaaaaaaagggaaaacaaatatttcacttaaactttgtcacttctgctgtacagatatcgagagtttctatggattcacttctatttatttattattattactgttcttattgtttttggatggcttaagcctgtgtataaaaaagaaaacttgtgttcaatctgtgaagcctttatctatgggagattaaaaccagagagaaagaagatttattatgaaccgcaatatgggaggaacaaagacaaccactgggatcagctggtgtcagtccctacttaggaaatactcagcaactgttagctgggaagaatgtattcggcaccttcccctgaggacctttctgaggagtaaaaagactactggcctctgtgccatggatgattcttttcccatcaccagaaatgatagcgtgcagtagagagcaaagatggcttccgtgagacacaagatggcgcatagtgtgctcggacacagttttgtcttcgtaggttgtgatgatagcactggtttgtttctcaagcgctatccacagaacctttgtcaacttcagttgaaaagaggtggattcatgtccagagctcatttcggggtcaggtgggaaagccaagaacttggaaaagataagacaagctataaattcggaggcaagtttcttttacaatgaacttttcagatctcacttccctccgacccctaacttccatgcccacccgtccttttaactgtgcaagcaaaattgtgcatggtcttcgtcgattaataccttgtgtgcagacactactgctccagacgtcgtttccctgataggtagagcagatccataaaaaggtatgacttatacaattaggggaagctaatggagtttattagctgagtatcaatgtctctgcgttgtacggtggtgatgggttttaatgaatatggaccctgaagcctggaaatcctcatccacgtcgaacccacaggactgtgggaagggcagaatcaatccctaagggaaaggaaacctcaccctgagggcatcacatgcactcatgttcagtgtacacaggtcaagtcccttgctctgggctctagttgggagagtggtttcattccaagtgtactccattgtcagtatgctgtttttgtttccttcactccattcaaaaagtcaaaatacaaaatttggcacagcatgccaacgggaggctgtgcccagaccaagcactggaagtgtgcttctaggcatagtcattggttttgcaaaaagagggctcaaatttaaatagaaatttacagctatttgaatggtcagatataccaagaaagaaaaatatttctgttcctcaagaaaacttgctaccctctgtgaggggaattttgctaaacttgacatctttataacatgagccagattgaaagggagtgattttcattcatcttaggtcatgttatttcatatttgtttctgaaggtgcgatagctctgttttaggttttgcttgcgcctgttaattactggaacaccttatttttcattaaaggctttgaaagccaattctcaaaaattcaaaagtgcaaattaacagaacaaaaggaaatccagtagcaactgcagtcaagcgagggagttgacaagataaaccttacgtccattcaagttatatgctggcctatgagagatgagagttgggtcgtttgttctctttgttgatgattt

SEQ ID NO: 310519 - DNA, 2469 bp, Artificial Sequence
  derived and/or modified sequence
atgagctcatggatccgatggcatggaccagccatggctcgattgtggggcttttgctggctggtcgtcggcttctggcgcgctgcttttgcttgtcccacctcgtgtaagtgctccgccagccgcatctggtgctccgatccgtcacccggaattgtagcgttcccaagacttgaaccaaactcagtcgatcctgagaacatcactgagattttcattgccaaccagaagcgcctggaaatcatcaacgaagatgatgtcgaggcatatgtgggcctgcgcaatctgactattgttgacagtggactgaaattcgtcgctcacaaggcctttctgaaaaactctaacctgcagcatatcaatttcactcggaacaagctgacaagtctaagccggaaacacttccgacatctcgatctgagtgagctgattctggtgggaaacccgttcacctgcagctgtgatattatgtggattaaaacactccaggaggcgaagagctcccctgatacacaggatctgtactgtctgaatgaatctagcaaaaatatcccgttagccaatctgcagattcccaactgtggcctgccatctgccaatctcgcggctcctaacttgaccgtcgaggagggaaaatcaattaccctctcatgtagcgtggcaggagaccccgtgccgaacatgtactgggacgttggcaatctggtcagtaagcacatgaacgaaaccagtcatactcagggatctcttcgcatcactaacatctcttcagacgattccggtaaacagatatcctgcgtggccgaaaaccttgtgggcgaagatcaggactcagtcaacctgacagttcactttgctcctacgatcacttttctggaaagccctacctctgatcaccattggtgcattcccttcacagtcaagggcaatccaaagcctgctcttcagtggttctataatggcgctatcctcaatgaaagcaaatatatatgtaccaagattcacgttacaaaccatacggagtaccacggctgcctgcagttggataaccccacacacatgaataacggggactacaccttaatcgcgaagaatgagtatggtaaggatgagaaacaaattagcgcccatttcatggggtggccgggaattgatgacggtgcaaatccaaactacccagacgttatttacgaggactacgggacagccgctaatgacatcggtgataccaccaaccggtccaatgagatacctagtactgacgtcaccgataaaactggccgagagcatctgtctgtgtatgccgtcgtagtaattgccagcgtcgtgggattctgccttctcgtaatgctgtttttgctgaaactggccagacactcaaagttcggcatgaagggaccagcctccgtgatatcaaatgatgacgacagtgcatcccctttgcatcatatatctaacggctctaacacccctagttcatccgaaggcggtcctgatgcagtgatcattggcatgacgaaaattcccgtgatagagaacccacaatactttggcattactaacagtcagcttaagccagatacatttgtgcagcacataaagcggcacaatattgtgctgaagagagaactcggcgagggcgctttcggaaaagttttcctggcggagtgttacaacttatgccctgagcaagataaaatactcgtggctgtcaagactctgaaggatgccagcgacaacgctaggaaggacttccaccgagaggctgaattgcttactaacctgcagcacgagcacattgtgaagttctacggtgtctgtgtagagggagaccctctgattatggtattcgaatacatgaagcatggagatctcaataaatttttgagggcacatggccctgatgcagtcttaatggccgaaggtaatcctcccacagagcttacccaatcccagatgctacatatagcccaacagatagccgcaggcatggtgtatctcgcatctcagcacttcgtgcacagggaccttgccaccaggaactgtcttgtaggagaaaatctgttggttaaaatcggagactttggaatgtccagagacgtctatagtacggattattatcgtgttggtggccacaccatgcttccaattcgctggatgccgccagagtcaataatgtatagaaaatttaccaccgagagtgatgtgtggagcctgggggttgtgctgtgggagatatttacttatggtaaacagccttggtaccaactgtcaaacaacgaggtcatagagtgcattacccagggccgagtgctgcagagacctcgcacgtgccctcaggaagtctacgagttaatgctgggctgttggcaacgtgagccccacatgcgaaagaatattaaaggcatccacaccctcttacagaatctcgctaaggcctcacccgtgtatcttgacatcttgggctag

SEQ ID NO: 310520 - DNA, 2469 bp, Artificial Sequence
  derived and/or modified sequence
atgagcagttggatacggtggcatggtcccgctatggccagactatggggcttctgctggctggtggtcggtttttggagagcagccttcgcgtgcccaacttcgtgcaagtgttccgcaagccgtatttggtgttcagacccatcccccggaattgtagctttccccaggctggagccaaatagtgtcgatcctgaaaacatcactgagatctttattgctaatcagaagaggctggagatcattaacgaggacgatgtggaagcctacgtgggactgaggaatctcacgatcgtcgacagtggattgaaattcgtagcacataaggcgttcctcaagaattccaatttacaacatatcaattttacaagaaataagctcacatctctctcccggaagcatttccgtcatttagatctctcagagctcattctagtgggcaacccattcacatgcagctgcgacattatgtggatcaaaaccctacaagaggccaagtcatcccctgacacccaggacctctattgtttgaacgagagctcaaagaacattccgctggcaaatttgcagattcccaattgtgggctgccttccgccaacctggccgctcccaacttgaccgttgaggaaggcaaatcgatcacgctgtcatgttcagtggccggtgatccagtcccgaatatgtactgggatgttgggaacctagttagtaagcatatgaacgagacctctcacacccaggggagcctacggataacaaacatctcctcagatgactccgggaaacagatctcatgtgtggccgagaatctggtgggggaggaccaagattccgtgaatctaacagtgcactttgctcccacgataacctttctggaaagtcctaccagtgaccatcactggtgtatccctttcactgttaaaggtaaccctaagcccgctctacagtggttttacaatggggctattctgaatgagtccaagtatatatgtaccaagattcatgttactaatcacactgagtatcacggatgtctgcaattagataatccaacacatatgaataacggtgattacactcttatagctaaaaacgaatacggcaaggacgagaagcagatcagcgctcacttcatgggctggcctggtatcgacgacggggcaaacccaaattaccccgacgtgatctatgaggactatggcacagcagctaacgatattggtgatactacaaaccggagcaacgagataccctctacagatgtcacagacaagaccgggagggagcacctgtccgtgtatgcagtcgtcgtgatagcctcagttgttggtttctgtctgctcgtgatgttgtttctcctgaagctcgctaggcactcgaaattcggcatgaagggcccagcatcagttatttccaatgatgatgattcagcatcacccttgcaccacatatccaatggaagcaacaccccttcatcaagcgagggaggtccagatgccgtaatcataggtatgacaaagatcccagtgatcgaaaacccccagtacttcgggattactaacagccaattgaagcccgacacattcgtgcagcatatcaaacggcacaacatcgtgctgaagagggaactcggggagggagcgtttggtaaggtcttcctcgccgagtgttataacttgtgtcctgagcaagacaagatcctagtcgctgtgaagacgctaaaagatgccagcgataatgctagaaaagacttccaccgagaggctgagctgttgaccaacctgcagcatgaacatatcgtgaaattctacggcgtgtgtgtcgaaggggatcccctaattatggtcttcgagtatatgaaacatggcgatctgaataaattccttcgggctcacggacctgatgccgtgcttatggcagaaggaaacccacccacagagttgacccaaagtcagatgctgcacatcgcacaacaaattgctgcaggcatggtctacctggcgtcccaacacttcgtgcacagggatctcgccacccggaactgcttggtaggcgagaacctgctggtgaaaatcggtgactttggtatgagtcgagacgtatacagtacagactactacagagtgggaggccacactatgcttcccattagatggatgcctccagaatccatcatgtaccgcaaatttaccacagaatcagatgtatggagtctgggcgtggtcctgtgggagatttttacctacggaaagcagccctggtatcagctcagcaacaatgaggtgattgagtgcatcactcaggggcgagtcttgcaacggccacgtacatgtccccaggaagtgtatgaactgatgcttggctgctggcagcgtgagccacacatgaggaaaaacatcaaagggatacacacgctgcttcagaatttagccaaggccagcccagtctacctagacatactggggtag

SEQ ID NO: 310521 - DNA, 2469 bp, Artificial Sequence
  derived and/or modified sequence
atgagcagctggatcagatggcacggccccgccatggccagactgtggggcttctgctggctggtggtgggcttctggagagccgccttcgcctgccccaccagctgcaagtgcagcgccagcagaatctggtgcagcgaccccagccccggcatcgtggccttccccagactggagcccaacagcgtggaccccgagaacatcaccgagatcttcatcgccaaccagaagagactggagatcatcaacgaggacgacgtggaggcctacgtgggcctgagaaacctgaccatcgtggacagcggcctgaagttcgtggcccacaaggccttcctgaagaacagcaacctgcagcacatcaacttcaccagaaacaagctgaccagcctgagcagaaagcacttcagacacctggacctgagcgagctgatcctggtgggcaaccccttcacctgcagctgcgacatcatgtggatcaagaccctgcaggaggccaagagcagccccgacacccaggacctgtactgcctgaacgagagcagcaagaacatccccctggccaacctgcagatccccaactgcggcctgcccagcgccaacctggccgcccccaacctgaccgtggaggagggcaagagcatcaccctgagctgcagcgtggccggcgaccccgtgcccaacatgtactgggacgtgggcaacctggtgagcaagcacatgaacgagaccagccacacccagggcagcctgagaatcaccaacatcagcagcgacgacagcggcaagcagatcagctgcgtggccgagaacctggtgggcgaggaccaggacagcgtgaacctgaccgtgcacttcgcccccaccatcaccttcctggagagccccaccagcgaccaccactggtgcatccccttcaccgtgaagggcaaccccaagcccgccctgcagtggttctacaacggcgccatcctgaacgagagcaagtacatctgcaccaagatccacgtgaccaaccacaccgagtaccacggctgcctgcagctggacaaccccacccacatgaacaacggcgactacaccctgatcgccaagaacgagtacggcaaggacgagaagcagatcagcgcccacttcatgggctggcccggcatcgacgacggcgccaaccccaactaccccgacgtgatctacgaggactacggcaccgccgccaacgacatcggcgacaccaccaacagaagcaacgagatccccagcaccgacgtgaccgacaagaccggcagagagcacctgagcgtgtacgccgtggtggtgatcgccagcgtggtgggcttctgcctgctggtgatgctgttcctgctgaagctggccagacacagcaagttcggcatgaagggccccgccagcgtgatcagcaacgacgacgacagcgccagccccctgcaccacatcagcaacggcagcaacacccccagcagcagcgagggcggccccgacgccgtgatcatcggcatgaccaagatccccgtgatcgagaacccccagtacttcggcatcaccaacagccagctgaagcccgacaccttcgtgcagcacatcaagagacacaacatcgtgctgaagagagagctgggcgagggcgccttcggcaaggtgttcctggccgagtgctacaacctgtgccccgagcaggacaagatcctggtggccgtgaagaccctgaaggacgccagcgacaacgccagaaaggacttccacagagaggccgagctgctgaccaacctgcagcacgagcacatcgtgaagttctacggcgtgtgcgtggagggcgaccccctgatcatggtgttcgagtacatgaagcacggcgacctgaacaagttcctgagagcccacggccccgacgccgtgctgatggccgagggcaacccccccaccgagctgacccagagccagatgctgcacatcgcccagcagatcgccgccggcatggtgtacctggccagccagcacttcgtgcacagagacctggccaccagaaactgcctggtgggcgagaacctgctggtgaagatcggcgacttcggcatgagcagagacgtgtacagcaccgactactacagagtgggcggccacaccatgctgcccatcagatggatgccccccgagagcatcatgtacagaaagttcaccaccgagagcgacgtgtggagcctgggcgtggtgctgtgggagatcttcacctacggcaagcagccctggtaccagctgagcaacaacgaggtgatcgagtgcatcacccagggcagagtgctgcagagacccagaacctgcccccaggaggtgtacgagctgatgctgggctgctggcagagagagccccacatgagaaagaacatcaagggcatccacaccctgctgcagaacctggccaaggccagccccgtgtacctggacatcctgggctag

SEQ ID NO: 310522 - protein, 33 aa, Artificial Sequence
  derived and/or modified sequence
  misc_feature (1)..(1): Xaa can be any naturally occurring amino acid
XEIMQGFIRAFRPLPRHLWYLLDLKQMEEPCRF

SEQ ID NO: 310523 - protein, 145 aa, Artificial Sequence
  derived and/or modified sequence
MLCLLLTLGVALVCGVPAMDIPQTKQDLELPKAPLRVHITSLLPTPEDNLEIVLHRWENNSCVEKKVLGEKTENPKKFKINCKASGAPQLSWKPQGPRTDPASSTARVLVEDDEIMQGFIRAFRPLPRHLWYLLDLKQMEEPCRF

SEQ ID NO: 310524 - protein, 131 aa, Artificial Sequence
  derived and/or modified sequence
  misc_feature (1)..(1): Xaa can be any naturally occurring amino acid
XVPAMDIPQTKQDLELPKAPLRVHITSLLPTPEDNLEIVLHRWENNSCVEKKVLGEKTENPKKFKINCKASGAPQLSWKPQGPRTDPASSTARVLVEDDEIMQGFIRAFRPLPRHLWYLLDLKQMEEPCRF

SEQ ID NO: 310525 - DNA, 438 bp, Artificial Sequence
  derived and/or modified sequence
atgctctgcctcctactgaccctgggcgtggccttggtatgtggcgtgcctgctatggacattccccagaccaagcaggacctagaactgcctaaggcaccgctacgagtccacattacatctctgctcccaacacccgaggacaatcttgagattgtgctgcacagatgggagaacaattcctgcgtggaaaaaaaggtcttgggcgagaagaccgagaatcccaagaagttcaagatcaattgcaaagcctccggggccccacagctgagctggaaaccacagggacccagaaccgatcctgcatcaagtaccgctagagtcttggtggaggacgatgagatcatgcaggggtttattagagccttccgcccacttccacgccatttatggtacttgttggacctgaagcagatggaagagccctgccggttctag

SEQ ID NO: 310526 - DNA, 396 bp, Artificial Sequence
  derived and/or modified sequence
tgagtgcctgccatggatattccgcagactaagcaggacttggagctgccgaaagccccactgcgcgtccatattactagcctcctgccaactcccgaagacaatcttgagatcgtgctccatcgttgggaaaacaacagctgtgttgagaaaaaagtgctgggcgagaagaccgaaaaccctaagaagttcaagatcaattgcaaggcctctggtgcccctcagctctcctggaagcctcaggggccccgaaccgaccccgcatcctcaaccgcacgggtgctcgtggaggacgacgagattatgcagggatttattcgcgccttccgcccactgccccgccacctctggtacctgctggacttaaagcagatggaggagccttgcagattttag

SEQ ID NO: 310527 - DNA, 438 bp, Artificial Sequence
  derived and/or modified sequence
atgctgtgcctgctgctgaccctgggcgtggccctggtgtgtggggtgcctgccatggacatcccccagaccaagcaggacctggagctgcccaaggcccccctgcgggtgcacatcaccagcctgctgcccaccccagaggacaacctggagatcgtgctgcaccgctgggagaacaacagctgtgtggagaagaaggtgctgggggagaagacagagaaccccaagaagttcaagatcaactgcaaggccagcggggccccccagctgtcctggaagccccagggccccaggacagatcctgccagcagcacagcccgggtgctggtggaggatgatgagatcatgcagggcttcatccgggccttccggcccctgcccaggcacctgtggtacctgctggacctgaagcagatggaggagccctgccgcttctag

SEQ ID NO: 310528 - DNA, 396 bp, Artificial Sequence
  derived and/or modified sequence
tgagtgcctgccatggacatcccccagaccaagcaggacctggagctgcccaaggcccccctgcgggtgcacatcaccagcctgctgcccaccccagaggacaacctggagatcgtgctgcaccgctgggagaacaacagctgtgtggagaagaaggtgctgggggagaagacagagaaccccaagaagttcaagatcaactgcaaggccagcggggccccccagctgtcctggaagccccagggccccaggacagatcctgccagcagcacagcccgggtgctggtggaggatgatgagatcatgcagggcttcatccgggccttccggcccctgcccaggcacctgtggtacctgctggacctgaagcagatggaggagccctgccgcttctag

SEQ ID NO: 310529 - DNA, 438 bp, Artificial Sequence
  derived and/or modified sequence
atgctgtgcctgctgctgaccctgggcgtggccctggtgtgcggcgttccagcgatggatatacctcagacgaagcaggacctggaactgccaaaggcccccctgcgggtgcacattacctctctgctgcccacccctgaagataacctagaaatcgttctccatagatgggagaacaactcatgcgtggagaagaaagtgctcggagagaaaaccgagaatcctaaaaagttcaagatcaactgcaaggcctcgggggctcctcagctgtcatggaaaccgcaggggccgaggacggaccccgccagctccaccgcccgagttctggttgaagacgacgaaatcatgcagggctttatcagggcttttcgtcccctgcctagacacctctggtacttattggacctgaagcagatggaggaaccttgccgcttttag

SEQ ID NO: 310530 - DNA, 396 bp, Artificial Sequence
  derived and/or modified sequence
tgagtgcccgccatggacatcccccagaccaagcaggacctggagctgccaaaggcccctcttcgcgtgcacatcacctcactattgcctactccagaggacaatctggaaatcgtcctgcaccgatgggagaataactcctgtgtagagaaaaaggtcctgggcgaaaaaacagaaaacccgaagaagtttaaaatcaattgcaaagcttcaggtgcaccacaactgagctggaagccccagggccctcggactgatcccgcctcctctacggcaagggttctggtggaggacgacgagattatgcaggggtttattcgagctttccgcccactgccccgtcatctgtggtaccttctggatctgaagcagatggaagaaccttgcagattctag

SEQ ID NO: 310531 - DNA, 438 bp, Artificial Sequence
  derived and/or modified sequence
atgttgtgtctactcttgacgctgggggttgcgcttgtgtgtggcgtccctgctatggacataccccagaccaagcaggatttagaacttccaaaggcgccacttagagtgcacattacatccctgttgcccactccagaagacaacctggaaatcgttctgcatcggtgggaaaataactcttgcgtggaaaagaaggtgcttggcgaaaaaaccgaaaatcccaagaagttcaaaattaattgtaaggctagcggagcccctcagctgagttggaagccacagggaccgagaaccgaccccgcaagtagcactgcccgtgtgctcgtcgaagacgacgagatcatgcaggggtttatccgggcatttagacctctaccccgacacctgtggtatcttctggatctgaaacagatggaagagccatgccggttctag

SEQ ID NO: 310532 - DNA, 396 bp, Artificial Sequence
  derived and/or modified sequence
tgagtccctgccatggatattcctcagacaaaacaggacctcgagctgcccaaagcaccgctgcgtgttcacatcacttctctgttgcctacaccagaggataatctggaaatcgtcctccacagatgggagaataactcctgtgtcgaaaaaaaggttctgggggagaagacagagaaccctaaaaaattcaaaatcaattgcaaagccagcggcgctccacagctgagctggaagccccaggggccacgcaccgatcctgccagtagcactgctagagtacttgtagaagatgacgagataatgcagggattcatacgcgcattcaggcccctccccaggcacctgtggtatttgctagacctgaagcagatggaagaaccctgccgcttttag

SEQ ID NO: 310533 - DNA, 735 bp, Artificial Sequence
  derived and/or modified sequence
catccctctggctccagagctcagagccacccacagccgcagccatgctgtgcctcctgctcaccctgggcgtggccctggtctgtggtgtcccggccatggacatcccccagaccaagcaggacctggagctcccaaaggcccctctgagggtccacatcacctcactgttgcccacccccgaggacaacctggagatcgttctgcacagatgggagaacaacagctgtgttgagaagaaggtccttggagagaagactgagaatccaaagaagttcaagatcaactgcaaggcctctggagctccccagctctcatggaagccccaggggcccaggactgacccagcctcttccacagccagagtcctggtggaggacgatgagatcatgcagggattcatcagggctttcaggcccctgcccaggcacctatggtacttgctggacttgaaacagatggaagagccgtgccgtttctaggtgagctcctgcctggtcctgcctcctggctcacctccgcctccaggaagaccagactcccacccttccacacctccagagcagtgggacttcctcctgccctttcaaagaataaccacagctcagaagacgatgacgtggtcatctgtgtcgccatccccttcctgctgcacacctgcaccacggccatggggaggctgctccctgggggcagagtctctggcagaggttattaataaacccttggagcatg

SEQ ID NO: 310534 - DNA, 826 bp, Artificial Sequence
  derived and/or modified sequence
tgtcccggccatggacatcccccagaccaagcaggacctggagctcccaaaggcccctctgagggtccacatcacctcactgttgcccacccccgaggacaacctggagatcgttctgcacagatgggagaacaacagctgtgttgagaagaaggtccttggagagaagactgagaatccaaagaagttcaagatcaactgcaaggcctctggagctccccagctctcatggaagccccaggggcccaggactgacccagcctcttccacagccagagtcctggtggaggacgatgagatcatgcagggattcatcagggctttcaggcccctgcccaggcacctatggtacttgctggacttgaaacagatggaagagccgtgccgtttctaggtgagctcctgcctggtcctgcctcctggctcacctccgcctccaggaagaccagactcccacccttccacacctccagagcagtgggacttcctcctgccctttcaaagaataaccacagctcagaagacgatgacgtggtcatctgtgtcgccatccccttcctgctgcacacctgcaccacggccatggggaggctgctccctgggggcagagtctctggcagaggttattaataaacccttggagcatgtcctgtctggatgcgcagccactgctgggtgtgggattcagggacgagggcctggggtcggggcaggcccaggccaccgcctggcagaaccggagctcctacagacccatgggcagcttctggtggagaaaatacctcaagtttcttatctacaaaacaaaagggtccactttcacaaa

SEQ ID NO: 310535 - DNA, 438 bp, Artificial Sequence
  derived and/or modified sequence
atgctgtgcctgctgctgaccctgggcgtggccctggtgtgcggcgtgcccgccatggacatcccccagaccaagcaggacctggagctgcccaaggcccccctgagagtgcacatcaccagcctgctgcccacccccgaggacaacctggagatcgtgctgcacagatgggagaacaacagctgcgtggagaagaaggtgctgggcgagaagaccgagaaccccaagaagttcaagatcaactgcaaggccagcggcgccccccagctgagctggaagccccagggccccagaaccgaccccgccagcagcaccgccagagtgctggtggaggacgacgagatcatgcagggcttcatcagagccttcagacccctgcccagacacctgtggtacctgctggacctgaagcagatggaggagccctgcagattctag

SEQ ID NO: 310536 - DNA, 396 bp, Artificial Sequence
  derived and/or modified sequence
tgagtgcccgccatggacatcccccagaccaagcaggacctggagctgcccaaggcccccctgagagtgcacatcaccagcctgctgcccacccccgaggacaacctggagatcgtgctgcacagatgggagaacaacagctgcgtggagaagaaggtgctgggcgagaagaccgagaaccccaagaagttcaagatcaactgcaaggccagcggcgccccccagctgagctggaagccccagggccccagaaccgaccccgccagcagcaccgccagagtgctggtggaggacgacgagatcatgcagggcttcatcagagccttcagacccctgcccagacacctgtggtacctgctggacctgaagcagatggaggagccctgcagattctag

SEQ ID NO: 310537 - DNA, 102 bp, Artificial Sequence
  derived and/or modified sequence
tgagaaatcatgcaaggattcattcgcgcatttaggccactcccccggcacctgtggtatttgttagaccttaaacaaatggaggaaccttgtcggttttag

SEQ ID NO: 310538 - DNA, 102 bp, Artificial Sequence
  derived and/or modified sequence
tgagaaatcatgcagggcttcatccgggccttccggcccctgcccaggcacctgtggtacctgctggacctgaagcagatggaggagccctgccgcttctag

SEQ ID NO: 310539 - DNA, 102 bp, Artificial Sequence
  derived and/or modified sequence
tgagagatcatgcagggcttcatccgggccttccggcccctgcccagacacctctggtatctcctggacctgaagcagatggaggaaccatgcaggttttag

SEQ ID NO: 310540 - DNA, 102 bp, Artificial Sequence
  derived and/or modified sequence
tgagagattatgcaggggttcatccgagcgttccgcccactccctaggcatctatggtatttactcgacctaaagcagatggaggagccttgtcgtttttag

SEQ ID NO: 310541 - DNA, 102 bp, Artificial Sequence
  derived and/or modified sequence
tgagagatcatgcagggcttcatcagagccttcagacccctgcccagacacctgtggtacctgctggacctgaagcagatggaggagccctgcagattctag

SEQ ID NO: 310542 - protein, 70 aa, Artificial Sequence
  derived and/or modified sequence
MTMNVLEAGKWKSIVPAPGEGLLAVLHMMVFTDALHRERSVKWQAGVCYNGGKDFAVSLARPKAAEGIAD

SEQ ID NO: 310543 - DNA, 213 bp, Artificial Sequence
  derived and/or modified sequence
atgaccatgaacgtgctggaggccggcaagtggaagagcatcgtgcccgcccccggcgagggcctgctggccgtgctgcacatgatggtgttcaccgacgccctgcacagagagagaagcgtgaagtggcaggccggcgtgtgctacaacggcggcaaggacttcgccgtgagcctggccagacccaaggccgccgagggcatcgccgactag

SEQ ID NO: 310544 - DNA, 1251 bp, Artificial Sequence
  derived and/or modified sequence
ctattgtttctacctcaccctggcccaggaagacagatctactgaggaaagccctgaacactctgcggcttctctgagaaaccctatcgaaggggatgtggaatcccagagctactcttgctatcaactcgccgcatgaccttgggaaaatcatttcacctggttcagcaatgatttactgagctattgaaggccttactttccagatccagatccttgtgcatacaactgacttgtgtgggtgaggcttgcagaaaaaatcagctagaacagccttgggggtagtggcaaggtggccagagcaattgactgggagctgggaacaggaatgaagaggaagagctgataagaaacatgcccagagcagatttgatgctactgccaatgtacctgaataagaagacaactctttctggaaaaagggaaaacttgaagggctattgaaggccgctagaaagtacagaaggaactttggatgtgggagagaaagacaaggagaaacctgaaagcagcccagttatgacaatgaatgttctggaggctgggaagtggaagagcattgtgccagcacctggtgagggccttcttgccgtgttacacatgatggtttttactgatgccctgcacagagagaggtctgtaaagtggcaagcaggagtctgctacaatggaggaaaggattttgctgtatctcttgccaggcccaaggctgcagagggaattgcagattgaatgtaagtgacttggaaaaggaagaggagttgccagaaacagctaaaatgtcagtagaagacttgacagcttgagaatagaggaaaaaataaaagcgaagcagacaaaaagaaccttacctcccccacaatacaacattgggctgctgaacccacaaaaatctaaatccgtttagaatcatctatttaactcctcagagacatgcacaaactattctagagaggcttgtgcctacgaagattacttaagaatgtgttgacacatttggagggggttaatttaccagttatcatttactagaaaggctttttctataagaatatatgaaagagtttcctcggagcattcaaccgggcttctttgtagggtatgtgtactgcttggagctacggaagaccacgtcctagaagtgctgtgtccctgaggcacacctatgtgtgttatctctctggcatactttccaacaaggattcttttctagtctatacattctgattaatttgcagtcagaggcaatgc

SEQ ID NO: 310545 - DNA, 213 bp, Artificial Sequence
  derived and/or modified sequence
atgaccatgaatgtgttggaggccggcaaatggaagagtatcgtgccagcacctggcgagggcttgttagctgtacttcacatgatggtgttcactgacgcattacacagggagcggtccgtaaaatggcaagcaggggtgtgctataatggaggaaaagacttcgccgtttccctcgcccgcccaaaggctgcagagggaatagctgattag

SEQ ID NO: 310546 - DNA, 213 bp, Artificial Sequence
  derived and/or modified sequence
atgaccatgaatgtgctggaggccggcaagtggaagagcatcgtgcctgcccctggagagggcctgctggccgtgctgcacatgatggtgttcacagatgccctgcaccgggagaggtctgtgaagtggcaggccggcgtgtgctacaacggcggcaaggactttgctgtgtccctggcccggcccaaggctgctgagggcattgctgactag

SEQ ID NO: 310547 - DNA, 213 bp, Artificial Sequence
  derived and/or modified sequence
atgaccatgaacgtgctggaggccggcaagtggaagagcatcgtgcctgcgccaggagagggcctgctggccgtcctgcacatgatggtgtttacagatgctttgcaccgggaacgtagcgtcaagtggcaggctggtgtgtgctacaacgggggcaaagacttcgccgtctcactggcacgacccaaagcggcggagggaatagccgattag

SEQ ID NO: 310548 - DNA, 213 bp, Artificial Sequence
  derived and/or modified sequence
atgacaatgaacgtcctcgaggccggtaagtggaagtcgattgtacctgcgcctggagagggtctgctggctgtcctgcacatgatggtattcacagacgctctgcacagagaacggagtgtgaaatggcaggcaggcgtctgttacaacggtggcaaggactttgccgtttcgttagctcgccctaaagccgctgaaggtattgccgattag

SEQ ID NO: 310549 - protein, 262 aa, Artificial Sequence
  derived and/or modified sequence
MRGLSIRGAQEEDPPDPQLMRLDNMLLAEGVSGPEKGGGSAAAAAAAAASGGSSDNSIEHSDYRAKLTQIRQIYHTELEKYEQACNEFTTHVMNLLREQSRTRPISPKEIERMVGIIHRKFSSIQMQLKQSTCEAVMILRSRFLDARRKRRNFSKQATEILNEYFYSHLSNPYPSEEAKEELAKKCSITVSQVSNWFGNKRIRYKKNIGKFQEEANLYAAKTAVTAAHAVAAAVQNNQTNSPTTPNSGGYPPSCYQSDGRLQ

SEQ ID NO: 310550 - DNA, 789 bp, Artificial Sequence
  derived and/or modified sequence
atgagggggctgagcatcagaggagcccaggaggaagatccacccgaccctcagctcatgagactcgataacatgctgttggcggaaggcgttagtggaccagagaaaggtggaggcagcgcggcagctgccgctgccgccgctgctagcggcggctcgtccgataattcgatcgagcattcagactaccgagctaagctcacacaaattcgccagatctatcacactgagttagaaaaatacgaacaggcctgcaacgagttcaccacacacgtgatgaacctgttgcgggagcaatcaagaacgcgcccaataagcccaaaggaaatcgagcggatggttggtattattcatcggaagtttagtagcattcagatgcaactgaaacagtcaacgtgcgaagctgtgatgatcctgaggtcacgcttcttggatgcacggaggaaaagaagaaacttctccaaacaggccacagaaatactgaatgagtatttctattcacacctgtcgaatccgtatccttcggaggaggccaaggaagaactggcaaagaagtgcagcatcacagtgtcccaggtgtcaaattggtttggcaacaaaagaatccgatataagaagaacataggcaaattccaggaggaggctaacctttacgccgcgaagaccgctgtcacagctgcccacgccgtcgcagcagcagtacagaacaatcagacaaactcccctacaacccccaactccggaggctacccgccctcatgttaccagtccgacggtagactccaatag

SEQ ID NO: 310551 - DNA, 789 bp, Artificial Sequence
  derived and/or modified sequence
atgaggggcctgagcatccggggggcccaggaggaggaccccccagacccccagctgatgaggctggacaacatgctgctggccgagggcgtgtctggccctgagaagggcggcggcagcgctgctgctgctgctgctgctgctgccagcggcggcagcagtgacaacagcattgagcacagcgactaccgggccaagctgacccagatccggcagatctaccacacagagctggagaagtatgagcaggcctgcaatgagttcaccacccacgtgatgaacctgctgcgggagcagagcaggacccggcccatcagccccaaggagattgaaagaatggtgggcatcatccacaggaagttcagcagcatccagatgcagctgaagcagagcacctgtgaggccgtgatgatcctgcggagccgcttcctggatgcccggaggaagagaagaaacttcagcaagcaggccacagagatcctgaatgagtacttctacagccacctgagcaacccctaccccagcgaggaggccaaggaggagctggccaagaagtgcagcatcaccgtgtcccaggtgagcaactggtttggaaacaagaggatccgctacaagaagaacatcggcaagttccaggaggaggccaacctgtatgctgccaagacagctgtgacagctgcccatgctgtggccgctgctgtgcagaacaaccagaccaacagccccaccacccccaacagcggcggctacccacccagctgctaccagagtgatggccgcctgcagtag

SEQ ID NO: 310552 - DNA, 789 bp, Artificial Sequence
  derived and/or modified sequence
atgcggggcctgagcatccggggcgcccaggaggaggacccccccgatccacaactgatgcgcctagataacatgttgctggccgaaggcgtgtcgggtccggagaaggggggagggtccgctgccgcagctgccgcagccgctgcttccggcggaagctccgataattccatcgaacattctgactaccgggcgaaattgacacagattaggcaaatctaccacacagagttggaaaagtatgaacaggcgtgtaatgaatttacaacgcatgtgatgaatctgctgagggagcagagccgcactcgccccattagccccaaggagatcgaacgaatggtcgggattattcaccgcaagtttagctccatacagatgcagctgaaacagtcaacatgtgaagctgtcatgattttgagatctaggtttctagacgcgcgccggaagcgccggaatttttctaagcaagccacagagatcttgaacgagtatttttactcgcatctgagcaacccttatccctcagaagaagctaaggaggagctcgctaaaaagtgttctataactgtgtcccaggtcagcaactggtttggaaacaaaagaatccgctataagaagaatattggaaaattccaagaagaagccaatctgtacgcagccaaaacagccgtgacagccgcccacgccgtagcagccgccgtgcagaataaccagacaaattcccccaccaccccaaacagtgggggctatcctcctagttgctaccagtccgacgggaggttgcagtag

SEQ ID NO: 310553 - DNA, 1035 bp, Artificial Sequence
  derived and/or modified sequence
agtagtcatttcggccatggtgcagcgaggtcataagctgagctcagtgaagggagccagaacatgaaatgatgctgagagaacgtctgggagatgagaggtctcagcatcagaggagcccaggaggaggaccctcccgatccccagctaatgagactggacaatatgcttttggcagaaggggtttcaggtcctgagaaaggtgggggatcggcggcagcagctgcagccgcggcagcctctggaggttcttcagataactctattgaacactcagattacagagccaaattgacccagatcagacaaatctatcacacagaactggagaaatatgaacaggcatgtaatgaatttactacacatgtgatgaaccttctccgagaacagagtagaacacgtcccatttctccaaaagagattgaaagaatggtgggcatcatccatcgaaaatttagttccattcagatgcagctcaaacaaagcacttgtgaagcagttatgattttaagatcaaggttccttgatgccagacggaaaaggcgtaacttcagtaaacaggccacagaaatcttgaatgaatatttttactcacacctcagcaacccctaccccagtgaagaagccaaagaggagctggccaagaaatgcagcatcacagtgtcacaggtatccaattggtttggcaacaaacgaatcaggtacaagaagaacattggcaagtttcaggaagaagccaacctctatgctgcaaagacggccgtgacagctgcacacgcagtagcagcagctgtgcagaacaaccagaccaattcgcccaccacaccaaattccggtggataccctccgtcatgttatcaatcagacgggaggctacagtgatggccttggaggaaattcactgtacagtccacataatttaaatgctaatggaggctggcaggacgcaacaactccatcttctgtgacttctcctacagaaggcccaggaagtgtgcactcggatacctctaactaatctctggccacactttt

SEQ ID NO: 310554 - DNA, 789 bp, Artificial Sequence
  derived and/or modified sequence
atgcggggactgagcatccgaggagcacaggaggaagatcctccagacccacagctcatgcgtcttgataatatgctcctggctgagggcgtctctggccctgagaaaggagggggttctgcggctgctgctgcggctgcagctgcttctgggggtagcagtgataattcgatcgaacactccgactacagagccaagctgactcagattcggcagatttatcataccgagctggaaaagtacgagcaggcctgtaatgaattcactacacatgttatgaatctgctgcgcgaacagtccaggaccaggcctatttcccctaaggagatcgaacgcatggtgggcatcattcaccggaagttctcatcaatccagatgcaactgaagcagagcacatgtgaggctgtgatgattttgcgtagcagattcttagatgccaggaggaaacgcaggaattttagcaaacaggctaccgaaatccttaatgaatatttctactcccacctttcaaatccttatcccagtgaggaggccaaggaagaattggctaaaaagtgctctattacagtgtcccaggtgagcaactggtttggaaacaaacgaatccgttacaaaaagaacatcgggaagttccaagaggaagctaacctgtatgcagcaaagacagctgtgactgccgctcacgcagttgctgcagcagtgcagaataaccagaccaactcgcctactacacctaattctggcggatatccaccttcatgttatcagtccgacggcaggctccagtag

SEQ ID NO: 310555 - DNA, 789 bp, Artificial Sequence
  derived and/or modified sequence
atgagaggcctgagcatcagaggcgcccaggaggaggacccccccgacccccagctgatgagactggacaacatgctgctggccgagggcgtgagcggccccgagaagggcggcggcagcgccgccgccgccgccgccgccgccgccagcggcggcagcagcgacaacagcatcgagcacagcgactacagagccaagctgacccagatcagacagatctaccacaccgagctggagaagtacgagcaggcctgcaacgagttcaccacccacgtgatgaacctgctgagagagcagagcagaaccagacccatcagccccaaggagatcgagagaatggtgggcatcatccacagaaagttcagcagcatccagatgcagctgaagcagagcacctgcgaggccgtgatgatcctgagaagcagattcctggacgccagaagaaagagaagaaacttcagcaagcaggccaccgagatcctgaacgagtacttctacagccacctgagcaacccctaccccagcgaggaggccaaggaggagctggccaagaagtgcagcatcaccgtgagccaggtgagcaactggttcggcaacaagagaatcagatacaagaagaacatcggcaagttccaggaggaggccaacctgtacgccgccaagaccgccgtgaccgccgcccacgccgtggccgccgccgtgcagaacaaccagaccaacagccccaccacccccaacagcggcggctacccccccagctgctaccagagcgacggcagactgcagtag

SEQ ID NO: 310556 - DNA, 456 bp, Artificial Sequence
  derived and/or modified sequence
atggccactctgctgaggcctgtgttacggaggctttgcggacttccagggttgcagcgaccagccgcggagatgccgcttcgggcccgatccgacggagctgggccactgtactcacatcacctgcctacatcaccattacagaaaggactcttggcagctgggtctgccgcaatggccctgtataacccataccgccacgatatggtggctgtgcttggcgaaaccaccggtcacagaacactgaaggtcctgcgtgatcagatgagaagagatccggagggagcccaaatactccaggaaaggccccgcatcagcacaagtacattagatttgggcaaacttcagtccctgcccgagggctctctagggagagagtatttacgatttctggatgtcaatgtaagcttccagctgctctgtatttggcagtcccccgaccgtactgaagagtag

SEQ ID NO: 310557 - DNA, 456 bp, Artificial Sequence
  derived and/or modified sequence
atggccaccctgctgcggcctgtgctgcggcggctgtgtggcctgcccggcctgcagaggcctgctgctgagatgcccctgcgggcccggagtgatggagctggccccctgtacagccaccacctgcccaccagccccctgcagaagggcctgctggccgccggcagcgctgccatggccctgtacaacccctacagacatgacatggtggccgtgctgggggagaccaccggccacaggaccctgaaggtgctgcgggaccagatgaggcgggaccctgagggcgcccagatcctgcaggagcggccccgcatcagcaccagcaccctggacctgggcaagctgcagagcctgcctgagggcagcctgggccgggagtacctgcgcttcctggatgtgaatgtgtccttccagctgctgtgcatctggcagagcccagacagaacagaggagtag

SEQ ID NO: 310558 - DNA, 456 bp, Artificial Sequence
  derived and/or modified sequence
atggccaccctgctgcggcccgtgctgcggcggctgtgcggcctgcccgggctgcagcgtccagcagccgagatgcccctcagggctcgcagcgacggggctggcccgctgtactcccaccatctccccacctcacctcttcagaaggggctgctggcggcgggtagcgcagctatggctctgtataatccttacaggcatgatatggtcgccgtgctgggcgagacaactgggcaccgcactttaaaggtgttacgtgaccagatgcgacgcgaccctgagggcgctcagatcctccaggaacggccccgcatatcaacgagcacactcgatttagggaaattgcagtctttgccagaagggtcactcggtcgggagtatcttcgattcctggatgtaaacgtctcgtttcagttgctctgtatttggcaatctcctgatagaacagaagagtag

SEQ ID NO: 310559 - DNA, 456 bp, Artificial Sequence
  derived and/or modified sequence
atggcaacactgctccgcccagtgctccgcaggctgtgtgggcttcccggactccaaagaccagcagctgagatgccactgagggcccgttcggacggggcaggcccactgtactcacatcacctgcccacctcccccctgcagaagggcctcctggccgcaggttccgccgcaatggccctctacaacccctatagacacgatatggttgccgtactcggcgagacaacaggacatcgaacactcaaagtcctgcgggaccagatgcgacgcgatccagagggagcacagattttgcaggagagacccagaatctctacatcgactctggatcttgggaagcttcagtccctgccagagggctcactgggcagagaataccttcgcttcttggacgtcaatgtcagcttccagttgttatgcatctggcagtcacctgatcgcacggaagagtag

SEQ ID NO: 310560 - DNA, 928 bp, Artificial Sequence
  derived and/or modified sequence
cgctgccatggcgactctgctgcgccctgtcctccgtcggctctgcgggctcccgggcctacagcggcctgcggcagaaatgcccctccgggctaggagcgacggcgccggcccgctatactcgcaccacctccccacctccccgctgcagaaagggctgttggccgccggctccgcggcgatggcgctctataacccctaccgccacgacatggtcgcagttctaggggagaccacaggacaccgcaccctgaaggtcctcagggaccagatgaggagggatccagagggtgcccagatcctgcaggagcgtccccggatttcgacatccaccctcgacctgggcaagctccagagcctgccggaaggctccctcggtcgcgagtatctccgtttcctggatgtgaacgtgagttttcagctcctgtgtatctggcagtcaccagacaggacagaggaatagcacaggcatgacaccctgaggaaagaggagccctgagctgccaccattggcaggagtgctcttcaggctcatgccaaggctttgtcattttctatgggataggcaaatgggtgggaacatgcctgcaattgataatactggccagtgttcattaacctcgcactgcatgcctgatgccagcctcatccgtgatcttgctgaatccccccacaactctgtcaagtatgttctattattatcctcttttagcagataaggaaacagaggctcagagcagtgaagcaaacttgctaattccacataactggtattaatggagatagtaatcaatcccagatcatgctcttcactgctgtactgtatccctttattccagggacattgctttccctacggtatggcaggtgtggcactctccagcccctccagccccaggcagggaggacaaggagagggggaaagggg

SEQ ID NO: 310561 - DNA, 456 bp, Artificial Sequence
  derived and/or modified sequence
atggccaccctgctgagacccgtgctgagaagactgtgcggcctgcccggcctgcagagacccgccgccgagatgcccctgagagccagaagcgacggcgccggccccctgtacagccaccacctgcccaccagccccctgcagaagggcctgctggccgccggcagcgccgccatggccctgtacaacccctacagacacgacatggtggccgtgctgggcgagaccaccggccacagaaccctgaaggtgctgagagaccagatgagaagagaccccgagggcgcccagatcctgcaggagagacccagaatcagcaccagcaccctggacctgggcaagctgcagagcctgcccgagggcagcctgggcagagagtacctgagattcctggacgtgaacgtgagcttccagctgctgtgcatctggcagagccccgacagaaccgaggagtag

SEQ ID NO: 310562 - protein, 273 aa, Artificial Sequence
  derived and/or modified sequence
MRGSQEVLLMWLLVLAVGGTEHAYRPGRRVCAVRAHGDPVSESFVQRVYQPFLTTCDGHRACSTYRTIYRTAYRRSPGLAPARPRYACCPGWKRTSGLPGACGAAICQPPCRNGGSCVQPGRCRCPAGWRGDTCQSDVDECSARRGGCPQRCVNTAGSYWCQCWEGHSLSADGTLCVPKGGPPRVAPNPTGVDSAMKEEVQRLQSRVDLLEEKLQLVLAPLHSLASQALEHGLPDPGSLLVHSFQQLGRIDSLSEQISFLEEQLGSCSCKKDS

SEQ ID NO: 310563 - DNA, 822 bp, Artificial Sequence
  derived and/or modified sequence
atgcgaggctcacaggaagtccttctcatgtggctgctcgtccttgctgtgggtgggaccgagcatgcttataggcctggccgccgtgtttgtgctgtgagggcccacggagaccctgtttctgagtctttcgtccagagggtgtatcagcccttccttactacgtgtgacggccatcgggcttgctctacctataggacgatctaccggaccgcatatcgccgatcccctggactcgcacctgctcggccacgctacgcatgctgccctggctggaaacgaactagtggcctgcccggggcttgtggagccgcaatctgccagccgccttgccggaacggcggaagctgtgttcagccggggcggtgtcgatgcccagcaggctggagaggagatacctgtcagtcagacgtagatgagtgtagtgcacgacgtggagggtgcccccaacgttgtgtcaataccgcaggcagctattggtgtcagtgttgggagggccactccctcagtgcagacgggaccctctgtgtgccaaagggcggcccccctagggtcgcccctaacccaaccggagttgactcagctatgaaggaggaggtccagagactgcagagcagggtggatcttttggaagagaagctgcagctggtgttggctccactgcactcgctggctagtcaggctctcgaacacggtcttcctgaccccggttctctgctggtgcatagctttcagcagttaggcagaatagacagtctttccgaacaaatttcgttcctggaggagcagctaggttcttgctcctgcaagaaggacagttag

SEQ ID NO: 310564 - DNA, 822 bp, Artificial Sequence
  derived and/or modified sequence
atgagggggagccaggaggtgctcctgatgtggctgctggtactcgctgtcggcgggacagaacacgcctatcgccctggccgccgagtctgcgcggtaagggctcacggagatcctgtgagcgaaagttttgtgcagcgggtataccagcctttcctgacaacctgcgacggacatagggcttgctcgacatacaggactatttataggacagcctatcgacgctcccctggccttgcgccagctagaccacgatatgcgtgttgccctggttggaagcgcacttctgggctgcccggagcctgtggcgcagcaatctgccagcccccatgccgcaacggagggagctgtgttcagccaggccgttgtagatgtcccgccggctggaggggagatacctgtcaatccgacgtcgacgaatgctcagccaggaggggagggtgtccacagcggtgcgtgaataccgcgggcagttactggtgtcagtgttgggagggccattctctctccgcagatggaaccctgtgtgtgcctaagggagggccaccacgagtggcacccaatcctactggggtcgatagtgccatgaaagaagaggtgcaacggctgcaaagccgcgtggatttgcttgaagagaaactgcagctggtgttagcacccttacactctctcgccagccaagcactcgagcacgggctgcctgaccccgggagtttgttggtgcactcattccagcaactcggtcggatcgattccctaagcgaacagatttccttccttgaggaacagctcggctcttgttcttgtaagaaggactcctag

SEQ ID NO: 310565 - DNA, 822 bp, Artificial Sequence
  derived and/or modified sequence
atgagggggtcccaggaggtactcctgatgtggttgctcgtacttgccgtgggtggcacggagcacgcctaccgccccggccggcgcgtgtgtgccgtgcgcgctcatggtgaccccgtttccgagagctttgttcaaagggtgtaccagcctttcttgacaacgtgtgatggacacagggcttgctcgacctacaggactatatatcgtacagcatatagacggtctccagggctggcccctgctcgaccacggtatgcgtgctgtcccggctggaagcgcactagcggactgcctggggcatgtggtgcagctatttgccagccaccgtgccgaaatggggggagctgtgtacagccagggagatgccggtgccctgccgggtggcggggtgatacatgccaaagtgatgttgatgaatgctcagcaagacgaggaggatgtccccagcggtgtgtgaatacagcaggttcgtactggtgtcagtgctgggaagggcactcattatcagctgacggaactctctgtgttcctaaaggcggaccgccaagggtggcacctaatcccaccggcgtggattcagctatgaaagaggaggtacaacgcctgcagtcgcgggtcgatctgctggaggaaaagttacaactggtcctcgccccgttgcactctcttgcatctcaagcgctggaacacggtttgccggatcctggctcactccttgtgcatagttttcagcagcttggtaggatcgacagtctctcagaacagatcagctttctcgaggaacagctgggatcatgctcatgtaaaaaggacagctag

SEQ ID NO: 310566 - DNA, 822 bp, Artificial Sequence
  derived and/or modified sequence
atgagaggatcgcaggaagtcttgctgatgtggttgttggtactggctgtagggggaacggagcatgcctatcgccccggcaggagagtctgcgcggtgagggcacacggggaccctgtgtcagagtccttcgtgcagcgggtgtaccaacctttcctcactacgtgcgacggacaccgcgcctgttccacttataggacaatctacaggactgcctatagacgttcccccggtctagcccctgccaggccaagatatgcatgctgtcctgggtggaagcgcacttctggattgcctggggcttgtggtgcagccatttgccagccaccatgccgcaacggaggttcttgtgttcagcccgggcggtgccggtgccccgccggatggcggggcgatacatgtcaatcagatgtggacgagtgcagtgccaggcgggggggatgcccccaacgttgcgtcaataccgccggctcctactggtgccagtgctgggaagggcactccctgagtgcagatgggactttgtgtgtgcctaaggggggcccgccccgtgtagccccaaatcctactggtgtagatagcgccatgaaggaggaagtacagcgtctgcaaagtagagtcgacttgctggaagaaaagcttcagctggttcttgcccctctccactccctggcttcccaagccctggagcatgggctgccagatccgggcagcctgttagtacattcattccaacagctaggtcggatcgatagcttgtctgaacagatttccttcctagaggaacaattgggatcatgctcatgtaaaaaggactcctag

SEQ ID NO: 310567 - DNA, 822 bp, Artificial Sequence
  derived and/or modified sequence
atgaggggcagccaggaggtgctgctgatgtggctgctggtgctggccgtgggcggcacagagcacgcctaccggcccggccggcgggtgtgtgctgtgcgggcccacggggaccctgtgtctgagagctttgtgcagagggtgtaccagcccttcctgaccacctgtgatggccaccgggcctgcagcacctaccgcaccatctacagaacagcctaccgccgcagccctggcctggccccagcccggcccaggtatgcctgctgccccggctggaagaggaccagcggcctgcccggggcctgtggggccgccatctgccagcccccctgcagaaatggaggcagctgtgtgcagcccggccgctgccgctgcccagctggctggaggggggacacctgccagagtgatgtggatgagtgcagcgcccggcggggcggctgcccccagagatgtgtgaacacagctggcagctactggtgccagtgctgggagggccacagcctgtctgcagatggcaccctgtgtgtgcccaagggcggccccccccgggtggcccccaaccccaccggggtggacagcgccatgaaggaggaggtgcagaggctgcagagccgggtggacctgctggaggagaagctgcagctggtgctggcccccctgcacagcctggccagccaggccctggagcacggcctgcctgaccccggcagcctgctggtgcacagcttccagcagctgggcagaattgacagcctgtctgagcagatctccttcctggaggagcagctgggcagctgcagctgcaagaaggacagctag

SEQ ID NO: 310568 - DNA, 822 bp, Artificial Sequence
  derived and/or modified sequence
atgcggggcagccaggaggtgctgctgatgtggctgctggtgctggctgtcggcggtaccgagcacgcctaccgccctggacggcgagtctgcgctgttagggcacatggagacccagtctctgaatcgttcgtccagagagtgtatcagccttttcttaccacgtgcgacggccaccgggcatgcagcacatatcgcacaatctaccggacggcataccgccggtccccggggttggctccagcccgaccgcgctacgcctgttgtcccgggtggaagcggaccagcggccttcccggagcatgcggggctgctatttgtcaacctccctgtcggaacgggggttcttgcgtccagccaggccggtgtcgatgtccagcaggatggaggggggatacctgccagagcgacgtcgacgagtgcagcgcccgcaggggaggctgcccccagcgttgtgtgaacacagctgggagttactggtgccaatgctgggagggacactccctcagcgcagacggtactctttgcgtccctaagggcgggccccccagagtggcacctaaccccaccggcgtcgattctgccatgaaagaagaggtgcaaagactgcagtcaagagtcgatttgctggaggaaaaactccaactggtcctcgcgccacttcattccctggcatcccaagctctcgagcacgggcttccagaccccgggtcactgctcgtgcattcttttcagcagctgggtaggattgattcactgagtgagcagatcagcttcctggaagagcagctgggatcttgtagctgcaaaaaggactcgtag

SEQ ID NO: 310569 - DNA, 822 bp, Artificial Sequence
  derived and/or modified sequence
atgcggggcagccaggaggtgctgctgatgtggctgctggtgctggctgtgggtggtactgagcacgcctacagacccgggagacgggtgtgtgccgttcgagcgcacggcgacccggtttccgagtcttttgtgcagagggtgtaccagcctttcttaaccacatgcgatggacatcgggcatgttctacctacagaaccatttataggacagcctaccgaagaagccccggtctagcccccgcgcggccaaggtatgcgtgttgtcccggctggaaacggactagcggtttgcctggggcctgtggggcagccatttgccagcctccttgccgcaacggcgggtcatgtgttcagcccggcaggtgccgctgcccagctggctggagaggcgatacatgccagtccgacgttgatgaatgcagcgcacgcagagggggatgtccacagcggtgtgttaataccgccgggtcttactggtgtcaatgttgggaggggcatagcctgtcggctgacggaaccctgtgcgtgccaaaaggcggcccccccagggtggctccgaatcctaccggagtcgactctgcaatgaaggaggaggttcagcggttgcagagccgggtcgatctgctggaggaaaagcttcagctggtactggccccccttcattcgcttgcctctcaggcactggagcacggcctccccgatcctggctctctcctggtacatagttttcaacagctcggccgtattgactccctgtcagaacaaatctcattcttggaggaacagctgggcagttgcagctgcaaaaaagacagctag

SEQ ID NO: 310570 - DNA, 822 bp, Artificial Sequence
  derived and/or modified sequence
atgcggggcagccaggaggtgctgctgatgtggctgctggtgctggctgtcggcggtactgagcacgcgtaccgcccaggccggcgggtttgcgcggttcgggcacacggggatcccgtctcggaatctttcgtacagcgcgtataccagccctttctgaccacttgcgacggacatcgggcatgcagtacctaccggaccatttatcgaactgcttaccggcggtctccaggactcgcacccgccagaccccggtacgcctgttgtccgggatggaagcgcacctcagggctgcccggggcctgcggggctgcaatctgccagcccccctgccgcaatggtgggtcttgcgtgcagccgggtagatgtcggtgtcccgctgggtggcgaggcgatacctgtcaatctgacgtcgacgagtgctctgcacgccggggcggatgccctcagaggtgtgtgaacacagctggcagctattggtgtcagtgctgggaaggccactctctttccgcggacggtactctgtgtgtacccaagggcggcccccctagagtagcacctaatcccacgggtgtggattcagctatgaaagaagaggtccagcgcctccagagtagagttgatctgctggaggagaaactgcagttggtacttgccccactccacagcttggccagccaggcactggaacacgggttgcctgatcccggaagcttgctggtacactcctttcagcagcttggtaggatcgattctctctccgaacagatcagttttttagaggaacagctgggatcttgtagttgcaaaaaggatagttag

SEQ ID NO: 310571 - DNA, 822 bp, Artificial Sequence
  derived and/or modified sequence
atgcggggcagccaggaggtgctgctgatgtggctgctggtgctggctgtgggcgggactgaacacgcataccgccctggccggagggtctgcgcagtacgagcccacggggatcccgtcagcgagtcgtttgtgcagcgggtttatcagccattcctgactacttgcgatgggcacagagcctgttctacttatcgcacaatttaccgtactgcctatcggagatccccagggctggccccagcgcgtcctcgctacgcctgctgtcctgggtggaagcgcacatctggtctccccggggcctgtggcgccgcaatttgtcaaccgccatgccgtaatggcgggtcgtgtgttcagcctggaagatgccgctgtccagctggatggcggggagacacgtgccaatccgacgttgatgaatgctccgccaggcgagggggatgcccacaaaggtgcgtcaatacagccgggtcttactggtgtcagtgctgggagggacatagcctgtccgcagacggaactctgtgcgtgcctaagggaggccccccacgggtagcaccgaacccaaccggcgtggactctgcaatgaaagaggaagtgcaacgcctgcaatctagggtcgacctcctggaggaaaagctgcaactcgtgttggcccctttgcatagtctcgcatcccaggcgctggaacacgggctgccggacccaggaagcttgctggtgcactccttccagcagttaggccggatcgactctctgtcagagcagatcagctttcttgaagagcagttaggctcttgctcgtgtaagaaagatagctag

SEQ ID NO: 310572 - DNA, 822 bp, Artificial Sequence
  derived and/or modified sequence
atgcgtggatcacaggaagtgcttctcatgtggttacttgtgctggctgtggggggtacagagcacgcctacagacctgggaggagagtctgcgcagtgagggcccacggtgatcccgtaagtgaaagctttgtccagagagtgtatcagcctttcttgacaacttgcgacgggcatagggcctgtagcacctaccgaactatttataggaccgcctataggcgctcccccggactggctcctgctcggccaaggtatgcctgctgccctggttggaagagaaccagtggcctgccaggagcatgtggagccgctatctgtcaacctccttgccgaaatggcggttcctgcgttcagcctgggcgatgcaggtgtccggctggttggagaggagatacatgccaatccgacgttgacgaatgtagcgctaggcgcggaggttgcccacaaagatgtgtgaataccgccggtagctattggtgccagtgctgggagggtcactccctcagtgctgatggcaccctgtgcgtaccaaaggggggtccgccacgcgtggcgccaaacccgactggggtcgactccgccatgaaagaggaggttcagcgactccagtccagagtcgaccttctggaggaaaagctccagctggtgctcgccccactgcacagtctggcatcccaggcattggaacacggcctgccggatccaggctctcttctggtccacagcttccagcaactgggccgtatcgatagcttgtccgagcagatttctttcttagaagaacaattggggagttgtagctgtaaaaaagattcctag

SEQ ID NO: 310573 - DNA, 822 bp, Artificial Sequence
  derived and/or modified sequence
atgagaggctcccaggaagttctcctaatgtggctcctagttttggctgttggaggaaccgaacacgcgtacaggcctgggagacgcgtatgtgctgttagagcgcacggcgatccagtgagtgagagtttcgtacaacgggtttatcagccattcctcacaacctgtgacggccaccgggcatgctcaacataccgtacaatttaccgcactgcatatcggagatccccgggactcgccccagctagaccaagatacgcttgttgcccaggctggaaacgtacgagtgggcttcctggcgcttgtggagccgctatatgccaacctccctgtagaaacgggggatcctgcgttcaacctgggagatgccgctgtcccgctggttggaggggcgacacgtgtcagtcagacgtcgatgagtgttctgcacggaggggaggctgtcctcagcgatgcgtcaacactgccggttcgtactggtgccagtgctgggaaggacacagtctgtctgcagacggtacattatgcgtgcctaagggcggtcccccaagggttgcccctaacccaacaggggtagattccgccatgaaagaggaagtgcaaaggctccaatcccgggtcgatctgcttgaggagaagctgcagctggttctggctccacttcattctctggcctctcaggccctggagcatggactccccgacccgggttccctgctggttcactcgtttcagcaactggggaggatagattcattaagtgagcaaatcagcttcctcgaggagcagctggggtcatgctcctgcaagaaggacagctag

SEQ ID NO: 310574 - DNA, 822 bp, Artificial Sequence
  derived and/or modified sequence
atgaggggcagccaagaagtgctgcttatgtggctcctggttctcgccgtgggcggaaccgaacacgcttacaggcctggccgtcgggtatgcgcagtgcgggcacatggggatcctgtctcagaaagctttgttcagcgggtgtaccagccctttctgacaacctgcgacggccacagggcctgttcaacataccggaccatttaccgcactgcttaccgacggagtccaggacttgcccctgctcgccctcgatatgcctgctgcccaggttggaagaggacatcaggactacccggagcatgtggtgcggcaatttgccagcctccttgcagaaacggaggatcctgtgtgcagccgggacgatgcaggtgtccggcaggatggagaggtgacacgtgtcagtctgatgtggatgagtgctccgctcgcagaggcggatgccctcagcggtgtgtgaacacagccggatcctactggtgccagtgctgggagggacactcattgagcgccgatggcaccctgtgcgttcctaagggagggccacccagggtagcacccaacccgactggcgtagacagcgctatgaaagaagaggtacagcgccttcagagtcgcgttgacctgcttgaagagaagctgcagctggtgcttgcacccctccattcgttagcaagccaggccctcgagcacggactgccagacccaggctcattactcgtgcattcgtttcagcagctcgggagaattgattcactctctgagcagatcagcttcctagaagagcaactcggaagttgttcatgtaagaaggatagttag

SEQ ID NO: 310575 - DNA, 822 bp, Artificial Sequence
  derived and/or modified sequence
atgagaggatctcaggaggtacttcttatgtggctgttagtgttggccgtgggcggtacagaacatgcatatcgcccaggtcgccgagtgtgcgctgtgcgggcacacggcgaccccgtctctgaatcattcgtccagagggtctatcagcctttcctcaccacctgtgacggccaccgagcttgctcaacatataggacaatctatcgcactgcttaccgcagatctcctggactagcccctgcacggccacgctacgcttgttgcccgggttggaagcgaacatccggactcccaggagcctgtggtgcggcaatctgtcagccaccttgccggaatggaggttcatgtgtgcaaccaggtaggtgccgctgtcccgcaggctggaggggtgatacttgccaaagtgatgtggacgagtgctctgcacggcgtggcggatgccctcagcggtgcgttaacaccgcgggatcatactggtgccagtgttgggaaggccactccttaagtgcagacggcacactttgcgtgcccaaaggagggccacccagggtcgcgccaaatcctaccggagtagactcagctatgaaggaagaggtgcagaggctgcaatctcgggtcgacctcctcgaggaaaaactccagctggtccttgctccactgcatagcctcgccagccaggccctggagcatggactaccggatccgggaagtttactggtccacagcttccagcagctggggcgaatcgactcactgtccgagcagatctctttcctggaagagcagctgggctcttgtagttgtaagaaagatagttag

SEQ ID NO: 310576 - DNA, 822 bp, Artificial Sequence
  derived and/or modified sequence
atgagaggcagccaggaggtgctgctgatgtggctgctggtgctggccgtgggcggcaccgagcacgcctacagacccggcagaagagtgtgcgccgtgagagcccacggcgaccccgtgagcgagagcttcgtgcagagagtgtaccagcccttcctgaccacctgcgacggccacagagcctgcagcacctacagaaccatctacagaaccgcctacagaagaagccccggcctggcccccgccagacccagatacgcctgctgccccggctggaagagaaccagcggcctgcccggcgcctgcggcgccgccatctgccagcccccctgcagaaacggcggcagctgcgtgcagcccggcagatgcagatgccccgccggctggagaggcgacacctgccagagcgacgtggacgagtgcagcgccagaagaggcggctgcccccagagatgcgtgaacaccgccggcagctactggtgccagtgctgggagggccacagcctgagcgccgacggcaccctgtgcgtgcccaagggcggcccccccagagtggcccccaaccccaccggcgtggacagcgccatgaaggaggaggtgcagagactgcagagcagagtggacctgctggaggagaagctgcagctggtgctggcccccctgcacagcctggccagccaggccctggagcacggcctgcccgaccccggcagcctgctggtgcacagcttccagcagctgggcagaatcgacagcctgagcgagcagatcagcttcctggaggagcagctgggcagctgcagctgcaagaaggacagctag

SEQ ID NO: 310577 - DNA, 1530 bp, Artificial Sequence
  derived and/or modified sequence
ctgcaccaagctggccctgcacggctgcaagggaggctcctgtggacaggccaggcaggtgggcctcaggaggtgcctccaggcggccagtgggcctgaggccccagcaagggctagggtccatctccagtcccaggacacagcagcggccaccatggccacgcctgggctccagcagcatcagcccccaggaccggggaggcacaggtggcccccaccacccggaggagcagctcctgcccctgtccgggggatgactgattctcctccgccaggccacccagaggagaaggccaccccgcctggaggcacaggccatgaggggctctcaggaggtgctgctgatgtggcttctggtgttggcagtgggcggcacagagcacgcctaccggcccggccgtagggtgtgtgctgtccgggctcacggggaccctgtctccgagtcgttcgtgcagcgtgtgtaccagcccttcctcaccacctgcgacgggcaccgggcctgcagcacctaccgaaccatctataggaccgcctaccgccgcagccctgggctggcccctgccaggcctcgctacgcgtgctgccccggctggaagaggaccagcgggcttcctggggcctgtggagcagcaatatgccagccgccatgccggaacggagggagctgtgtccagcctggccgctgccgctgccctgcaggatggcggggtgacacttgccagtcagatgtggatgaatgcagtgctaggaggggcggctgtccccagcgctgcgtcaacaccgccggcagttactggtgccagtgttgggaggggcacagcctgtctgcagacggtacactctgtgtgcccaagggagggccccccagggtggcccccaacccgacaggagtggacagtgcaatgaaggaagaagtgcagaggctgcagtccagggtggacctgctggaggagaagctgcagctggtgctggccccactgcacagcctggcctcgcaggcactggagcatgggctcccggaccccggcagcctcctggtgcactccttccagcagctcggccgcatcgactccctgagcgagcagatttccttcctggaggagcagctggggtcctgctcctgcaagaaagactcgtgactgcccagcgccccaggctggactgagcccctcacgccgccctgcagcccccatgcccctgcccaacatgctgggggtccagaaaccacctcggggtgactgagcggaaggccaggcagggccttcctcctcttcctcctccccttcctcgggaggctccccagaccctggcatgggatgggctgggatcttctctgtgaatccacccctggctacccccaccctggctaccccaacggcatcccaaggccaggtgggccctcagctgagggaaggtacgagctccctgctggagcctgggacccatggcacaggccaggcagcccggaggctgggtggggcctcagtgggggctgctgcctgacccccagcacaataaaaatgaaacgtg

SEQ ID NO: 310578 - DNA, 1282 bp, Artificial Sequence
  derived and/or modified sequence
ggcgcgtgcgcgccccggatccggcggccacccagaggagaaggccaccccgcctggaggcacaggccatgaggggctctcaggaggtgctgctgatgtggcttctggtgttggcagtgggcggcacagagcacgcctaccggcccggccgtagggtgtgtgctgtccgggctcacggggaccctgtctccgagtcgttcgtgcagcgtgtgtaccagcccttcctcaccacctgcgacgggcaccgggcctgcagcacctaccgaaccatctataggaccgcctaccgccgcagccctgggctggcccctgccaggcctcgctacgcgtgctgccccggctggaagaggaccagcgggcttcctggggcctgtggagcagcaatatgccagccgccatgccggaacggagggagctgtgtccagcctggccgctgccgctgccctgcaggatggcggggtgacacttgccagtcagatgtggatgaatgcagtgctaggaggggcggctgtccccagcgctgcgtcaacaccgccggcagttactggtgccagtgttgggaggggcacagcctgtctgcagacggtacactctgtgtgcccaagggagggccccccagggtggcccccaacccgacaggagtggacagtgcaatgaaggaagaagtgcagaggctgcagtccagggtggacctgctggaggagaagctgcagctggtgctggccccactgcacagcctggcctcgcaggcactggagcatgggctcccggaccccggcagcctcctggtgcactccttccagcagctcggccgcatcgactccctgagcgagcagatttccttcctggaggagcagctggggtcctgctcctgcaagaaagactcgtgactgcccagcgccccaggctggactgagcccctcacgccgccctgcagcccccatgcccctgcccaacatgctgggggtccagaaaccacctcggggtgactgagcggaaggccaggcagggccttcctcctcttcctcctccccttcctcgggaggctccccagaccctggcatgggatgggctgggatcttctctgtgaatccacccctggctacccccaccctggctaccccaacggcatcccaaggccaggtgggccctcagctgagggaaggtacgagctccctgctggagcctgggacccatggcacaggccaggcagcccggaggctgggtggggcctcagtgggggctgctgcctgacccccagcacaataaaaatgaaacgtga

SEQ ID NO: 310579 - DNA, 2125 bp, Artificial Sequence
  derived and/or modified sequence
agatgcaaagccggtggggacctgccaagaagccagcccacaaggccatggactcctccacgccatcagctggagcagtgggcagccccaggaagggagacgggagcggccaggggaagggcgaggggtcccccgggcgacccccgaggctcaggcgcccggactccagtcctgggcctccgttttccacccttgaacaagcggcttccacctgtgagccagctgcctcctctgaaaatggaagcccctcaactcagagggtgtcgctctgggacgtgggtcaggggccggagcaggcagggagaggtgagaggaaaggctggggaccctcacttctccctgcccaaaccctcgctcgggagcagacggctcctctgcccgcaggcacccctgcctggcagctccctccagcccccgtcgggtccgggacgtcctctgatgggaaggttccaccacatccgtggctgacagagccagcccgtccgaggccggggggcgctcggggtaaacaggaagccccatccctcccgcactctgcttcactccctcctcctgcacctcctgcagcccggctcccgcggccgcgcctggtgcccctctgtctcgcgccacctgagatgcccaggctggcctctgccaggggcttagtctgccctctcctggggcttcagaggccaaaagcaccctggtgaggggtccgggaggcccgggagggcccggggggctctgccaggcccctccacgcctctctgcccagccagcacgctctgggaagcagcccccaggaccggggaggcacaggtggcccccaccacccggaggagcagctcctgcccctgtccgggggatgactgattctcctccgccaggccacccagaggagaaggccaccccgcctggaggcacaggccatgaggggctctcaggaggtgctgctgatgtggcttctggtgttggcagtgggcggcacagagcacgcctaccggcccggccgtagggtgtgtgctgtccgggctcacggggaccctgtctccgagtcgttcgtgcagcgtgtgtaccagcccttcctcaccacctgcgacgggcaccgggcctgcagcacctaccgaaccatctataggaccgcctaccgccgcagccctgggctggcccctgccaggcctcgctacgcgtgctgccccggctggaagaggaccagcgggcttcctggggcctgtggagcagcaatatgccagccgccatgccggaacggagggagctgtgtccagcctggccgctgccgctgccctgcaggatggcggggtgacacttgccagtcagatgtggatgaatgcagtgctaggaggggcggctgtccccagcgctgcgtcaacaccgccggcagttactggtgccagtgttgggaggggcacagcctgtctgcagacggtacactctgtgtgcccaagggagggccccccagggtggcccccaacccgacaggagtggacagtgcaatgaaggaagaagtgcagaggctgcagtccagggtggacctgctggaggagaagctgcagctggtgctggccccactgcacagcctggcctcgcaggcactggagcatgggctcccggaccccggcagcctcctggtgcactccttccagcagctcggccgcatcgactccctgagcgagcagatttccttcctggaggagcagctggggtcctgctcctgcaagaaagactcgtgactgcccagcgccccaggctggactgagcccctcacgccgccctgcagcccccatgcccctgcccaacatgctgggggtccagaaaccacctcggggtgactgagcggaaggccaggcagggccttcctcctcttcctcctccccttcctcgggaggctccccagaccctggcatgggatgggctgggatcttctctgtgaatccacccctggctacccccaccctggctaccccaacggcatcccaaggccaggtgggccctcagctgagggaaggtacgagctccctgctggagcctgggacccatggcacaggccaggcagcccggaggctgggtggggcctcagtgggggctgctgcctgacccccagcacaataaaaatgaaacgtga

SEQ ID NO: 310580 - DNA, 1529 bp, Artificial Sequence
  derived and/or modified sequence
ccaagctggccctgcacggctgcaagggaggctcctgtggacaggccaggcaggtgggcctcaggaggtgcctccaggcggccagtgggcctgaggccccagcaagggctagggtccatctccagtcccaggacacagcagcggccaccatggccacgcctgggctccagcagcatcagcagcccccaggaccggggaggcacaggtggcccccaccacccggaggagcagctcctgcccctgtccgggggatgactgattctcctccgccaggccacccagaggagaaggccaccccgcctggaggcacaggccatgaggggctctcaggaggtgctgctgatgtggcttctggtgttggcagtgggcggcacagagcacgcctaccggcccggccgtagggtgtgtgctgtccgggctcacggggaccctgtctccgagtcgttcgtgcagcgtgtgtaccagcccttcctcaccacctgcgacgggcaccgggcctgcagcacctaccgaaccatctataggaccgcctaccgccgcagccctgggctggcccctgccaggcctcgctacgcgtgctgccccggctggaagaggaccagcgggcttcctggggcctgtggagcagcaatatgccagccgccatgccggaacggagggagctgtgtccagcctggccgctgccgctgccctgcaggatggcggggtgacacttgccagtcagatgtggatgaatgcagtgctaggaggggcggctgtccccagcgctgcgtcaacaccgccggcagttactggtgccagtgttgggaggggcacagcctgtctgcagacggtacactctgtgtgcccaagggagggccccccagggtggcccccaacccgacaggagtggacagtgcaatgaaggaagaagtgcagaggctgcagtccagggtggacctgctggaggagaagctgcagctggtgctggccccactgcacagcctggcctcgcaggcactggagcatgggctcccggaccccggcagcctcctggtgcactccttccagcagctcggccgcatcgactccctgagcgagcagatttccttcctggaggagcagctggggtcctgctcctgcaagaaagactcgtgactgcccagcgccccaggctggactgagcccctcacgccgccctgcagcccccatgcccctgcccaacatgctgggggtccagaaaccacctcggggtgactgagcggaaggccaggcagggccttcctcctcttcctcctccccttcctcgggaggctccccagaccctggcatgggatgggctgggatcttctctgtgaatccacccctggctacccccaccctggctaccccaacggcatcccaaggccaggtgggccctcagctgagggaaggtacgagctccctgctggagcctgggacccatggcacaggccaggcagcccggaggctgggtggggcctcagtgggggctgctgcctgacccccagcacaataaaaatgaaacgtga

SEQ ID NO: 310581 - DNA, 2073 bp, Artificial Sequence
  derived and/or modified sequence
atgggctgggggtccagatgttgctgccctggcaggttagatttgctctgtgttctcgctcttctcggcggctgtctcttacctgtgtgcagaactcgggtatacactaaccactgggcagtgaagattgccggaggcttccccgaggctaatcgtatcgcctctaaatacggctttatcaatataggacagattggtgctttaaaagactactaccacttttatcattcccggacaattaaaagatccgtgattagttcacgtgggacgcactctttcatctctatggagccaaaggtggagtggattcaacaacaggtggtcaagaaaagaacaaagcgagactatgacttctcccgggcgcagtcaacttattttaatgatcccaagtggccatctatgtggtatatgcactgtagcgataatacacacccttgccaatccgatatgaatatagaaggagcctggaagagaggatatacgggcaaaaacatcgtggtgaccattctggatgatggcatagagcggacccatccagacttaatgcagaactatgatgccctggcttcctgcgatgtcaacggaaacgatctcgaccctatgcctcggtacgacgccagcaatgagaacaagcatggcactagatgcgccggagaagtggctgccgccgccaacaactcccactgtacagtgggtatcgccttcaacgcaaaaatcggtggagtgcggatgctggacggggatgtgaccgacatggtcgaggctaaatcagtttccttcaatccgcagcacgtgcatatatatagcgccagctggggaccagatgacgacgggaagacggtagatggaccagcgcctctgaccaggcaagctttcgagaatggcgtgcggatggggagacgcggcctgggaagcgtatttgtgtgggccagcggaaatggagggcgctcaaaggatcattgttcatgcgacggatacacaaattctatatacacgatttcaatctccagtaccgctgaatccggaaaaaagccgtggtatctggaggagtgcagctccacactcgccaccacttacagcagtggtgaatcttacgacaagaaaatcatcaccacggatctgcgacagaggtgcacggacaatcatactggcacatccgcttccgctcctatggctgccggcatcatcgccttggccctggaagcaaatccttttctgacttggagagatgtccagcacgtcatcgtgagaacatcccgggccggccatctgaatgccaatgattggaagactaacgccgccggtttcaaggtgtcacacctgtacggtttcggcttgatggatgccgaggccatggtgatggaggccgagaaatggacgacggtcccccgtcagcacgtgtgcgttgaatccactgaccggcagatcaagacaattaggccgaacagtgctgtccgatcaatatacaaagcttcaggctgctcagacaaccctaacaggcacgtaaactatctcgaacacgtggtggtgcgcatcacaatcactcacccccggcggggtgacctggccatttatttgactagcccaagcggcactcgaagccagcttttggctaacaggttgttcgatcattctatggaagggtttaaaaattgggaattcatgacaattcactgctggggtgagcgggccgccggagactgggttctggaagtgtacgacacaccaagtcaactgagaaactttaagacgccaggaaaactgaaagaatggagcttagtgctctacggtacatcagtgcagccgtactctccgaccaacgaattcccaaaagtcgaaagatttcggtactcaagggtcgaagatccaacagacgactatggtacagaagattacgcaggagaacttgcctcatccggtacccaggcgaaaaaacgacagctaatgcaccaccctactacttgggagaatcgaatggagtggaacggcatgaagtggaatggaatgaaatggaacggcatggagtggaacggaatggaatggaataggattgaatcgaaccgcatcgaatag

SEQ ID NO: 310582 - DNA, 2073 bp, Artificial Sequence
  derived and/or modified sequence
atgggctggggttctcgttgctgttgcccgggacggctcgatcttctgtgcgtgttggcattactcggtggctgtttgctccccgtctgcagaacaagggtgtacactaaccactgggcagtgaaaatcgccggcggatttcctgaggccaatcgcattgcttctaagtatggattcatcaatattgggcaaatcggtgcccttaaagactattaccatttttaccattctaggaccatcaagaggtcggtcatctctagcaggggtacacattctttcatcagtatggaacccaaggtggaatggattcaacagcaggtagtcaagaagcgcacaaaaagggactacgatttcagtagagctcaaagcacttacttcaatgatccaaaatggccatctatgtggtacatgcactgctccgacaacacccacccttgccagtccgacatgaacatagaaggggcgtggaagcgcggatatacaggaaaaaacattgtggtgacgatcctcgatgatggtattgaacgcacccaccccgacctcatgcagaattatgatgcactggcctcctgcgatgtgaatggcaatgacttggacccgatgcctcggtacgacgcctcaaatgagaacaaacacggaacgaggtgcgcaggcgaggtggccgctgccgccaataactctcactgcactgttggaatcgccttcaatgctaagatcggcggcgtcagaatgctggatggcgatgtaactgatatggtagaggccaaatcagtgagcttcaatccccagcatgtgcatatctattccgcctcttgggggccggacgacgatggtaagacagtcgacggcccagccccgcttacaaggcaagctttcgagaacggggtgcggatgggtcgaagaggattaggctccgtcttcgtgtgggcttcggggaacggcggaaggtctaaggaccattgcagttgcgatggctacactaatagtatctatactatcagtataagtagcacggccgagtccggaaagaagccgtggtaccttgaagaatgtagctctaccctggctacaacttactccagtggcgagagctatgacaagaaaatcattaccactgatctgagacaacgatgcactgacaaccacaccgggacttctgccagtgcccctatggctgctggcattatcgccttggcacttgaggcaaatccattcttgacctggagagatgtgcagcacgtgattgtgcggacctctagagccgggcatctgaatgccaatgactggaagacaaacgcagccggatttaaggtgtctcatctgtacggcttcggacttatggatgccgaggccatggtgatggaggcagaaaagtggaccactgtcccgaggcaacatgtctgtgtggaatctacagaccgccaaataaaaacaataaggccgaactctgcggtgaggtcgatctacaaagcctctgggtgtagtgataatccaaaccggcatgtcaactacctcgagcacgtggttgttcggatcacaatcacgcaccctagacggggagatctcgccatctaccttactagcccgagtgggacacgctcccagcttttggctaaccggctcttcgaccacagcatggagggcttcaagaattgggagtttatgactattcactgctggggggaacgagctgcaggtgattgggtgctcgaggtgtatgacacgcctagccaactccgcaatttcaagactcccggcaagttaaaggagtggtcactcgtcctgtatggaacatctgtccaaccttactcgccaaccaatgaattccccaaagttgagcgattcaggtattcaagggttgaggacccaacagacgattatgggaccgaggactacgccggcgagttggccagttccggcacgcaggctaagaagcggcaactgatgcatcaccctaccacctgggagaaccggatggagtggaacggcatgaagtggaatggcatggagtggaatgggatggagtggaatgggatggagagtaatcggatagaaagtaatcgcatagaatag

SEQ ID NO: 310583 - DNA, 2073 bp, Artificial Sequence
  derived and/or modified sequence
atgggctggggcagccgctgctgctgccccggccgcctggacctgctgtgtgtgctggccctgctgggcggctgcctgctgcctgtgtgcaggaccagggtgtacaccaaccactgggccgtgaagattgctgggggcttccctgaggccaacagaattgccagcaaatatggcttcatcaacatcggccagattggagccctgaaggactactaccacttctaccacagcaggaccatcaagaggagcgtcatcagcagccggggcacccacagcttcatctccatggagcccaaggtggagtggatccagcagcaggtggtgaagaagaggaccaagagggactatgacttcagccgggcccagagcacctacttcaatgaccccaagtggcccagcatgtggtacatgcactgcagcgacaacacccacccctgccagagcgacatgaacatcgagggcgcctggaagaggggctacacaggcaagaacatcgtggtgaccatcctggatgatggcatcgagaggacccacccagacctgatgcagaactatgatgccctggccagctgtgatgtgaatggaaatgacctggaccccatgcccaggtatgatgccagcaatgaaaacaagcacggcacccgctgtgccggggaggtggccgctgctgccaacaacagccactgcaccgtgggcatcgccttcaatgccaagattggaggagtgaggatgctggatggagatgtgacagacatggtggaggccaagtctgtgtccttcaacccccagcacgtgcacatctacagcgcctcctggggcccagatgatgatggcaagacagtggatggccctgcccccctgacccggcaggcctttgaaaatggagtgaggatgggccggcggggcctgggctctgtgtttgtgtgggccagcggaaatggaggccgcagcaaggaccactgcagctgtgatggctacaccaacagcatctacaccatcagcatcagcagcacagctgagagcggcaagaagccctggtacctggaggagtgcagcagcaccctggccaccacctacagcagtggagagagctatgacaagaagatcatcaccacagacctgcggcagcgctgcacagacaaccacacaggcaccagcgccagcgcccccatggctgctggcatcatcgccctggccctggaggccaaccccttcctgacctggagagatgtgcagcacgtgattgtgaggaccagcagagctggccacctgaatgccaatgactggaagaccaatgctgctggcttcaaggtgagccacctgtatggcttcggcctgatggatgctgaggccatggtgatggaggccgagaagtggaccaccgtgccccggcagcacgtgtgtgtggagagcacagaccggcagatcaagaccatccggcccaacagcgctgtgcgcagcatctacaaggccagcggctgcagcgacaaccccaacagacatgtgaactacctggagcacgtggtggtgcgcatcaccatcacccacccccggcggggggacctggccatctacctgaccagccccagcggcaccaggagccagctgctggccaacagactctttgaccacagcatggagggcttcaagaactgggagttcatgaccatccactgctggggcgagagagctgctggggactgggtgctggaggtgtatgacacccccagccagctgaggaacttcaagaccccaggcaagctgaaggagtggagcctggtgctgtatggcacctctgtgcagccctacagccccaccaatgagttccccaaggtggagcgcttccgctacagccgggtggaggaccccacagatgattatggaacagaggactatgctggggagctggccagcagcggcacccaggccaagaagaggcagctgatgcaccaccccaccacctgggagaacaggatggagtggaatggcatgaagtggaatggcatgaagtggaatggcatggagtggaatggcatggagtggaaccgcatcgagagcaacagaattgaatag

SEQ ID NO: 310584 - DNA, 2073 bp, Artificial Sequence
  derived and/or modified sequence
atgggctggggcagccgctgctgctgccccggccgcctggacctgctgtgtgtgctggccctgctgggcggctgcctgctgcctgtgtgcaggaccagggtgtacaccaaccactgggccgtgaagattgctgggggcttccctgaggccaacagaattgccagcaaatatggcttcatcaacatcggccagattggagccctgaaggactactaccacttctaccacagcaggaccatcaagaggagcgtcatcagcagccggggcacccacagcttcatctccatggagcccaaggtggagtggatccagcagcaggtggtgaagaagaggaccaagagggactatgacttcagccgggcccagagcacctacttcaatgaccccaagtggcccagcatgtggtacatgcactgcagcgacaacacccacccctgccagagcgacatgaacatcgagggcgcctggaagaggggctacacaggcaagaacatcgtggtgaccatcctggatgatggcatcgagaggacccacccagacctgatgcagaactatgatgccctggccagctgtgatgtgaatggaaatgacctggaccccatgcccaggtatgatgccagcaatgaaaacaagcacggcacccgctgtgccggggaggtggccgctgctgccaacaacagccactgcaccgtgggcatcgccttcaatgccaagattggaggagtgaggatgctggatggagatgtgacagacatggtggaggccaagtctgtgtccttcaacccccagcacgtgcacatctacagcgcctcctggggcccagatgatgatggcaagacagtggatggccctgcccccctgacccggcaggcctttgaaaatggagtgaggatgggccggcggggcctgggctctgtgtttgtgtgggccagcggaaatggaggccgcagcaaggaccactgcagctgtgatggctacaccaacagcatctacaccatcagcatcagcagcacagctgagagcggcaagaagccctggtacctggaggagtgcagcagcaccctggccaccacctacagcagtggagagagctatgacaagaagatcatcaccacagacctgcggcagcgctgcacagacaaccacacaggcaccagcgccagcgcccccatggctgctggcatcatcgccctggccctggaggccaaccccttcctgacctggagagatgtgcagcacgtgattgtgaggaccagcagagctggccacctgaatgccaatgactggaagaccaatgctgctggcttcaaggtgagccacctgtatggcttcggcctgatggatgctgaggccatggtgatggaggccgagaagtggaccaccgtgccccggcagcacgtgtgtgtggagagcacagaccggcagatcaagaccatccggcccaacagcgctgtgcgcagcatctacaaggccagcggctgcagcgacaaccccaacagacatgtgaactacctggagcacgtggtggtgcgcatcaccatcacccacccccggcggggggacctggccatctacctgaccagccccagcggcaccaggagccagctgctggccaacagactctttgaccacagcatggagggcttcaagaactgggagttcatgaccatccactgctggggcgagagagctgctggggactgggtgctggaggtgtatgacacccccagccagctgaggaacttcaagaccccaggcaagctgaaggagtggagcctggtgctgtatggcacctctgtgcagccctacagccccaccaatgagttccccaaggtggagcgcttccgctacagccgggtggaggaccccacagatgattatggaacagaggactatgctggggagctggccagcagcggcacccaggccaagaagaggcagctgatgcaccaccccaccacctgggagaacaggatggagtggaatggcatgaagtggaatggcatggagtggaatggcatggagtggaatggcatggagagcaaccgcatcgagagcaacagaattgaatag

SEQ ID NO: 310585 - DNA, 2073 bp, Artificial Sequence
  derived and/or modified sequence
atgggctggggcagccggtgctgctgccccggccggctggacctgttatgtgtgttggccctccttgggggctgcttgctgcctgtgtgtcgcacccgggtctacaccaatcactgggctgtgaagatcgccggagggttccccgaagccaataggatagcttccaagtatggcttcattaatataggccagattggggcgctcaaggactattatcacttctatcattcccgcactattaagcggtcagtgatctcctctagaggaacccacagttttatctccatggaaccgaaggtggaatggatccaacaacaggtcgtgaaaaagagaacaaagcgggattacgatttctcaagggcgcagagtacctacttcaacgatcccaagtggccatcaatgtggtacatgcattgcagcgataacacccacccttgtcagtcagatatgaacatcgaaggcgcatggaagaggggctatacaggaaagaatattgtcgtaacaatactcgacgatgggattgaaaggactcaccctgatctgatgcagaactacgacgccctggcatcatgtgatgtgaatggaaacgatctcgaccccatgccaagatacgatgccagcaatgaaaacaagcacgggacccgatgtgccggggaggtggccgcagccgcgaacaactcacattgcacagtaggcattgcctttaacgcaaaaatcgggggggtgcggatgttggacggcgatgtgacggatatggtcgaggccaagtccgtgagtttcaacccgcagcatgtccatatctactctgcctcatggggtccggatgatgatggtaagacggttgacgggcctgcccctctgacgaggcaggcttttgaaaacggcgttcgtatgggaaggcggggacttgggtctgtgtttgtgtgggcttccgggaacggaggcagaagcaaggatcattgttcctgcgacggttataccaattctatctataccattagcatcagttctactgccgagtccgggaaaaaaccatggtacctggaggagtgtagcagtacactcgccacgacctattcaagcggcgagtcctacgataagaagatcataaccactgatctgcggcagcgatgtacagacaaccacacggggacgagcgcttcagcccccatggccgctggcatcatcgcacttgcactggaggccaacccattccttacctggagggacgtgcaacatgtaattgtgcgcacctcccgcgccggccatcttaatgccaatgactggaagaccaatgcagccggctttaaggtatcgcacctgtacggatttggactgatggacgcagaagcgatggtcatggaagccgagaaatggacaactgtgccccgccaacacgtgtgcgttgaaagcaccgatcggcagataaagacaattcggcctaacagtgctgtgcggagcatttacaaggcctccgggtgcagtgataacccaaaccgacacgtgaactaccttgagcacgtggtcgtgagaattacaattacccacccccgtaggggggatctggcgatctacctcacatccccgtccggaacacgctcacagttactggccaacagactgttcgatcacagcatggaaggttttaagaactgggaatttatgacaatccactgctggggggaaagagcagctggcgattgggttctagaagtttatgatactccatctcaactcagaaacttcaagacaccaggtaagctgaaggaatggtcattggtgctttacggaacaagtgtccagccgtactctcctacaaacgagtttcctaaagtggagagattccggtatagccgcgttgaggatcccaccgatgactacgggacagaggactacgccggtgagctggcgagtagcggaacacaggctaaaaagagacagctcatgcatcatcccacaacatgggagaaccggatggaatggaatgggatgaagtggaatggtatgaagtggaacgggatggaatggaatgggatggaatggaataggattgaatctaaccgtattgaatag

SEQ ID NO: 310586 - DNA, 2073 bp, Artificial Sequence
  derived and/or modified sequence
atgggctggggcagccggtgctgctgccccggccggctggacctgctgtgcgtactggccctactgggaggctgcctcctgcctgtctgtcgtactcgggtgtataccaaccactgggccgtaaaaattgccggcggcttcccggaagctaaccggattgccagtaagtacggatttattaacatcggtcaaattggtgccctcaaggattattaccacttttatcactcccggaccattaagcgctccgtcatcagttcgagaggcactcactccttcatttccatggagcctaaggtggaatggatccaacagcaggtagtgaaaaagcgcaccaaaagagactacgactttagcagggcacagtcgacctattttaatgatcccaagtggcctagcatgtggtatatgcactgttccgataatacgcacccctgccaatctgacatgaacatcgaaggggcctggaaaagaggctataccgggaagaatattgtggtcactattctcgatgatggcatcgagaggacccaccccgacctaatgcagaactatgatgctctggcatcttgcgatgttaatggcaacgaccttgatccaatgccacgatatgatgcgtccaatgagaataagcatggaacaaggtgcgccggcgaggtggccgcagctgcgaataactcccactgtacagtgggtatagcattcaatgccaaaatcggcggtgttaggatgttggacggcgacgtgaccgatatggtggaagcaaaatcggtgagcttcaatcctcagcatgtgcatatctactccgcttcctgggggcctgatgacgacgggaagaccgtggatggacctgcacctttaacccgtcaggcctttgagaacggcgtgcggatgggaagaagggggcttggcagtgtgttcgtgtgggcatcaggcaatggcggacggagcaaggaccattgtagctgtgacggatatactaatagtatttataccatttctatcagtagcacagccgagagtggaaaaaagccatggtatctcgaagaatgctcgtccactctagcaaccacatatagttccggggagagttacgataaaaaaataatcactaccgatctgcgacagaggtgcacagacaatcacaccggaacaagtgcaagcgccccaatggccgccggcattattgcactcgcgctcgaggccaacccatttctcacttggagagatgtacaacacgttattgtgaggactagcagagcggggcaccttaacgccaatgattggaaaacaaatgcagctggttttaaggtatctcacctatatggatttggactcatggacgccgaagccatggtcatggaagctgaaaaatggactaccgtccccagacagcacgtgtgcgtggagagtacagatcgccagattaagacaatacgacccaactcggccgtccgctccatatataaagcatctggctgctctgacaacccaaaccgccacgtcaactaccttgagcacgtcgtagtgcggatcactatcacccaccctcgacgaggtgacctggccatttatttgactagtccatcaggtacccgatcccagcttcttgccaacaggctcttcgaccacagcatggagggatttaaaaactgggaattcatgactatccattgttggggggagcgcgcagctggagattgggtactggaggtttatgatacaccaagccaactgcgcaactttaaaacccccggcaagcttaaagagtggtccctagttctgtatggcacatccgtgcagccgtactcccccactaacgagtttcctaaggtagagagattcaggtacagcagggtcgaagaccctacagatgactatggtactgaggactacgccggagagctggcatccagcgggactcaggcaaaaaagagacagctcatgcatcaccctactacatgggagaaccgcatggagtggaacggaatgaagtggaatggcatggaatggaatggcatggaatggaacggaatggagagtaacaggattgaatctaatcgtatagagtag

SEQ ID NO: 310587 - DNA, 2073 bp, Artificial Sequence
  derived and/or modified sequence
atgggctgggggtcaaggtgctgttgcccaggaagacttgatttactctgtgtacttgccctgctgggcggttgtctgttgcccgtgtgccgaactagggtgtacacaaaccactgggctgtaaaaatcgctggaggatttcctgaggcaaaccggattgcctcaaagtacgggtttatcaatatcggacaaatcggcgctctcaaggactactaccacttttaccactctagaacaatcaagcgatccgtgataagcagccgcggaactcacagttttataagcatggaaccaaaagttgaatggattcagcagcaggtggtgaaaaagcggacgaagcgggactacgacttctcgagagcgcagagcacctactttaacgaccccaagtggccatctatgtggtatatgcactgcagtgacaatacacatccatgccagagcgacatgaatattgagggtgcttggaagaggggctatacgggcaagaatatcgttgtgaccattctcgacgacgggattgagaggacccatccagatcttatgcagaattacgacgccctggcaagctgcgatgtgaatggcaacgatctggacccgatgcccaggtatgatgcatcaaacgagaacaaacatggtactcgttgcgccggagaggtggctgcagcagcaaacaattcccactgtactgtcggtattgcgttcaatgcaaaaatcggcggtgtgcgaatgctcgacggtgatgtgacagatatggtagaagccaaatctgtcagctttaatccacagcacgtccacatatatagcgcctcgtgggggcctgatgatgatggaaagaccgtggacggacccgctccgcttactcgacaggcatttgagaacggggtgaggatgggaagaagaggtcttgggagtgtcttcgtgtgggcaagcggtaacggaggtcgctctaaggatcactgctcttgtgacgggtataccaattcaatctatactatcagcattagctcaactgccgaaagcggtaaaaaaccttggtatcttgaggaatgttcaagcacactagccactacttattctagtggcgagtcctacgacaagaaaattatcaccactgatctgcgacagagatgcaccgacaaccatacagggacaagtgcaagcgctccaatggccgcaggcatcatcgccctcgcgctggaggccaatccatttctgacctggcgcgacgtgcagcacgtaatcgtcaggacaagccgcgcagggcaccttaatgccaatgattggaaaaccaacgcggctggctttaaggtgtcccatctatatgggttcggtcttatggacgccgaggccatggtgatggaggctgagaaatggacaaccgtgcctcggcaacatgtctgcgtcgagtccaccgatcgtcagataaagactataaggccaaacagcgcggtgcgctccatctataaggcctccgggtgctctgacaatccaaaccgacatgttaactacctcgaacacgttgtggtgcgaatcactattacccaccccagaaggggtgatcttgctatctaccttacaagcccgtccggaacccggagccagcttctggccaaccgccttttcgaccactctatggaggggttcaaaaattgggaattcatgacaatacactgttggggggagcgcgctgcaggcgattgggtcctggaggtgtacgacacaccctcccagctccggaacttcaaaactcccggtaaactaaaggagtggtccctggtgttatacggcacatccgtccagccttactcaccgaccaatgagttccctaaggtggaacgtttcaggtactcccgggtggaagatcctaccgacgactacggcacagaggactacgccggtgagctggccagctcaggcacccaagcgaagaagcgacagctgatgcatcaccctactacttgggagaatcgcatggagtggaacgggatgaagtggaatggcatgaagtggaatggcatggaatggaacggcatggagtggaaccggatcgagtctaatcgcatcgaatag

SEQ ID NO: 310588 - DNA, 2073 bp, Artificial Sequence
  derived and/or modified sequence
atgggttggggcagcaggtgctgctgccccggaaggctagatctgctatgcgtcctggctctgctcggaggctgcctccttcctgtgtgccggacacgcgtgtataccaaccactgggcagtgaagatcgcagggggtttccccgaggcaaatcgtattgcatctaagtatgggtttattaatatcggccagattggcgcactgaaggactattaccacttctaccactccagaaccatcaagaggtcagtgatctcgagccggggaactcattcgttcatcagcatggaacccaaggtggagtggattcaacagcaagtggttaagaagcgtacaaagagggattatgacttctcaagggctcaaagcacatacttcaacgatcccaaatggccatcgatgtggtacatgcactgttccgacaacacacacccatgccaaagcgacatgaatatcgaaggggcttggaagcgcggatatacaggcaaaaacatagtcgtaactatacttgatgatgggatcgagcggacacacccagacctgatgcaaaattatgacgccttagctagctgtgatgtgaacgggaatgatctggacccaatgccacgctatgacgcgagcaatgaaaataagcatggcacaagatgcgccggagaggtggctgcggctgctaacaattcacattgtaccgtgggcattgccttcaatgcaaaaatcggcggagtgcgcatgttagacggggacgtcacagacatggtggaggctaagtcggtgtcctttaatccacagcatgtccacatctatagtgcatcttgggggcctgatgatgacggaaaaaccgtggacggccctgcacctttgacaaggcaagctttcgaaaacggagtgcgcatgggcagacgagggctgggcagcgtattcgtctgggcttctgggaacgggggaagaagcaaggatcattgttcctgcgatggctacacaaactctatttacacgatatccatttcgtcaacagcagagtccggtaagaagccttggtacctggaggagtgctccagtactctggctaccacctattcatctggcgagtcctatgataaaaagataattacaacagatcttaggcaacgttgtaccgacaatcacaccggtacttcggcttcagctcctatggccgctggcattatagccctcgccctggaagccaatcctttcctcacctggagggacgtccagcacgtcatcgttaggactagccgtgccggacacctgaatgccaacgactggaagacaaatgccgctgggtttaaagtttcgcacctctatggcttcggcttaatggatgctgaagccatggtaatggaggccgagaagtggacaacggtgccacggcaacatgtgtgtgtcgagtcaacggaccggcagataaagacgatccgtcccaatagtgctgtgaggtccatttacaaggcctctggttgtagcgacaatcccaatagacatgtcaactatctcgaacatgttgtagtcaggatcaccatcactcacccacgcaggggggaccttgcgatctatctgacttcacctagtggcactcgatcccaattgctagctaaccgtctcttcgaccatagcatggaaggctttaaaaactgggaatttatgactattcactgctggggtgaaagggctgccggagattgggtactggaggtctacgatactccctctcagctgaggaatttcaagacgcctggtaaactgaaagagtggtctttggttctgtacggcacaagcgtccaaccttattcgcccactaatgagttccccaaggtcgaacgatttcgatattccagggtcgaggatcccaccgatgattatggtaccgaggattacgccggagaactggccagctccggcacccaggctaaaaagaggcaactcatgcaccatccgaccacgtgggagaaccggatggagtggaatggaatgaagtggaatggcatggagtggaatgggatggaatggaatggaatggaatccaacagaatcgaatctaatcggattgaatag

SEQ ID NO: 310589 - DNA, 2845 bp, Artificial Sequence
  derived and/or modified sequence
attgccactcagaatcctcgcgcgctgctcggagccggagggagcgctgggagcgagcaagcgagcgtttggagcccgggccagcagagggggcgcccggtcgctgcctgtaccgctcccgctggtcatctccgccgcgctcgggggccccgggaggagcgagaccgagtcggagagtccgggagccaagccgggcgaaacccaactgcggaggacgcccgccccactcagcctcctcctgcgtccgagccggggagcatcgccgagcgccccacgggccggagagctgggagcacaggtcccggcagccccagggatggtctaggagccggcgtaaggctcgctgctctgctccctgccggggctagccgcctcctgccgatcgcccggggctgcgagctgcggcggcccggggctgctcgccgggcggcgcaggccggagaagttagttgtgcgcgcccttagtgcgcggaaccagccagcgagcgagggagcagcgaggcgccgggaccatgggctgggggagccgctgctgctgcccgggacgtttggacctgctgtgcgtgctggcgctgctcgggggctgcctgctccccgtgtgtcggacgcgcgtctacaccaaccactgggcagtcaaaatcgccgggggcttcccggaggccaaccgtatcgccagcaagtacggattcatcaacataggacagataggggccctgaaggactactaccacttctaccatagcaggacgattaaaaggtcagttatctcgagcagagggacccacagtttcatttcaatggaaccaaaggtggaatggatccaacagcaagtggtaaaaaagcggacaaagagggattatgacttcagtcgtgcccagtctacctatttcaatgatcccaagtggcccagcatgtggtatatgcactgcagtgacaatacacatccctgccagtctgacatgaatatcgaaggagcctggaagagaggctacacgggaaagaacattgtggtcactatcctggatgacggaattgagagaacccatccagatctgatgcaaaactacgatgctctggcaagttgcgacgtgaatgggaatgacttggacccaatgcctcgttatgatgcaagcaacgagaacaagcatgggactcgctgtgctggagaagtggcagccgctgcaaacaattcgcactgcacagtcggaattgctttcaacgccaagatcggaggagtgcgaatgctggacggagatgtcacggacatggttgaagcaaaatcagttagcttcaacccccagcacgtgcacatttacagcgccagctggggcccggatgatgatggcaagactgtggacggaccagcccccctcacccggcaagcctttgaaaacggcgttagaatggggcggagaggcctcggctctgtgtttgtttgggcatctggaaatggtggaaggagcaaagaccactgctcctgtgatggctacaccaacagcatctacaccatctccatcagcagcactgcagaaagcggaaagaaaccttggtacctggaagagtgttcatccacgctggccacaacctacagcagcggggagtcctacgataagaaaatcatcactacagatctgaggcagcgttgcacggacaaccacactgggacgtcagcctcagcccccatggctgcaggcatcattgcgctggccctggaagccaatccgtttctgacctggagagacgtacagcatgttattgtcaggacttcccgtgcgggacatttgaacgctaatgactggaaaaccaatgctgctggttttaaggtgagccatctttatggatttggactgatggacgcagaagccatggtgatggaggcagagaagtggaccaccgttccccggcagcacgtgtgtgtggagagcacagaccgacaaatcaagacaatccgccctaacagtgcagtgcgctccatctacaaagcttcaggctgctcggataaccccaaccgccatgtcaactacctggagcacgtcgttgtgcgcatcaccatcacccaccccaggagaggagacctggccatctacctgacctcgccctctggaactaggtctcagcttttggccaacaggctatttgatcactccatggaaggattcaaaaactgggagttcatgaccattcattgctggggagaaagagctgctggtgactgggtccttgaagtttatgatactccctctcagctaaggaactttaagactccaggtaaattgaaagaatggtctttggtcctctacggcacctccgtgcagccatattcaccaaccaatgaatttccgaaagtggaacggttccgctatagccgagttgaagaccccacagacgactatggcacagaggattatgcaggtgagctggcttccagtgggacacaggctaaaaagaggcagctcatgcatcatcccaccacatgggagaacagaatggaatggaatggaatgaaatggaatggaatgaaatggaatggaatggaatggaatggaatggaatggaatcgaatcgaatcgaatcgaatagaatagaatagaatagaacagaacagaatagaatagaacagaacaatctactacccatattctgacatattttcttccccttaaatatttgtgtgtgtatatcagtgcactcatatattcaaatatccatatgtgttatctgcaaagctaatagtccatattgcgattgtaccataatatagttaatctgtaatctgggacatattgttcgcttacagaattttacactattttaaacacggtttggataaacatcattatttatc

SEQ ID NO: 310590 - DNA, 2840 bp, Artificial Sequence
  derived and/or modified sequence
attgccactcagaatcctcgcgcgctgctcggagccggagggagcgctgggagcgagcaagcgagcgtttggagcccgggccagcagagggggcgcccggtcgctgcctgtaccgctcccgctggtcatctccgccgcgctcgggggccccgggaggagcgagaccgagtcggagagtccgggagccaagccgggcgaaacccaactgcggaggacgcccgccccactcagcctcctcctgcgtccgagccggggagcatcgccgagcgccccacgggccggagagctgggagcacaggtcccggcagccccagggatggtctaggagccggcgtaaggctcgctgctctgctccctgccggggctagccgcctcctgccgatcgcccggggctgcgagctgcggcggcccggggctgctcgccgggcggcgcaggccggagaagttagttgtgcgcgcccttagtgcgcggaaccagccagcgagcgagggagcagcgaggcgccgggaccatgggctgggggagccgctgctgctgcccgggacgtttggacctgctgtgcgtgctggcgctgctcgggggctgcctgctccccgtgtgtcggacgcgcgtctacaccaaccactgggcagtcaaaatcgccgggggcttcccggaggccaaccgtatcgccagcaagtacggattcatcaacataggacagataggggccctgaaggactactaccacttctaccatagcaggacgattaaaaggtcagttatctcgagcagagggacccacagtttcatttcaatggaaccaaaggtggaatggatccaacagcaagtggtaaaaaagcggacaaagagggattatgacttcagtcgtgcccagtctacctatttcaatgatcccaagtggcccagcatgtggtatatgcactgcagtgacaatacacatccctgccagtctgacatgaatatcgaaggagcctggaagagaggctacacgggaaagaacattgtggtcactatcctggatgacggaattgagagaacccatccagatctgatgcaaaactacgatgctctggcaagttgcgacgtgaatgggaatgacttggacccaatgcctcgttatgatgcaagcaacgagaacaagcatgggactcgctgtgctggagaagtggcagccgctgcaaacaattcgcactgcacagtcggaattgctttcaacgccaagatcggaggagtgcgaatgctggacggagatgtcacggacatggttgaagcaaaatcagttagcttcaacccccagcacgtgcacatttacagcgccagctggggcccggatgatgatggcaagactgtggacggaccagcccccctcacccggcaagcctttgaaaacggcgttagaatggggcggagaggcctcggctctgtgtttgtttgggcatctggaaatggtggaaggagcaaagaccactgctcctgtgatggctacaccaacagcatctacaccatctccatcagcagcactgcagaaagcggaaagaaaccttggtacctggaagagtgttcatccacgctggccacaacctacagcagcggggagtcctacgataagaaaatcatcactacagatctgaggcagcgttgcacggacaaccacactgggacgtcagcctcagcccccatggctgcaggcatcattgcgctggccctggaagccaatccgtttctgacctggagagacgtacagcatgttattgtcaggacttcccgtgcgggacatttgaacgctaatgactggaaaaccaatgctgctggttttaaggtgagccatctttatggatttggactgatggacgcagaagccatggtgatggaggcagagaagtggaccaccgttccccggcagcacgtgtgtgtggagagcacagaccgacaaatcaagacaatccgccctaacagtgcagtgcgctccatctacaaagcttcaggctgctcggataaccccaaccgccatgtcaactacctggagcacgtcgttgtgcgcatcaccatcacccaccccaggagaggagacctggccatctacctgacctcgccctctggaactaggtctcagcttttggccaacaggctatttgatcactccatggaaggattcaaaaactgggagttcatgaccattcattgctggggagaaagagctgctggtgactgggtccttgaagtttatgatactccctctcagctaaggaactttaagactccaggtaaattgaaagaatggtctttggtcctctacggcacctccgtgcagccatattcaccaaccaatgaatttccgaaagtggaacggttccgctatagccgagttgaagaccccacagacgactatggcacagaggattatgcaggtgagctggcttccagtgggacacaggctaaaaagaggcagctcatgcatcatcccaccacatgggagaacagaatggaatggaatggaatgaaatggaatggaatggaatggaatggaatggaatggaatggaatggaatcgaatcgaatcgaatcgaatagaatagaatagaatagaacagaacagaatagaatagaacagaacaatctactacccatattctgacatattttcttccccttaaatatttgtgtgtgtatatcagtgcactcatatattcaaatatccatatgtgttatctgcaaagctaatagtccatattgcgattgtaccataatatagttaatctgtaatctgggacatattgttcgcttacagaattttacactattttaaacacggtttggataaacatcattatttatc

SEQ ID NO: 310591 - DNA, 2073 bp, Artificial Sequence
  derived and/or modified sequence
atgggctggggcagcagatgctgctgccccggcagactggacctgctgtgcgtgctggccctgctgggcggctgcctgctgcccgtgtgcagaaccagagtgtacaccaaccactgggccgtgaagatcgccggcggcttccccgaggccaacagaatcgccagcaagtacggcttcatcaacatcggccagatcggcgccctgaaggactactaccacttctaccacagcagaaccatcaagagaagcgtgatcagcagcagaggcacccacagcttcatcagcatggagcccaaggtggagtggatccagcagcaggtggtgaagaagagaaccaagagagactacgacttcagcagagcccagagcacctacttcaacgaccccaagtggcccagcatgtggtacatgcactgcagcgacaacacccacccctgccagagcgacatgaacatcgagggcgcctggaagagaggctacaccggcaagaacatcgtggtgaccatcctggacgacggcatcgagagaacccaccccgacctgatgcagaactacgacgccctggccagctgcgacgtgaacggcaacgacctggaccccatgcccagatacgacgccagcaacgagaacaagcacggcaccagatgcgccggcgaggtggccgccgccgccaacaacagccactgcaccgtgggcatcgccttcaacgccaagatcggcggcgtgagaatgctggacggcgacgtgaccgacatggtggaggccaagagcgtgagcttcaacccccagcacgtgcacatctacagcgccagctggggccccgacgacgacggcaagaccgtggacggccccgcccccctgaccagacaggccttcgagaacggcgtgagaatgggcagaagaggcctgggcagcgtgttcgtgtgggccagcggcaacggcggcagaagcaaggaccactgcagctgcgacggctacaccaacagcatctacaccatcagcatcagcagcaccgccgagagcggcaagaagccctggtacctggaggagtgcagcagcaccctggccaccacctacagcagcggcgagagctacgacaagaagatcatcaccaccgacctgagacagagatgcaccgacaaccacaccggcaccagcgccagcgcccccatggccgccggcatcatcgccctggccctggaggccaaccccttcctgacctggagagacgtgcagcacgtgatcgtgagaaccagcagagccggccacctgaacgccaacgactggaagaccaacgccgccggcttcaaggtgagccacctgtacggcttcggcctgatggacgccgaggccatggtgatggaggccgagaagtggaccaccgtgcccagacagcacgtgtgcgtggagagcaccgacagacagatcaagaccatcagacccaacagcgccgtgagaagcatctacaaggccagcggctgcagcgacaaccccaacagacacgtgaactacctggagcacgtggtggtgagaatcaccatcacccaccccagaagaggcgacctggccatctacctgaccagccccagcggcaccagaagccagctgctggccaacagactgttcgaccacagcatggagggcttcaagaactgggagttcatgaccatccactgctggggcgagagagccgccggcgactgggtgctggaggtgtacgacacccccagccagctgagaaacttcaagacccccggcaagctgaaggagtggagcctggtgctgtacggcaccagcgtgcagccctacagccccaccaacgagttccccaaggtggagagattcagatacagcagagtggaggaccccaccgacgactacggcaccgaggactacgccggcgagctggccagcagcggcacccaggccaagaagagacagctgatgcaccaccccaccacctgggagaacagaatggagtggaacggcatgaagtggaacggcatgaagtggaacggcatggagtggaacggcatggagtggaacagaatcgagagcaacagaatcgagtag

SEQ ID NO: 310592 - DNA, 2073 bp, Artificial Sequence
  derived and/or modified sequence
atgggctggggcagcagatgctgctgccccggcagactggacctgctgtgcgtgctggccctgctgggcggctgcctgctgcccgtgtgcagaaccagagtgtacaccaaccactgggccgtgaagatcgccggcggcttccccgaggccaacagaatcgccagcaagtacggcttcatcaacatcggccagatcggcgccctgaaggactactaccacttctaccacagcagaaccatcaagagaagcgtgatcagcagcagaggcacccacagcttcatcagcatggagcccaaggtggagtggatccagcagcaggtggtgaagaagagaaccaagagagactacgacttcagcagagcccagagcacctacttcaacgaccccaagtggcccagcatgtggtacatgcactgcagcgacaacacccacccctgccagagcgacatgaacatcgagggcgcctggaagagaggctacaccggcaagaacatcgtggtgaccatcctggacgacggcatcgagagaacccaccccgacctgatgcagaactacgacgccctggccagctgcgacgtgaacggcaacgacctggaccccatgcccagatacgacgccagcaacgagaacaagcacggcaccagatgcgccggcgaggtggccgccgccgccaacaacagccactgcaccgtgggcatcgccttcaacgccaagatcggcggcgtgagaatgctggacggcgacgtgaccgacatggtggaggccaagagcgtgagcttcaacccccagcacgtgcacatctacagcgccagctggggccccgacgacgacggcaagaccgtggacggccccgcccccctgaccagacaggccttcgagaacggcgtgagaatgggcagaagaggcctgggcagcgtgttcgtgtgggccagcggcaacggcggcagaagcaaggaccactgcagctgcgacggctacaccaacagcatctacaccatcagcatcagcagcaccgccgagagcggcaagaagccctggtacctggaggagtgcagcagcaccctggccaccacctacagcagcggcgagagctacgacaagaagatcatcaccaccgacctgagacagagatgcaccgacaaccacaccggcaccagcgccagcgcccccatggccgccggcatcatcgccctggccctggaggccaaccccttcctgacctggagagacgtgcagcacgtgatcgtgagaaccagcagagccggccacctgaacgccaacgactggaagaccaacgccgccggcttcaaggtgagccacctgtacggcttcggcctgatggacgccgaggccatggtgatggaggccgagaagtggaccaccgtgcccagacagcacgtgtgcgtggagagcaccgacagacagatcaagaccatcagacccaacagcgccgtgagaagcatctacaaggccagcggctgcagcgacaaccccaacagacacgtgaactacctggagcacgtggtggtgagaatcaccatcacccaccccagaagaggcgacctggccatctacctgaccagccccagcggcaccagaagccagctgctggccaacagactgttcgaccacagcatggagggcttcaagaactgggagttcatgaccatccactgctggggcgagagagccgccggcgactgggtgctggaggtgtacgacacccccagccagctgagaaacttcaagacccccggcaagctgaaggagtggagcctggtgctgtacggcaccagcgtgcagccctacagccccaccaacgagttccccaaggtggagagattcagatacagcagagtggaggaccccaccgacgactacggcaccgaggactacgccggcgagctggccagcagcggcacccaggccaagaagagacagctgatgcaccaccccaccacctgggagaacagaatggagtggaacggcatgaagtggaacggcatggagtggaacggcatggagtggaacggcatggagagcaacagaatcgagagcaacagaatcgagtag

SEQ ID NO: 310593 - DNA, 480 bp, Artificial Sequence
  derived and/or modified sequence
agaggcctggaggagagcggccccagacccaccgccaccccctgcggctgcgtgaagcccgccctggagaccggcaacctgctgaccgagcccgtgggctacctggagagctgcttcagcgccaagaacggcacccccagacagcccagcatctgcagctacagcagagcctgcctgagaatcagaaagagaatcttcaacaaccccgagcacagcctgatgggcctggagcagttcagccacgtgtggatcctgttcgtgttccacaagaacggccacctgagctgcaaggccaaggtgcagccccccagactgaacggcgccaagaccggcgtgttcagcaccagaagcccccacagacccaacgccatcggcctgaccctggccaagctggagaaggtggaggccctgggcaagtggaccgacatcatggccgccgtgctgatgagcaccgtgctgtgcggcagaagcctgggctag

SEQ ID NO: 310594 - DNA, 519 bp, Artificial Sequence
  derived and/or modified sequence
ggcctggaggagagcggccccagacccaccgccaccccctgcggctgcgtgaagcccgccctggagaccggcaacctgctgaccgagcccgtgggctacctggagagctgcttcagcgccaagaacggcacccccagacagcccagcatctgcagctacagcagagcctgcctgagaatcagaaagagaatcttcaacaaccccgagcacagcctgatgggcctggagcagttcagccacgtgtggatcctgttcgtgttccacaagaacggccacctgagctgcaaggccaaggtgcagccccccagactgaacggcgccaagaccggcgtgttcagcaccagaagcccccacagacccaacgccatcggcctgaccctggccaagctggagaaggtggagggcaaccccttccacttctacttctacctgttcccccaccccaagaagccctacaagatcaacagcatccaccactggctgttcatccagaccagcaccaacgacgtgaacagctag

SEQ ID NO: 310595 - DNA, 552 bp, Artificial Sequence
  derived and/or modified sequence
ggcttggaggagtcggggcctcggcctacagcgaccccgtgcggctgcgttaagccggctctggagacagggaatcttttaactgagccagtcggctacttggaatcttgtttctcggccaagaatggtactccaagacagccatccatttgtagctattctcgagcctgtttgaggattagaaagaggatctttaataatcctgaacattccttgatgggcctagaacagttttctcatgtttggattttgtttgtttttcacaaaaatggtcatttgagctgtaaggcaaaagtgcagcctcctaggctgaatggtgcaaagactggagttttttccacaaggagccctcatcgtcccaatgcaataggactgaccctggccaagctggaaaaggtagaaggtaacccatttcatttctacttttacctttttcctcacccaaaaaagccttataaaataaacagcattcaccactggctgtttattcagacgagtaccaatgatgttaactcctgagaaccaccagacattgaagaaaatacaatgatt

SEQ ID NO: 310596 - DNA, 480 bp, Artificial Sequence
  derived and/or modified sequence
agaggtctggaggaaagcggccctagacccactgctacaccctgtgggtgcgtgaagcccgcgcttgaaacagggaatctgctcaccgagcccgtaggctacttagaaagttgcttctctgctaaaaacgggacccctcggcagcccagtatttgtagttactcccgggcctgcctgcgcattcggaaaagaatcttcaacaatccagaacacagtctcatgggcttagagcagttctcccatgtctggattctgttcgtatttcacaagaatgggcacctaagctgtaaagccaaagtgcagcctccacggctcaacggggccaaaaccggcgtgtttagcaccaggtcgcctcacaggcctaacgctatcggtctaaccttggccaagctcgaaaaggtcgaagcgcttggcaaatggacagacatcatggcagccgtgttgatgagtactgttctgtgcggtcgtagcctgggatag

SEQ ID NO: 310597 - DNA, 519 bp, Artificial Sequence
  derived and/or modified sequence
ggactggaggaaagcgggccacggccaactgctaccccatgtggatgcgtcaaaccggccctggagaccggaaacctgctgacagagcccgttgggtacctcgagtcctgcttcagcgcaaagaatggcacaccccgccagccaagtatctgttcatactcccgggcctgcctgaggataagaaagaggatcttcaataatccggaacactcacttatgggactggagcaattttctcatgtttggattctgttcgtgttccataaaaacggccatctttcttgtaaggctaaggtgcagcctccgcgacttaacggagccaagacaggggtgttttccacgagatcgcctcatcggccgaacgcaattggccttacgcttgctaaattagaaaaagtggaggggaacccctttcacttttacttttacctctttcctcacccaaagaagccatacaagatcaactccatccaccactggctcttcattcagacaagtaccaacgacgtgaatagctag

SEQ ID NO: 310598 - DNA, 480 bp, Artificial Sequence
  derived and/or modified sequence
cggggcctggaggagagcggcccccggcccacagccaccccctgtggctgtgtgaagccagccctggagaccggcaacctgctgacagagcctgtgggctacctggagagctgcttcagcgccaagaatggcaccccccggcagcccagcatctgcagctacagccgggcctgcctgcgcatcaggaagaggatcttcaacaaccctgagcacagcctgatgggcctggagcagttcagccacgtgtggatcctgtttgtgttccacaagaatggccacctgagctgcaaggccaaggtgcagcccccccggctgaatggagccaagacaggagtcttcagcaccaggagcccccaccggcccaatgccatcggcctgaccctggccaagctggagaaggtggaggccctgggcaagtggacagacatcatggctgctgtgctgatgagcacagtgctgtgtggccgcagcctgggctag

SEQ ID NO: 310599 - DNA, 519 bp, Artificial Sequence
  derived and/or modified sequence
ggcctggaggagagcggcccccggcccacagccaccccctgtggctgtgtgaagccagccctggagactggaaacctgctgacagagcctgtgggctacctggagagctgcttcagcgccaagaatggcaccccccggcagcccagcatctgcagctacagccgggcctgcctgcgcatcaggaagaggatcttcaacaaccctgagcacagcctgatgggcctggagcagttcagccacgtgtggatcctgtttgtgttccacaagaatggccacctgagctgcaaggccaaggtgcagcccccccggctgaatggagccaagacaggagtcttcagcaccaggagcccccaccggcccaatgccatcggcctgaccctggccaagctggagaaggtggagggcaaccccttccacttctacttctacctgttcccccaccccaagaagccctacaagatcaacagcatccaccactggctgttcatccagaccagcaccaatgatgtgaacagctag

SEQ ID NO: 310600 - DNA, 480 bp, Artificial Sequence
  derived and/or modified sequence
cggggcctggaggagagcggcccccggcccaccgccaccccctgcggctgcgtgaagcctgccctggaaactgggaacctgctgacagaacctgtgggctatctcgaaagttgcttttctgcaaaaaacggcacacccagacagccaagcatctgctcctacagccgcgcttgtctcaggattagaaagcgcatctttaataacccagagcattccctgatgggccttgaacagttctcacatgtctggatccttttcgtcttccacaaaaacggacatctgagttgcaaggccaaggtacagcccccccggctgaatggtgccaaaacgggcgttttctccacacgctctcctcaccggccaaatgcaattggcctgacacttgcaaagcttgagaaggtggaagctctcggcaagtggaccgatatcatggccgccgtgctgatgtctaccgtgctttgcggcagatccttgggatag

SEQ ID NO: 310601 - DNA, 519 bp, Artificial Sequence
  derived and/or modified sequence
ggcctggaggagagcggcccccggcccaccgccaccccctgcggctgcgtcaagccagctctggagacagggaacctattaacagagccagttggatatctcgaatcttgcttctccgctaagaatggtacccctcgccagcccagcatctgcagctactctcgcgcatgtttgcggatcagaaagagaatattcaataaccccgaacatagcctgatggggctggagcaattttcacatgtgtggatactgtttgtcttccacaaaaacggccatttgagctgtaaagcaaaagttcagcccccgcgcctaaacggtgcgaaaacaggtgtcttctcgacccggtctccgcaccgccccaacgccatcgggctcacgctggccaagctcgagaaggttgaggggaacccgtttcacttttacttctacctgttcccacacccaaagaagccctacaagatcaattccattcaccactggctttttatccagacttcaacgaatgacgtgaatagctag

SEQ ID NO: 310602 - DNA, 480 bp, Artificial Sequence
  derived and/or modified sequence
cgagggctggaagaatctggacctagaccaacagccacgccatgtgggtgcgtgaagccagctctggagacgggcaacctcttgaccgagcccgtaggttatctggaaagctgtttttcagctaagaatggtacaccgagacagccctccatttgctcctacagcagagcctgtttgcgtatacgaaagcgcatcttcaacaatcctgagcactctctcatgggcctggagcagttctctcatgtgtggatcctgtttgtgttccacaaaaatggacatctctcatgcaaagccaaagtgcagccccctaggctcaatggcgcaaagacaggcgttttcagcacccgaagcccacacaggcctaacgccatcggtcttactcttgcgaagctggagaaagtggaagccctcggcaagtggaccgatataatggccgctgttctgatgagcaccgtgctgtgtggaagatctctgggttag

SEQ ID NO: 310603 - DNA, 519 bp, Artificial Sequence
  derived and/or modified sequence
ggcctcgaagaaagcggcccaagaccaaccgccactccttgtggctgtgtcaaaccggctctcgagacaggtaacctgcttactgagcctgtcgggtacctggagtcgtgtttctcagccaaaaatggcactcccagacagccatccatctgtagttacagccgagcctgtttaagaattagaaagagaatttttaacaacccagaacacagcctaatgggactggagcagttctcgcatgtgtggatcttgttcgtttttcacaagaacggccacctttcttgcaaagccaaggtgcagcccccaagactgaacggagctaagaccggcgtgtttagcacacggagtccccataggcctaacgctatagggctcaccctcgccaagctggagaaagttgaagggaacccttttcatttctatttttatctgtttcctcatcctaagaagccatacaagatcaattccatccatcactggctgttcattcagacatccacaaatgatgtcaatagttag

SEQ ID NO: 310604 - protein, 185 aa, Artificial Sequence [sequence omitted]

SEQ ID NO: 310605 - DNA, 558 bp, Artificial Sequence
  derived and/or modified sequence
atgagctggagccagcccgtgctgagaggcctgcccgccagcagagacgaggacagcaagcaggtgaccaccctgccctggggcaagagaagcagcagaggcggcgccatctacctgagcggcatcgacatgatccacggcacccccgtgctggacatcaagccctacatcgccgagtacgacagcccccagaacgtgatggagcccctggccgacttcaacctgcagaacaaccagcacacccccaacaccgtgagccagagcgacagcaagaccgacagctgcgaccagagacagctgagcggctgcgacgagccccagccccaccacagcaccaagagaaagcccaagtgccccgaggacagaaccagcgaggagaactacctgacccacagcgacaccgccagaatccagcaggccttccccatgcacagagagatcgccgtggacttcggcctggagagcagaagagaccagagcagcagcgtggccgaggagcagatcggcccctactgccccgagaagagcttcagcgagaagggcaccgacagaagctag

SEQ ID NO: 310606 - DNA, 3635 bp, Artificial Sequence
  derived and/or modified sequence
gggcacctcagcaaccagtagccatgcgcggcttggaggagtcggggcctcggcctacagcgaccccgtgcggctgcgttaagccggctctggagacagggaatcttttaactgagccagtcggctacttggaatcttgtttctcggccaagaatggtactccaagacagccatccatttgtagctattctcgagcctgtttgaggattagaaagaggatctttaataatcctgaacattccttgatgggcctagaacagttttctcatgtttggaaggtctagtcatgccaaatggaaaaagaaaggaaggtctggtaaaggattttgtttgtttttcacaaaaatggtcatttgagctgtaaggcaaaagtgcagcctcctaggctgaatggtgcaaagactggagttttttccacaaggagccctcatcgtcccaatgcaataggactgaccctggccaagctggaaaaggtagaagccttggggaaatggacagatatcatggctgcagtgctgatgtcaactgtgctgtgtggcaggagtctgggatgaatcacactacaaggacaaacattggtcaggttgtagaagttttaaactagttttaactgtgtgttcgtatataacctagttacgcatttatggaaagcattccattctgacctaacagatgcatttgttatagaggcagcagatgaaatggcaggtaaactaggagtcaagagaccattccaggcttcagcctgctggttgtgaagtgggcaaaggagaaggacctgcttcctctgtgattccacagaatattttgagaatcttgtaagagagaagttctaaaactactttttcaggctattggacactaaatagatgagagcagttattttgcttgttctttcccagaacttgaactctcccactggattgtactcaactgggccttaggtagttttctcagaaaaattcagtagctgatccaccttgaattttatcaatttgtaatggctaacaaacttggatagcaagtactagaagattttatgattattcagggacatattttctagcactgaatatgtgccagacattgtcctaggtgctagagctatagtgataaacaaatcagatgaaagtagaaatccatgccctaaagaacttaatgtttcaattgggaaggtcaagtcagataggttaaaaggcaaacacagtagcactgtagacattactatataagctttatggcaactagtgtttgtgcagtgctttacagttagtaaacagtgttcacgtaccttatctcacagtggctttgtgggtttgacaaagtagcaatcctcatctcataggtgaggaaactagggctctttaagattagataatctgtctaatagcatccagccaggtggtcatctgactctaaatcctttgaagtcttacttatgctacagtgcctttctttttcctacagatattgttaggcataattcatcatctagcaagtccagaatcatctttccagagttccagctcattcataataacatgtttcagaaatcagggtcctgtattagttacgtttttcttaaatggagacggaatcaaatgtgactgcatgtagtttttctgttctcatttggcctattttccaagagtaaggttagtagatggctatttgtagcagtaactggacagcatctgtccagtgggacagctggagacttgtctttagtatttggtaatgctgacttatgtgctgcttaatcttttgagtcttgatggatgtattagatttctattgttgtgtaacaaattaccacagaatcatcagtttaaacaacacacatgtattatgtgtttgaaacattattatgtatctgtgggtcagaaggatgggcacagcttaactaggtcatctgcttaggtctcactagactgcaattaaattgtcagctgatatgagttcttatctggaggcttgaccatggaagaatctgcttaagctcactcagactgttggccacattgatttccttgccatcgtagtaggactgggggccccagattcttgctggttgttggctggaggctgccctcagtgtctaaaggctgtttgcagttccttgctatgtgggcttcctagcacgcctgcctacttcagcaagccttcaaggagagtctctcgagtgagtcttccagccagcagcagtgctaatgaaaagcatagtcactggagggacatcatacctcttttgccatattctgttggttagaagccagtcacactcaaggggaaggattatataagggcatgaacttcaggaggtgcgggtcacagggccacttttggatctgtttgccacagtaagaaccttcattggtcccacagagatatactgaggactactatatccctggaacagaagcaccagtgatacaaagatgagttggtcccagcctgtgttaaggggcctgcctgcgtctagggatgaagactctaagcaggtcactaccctaccgtggggaaagcgctctagcagaggtggagctatatacctttctggaattgacatgatacatggcacacccgtactagacatcaagccctacatagctgagtatgactcaccgcaaaatgtgatggagcctttagcagactttaatttacagaataaccaacatacaccaaacactgtgtcccagtctgacagcaagactgacagctgtgaccagcgacagctctcagggtgtgatgagccacaaccccaccatagcactaagaggaaacctaaatgtcctgaagacagaacttcagaagaaaactacctgacacacagtgacacagccagaattcagcaagcatttcctatgcacagggagatagcagtggattttggtttggaatcaagacgtgatcagagttccagcgtggcagaagaacaaattggcccatattgcccagagaagagcttttcagagaaaggtacagacagaagctagaaagagtggaaggagcagcagtcttgcaaggaagcagggcagagacacagcccatggcccctcactgccctgctggaagggctgatggagctccccgcagcgtggttcctgcctgggtgacagaggctcctgtggccactttagaagtgcggtttactcctcatgccgagatggaccttgggcagctcagttcacaagatgttggtcaggcgtcatttaaatattttcagtcagcagaggaagcaaagcgtgccattgaggctgtgctgtcagcggatcctcggtctgtgtaccgccggaagctttgccaggaccgccttttctactttactgtagacatagcgcatgtcacttgctggtttggtgatggctttgcagaggtgctgaggatcaagccggcttctgagcctgttcatatgactggccctgtggggtccttggtgtctctagggtcttaaggagcctccctcatgtctttaaggtagcatcattgatctttggatgtggcttttggattttctgaacaagctaatgttgtgtcgagaagcaacactttgtgatctcatggctttgattgatttgggctgttcaaaatgtttatttgaaaaacgtatacattaataaacttaacaaagagat

SEQ ID NO: 310607 - DNA, 2971 bp, Artificial Sequence
  derived and/or modified sequence
attttatcaatttgtaatggctaacaaacttggatagcaagtactagaagattttatgattattcagggacatattttctagcactgaatatgtgccagacattgtcctaggtgctagagctatagtgataaacaaatcagatgaaagtagaaatccatgccctaaagaacttaatgtttcaattgggaaggtcaagtcagataggttaaaaggcaaacacagtagcactgtagacattactatataagctttatggcaactagtgtttgtgcagtgctttacagttagtaaacagtgttcacgtaccttatctcacagtggctttgtgggtttgacaaagtagcaatcctcatctcataggtgaggaaactagggctctttaagattagataatctgtctaatagcatccagccaggtggtcatctgactctaaatcctttgaagtcttacttatgctacagtgcctttctttttcctacagatattgttaggcataattcatcatctagcaagtccagaatcatctttccagagttccagctcattcataataacatgtttcagaaatcagggtcctgtattagttacgtttttcttaaatggagacggaatcaaatgtgactgcatgtagtttttctgttctcatttggcctattttccaagagtaaggttagtagatggctatttgtagcagtaactggacagcatctgtccagtgggacagctggagacttgtctttagtatttggtaatgctgacttatgtgctgcttaatcttttgagtcttgatggatgtattagatttctattgttgtgtaacaaattaccacagaatcatcagtttaaacaacacacatgtattatgtgtttgaaacattattatgtatctgtgggtcagaaggatgggcacagcttaactaggtcatctgcttaggtctcactagactgcaattaaattgtcagctgatatgagttcttatctggaggcttgaccatggaagaatctgcttaagctcactcagactgttggccacattgatttccttgccatcgtagtaggactgggggccccagattcttgctggttgttggctggaggctgccctcagtgtctaaaggctgtttgcagttccttgctatgtgggcttcctagcacgcctgcctacttcagcaagccttcaaggagagtctctcgagtgagtcttccagccagcagcagtgctaatgaaaagcatagtcactggagggacatcatacctcttttgccatattctgttggttagaagccagtcacactcaaggggaaggattatataagggcatgaacttcaggaggtgcgggtcacagggccacttttggatctgtttgccacagtaagaaccttcattggtcccacagagatatactgaggactactatatccctggaacagaagcaccagtgatacaaagatgagttggtcccagcctgtgttaaggggcctgcctgcgtctagggatgaagactctaagcaggtcactaccctaccgtggggaaagcgctctagcagaggtttgtgcacaggcttctctatggggactgtaggaaagaatgcttttgtctggaggagccagaaaggctttgtaaaaggtgtgcttttgagggcctcaaagagcaagtaggagtttgataggtagagaagaggatgggctaccaggtagcaagaagggtgtgtgttggtactaggtctgtgtgagagaattatgagtaagtgcagtgaggcgtaagcagacagtgttagaggattctggggcgtgactgtattctccaagtgtttgcactgttcttcatttttcacgtttttatgtcataggtggagctatatacctttctggaattgacatgatacatggcacacccgtactagacatcaagccctacatagctgagtatgactcaccgcaaaatgtgatggagcctttagcagactttaatttacagaataaccaacatacaccaaacactgtgtcccagtctgacagcaagactgacagctgtgaccagcgacagctctcagggtgtgatgagccacaaccccaccatagcactaagaggaaacctaaatgtcctgaagacagaacttcagaagaaaactacctgacacacagtgacacagccagaattcagcaagcatttcctatgcacagggagatagcagtggattttggtttggaatcaagacgtgatcagagttccagcgtggcagaagaacaaattggcccatattgcccagagaagagcttttcagagaaaggtacagacaagaagctagaaagagtggaaggagcagcagtcttgcaaggaagcagggcagagacacagcccatggcccctcactgccctgctggaagggctgatggagctccccgcagcgtggttcctgcctgggtgacagaggctcctgtggccactttagaagtgcggtttactcctcatgccgagatggaccttgggcagctcagttcacaagatgttggtcaggcgtcatttaaatattttcagtcagcagaggaagcaaagcgtgccattgaggctgtgctgtcagcggatcctcggtctgtgtaccgccggaagctttgccaggaccgccttttctactttactgtagacatagcgcatgtcacttgctggtttggtgatggctttgcagaggtgctgaggatcaagccggcttctgagcctgttcatatgactggccctgtggggtccttggtgtctctagggtcttaaggagcctccctcatgtctttaaggtagcatcattgatctttggatgtggcttttggattttctgaacaagctaatgttgtgtcgagaagcaacactttgtgatctcatggctttgattgatttgggctgttcaaaatgtttatttgaaaaacgtatacattaataaacttaacaaagagatataaaatacagagaaatc

SEQ ID NO: 310608 - DNA, 558 bp, Artificial Sequence
  derived and/or modified sequence
atgtcctggagtcagcccgtgttgcgcggattacccgcgtctcgggatgaggatagtaagcaggtcacaacccttccatggggcaaacgcagtagcagggggggagcaatttacttgtctggtattgacatgatacacggtacccccgtgctggacattaagccttatatagccgagtacgacagccctcaaaatgtaatggaacccctggcagacttcaatctgcaaaacaaccagcatacccctaatacagtgagccaaagtgactctaaaacagacagctgtgatcagcgtcagttgtccggctgcgatgagcctcagccccaccatagtacaaagcgaaagccaaagtgtccagaggacagaactagcgaggagaattatctgacccactctgacacagcgcgcatacaacaggccttcccaatgcatcgcgagattgccgtcgactttggactggagtcacggcgggatcaaagttcctcagtggcagaagagcaaatcgggccatactgtcccgaaaagtccttcagtgagaaagggaccgacagatcttag

SEQ ID NO: 310609 - DNA, 558 bp, Artificial Sequence
  derived and/or modified sequence
atgtcctggagccagcctgtgctgcggggcctgcctgccagcagagatgaggacagcaagcaggtgaccaccctgccctggggcaagaggagcagccggggcggggccatctacctgagcggcatcgacatgatccacggcacccctgtgctggacatcaagccctacatcgccgagtatgacagcccccagaatgtgatggagcccctggccgacttcaacctgcagaacaaccagcacacccccaacacagtgtcccagagcgacagcaagacagacagctgtgaccagaggcagctgagcggctgtgatgagccccagccccaccacagcaccaagaggaagcccaagtgcccagaggacaggaccagcgaggagaactacctgacccacagcgacacagcccgcatccagcaggccttccccatgcaccgggagattgctgtggactttggcctggagagccggcgggaccagagcagctctgtggccgaggagcagatcggcccctactgcccagagaagagcttcagcgagaagggcacagacaggagctag

SEQ ID NO: 310610 - DNA, 558 bp, Artificial Sequence
  derived and/or modified sequence
atgagctggagccagcccgtgctgcggggcctgcccgccagccgggatgaagactcgaagcaggtgaccactcttccgtggggcaaaaggagctcgcgaggaggggcaatttatctgtctggaatagatatgatccatggcacacccgttcttgatataaagccatatattgcagagtacgattctccccagaatgtgatggagccgttggctgacttcaatctgcaaaacaatcaacacactcctaatactgtgagccaatccgactctaagaccgatagctgcgatcagcgtcaactcagcgggtgcgacgaaccccagcctcaccattcgacaaagaggaaacctaagtgtcctgaagacaggacgtcagaggagaattatcttacacactctgatactgctcggattcagcaagcattcccaatgcatcgcgaaatagccgtggattttggtctggaatctagacgggaccaatcatctagcgtggcagaggaacagattggcccctattgcccggagaaatcattttctgagaaaggtaccgacaggtcttag

SEQ ID NO: 310611 - DNA, 558 bp, Artificial Sequence
  derived and/or modified sequence
atgtcctggagtcagcctgtgctgcggggattacccgcttcgcgcgacgaggactctaagcaggtcactaccctgccctggggtaagcgatcgtcacgcggtggtgctatttaccttagtggcatagatatgattcatgggacgcctgtgctcgacattaaaccatatatcgctgaatatgactcaccacagaatgtgatggagcccctagctgactttaatctgcagaataatcagcatactcccaataccgttagccagtcagattcgaagactgatagctgcgatcagaggcagctgtccggctgtgacgagccgcagccacaccactcaactaagagaaaaccaaagtgtcctgaggaccgaacatctgaggagaattacctcacccactctgacacagcgcgaatccagcaagccttccccatgcacagagagattgcagtggattttggtctggaaagccgcagagaccagtcctcaagcgtggccgaggagcagatcggtccctactgtcccgagaagtcattttccgagaaaggcactgatagatcatag

SEQ ID NO: 310612 - protein, 327 aa, Artificial Sequence
  derived and/or modified sequence
MATVPVYCVCRLPYDVTRFMIECDACKDWFHGSCVGVEEEEAPDIDIYHCPNCEKTHGKSTLKKKRTWHKHGPGQAPDVKPKNSVDLDDYEEEQDHLDACFKDSDYVYPSLESDEDNPIFKSRSKKRKGSDDAPYSPTARVGPSVPRQDRPVREGTRVASIETGLAAAAAKLSQQEEQKSKKKKSAKRKLTPNTTSPSTSTSISAGTTSTSTTPASTTPASTTPASTSTASSQASQEGSSPEPPPESHSSSLADHEYTAAGTFTGAQAGRTSQPMAPGVFLTQRRPSASSPNNNTAAKGKRTKKGMATAKQRLGKILKIHRNGKLLL

SEQ ID NO: 310613 - protein, 105 aa, Artificial Sequence
  derived and/or modified sequence
MKPFEDALKNQPLGPVLSKAASVECISPVSPRAPDAKMLEELQAETWYQGEMSRKEAEGLLEKDGDFLVRKSTTNPGSFVLTGMHNGQAKHLLLVDPEGTRSNSY

SEQ ID NO: 310614 - DNA, 318 bp, Artificial Sequence
  derived and/or modified sequence
atgaagcccttcgaggacgccctgaagaaccagcccctgggccccgtgctgagcaaggccgccagcgtggagtgcatcagccccgtgagccccagagcccccgacgccaagatgctggaggagctgcaggccgagacctggtaccagggcgagatgagcagaaaggaggccgagggcctgctggagaaggacggcgacttcctggtgagaaagagcaccaccaaccccggcagcttcgtgctgaccggcatgcacaacggccaggccaagcacctgctgctggtggaccccgagggcaccagaagcaacagctactag

SEQ ID NO: 310615 - DNA, 318 bp, Artificial Sequence
  derived and/or modified sequence
atgaaaccttttgaggacgcactgaaaaaccaacccctggggccagtcctgtccaaagcagctagtgtggaatgcatctcacccgtgagcccaagagcccctgacgcgaaaatgctcgaagaactgcaggctgagacatggtatcagggagaaatgtcccgtaaggaggctgaaggcctgttggagaaggacggggactttctggtgcggaaatctacaacaaatcccgggagtttcgtgctcacaggaatgcacaatggccaggcgaaacatctcttgctagttgatcccgaggggaccaggtccaatagctattag

SEQ ID NO: 310616 - DNA, 318 bp, Artificial Sequence
  derived and/or modified sequence
atgaagccttttgaggatgccctgaagaaccagccattgggtcccgtgttgtctaaggccgctagcgtagaatgtattagtcctgtgtccccacgtgcaccggacgctaaaatgctcgaagagctgcaggccgaaacctggtatcaaggcgaaatgagtcggaaggaggctgagggcctactagagaaagatggcgacttccttgttaggaaatccaccactaatccagggagtttcgtcttaactggcatgcacaacggccaagccaaacacttgttgctggtcgatccagaaggcaccagatccaattcatattag

SEQ ID NO: 310617 - DNA, 569 bp, Artificial Sequence
  derived and/or modified sequence
cccacgggagaagcacccacctacgtcaacactcagcagatcccaccacaggcctggccggctgcggtcagcagtgctgagagcagcccaaggaaagacctctttgacatgaaaccttttgaagatgctctcaagaaccagcccttggggcccgtgttaagcaaggcagcctccgtggagtgcatcagccctgtgtcacctagagccccagatgccaagatgctggaggaactgcaagccgagacttggtaccaaggagagatgagcaggaaggaggcagaggggctgctggagaaagacggagacttcctggtcaggaagagcaccaccaacccgggctcctttgtcctcacgggcatgcacaatggccaggccaagcacctgctgctcgtggacccagaaggcacgagaagtaactcctactgatgttggccatccctggcactacagctgtatctgaataatcccgtaggtttggctgaatttttcatcttcccgtcaagaaagacattcatctttacctggggcatagtccaagaattgctaagtttaataaatgcagttaaatc

SEQ ID NO: 310618 - DNA, 318 bp, Artificial Sequence
  derived and/or modified sequence
atgaagccctttgaagatgccctgaagaaccagcccctgggccctgtgctgagcaaggccgcctctgtggagtgcatcagccctgtgagcccccgggccccagatgccaagatgctggaggagctgcaggccgagacctggtaccagggcgagatgagcaggaaggaggccgagggcctgctggagaaggatggagacttcctggtgaggaagagcaccaccaaccctggcagctttgtgctgaccggcatgcacaacggccaggccaagcacctgctgctggtggaccctgagggcaccaggagcaacagctactag

SEQ ID NO: 310619 - DNA, 318 bp, Artificial Sequence
  derived and/or modified sequence
atgaagcccttcgaggacgccctgaagaaccagcccctgggccccgtgctgtccaaggctgccagcgtcgagtgcataagcccagtgtccccccgggctcctgatgccaaaatgctggaggagttgcaggcagagacatggtaccaaggggagatgtcccgcaaagaggcagaaggactgttggagaaagatggcgattttctcgtgagaaaaagcaccactaatccaggcagttttgtgttgacgggcatgcacaatggtcaagccaagcacttgctcttagttgatcccgaaggtacccgctcaaactcatattag

SEQ ID NO: 310620 - DNA, 318 bp, Artificial Sequence
  derived and/or modified sequence
atgaagcccttcgaggacgccctgaagaaccagcccctgggccccgtgctgtctaaggcagcatcggtcgagtgcatcagccctgtctccccaagagcaccagatgccaagatgttggaagagctacaggctgaaacttggtaccaaggggagatgtctcgcaaagaggcggagggcctgctcgagaaagacggtgacttccttgtgcggaagtcaacaactaatcctggcagctttgtgttaaccggtatgcacaatggtcaggccaagcacctgctcctcgtggacccagagggcacaagatctaattcttattag

SEQ ID NO: 310621 - DNA, 318 bp, Artificial Sequence
  derived and/or modified sequence
atgaagcccttcgaagacgccctgaaaaatcagcccctcggccctgtgctgagcaaggcggcttcagtggaatgcatttccccggtgtcccccagagcacccgacgcgaagatgctagaagagctgcaggcagaaacctggtaccagggcgaaatgagcaggaaggaagcagagggactgctggagaaagatggagacttccttgtaagaaagtcgactacaaaccctggatcattcgtcctcaccggtatgcacaacggccaggccaaacatttgctgctcgtggatcctgaaggcactagatcaaactcctactag

SEQ ID NO: 310622 - DNA, 318 bp, Artificial Sequence
  derived and/or modified sequence
atgaagccctttgaagacgctctaaagaatcaacctctgggccctgtgctgagcaaagcggcttccgtggagtgcatttctccagtgtctccacgagctcctgacgccaaaatgctcgaagagctgcaggccgaaacctggtaccagggtgaaatgtctcggaaggaagcggagggtctacttgagaaggatggcgacttcctggtacgcaaaagcaccactaacccaggatccttcgtgctgaccggaatgcataacgggcaagccaaacacctgctgctggtagaccctgagggaacccggtcaaacagctattag

SEQ ID NO: 310623 - protein, 140 aa, Artificial Sequence
  derived and/or modified sequence
MVLVLDYSGRPMVISSGMQSMDTMKQVYQIVKPLNPNFCFLQCTSAYPLQPEDVNLRVISEYQKLFPDIPIGYSGHETGIAISVAAVALGAKVLERHITLDKTWKGSDHSASLEPGELAELVRSVRLVERALGSPTKQLL

SEQ ID NO: 310624 - protein, 115 aa, Artificial Sequence
  derived and/or modified sequence
EDVNLRVISEYQKLFPDIPIGYSGHETGIAISVAAVALGAKVLERHITLDKTWKGSDHSASLEPGELAELVRSVRLVERALGSPTKQLLPCEMACNEKVCPAGLYSVLLPCVEKG

SEQ ID NO: 310625 - DNA, 423 bp, Artificial Sequence
  derived and/or modified sequence
atggttcttgtgctcgactattcaggacgcccaatggtcatcagctcagggatgcagagtatggatacaatgaaacaagtgtaccaaattgtcaagcctctgaatccgaacttctgtttcctgcagtgtacgtcagcataccccttacaacctgaggatgtgaacctgagagttatcagtgagtatcagaaactgttccccgatattcctatcggttacagtgggcacgagaccgggattgccattagtgtggctgctgtcgcactaggcgctaaggtcctggaaagacacatcacactggataaaacatggaaagggtcagatcactccgcatcactggagccaggggagctcgcagaactggtgcggagcgttcgtcttgtagagcgcgcgctgggatcccccactaagcagttgttatag

SEQ ID NO: 310626 - DNA, 348 bp, Artificial Sequence
  derived and/or modified sequence
gaggatgtgaacctgcgtgtgatatccgaataccagaaactgtttcccgacattcctattggttattccggccacgagaccggaattgccatctccgttgcagcggtggccttaggcgccaaggtgctggaacgtcatatcaccctcgacaagacttggaagggatctgaccattccgcgagtctagaacccggcgagctggcagagctggtgcgaagcgtgaggctggtcgagagggcgctgggctcccccactaagcagctgttgccgtgtgagatggcttgcaatgagaaagtgtgccctgccggactgtacagcgtactcttaccttgcgtcgagaagggatag

SEQ ID NO: 310627 - DNA, 423 bp, Artificial Sequence
  derived and/or modified sequence
atggtgctggtgctggactacagcggccggcccatggtgatcagcagcggcatgcagagcatggacaccatgaagcaggtgtaccagatcgtgaagcccctgaaccccaacttctgcttcctgcagtgcaccagcgcctaccccctgcagccagaagatgtgaacctgcgggtcatcagcgagtaccagaagctgttcccagacatccccatcggctacagcggccacgagaccggcatcgccatctctgtggccgctgtggccctgggcgccaaggtgctggagcggcacatcaccctggacaagacctggaagggcagtgaccacagcgccagcctggagcctggagagctggccgagctggtgcgctctgtgcggctggtggagcgggccctgggcagccccaccaagcagctgctgtag

SEQ ID NO: 310628 - DNA, 348 bp, Artificial Sequence
  derived and/or modified sequence
gaagatgtgaacctgcgggtcatcagcgagtaccagaagctgttcccagacatccccatcggctacagcggccatgaaacaggaattgccatctctgtggccgctgtggccctgggcgccaaggtgctggagcggcacatcaccctggacaagacctggaagggcagtgaccacagcgccagcctggagcccggggagctggccgagctggtgcgctctgtgcggctggtggagcgggccctgggcagccccaccaagcagctgctgccctgtgagatggcctgcaatgagaaggtgtgcccagctggcctgtacagcgtgctgctgccctgtgtggagaagggctag

SEQ ID NO: 310629 - DNA, 715 bp, Artificial Sequence
  derived and/or modified sequence
tttttctacttgtatgttattccttgcctgtcataacaacagtgtttttggacaatggtgaaaaggagctccctctttgatttttgtagatggcagttgaattcctgcatgaactgaatgttccatttttcaaagttggatctggagacactaataattttccttatctggaaaagacagccaaaaaaggggctggcacagtgttttaagagatgtctgtggagttcagttgaatgatgagaccagcagttgggatgtgttggggagagtcagaacctctaaagagaaagtgctgatggtgttggtgctggattactcaggtcgcccaatggtgatctccagtgggatgcagtcaatggacaccatgaagcaagtttatcagatcgtgaagcccctcaaccccaacttctgcttcttgcagtgtaccagcgcatacccgctccagcctgaggacgtcaacctgcgggtcatctcggaatatcagaagctctttcctgacattcccatagggtattctgggcatgaaacaggcatagcgatatctgtggccgcagtggctctgggggccaaggtgttggaacgtcacataactttggacaagacctggaaggggagtgaccactcggcctcgctggagcctggagaactggccgagctggtgcggtcagtgcgtcttgtggagcgtgccctgggctccccaaccaagcagctgctg

SEQ ID NO: 310630 - DNA, 1378 bp, Artificial Sequence
  derived and/or modified sequence
gaggacgtcaacctgcgggtcatctcggaatatcagaagctctttcctgacattcccatagggtattctgggcatgaaacaggcatagcgatatctgtggccgcagtggctctgggggccaaggtgttggaacgtcacataactttggacaagacctggaaggggagtgaccactcggcctcgctggagcctggagaactggccgagctggtgcggtcagtgcgtcttgtggagcgtgccctgggctccccaaccaagcagctgctgccctgtgagatggcctgcaatgagaaggtgtgtcctgccggactctactcggttctgctgccgtgtgtggaaaaaggataggctggcctgagagggatggtcaggaccagccctccctgagccaggctgatgaaatgatcagtgaatgtgctcccacccgtgtcagcttcttcaggcttctcttcagtaatgcatgtcactctggcctgtagcagcagcaggagacacatgttatctaactttagcagtttctctggccacctagggtcacattagagtcttccactaattctctgaagcccatggccccagtactcctagactccagaatatgtaacaggagtgaggccctggaataagtcaagtctgggctcccttggagcaggtaagccctgagaaacatttaggcacggtgttccctgaggtaccagaagagcctgtggcatttcctaagccagggtggcactggtgggaagggcagtgagtcgttgcagaggtgggtgggtgatgatgcagctattccttgtgcaacagtgaccttcagacagaggaactggtgggcctagaagcactgcctggcatgctgactatcagggcttcctggaagccgtggcctggaccttcttgccttctgagtcatagagccaggcaggcatcctggggctgccaggcacacacacacctaacctgtaggctgtcggggtcaaggcaaagaccaaacaccaggcatgcctgggactgttgtcaccttttattctagtggggcctacctgcttccccaaatcaaagatgcatctataccaggaaattaaaataaagtaaaaagaaatagtttctttatagaggaaacaggagagaattagaccagaaaccagagtaagatttataacagctgagcacttaatttggctctctgagcagacagtaaaacataacaggatgcatgattatcacttgacattttttcctggcaccacattccaagcagaattgattccttgtactcttacgtggaggatatagagtaataaaacacgtaatttatttgaaagcatttatagagaagacaaacactggtcatgagcttcaggtacccttcattccctcatct

SEQ ID NO: 310631 - DNA, 423 bp, Artificial Sequence
  derived and/or modified sequence
atggtgctggtgctggactacagcggccggcccatggtgatcagctcaggaatgcagagcatggataccatgaaacaggtttatcagattgtgaagcctctgaatccaaacttctgtttccttcagtgcactagcgcttaccctttgcagcccgaggatgtgaacctaagagtaatctcggagtaccagaagctgtttccagacattcctattggatacagtggacacgaaaccgggatcgcgatcagcgtcgccgccgtcgccctgggggccaaggtgcttgaacgccacatcacactagataaaacttggaaggggtccgatcatagcgccagcctcgagcccggagaactagctgagttggtgcgatcggtccgattggtggagcgtgccctaggaagccccactaagcagttactgtag

SEQ ID NO: 310632 - DNA, 348 bp, Artificial Sequence
  derived and/or modified sequence
gaggacgtgaacctgcgggtgatcagcgagtaccagaagctgttccccgatatccccatcgggtattccggccatgagaccggcattgcaatctcggtggccgctgtagcactgggggctaaggtgctggaaaggcacataaccctggacaaaacttggaagggcagtgaccattcagcaagtcttgaaccgggtgagctggccgaacttgtgcgctctgttcggctcgtagagcgcgccctcggttcccccaccaagcaacttcttccatgtgagatggcgtgtaatgagaaagtgtgtcctgccggcctatattcggtcctgcttccatgcgtggagaagggctag

SEQ ID NO: 310633 - DNA, 423 bp, Artificial Sequence
  derived and/or modified sequence
atggttcttgtgctagattattctgggagacccatggtgatcagtagcggaatgcaaagcatggacactatgaagcaagtgtatcagatcgtgaaaccactgaatcctaacttttgtttcctgcagtgcacctctgcataccctcttcagcccgaggacgtgaacctccgtgtcattagcgaatatcagaagctctttccagatattcccatcgggtactctggccatgaaaccggtatcgccatttccgttgcagcagttgcccttggcgctaaggtgttggagcggcacatcacactggacaagacctggaagggttccgaccatagcgcctcccttgagccgggagagctggctgagctcgtgaggtccgtcagactggttgagcgcgctttgggtagccctactaaacaactcttgtag

SEQ ID NO: 310634 - DNA, 348 bp, Artificial Sequence
  derived and/or modified sequence
gaagacgtgaacctgcgtgttatatcagagtaccaaaagctcttcccagacataccgataggctatagcggccatgagactggcattgccatttctgttgcagcggtggccctgggagcgaaggtgctagaacgccatattaccctggacaagacttggaagggatctgaccatagtgccagccttgagcctggcgagctcgcggaactagtgagaagtgtcagactcgttgaaagagccctgggaagccccacgaagcaactgctgccatgtgagatggcttgtaatgaaaaagtgtgcccggctggtttgtacagtgtactcctgccctgtgttgagaagggatag

SEQ ID NO: 310635 - DNA, 423 bp, Artificial Sequence
  derived and/or modified sequence
atggtgctggtgctggactacagcggcagacccatggtgatcagcagcggcatgcagagcatggacaccatgaagcaggtgtaccagatcgtgaagcccctgaaccccaacttctgcttcctgcagtgcaccagcgcctaccccctgcagcccgaggacgtgaacctgagagtgatcagcgagtaccagaagctgttccccgacatccccatcggctacagcggccacgagaccggcatcgccatcagcgtggccgccgtggccctgggcgccaaggtgctggagagacacatcaccctggacaagacctggaagggcagcgaccacagcgccagcctggagcccggcgagctggccgagctggtgagaagcgtgagactggtggagagagccctgggcagccccaccaagcagctgctgtag

SEQ ID NO: 310636 - DNA, 348 bp, Artificial Sequence
  derived and/or modified sequence
gaggacgtgaacctgagagtgatcagcgagtaccagaagctgttccccgacatccccatcggctacagcggccacgagaccggcatcgccatcagcgtggccgccgtggccctgggcgccaaggtgctggagagacacatcaccctggacaagacctggaagggcagcgaccacagcgccagcctggagcccggcgagctggccgagctggtgagaagcgtgagactggtggagagagccctgggcagccccaccaagcagctgctgccctgcgagatggcctgcaacgagaaggtgtgccccgccggcctgtacagcgtgctgctgccctgcgtggagaagggctag

SEQ ID NO: 310637 - protein, 413 aa, Artificial Sequence
  derived and/or modified sequence
MKVNRETKRLYVGGLSQDISEADLQNQFSRFGEVSDVEIITRKDDQGNPQKVFAYINISVAEADLKKCMSVLNKTKWKGGTLQIQLAKESFLHRLAQEREAAKAKKEESTTGNANLLEKTGGVDFHMKAVPGTEVPGHKNWVVSKFGRVLPVLHLKNQHKRKIIKYDPSKYCHNLKKIGEDFSNTIPISSLTWELEGGNDPMSKKRRGEFSDFHGPPKKIIKVQKDESSTGSLAMSTRPRRVIERPPLTQQQAAQKRTCDSITPSKSSPVPVSDTQKLKNLPFKTSGLETAKKRNSISDDDTDSEDELRMMIAKEENLQRTTQPSINESESDPFEVVRDDFKSGVHKLHSLIGLGIKNRVSCHDSDDDIMRNDREYDSGDTDEIIAMKKNVAKVKNSTEFSQMEKSTKKTSFK

SEQ ID NO: 310638 - protein, 145 aa, Artificial Sequence
  derived and/or modified sequence
MKVNRETKRLYVGGLSQDISEADLQNQFSRFGEVSDVEIITRKDDQGNPQKVFAYINISVAEADLKKCMSVLNKTKWKGGTLQIQLAKESFLHRLAQEREAAKAKKEESTTGNANLLEKTGGVDFHMKAVPGTEVPGHKNWVVSK

SEQ ID NO: 310639 - protein, 86 aa, Artificial Sequence
  derived and/or modified sequence
MKVNRETKRLYVGGLSQDISEADLQNQFSRFGEVSDVEIITRKDDQGNPQKVFAYINISVAEADLKKSIFHVIQRDSSDEENSSIV

SEQ ID NO: 310640 - DNA, 777 bp, Artificial Sequence
  derived and/or modified sequence
atgaaggtcaacagagagactaaaagactctacgttggcggcttgagccaggacattagcgaggcagatctacaaaaccagttttccaggtttggggaggtgagcgatgtggaaattataacccggaaggatgatcaggggaatcctcagaaagtgtttgcttatataaacatttcagtggccgaggcagatctgaagaagtgcatgagcgtcctgaataagactaagtggaaggggggtactctgcagattcagttagcaaaagagagttttttacatagactggcacaagagcgcgaagctgcgaaggccaaaaaagaggagagtactaccggcaacgctaaccttctggagaagactggaggggtggattttcacatgaaggccgtccctggcacagaggtacccggccacaagaattgggtagttagcaagttcggaagggttctgccagtgctccatttgaaaaaccagcacaagagaaagattattaagtatgatccctccaagtattgtcataacttaaagaagattggggaagatttctctaacacaataccgatatcctcactgacgtgggaactcgagggaggcaacgatccgatgtctaaaaaaagaaggggcgaatttagcgacttccatggcccacccaaaaagataatcaaagtgcagaaggatgaatcatcaacaggctctctcgccatgtctacaaggcccagacgcgtcatcgagcgcccccctctgacacagcagcaagccgcccagaaacggacctag

SEQ ID NO: 310641 - DNA, 1242 bp, Artificial Sequence
  derived and/or modified sequence
atgaaagtcaatagggagaccaagcgtctctacgtcggggggttgagtcaggatataagcgaagccgatctgcaaaaccagtttagcaggttcggcgaagtgtctgatgtcgaaattattacacgcaaagacgaccagggaaatccacaaaaagtatttgcgtatattaacatttccgtcgcagaagcagaccttaagaaatgtatgtccgtactgaacaagaccaagtggaagggtggaaccctgcagattcagctggctaaagagtcttttctacatcgtctggcccaagagcgggaggcagccaaagccaagaaagaggagtctacaactggaaacgcaaatctcctggaaaaaacgggaggggtggattttcacatgaaggccgttcctggcaccgaagtaccaggtcacaagaattgggtcgtgagcaaatttggtcgagtgctgcctgtgttgcacttaaaaaatcaacacaagcgtaagatcataaaatacgacccctccaaatactgtcataatctaaagaagattggggaggacttttccaataccatcccaatctccagccttacttgggagctggagggaggcaatgaccccatgtcaaagaagaggcggggcgaattcagcgatttccacggacctcccaagaagatcattaaggtgcagaaggacgagtcatcaacaggatctctggctatgtctactcgacctcgccgcgtaatcgaaagacctccactcacccagcagcaggcagcccagaaacgaacctgtgactctattactccttccaaaagctcacccgttccagtgagtgacacccagaagcttaagaacctcccatttaaaacttcagggcttgagacggcgaagaagcggaacagcattagcgacgatgatacagacagtgaggatgagctacggatgatgatcgccaaggaagagaatctgcagcggacaacacaacctagtataaacgaatcagagtctgacccattcgaggtagttcgggatgactttaagtctggagtgcacaaactccattccctgattggcctggggatcaagaatagagtgtcttgtcatgactcagatgacgatattatgcgtaatgaccgggaatacgattctggcgacaccgacgagataattgccatgaaaaaaaatgttgcaaaagtgaagaatagcacggagttcagccagatggaaaagtcaacgaagaagacatcatttaaatag

SEQ ID NO: 310642 - DNA, 438 bp, Artificial Sequence
  derived and/or modified sequence
atgaaagtgaaccgtgagaccaaacgtctctacgtgggcgggctgtcccaagatatttcagaggcagacttgcaaaatcaattctcaaggtttggcgaggtctccgacgtcgagataatcaccaggaaagatgatcaggggaatccacagaaggtctttgcttatatcaatataagcgtagccgaggcagacttgaagaagtgtatgtcagtgctcaacaagacaaaatggaagggcggaacattacaaattcaactggccaaggaaagctttctgcacagactcgcacaggaaagagaagccgcaaaggccaagaaggaggaaagcactacagggaacgcaaatctgctggagaaaaccgggggagtggacttccatatgaaagcagtaccgggaaccgaggtgcctggtcacaagaactgggtcgtgagcaagtag

SEQ ID NO: 310643 - DNA, 261 bp, Artificial Sequence
  derived and/or modified sequence
atgaaggtcaatcgggagaccaagcgactgtacgtgggagggctgtcccaggatatttctgaggctgatcttcagaatcagttctcccggttcggagaggtgtccgacgtggaaattattactaggaaagacgaccagggcaacccccagaaagtgtttgcctatatcaacatttctgtggccgaggcggatcttaaaaagtcaattttccacgttattcagcgggattcttcggacgaagaaaactcatctattgtctag

SEQ ID NO: 310644 - DNA, 777 bp, Artificial Sequence
  derived and/or modified sequence
atgaaggtgaaccgggagaccaagaggctgtatgtgggcggcctgagccaggacatcagcgaggccgacctgcagaaccagttcagcagatttggagaggtgtctgatgtggagatcatcaccaggaaggatgaccagggcaacccccagaaggtgtttgcctacatcaacatctctgtggccgaggccgacctgaagaagtgcatgtctgtgctgaacaagaccaagtggaagggcggcaccctgcagatccagctggccaaggagagcttcctgcaccggctggcccaggagcgggaggccgccaaggccaagaaggaggagagcaccactggaaatgccaacctgctggagaagacaggaggagtggacttccacatgaaggctgtgcctggaacagaggtgcccggccacaagaactgggtggtgtccaagtttggccgggtgctgcctgtgctgcacctgaagaaccagcacaagaggaagatcatcaagtatgaccccagcaagtactgccacaacctgaagaagatcggggaggacttcagcaacaccatccccatcagcagcctgacctgggagctggagggcggcaatgaccccatgagcaagaagagaagaggagagttcagtgacttccacggcccccccaagaagatcatcaaggtgcagaaggatgagagcagcacaggcagcctggccatgagcacccggccccggcgggtgattgagcggccccccctgacccagcagcaggccgcccagaagaggacatag

SEQ ID NO: 310645 - DNA, 1242 bp, Artificial Sequence
  derived and/or modified sequence
atgaaggtgaaccgggagaccaagaggctgtatgtgggcggcctgagccaggacatcagcgaggccgacctgcagaaccagttcagcagatttggagaggtgtctgatgtggagatcatcaccaggaaggatgaccagggcaacccccagaaggtgtttgcctacatcaacatctctgtggccgaggccgacctgaagaagtgcatgtctgtgctgaacaagaccaagtggaagggcggcaccctgcagatccagctggccaaggagagcttcctgcaccggctggcccaggagcgggaggccgccaaggccaagaaggaggagagcaccactggaaatgccaacctgctggagaagacaggaggagtggacttccacatgaaggctgtgcctggaacagaggtgcccggccacaagaactgggtggtgtccaagtttggccgggtgctgcctgtgctgcacctgaagaaccagcacaagaggaagatcatcaagtatgaccccagcaagtactgccacaacctgaagaagatcggggaggacttcagcaacaccatccccatcagcagcctgacctgggagctggagggcggcaatgaccccatgagcaagaagagaagaggagagttcagtgacttccacggcccccccaagaagatcatcaaggtgcagaaggatgagagcagcacaggcagcctggccatgagcacccggccccggcgggtgattgagcggccccccctgacccagcagcaggccgcccagaagaggacctgtgacagcatcacccccagcaagagcagccctgtgcctgtgtctgacacccagaagctgaagaacctgcccttcaagaccagcggcctggagacagccaagaagaggaacagcatcagtgatgatgacacagacagtgaagatgagctgaggatgatgattgccaaggaggagaacctgcagaggaccacccagcccagcatcaatgaaagtgaaagtgacccctttgaggtggtgagagatgacttcaagtctggagtgcacaagctgcacagcctcatcggcctgggcatcaagaacagagtgtcctgccacgacagtgatgatgacatcatgagaaatgaccgggagtatgacagcggggacacagatgagatcatcgccatgaagaagaatgtggccaaggtgaagaacagcacagagttcagccagatggagaagagcaccaagaagaccagcttcaagtag

SEQ ID NO: 310646 - DNA, 438 bp, Artificial Sequence
  derived and/or modified sequence
atgaaggtgaaccgggagaccaagaggctgtatgtgggcggcctgagccaggacatcagcgaggccgacctgcagaaccagttcagcagatttggagaggtgtctgatgtggagatcatcaccaggaaggatgaccagggcaacccccagaaggtgtttgcctacatcaacatctctgtggccgaggccgacctgaagaagtgcatgtctgtgctgaacaagaccaagtggaagggcggcaccctgcagatccagctggccaaggagagcttcctgcaccggctggcccaggagcgggaggccgccaaggccaagaaggaggagagcaccactggaaatgccaacctgctggagaagacaggaggagtggacttccacatgaaggctgtgcctggaacagaggtgcccggccacaagaactgggtggtgtccaagtag

SEQ ID NO: 310647 - DNA, 261 bp, Artificial Sequence
  derived and/or modified sequence
atgaaggtgaaccgggagaccaagaggctgtatgtgggcggcctgagccaggacatcagcgaggccgacctgcagaaccagttcagcagatttggagaggtgtctgatgtggagatcatcaccaggaaggatgaccagggcaacccccagaaggtgtttgcctacatcaacatctctgtggccgaggccgacctgaagaagagcatcttccacgtgatccagagggacagcagtgatgaggagaacagcagcatcgtgtag

SEQ ID NO: 310648 - DNA, 777 bp, Artificial Sequence
  derived and/or modified sequence
atgaaggtgaaccgggagaccaagcggctgtacgtgggcggcctgagccaggacatctccgaagcagacctgcagaatcagttttctcgcttcggggaagttagcgatgtcgaaattatcacaaggaaggatgaccaggggaacccacaaaaggtcttcgcatacataaatatctccgtcgcagaggccgaccttaaaaaatgtatgagcgtgctgaataagaccaagtggaagggagggactctccagattcagctggccaaagagtcttttctccaccgattggcccaggagagggaagctgccaaagccaaaaaggaagaatctacaacaggcaatgctaacttgctggaaaagacaggtggcgtggatttccatatgaaggccgtgccaggaaccgaagtccctggccacaagaactgggtggtaagcaagttcgggcgggtcctccccgtgctccacctcaagaaccagcataagaggaagatcataaagtatgaccccagcaagtactgtcacaacttaaaaaagataggggaggacttctccaacaccatccctattagttctttgacatgggagctggaaggcgggaacgaccccatgtcgaaaaaacggcgcggcgaattttcagacttccatgggccaccaaaaaaaataatcaaagtgcagaaagacgagagcagcactggaagcctggcaatgtcgacgaggccaagacgggttattgaaagaccccccctgacccaacagcaagctgctcaaaagcgtacttag

SEQ ID NO: 310649 - DNA, 1242 bp, Artificial Sequence
  derived and/or modified sequence
atgaaggtgaaccgggagaccaagcggctgtacgtgggcggcctgtcacaagacatttctgaggccgatctacagaaccagtttagcagattcggtgaagtgtcagatgtggaaataatcacccgaaaggatgatcaggggaatccgcaaaaagtgttcgcttatatcaacatatctgtagccgaagctgacctgaagaaatgtatgtctgtgttaaacaagactaaatggaaaggcgggacccttcaaattcagcttgccaaagaatcattcctgcaccgcctggcacaagagagagaagccgcaaaagctaagaaggaagagagcacgaccggcaacgccaatctgctcgagaaaacaggaggggttgacttccacatgaaagccgtgccagggactgaagtaccaggccacaaaaattgggttgtaagcaaatttgggcgggtgttgcccgtgctgcacctgaagaaccagcacaagaggaagattatcaagtacgaccctagtaagtactgtcacaacctcaagaaaatcggcgaggacttctctaacacaattcctataagctccctcacttgggaattagaggggggcaacgaccccatgagcaaaaagcgaaggggggagttctcagacttccatgggcctcccaagaaaatcatcaaagtgcagaaagacgagagctctactgggtctcttgccatgagcacccgccctcgccgggttattgagaggccaccacttacccagcagcaagccgcgcagaagaggacatgtgattctatcacacccagcaaatcgagccccgttcccgtcagcgatactcagaagctgaaaaacctaccctttaagactagtgggctcgagactgccaagaagcggaatagcattagcgacgacgacaccgactcagaagatgaattgcgcatgatgattgctaaagaagaaaatcttcaacgcacgacgcagccatccattaatgaatctgagtctgatccattcgaggtggtccgggacgacttcaagtccggcgtacacaaactgcacagcctcattggacttggaatcaagaatagggtttcgtgtcatgattcagacgacgatatcatgaggaacgaccgagaatacgacagcggcgacacagacgagatcatagccatgaaaaagaacgttgccaaggtaaaaaacagtactgaatttagccagatggaaaagagcaccaaaaagacatcgtttaagtag

SEQ ID NO: 310650 - DNA, 438 bp, Artificial Sequence
  derived and/or modified sequence
atgaaggtgaaccgggagaccaagcggctgtacgtgggcggcctgagccaggacatatccgaggcagacctgcagaatcagttttccagattcggggaagtttccgatgtcgagatcatcacccgcaaggatgaccaggggaatccgcagaaagtgttcgcatatattaacatcagcgtggccgaggctgatctaaagaagtgtatgtctgtgctcaataaaacaaaatggaagggtggtacgctgcaaattcagttggccaaggagtcttttttgcaccgattagctcaggaaagggaagcggccaaggctaaaaaagaggagtcgacgacagggaacgccaatctgctggagaagacgggcggcgtagacttccatatgaaggccgtgccaggtacggaggtgccagggcataagaattgggtagtttctaagtag

SEQ ID NO: 310651 - DNA, 261 bp, Artificial Sequence
  derived and/or modified sequence
atgaaggtgaaccgggagaccaagcggctgtacgtgggcggcctgagccaggacattagtgaggcagacttgcagaaccaattctcaaggttcggagaggtgtccgacgtagagatcattactcggaaggacgaccagggcaacccgcagaaggtttttgcatatatcaatattagcgtggcagaggctgatctaaaaaagagcatttttcatgtcattcagcgggattcaagtgacgaagagaacagttctattgtgtag

SEQ ID NO: 310652 - DNA, 1098 bp, Artificial Sequence
  derived and/or modified sequence
cttacgccgacctagtccaggaattggtacacacagcgatagtgttcaatagaaactaggggattttggtttaggctcttttgcagtcgttgagggggaggtgacggaggcgtcagggaaggtgggaggacggaaaaggaaattaaaagctcttgggaactgaattgtggtaacggaaccttaggaggctgggttggaaatcgagtaggaaggaagagaggatgctccgttgggacacgtgaccagaagttaggggctgcagcggcgctggctttagaaaattacttttcccactgaaacacacccaagtatatgcccagccttcatgaaagtgaacagagaaacgaagcgcctttatgtgggtggccttagccaggacatttctgaggcagacctacaaaatcagttcagcagatttggagaagtttcggatgtggagatcatcacacggaaagatgaccaaggaaacccacagaaagtttttgcatatatcaacatcagtgtagcagaagcggacctgaaaaaatgtatgtctgttttaaataaaacaaaatggaaaggtggaacattacaaattcaactagcaaaagaaagctttctgcacagattggcccaagagagagaagcagcaaaagctaagaaagaagaatcaacaacaggtaacgccaacttgttagaaaagacaggaggagtggatttccatatgaaagctgtgccagggacagaagtgccagggcataagaattgggttgtgagcaaatttggaagagtcttacctgttcttcaccttaaaaatcaacataaacgtaaaatcatcaaatatgatccctcaaaatactgccacaacctgaagaagataggggaggatttctcaaacaccattcctatatccagcctgacttgggaattagaaggagggaatgaccctatgagtaagaaacggcgaggagagttctctgactttcatggccctcccaagaagataataaaagtgcagaaggatgagagttccactgggtctctggccatgagtacaaggcccaggagggtaatagagagaccacccttaacacagcaacaggctgcacaaaaaagaac

SEQ ID NO: 310653 - DNA, 1396 bp, Artificial Sequence
  derived and/or modified sequence
ctccgttgggacacgtgaccagaagttaggggctgcagcggcgctggctttaggtgaacgacgtgattttagaagaactaagggaaagaactcttctctgtatacagaaaattacttttcccactgaaacacacccaagtatatgcccagccttcatgaaagtgaacagagaaacgaagcgcctttatgtgggtggccttagccaggacatttctgaggcagacctacaaaatcagttcagcagatttggagaagtttcggatgtggagatcatcacacggaaagatgaccaaggaaacccacagaaagtttttgcatatatcaacatcagtgtagcagaagcggacctgaaaaaatgtatgtctgttttaaataaaacaaaatggaaaggtggaacattacaaattcaactagcaaaagaaagctttctgcacagattggcccaagagagagaagcagcaaaagctaagaaagaagaatcaacaacaggtaacgccaacttgttagaaaagacaggaggagtggatttccatatgaaagctgtgccagggacagaagtgccagggcataagaattgggttgtgagcaaatttggaagagtcttacctgttcttcaccttaaaaatcaacataaacgtaaaatcatcaaatatgatccctcaaaatactgccacaacctgaagaagataggggaggatttctcaaacaccattcctatatccagcctgacttgggaattagaaggagggaatgaccctatgagtaagaaacggcgaggagagttctctgactttcatggccctcccaagaagataataaaagtgcagaaggatgagagttccactgggtctctggccatgagtacaaggcccaggagggtaatagagagaccacccttaacacagcaacaggctgcacaaaaaagaacttgtgattccattactccttctaaatcatctcctgtacctgtttctgatactcagaaacttaaaaatctaccttttaagacttctggcttggaaactgccaagaagagaaacagcatttctgatgatgatactgattctgaagatgaattgagaatgatgattgcgaaagaggaaaacttacagagaactacacaaccctcaataaatgaatctgaaagtgatccttttgaagttgtaagggatgatttcaaatcaggcgttcacaaactgcattctttaataggtttaggtatcaaaaatcgtgtctcttgccatgatagtgatgatgatattatgagaaatgatcgtgagtatgactcaggagatacagatgaaattattgcgatgaaaaaaaatgttgctaaggtcaaaaacagtacagaattttcacaaatggaaaaatctacgaagaaaacttctttcaaaaa

SEQ ID NO: 310654 - DNA, 551 bp, Artificial Sequence
  derived and/or modified sequence
gtggaggggagcgcctctttatttttttcacctacttcctctcttacgccgacctagtccaggaattgaaaattacttttcccactgaaacacacccaagtatatgcccagccttcatgaaagtgaacagagaaacgaagcgcctttatgtgggtggccttagccaggacatttctgaggcagacctacaaaatcagttcagcagatttggagaagtttcggatgtggagatcatcacacggaaagatgaccaaggaaacccacagaaagtttttgcatatatcaacatcagtgtagcagaagcggacctgaaaaaatgtatgtctgttttaaataaaacaaaatggaaaggtggaacattacaaattcaactagcaaaagaaagctttctgcacagattggcccaagagagagaagcagcaaaagctaagaaagaagaatcaacaacaggtaacgccaacttgttagaaaagacaggaggagtggatttccatatgaaagctgtgccagggacagaagtgccagggcataagaattgggttgtgagcaaa

SEQ ID NO: 310655 - DNA, 777 bp, Artificial Sequence
  derived and/or modified sequence
atgaaggtaaaccgcgaaaccaaacgtctgtacgtcggtggcttgtcacaagacatttctgaggctgacttgcagaaccagtttagccgattcggcgaggtgtccgacgtcgaaattattaccagaaaggatgatcaaggaaacccccagaaagtttttgcttacattaatatttctgtggcggaggctgacctgaaaaaatgcatgagtgtactgaacaagaccaaatggaagggcggtaccctgcagatccagttggccaaggagtcattcctgcatagactggcccaggaaagggaagcagccaaggcaaagaaggaagagagcacgactggcaacgctaatctgctggaaaaaaccgggggagttgactttcacatgaaggctgtgccaggaactgaggtccccggacacaaaaattgggttgtatccaagtttgggagagtgctgcctgtcctgcacctgaagaaccaacataaaaggaagattattaaatatgatccctccaaatactgccacaacttgaagaagatcggcgaggatttcagcaacactatcccaattagtagcctgacatgggagttggaagggggtaacgatccaatgagtaaaaagaggcggggtgagttcagcgacttccatggtcctcctaagaagatcatcaaggtgcaaaaggacgaatcaagtactggtagcctggcaatgagtaccagacctcgtcgcgtgatcgagagaccaccactgacccagcagcaggccgcacagaagcggacatag

SEQ ID NO: 310656 - DNA, 1242 bp, Artificial Sequence
  derived and/or modified sequence
atgaaagttaatcgggaaacaaagcggctctacgttggcggactgtcacaagacataagcgaggctgatctgcaaaaccagttctcccgctttggcgaagtgagcgacgtggaaatcatcacaaggaaggacgaccagggaaatcctcagaaggtgttcgcttacataaatatcagtgtcgcagaggcagacctcaagaaatgtatgtccgtgctgaacaagacaaaatggaaagggggaaccctccagattcagttggccaaggaatcgtttttgcatagactagcccaggaaagagaggccgctaaagccaagaaagaagaaagtactactggcaacgccaatctgctggagaagacaggcggagttgattttcatatgaaggcggtgccgggtacagaagttcctggccacaaaaattgggtggtcagtaagtttggcagggtgctcccagtcctgcatctgaagaaccagcacaaacgtaaaatcatcaaatatgaccctagtaagtattgccacaacctgaagaaaatcggggaagattttagcaatacgatccctataagctctctgacttgggaacttgagggcggtaatgatcccatgagtaaaaaaagacggggagagttctctgattttcatgggccaccaaagaagattatcaaggtacagaaggacgagagctctacaggctctctggcaatgagtacacgaccccgaagggttatagagagacctccactgacccaacagcaggccgctcagaaacggacttgtgacagcatcaccccatcgaagagttcacctgtccctgtgtctgatacacagaagctgaaaaatctccccttcaaaacaagtgggctggagaccgccaagaagaggaattcaatatcagatgacgatacagactcagaggatgagctccgcatgatgattgctaaagaggagaatctgcagcgtactacgcagccgtctatcaacgaatcagaaagcgatccgttcgaagtggtacgggacgacttcaagtccggggtacacaaactacatagcctgataggattgggcattaagaaccgggtgtcttgtcatgatagtgatgatgatatcatgagaaatgatcgagaatacgactccggggacacggacgaaatcatagcaatgaaaaagaacgtcgcaaaggtgaagaatagcacggaattttcccagatggagaaatccaccaaaaaaacctcgtttaagtag

SEQ ID NO: 310657 - DNA, 438 bp, Artificial Sequence
  derived and/or modified sequence
atgaaggttaatcgcgagaccaaaaggctgtacgtcggtgggctgagtcaggatatcagcgaagctgacttgcagaaccagtttagccgctttggtgaggtttctgatgtagagattattacccggaaagacgaccagggcaacccgcagaaggtcttcgcctatattaatatctctgtggcagaagccgatcttaaaaaatgtatgtccgtgctgaacaagacaaagtggaaaggagggaccctgcagattcagctggccaaggagtcattcttacatcgcctggcccaggagcgggaagccgcaaaggcgaagaaggaagaatccacaacagggaacgccaatctcctcgaaaaaaccggaggggtggattttcacatgaaggcagtaccaggtacagaagttcctggtcacaagaattgggtcgttagcaaatag

SEQ ID NO: 310658 - DNA, 261 bp, Artificial Sequence
  derived and/or modified sequence
atgaaagtgaaccgggagaccaagaggctgtacgttggcggactttctcaagatatctcagaggcggatttgcagaatcagttctctaggttcggggaggtcagtgacgtcgaaatcatcactagaaaagacgaccagggtaaccctcagaaagtgttcgcctacatcaatatcagcgtggctgaggctgaccttaaaaaatcaatcttccatgtgatccaaagggattcaagcgacgaggagaacagctccattgtttag

SEQ ID NO: 310659 - DNA, 777 bp, Artificial Sequence
  derived and/or modified sequence
atgaaggtgaacagagagaccaagagactgtacgtgggcggcctgagccaggacatcagcgaggccgacctgcagaaccagttcagcagattcggcgaggtgagcgacgtggagatcatcaccagaaaggacgaccagggcaacccccagaaggtgttcgcctacatcaacatcagcgtggccgaggccgacctgaagaagtgcatgagcgtgctgaacaagaccaagtggaagggcggcaccctgcagatccagctggccaaggagagcttcctgcacagactggcccaggagagagaggccgccaaggccaagaaggaggagagcaccaccggcaacgccaacctgctggagaagaccggcggcgtggacttccacatgaaggccgtgcccggcaccgaggtgcccggccacaagaactgggtggtgagcaagttcggcagagtgctgcccgtgctgcacctgaagaaccagcacaagagaaagatcatcaagtacgaccccagcaagtactgccacaacctgaagaagatcggcgaggacttcagcaacaccatccccatcagcagcctgacctgggagctggagggcggcaacgaccccatgagcaagaagagaagaggcgagttcagcgacttccacggcccccccaagaagatcatcaaggtgcagaaggacgagagcagcaccggcagcctggccatgagcaccagacccagaagagtgatcgagagaccccccctgacccagcagcaggccgcccagaagagaacctag

SEQ ID NO: 310660 - DNA, 1242 bp, Artificial Sequence
  derived and/or modified sequence
atgaaggtgaacagagagaccaagagactgtacgtgggcggcctgagccaggacatcagcgaggccgacctgcagaaccagttcagcagattcggcgaggtgagcgacgtggagatcatcaccagaaaggacgaccagggcaacccccagaaggtgttcgcctacatcaacatcagcgtggccgaggccgacctgaagaagtgcatgagcgtgctgaacaagaccaagtggaagggcggcaccctgcagatccagctggccaaggagagcttcctgcacagactggcccaggagagagaggccgccaaggccaagaaggaggagagcaccaccggcaacgccaacctgctggagaagaccggcggcgtggacttccacatgaaggccgtgcccggcaccgaggtgcccggccacaagaactgggtggtgagcaagttcggcagagtgctgcccgtgctgcacctgaagaaccagcacaagagaaagatcatcaagtacgaccccagcaagtactgccacaacctgaagaagatcggcgaggacttcagcaacaccatccccatcagcagcctgacctgggagctggagggcggcaacgaccccatgagcaagaagagaagaggcgagttcagcgacttccacggcccccccaagaagatcatcaaggtgcagaaggacgagagcagcaccggcagcctggccatgagcaccagacccagaagagtgatcgagagaccccccctgacccagcagcaggccgcccagaagagaacctgcgacagcatcacccccagcaagagcagccccgtgcccgtgagcgacacccagaagctgaagaacctgcccttcaagaccagcggcctggagaccgccaagaagagaaacagcatcagcgacgacgacaccgacagcgaggacgagctgagaatgatgatcgccaaggaggagaacctgcagagaaccacccagcccagcatcaacgagagcgagagcgaccccttcgaggtggtgagagacgacttcaagagcggcgtgcacaagctgcacagcctgatcggcctgggcatcaagaacagagtgagctgccacgacagcgacgacgacatcatgagaaacgacagagagtacgacagcggcgacaccgacgagatcatcgccatgaagaagaacgtggccaaggtgaagaacagcaccgagttcagccagatggagaagagcaccaagaagaccagcttcaagtag

SEQ ID NO: 310661 - DNA, 438 bp, Artificial Sequence
  derived and/or modified sequence
atgaaggtgaacagagagaccaagagactgtacgtgggcggcctgagccaggacatcagcgaggccgacctgcagaaccagttcagcagattcggcgaggtgagcgacgtggagatcatcaccagaaaggacgaccagggcaacccccagaaggtgttcgcctacatcaacatcagcgtggccgaggccgacctgaagaagtgcatgagcgtgctgaacaagaccaagtggaagggcggcaccctgcagatccagctggccaaggagagcttcctgcacagactggcccaggagagagaggccgccaaggccaagaaggaggagagcaccaccggcaacgccaacctgctggagaagaccggcggcgtggacttccacatgaaggccgtgcccggcaccgaggtgcccggccacaagaactgggtggtgagcaagtag

SEQ ID NO: 310662 - DNA, 261 bp, Artificial Sequence
  derived and/or modified sequence
atgaaggtgaacagagagaccaagagactgtacgtgggcggcctgagccaggacatcagcgaggccgacctgcagaaccagttcagcagattcggcgaggtgagcgacgtggagatcatcaccagaaaggacgaccagggcaacccccagaaggtgttcgcctacatcaacatcagcgtggccgaggccgacctgaagaagagcatcttccacgtgatccagagagacagcagcgacgaggagaacagcagcatcgtgtag

SEQ ID NO: 310663 - protein, 81 aa, Artificial Sequence
  derived and/or modified sequence
  misc_feature (1)..(1): Xaa can be any naturally occurring amino acid
XWIVMIAIGWARGAGGTIITNFERLVKGDWKPEGDEWLKMSYPAKVTLLGSVIFTFQHTQHLAISKHNLMFLYTIFIVATK

SEQ ID NO: 310664 - DNA, 246 bp, Artificial Sequence
  derived and/or modified sequence
tgatggatcgtgatgatcgccatcggctgggccagaggcgccggcggcaccatcatcaccaacttcgagagactggtgaagggcgactggaagcccgagggcgacgagtggctgaagatgagctaccccgccaaggtgaccctgctgggcagcgtgatcttcaccttccagcacacccagcacctggccatcagcaagcacaacctgatgttcctgtacaccatcttcatcgtggccaccaagtag

SEQ ID NO: 310665 - DNA, 246 bp, Artificial Sequence
  derived and/or modified sequence
taatggattgtgatgatagcaataggctgggcccggggtgcaggaggtacaataatcacaaacttcgaaaggctcgtcaaaggggactggaaacccgagggcgacgagtggctcaagatgtcctaccccgccaaggtgaccctgctcgggagcgtgatttttacatttcaacacacccaacacctggcgatcagtaagcacaacctgatgtttctatacactatcttcatagtggccaccaagtag

SEQ ID NO: 310666 - DNA, 246 bp, Artificial Sequence
  derived and/or modified sequence
tgatggatcgtgatgattgccatcggctgggcccggggggccggcggcaccatcatcaccaactttgagcggctggtgaagggggactggaagccagaaggagatgagtggctgaagatgagctacccagccaaggtgaccctgctgggcagcgtcatcttcaccttccagcacacccagcacctggccatcagcaagcacaacctgatgttcctgtacaccatcttcatcgtggccaccaagtag

SEQ ID NO: 310667 - DNA, 246 bp, Artificial Sequence
  derived and/or modified sequence
tgatggatcgtgatgatcgccatcggctgggcccggggcgccggcggaacaataatcaccaattttgagcgcctggtgaaaggagattggaagccagaaggagacgaatggctcaaaatgtcttacccagccaaggtgacattattaggcagcgttattttcaccttccaacacacacaacatctggccatctccaaacacaatttgatgttcctgtacacgatttttattgtggccactaaatag

SEQ ID NO: 310668 - DNA, 246 bp, Artificial Sequence
  derived and/or modified sequence
taatggatcgtcatgatagccatcggatgggctcggggtgccggtggcactattattacgaacttcgaaagactcgtcaaaggggattggaagccagaaggggacgaatggcttaagatgagctacccggctaaggtgaccctgctggggagtgtgatttttacattccaacatacacagcacctggccatatcaaagcataatctgatgtttctatataccatctttatcgtagctactaaatag

SEQ ID NO: 310669 - protein, 263 aa, Artificial Sequence
  derived and/or modified sequence
MGKWKRSQAYADYIGFILTLNEGVKGKKLTFEYRVSEAIEKLVALLNTLDRWIDETPPVDQPSRFGNKAYRTWYAKLDEEAENLVATVVPTHLAAAVPEVAVYLKESVGNSTRIDYGTGHEAAFAAFLCCLCKIGVLRVDDQIAIVFKVFNRYLEVMRKLQKTYRMEPAGSQGVWGLDDFQFLPFIWGSSQLIDHPYLEPRHFVDEKAVNENHKDYMFLECILFITEMKTGPFAEHSNQLWNISAVPSWSKVNQGLIRMYKAE

SEQ ID NO: 310670 - protein, 151 aa, Artificial Sequence
  derived and/or modified sequence
MKTGPFAEHSNQLWNISAVPSWSKVNQGLIRMYKAEVSGGWPVCPSLLPHLVLGWGQSKRCGTWGSCFLLPHCFALNLRPAPLTLGASESPIWGMGSQRSTSHPSPEKLQSSSVLMSLEAEARTCCMGSGGDGGLPSPLSSGQRLLKARAV

SEQ ID NO: 310671 - DNA, 2737 bp, Artificial Sequence
  derived and/or modified sequence
gcactgacatggccgtcgcccggttccgcgcgtccgccgcgcgccggccgttaataggcttgctccctgagcgccccgcaccgacatggcggccgtcttcgctgtggtgactttaactctcggttttcggttatagccggccggcgctcacttgtcttcaggaagctcggagcctttggtggagccggggagaggaagggtgggtgcaagagtgaaaggcgagaggggactgcaagcatccgggtcggctcctggccggagcaagatggctgagggcgagcggcagccgccgccagattcttcagaggaggcccctccagccactcagaacttcatcattccaaaaaaggagatccacacagttccagacatgggcaaatggaagcgttctcaggtaccatttggaactgtggcatacgctgactacatcggattcatccttaccctcaacgaaggtgtgaaggggaagaagctgaccttcgagtacagagtctccgaggccattgagaaactagtcgctcttctcaacacgctggacaggtggattgatgagactcctccagtggaccagccctctcggtttgggaataaggcatacaggacctggtatgccaaacttgatgaggaagcagaaaacttggtggccacagtggtccctacccatctggcagctgctgtgcctgaggtggctgtttacctaaaggagtcagtggggaactccacgcgcattgactacggcacagggcatgaggcagccttcgctgctttcctctgctgtctctgcaagattggggtgctccgggtggatgaccaaatagctattgtcttcaaggtgttcaatcggtaccttgaggttatgcggaaactccagaaaacatacaggatggagccagccggcagccagggagtgtggggtctggatgacttccagtttctgcccttcatctggggcagttcgcagctgatagaccacccatacctggagcccagacactttgtggatgagaaggccgtgaatgagaaccacaaggactacatgttcctggagtgtatcctgtttattaccgagatgaagactggcccatttgcagagcactccaaccagctgtggaacatcagcgccgtcccttcctggtccaaagtgaaccagggtctcatccgcatgtataaggccgagtgcctggagaagttccctgtgatccagcacttcaagttcgggagcctgctgcccatccatcctgtcacgtcgggctaggaggggccaagccgaagagccacccaggccacagttcctgtgcctgccttccccaccccagcagtggcccctccccatcccctccctctgttcgtcccgtttgatgagaggctgtttactggggtggggtggcgagatgggcttgagggggctcagagcataaggcttcagggcccaagttgggagaagtgaccaaagtgtagccagttttctgagttcccgtgtgctagactggccagaagagagggtctggggcctggtcactcggccactctctcctgtttctggcctcttctcccttcactcccgtccagtctggttttgagagcaggggctgttctgcagcaccgcagggaagggaggagagatacctgctgcttccattgcttttcccttcctggagtcgatgcctttctaagggttggagctgctccttgcaggggcgggtcagtttcccaggccatgccggggtggccatctatggtagggctggaagctgaggctggccgccagctgtgggctggggtggggtgggtggggtcgggtggtggagaggccttagctgtcctggctggtgcccctcccaggctccttttcaccctgccccctgggcctgaggccccctgtgtccaagcctccccctggctcttcagttctctagcccttggctctgctgggtttcctgactgtagccacatctctcccgctccctaagggtaacctagccaatggaagctgccctttgggtaggtgctgggctcctgggagggcccagatgatggggtgaggcatgtctttccagaactttccctggcagggaggggatggcagaaactcagggaggggcttggggcccattgtatctggagagcctggattcctcttggcagtcttaggcccggccacttctgctacctttgcgctgctgtgagcctcaccctgggcccctgggccctgcttctctgctcccctgggtgatgggtgggcccagaaggtggcagtcccacaccttgtcctcccacctccctgaactgtccattgcttttatagggtgaggtaagagacagcctcccaagcccaggctttggcactcagaatgggcccagtgggggctgggcaggcccattgagggccaccgccgaggtttctcctagggctgttcctgggcctggctcttacaggctcgtcccccaggcctgcccttctccactgccccctcctgtgtctgggtccacacacccttcaggaagggggagcactgagaagcacagcacaggggctcagcctgggatccggtgatggtctgggcagaggctgggtcaggagtcccaaaggtcagtgacagtttctcagaagaggcccagcgtccacctctctcccagggccagacagcccttcctggctcccccatccccctatgggctcccagccccttgcaccctcattgctgttcagattaaagcctctgttttgcacctgtca

SEQ ID NO: 310672 - DNA, 2664 bp, Artificial Sequence
  derived and/or modified sequence
attgagacctgtggaggaggaaggaggaggtcaccgtccagctgtctctcccctgtccccacatgtcttctaagctgttggagccggccggcgctcacttgtcttcaggaagctcggagcctttggtggagccggggagaggaagggtgggtgcaagagtgaaaggcgagaggggactgcaagcatccgggtcggctcctggccggagcaagatggctgagggcgagcggcagccgccgccagattcttcagaggaggcccctccagccactcagaacttcatcattccaaaaaaggagatccacacagttccagacatgggcaaatggaagcgttctcaggcatacgctgactacatcggattcatccttaccctcaacgaaggtgtgaaggggaagaagctgaccttcgagtacagagtctccgaggccattgagaaactagtcgctcttctcaacacgctggacaggtggattgatgagactcctccagtggaccagccctctcggtttgggaataaggcatacaggacctggtatgccaaacttgatgaggaagcagaaaacttggtggccacagtggtccctacccatctggcagctgctgtgcctgaggtggctgtttacctaaaggagtcagtggggaactccacgcgcattgactacggcacagggcatgaggcagccttcgctgctttcctctgctgtctctgcaagattggggtgctccgggtggatgaccaaatagctattgtcttcaaggtgttcaatcggtaccttgaggttatgcggaaactccagaaaacatacaggatggagccagccggcagccagggagtgtggggtctggatgacttccagtttctgcccttcatctggggcagttcgcagctgatagaccacccatacctggagcccagacactttgtggatgagaaggccgtgaatgagaaccacaaggactacatgttcctggagtgtatcctgtttattaccgagatgaagactggcccatttgcagagcactccaaccagctgtggaacatcagcgccgtcccttcctggtccaaagtgaaccagggtctcatccgcatgtataaggccgagtgcctggagaagttccctgtgatccagcacttcaagttcgggagcctgctgcccatccatcctgtcacgtcgggctaggaggggccaagccgaagagccacccaggccacagttcctgtgcctgccttccccaccccagcagtggcccctccccatcccctccctctgttcgtcccgtttgatgagaggctgtttactggggtggggtggcgagatgggcttgagggggctcagagcataaggcttcagggcccaagttgggagaagtgaccaaagtgtagccagttttctgagttcccgtgtgctagactggccagaagagagggtctggggcctggtcactcggccactctctcctgtttctggcctcttctcccttcactcccgtccagtctggttttgagagcaggggctgttctgcagcaccgcagggaagggaggagagatacctgctgcttccattgcttttcccttcctggagtcgatgcctttctaagggttggagctgctccttgcaggggcgggtcagtttcccaggccatgccggggtggccatctatggtagggctggaagctgaggctggccgccagctgtgggctggggtggggtgggtggggtcgggtggtggagaggccttagctgtcctggctggtgcccctcccaggctccttttcaccctgccccctgggcctgaggccccctgtgtccaagcctccccctggctcttcagttctctagcccttggctctgctgggtttcctgactgtagccacatctctcccgctccctaagggtaacctagccaatggaagctgccctttgggtaggtgctgggctcctgggagggcccagatgatggggtgaggcatgtctttccagaactttccctggcagggaggggatggcagaaactcagggaggggcttggggcccattgtatctggagagcctggattcctcttggcagtcttaggcccggccacttctgctacctttgcgctgctgtgagcctcaccctgggcccctgggccctgcttctctgctcccctgggtgatgggtgggcccagaaggtggcagtcccacaccttgtcctcccacctccctgaactgtccattgcttttatagggtgaggtaagagacagcctcccaagcccaggctttggcactcagaatgggcccagtgggggctgggcaggcccattgagggccaccgccgaggtttctcctagggctgttcctgggcctggctcttacaggctcgtcccccaggcctgcccttctccactgccccctcctgtgtctgggtccacacacccttcaggaagggggagcactgagaagcacagcacaggggctcagcctgggatccggtgatggtctgggcagaggctgggtcaggagtcccaaaggtcagtgacagtttctcagaagaggcccagcgtccacctctctcccagggccagacagcccttcctggctcccccatccccctatgggctcccagccccttgcaccctcattgctgttcagattaaagcctctgttttgcacctgt

SEQ ID NO: 310673 - DNA, 2737 bp, Artificial Sequence
  derived and/or modified sequence
atgcgccccgcgcgccccgcactgacatggccgtcgcccggttccgcgcgtccgccgcgcgccggccgttaataggcttgctccctgagcgccccgcaccgacatggcggccgtcttcgctgtggtgactttaactctcggttttcggttatagccggccggcgctcacttgtcttcaggaagctcggagcctttggtggagccggggagaggaagggtgggtgcaagagtgaaaggcgagaggggactgcaagcatccgggtcggctcctggccggagcaagatggctgagggcgagcggcagccgccgccagattcttcagaggaggcccctccagccactcagaacttcatcattccaaaaaaggagatccacacagttccagacatgggcaaatggaagcgttctcaggcatacgctgactacatcggattcatccttaccctcaacgaaggtgtgaaggggaagaagctgaccttcgagtacagagtctccgaggccattgagaaactagtcgctcttctcaacacgctggacaggtggattgatgagactcctccagtggaccagccctctcggtttgggaataaggcatacaggacctggtatgccaaacttgatgaggaagcagaaaacttggtggccacagtggtccctacccatctggcagctgctgtgcctgaggtggctgtttacctaaaggagtcagtggggaactccacgcgcattgactacggcacagggcatgaggcagccttcgctgctttcctctgctgtctctgcaagattggggtgctccgggtggatgaccaaatagctattgtcttcaaggtgttcaatcggtaccttgaggttatgcggaaactccagaaaacatacaggatggagccagccggcagccagggagtgtggggtctggatgacttccagtttctgcccttcatctggggcagttcgcagctgatagaccacccatacctggagcccagacactttgtggatgagaaggccgtgaatgagaaccacaaggactacatgttcctggagtgtatcctgtttattaccgagatgaagactggcccatttgcagagcactccaaccagctgtggaacatcagcgccgtcccttcctggtccaaagtgaaccagggtctcatccgcatgtataaggccgagtgcctggagaagttccctgtgatccagcacttcaagttcgggagcctgctgcccatccatcctgtcacgtcgggctaggaggggccaagccgaagagccacccaggccacagttcctgtgcctgccttccccaccccagcagtggcccctccccatcccctccctctgttcgtcccgtttgatgagaggctgtttactggggtggggtggcgagatgggcttgagggggctcagagcataaggcttcagggcccaagttgggagaagtgaccaaagtgtagccagttttctgagttcccgtgtgctagactggccagaagagagggtctggggcctggtcactcggccactctctcctgtttctggcctcttctcccttcactcccgtccagtctggttttgagagcaggggctgttctgcagcaccgcagggaagggaggagagatacctgctgcttccattgcttttcccttcctggagtcgatgcctttctaagggttggagctgctccttgcaggggcgggtcagtttcccaggccatgccggggtggccatctatggtagggctggaagctgaggctggccgccagctgtgggctggggtggggtgggtggggtcgggtggtggagaggccttagctgtcctggctggtgcccctcccaggctccttttcaccctgccccctgggcctgaggccccctgtgtccaagcctccccctggctcttcagttctctagcccttggctctgctgggtttcctgactgtagccacatctctcccgctccctaagggtaacctagccaatggaagctgccctttgggtaggtgctgggctcctgggagggcccagatgatggggtgaggcatgtctttccagaactttccctggcagggaggggatggcagaaactcagggaggggcttggggcccattgtatctggagagcctggattcctcttggcagtcttaggcccggccacttctgctacctttgcgctgctgtgagcctcaccctgggcccctgggccctgcttctctgctcccctgggtgatgggtgggcccagaaggtggcagtcccacaccttgtcctcccacctccctgaactgtccattgcttttatagggtgaggtaagagacagcctcccaagcccaggctttggcactcagaatgggcccagtgggggctgggcaggcccattgagggccaccgccgaggtttctcctagggctgttcctgggcctggctcttacaggctcgtcccccaggcctgcccttctccactgccccctcctgtgtctgggtccacacacccttcaggaagggggagcactgagaagcacagcacaggggctcagcctgggatccggtgatggtctgggcagaggctgggtcaggagtcccaaaggtcagtgacagtttctcagaagaggcccagcgtccacctctctcccagggccagacagcccttcctggctcccccatccccctatgggctcccagccccttgcaccctcattgctgttcagattaaagcctctgttttgcacctgtca

SEQ ID NO: 310674 - DNA, 456 bp, Artificial Sequence
  derived and/or modified sequence
atgaagaccggcccatttgccgaacacagcaaccaattgtggaatatctcagccgtcccctcctggagcaaagtgaaccaggggttaatcagaatgtataaagctgaagtgagcggcggctggcccgtatgcccttctctactgccccacctggtgctgggttgggggcagtcgaaaagatgtggcacttggggctcctgctttttgctccctcactgctttgccttaaatcttcgacccgctcctctaaccctgggcgcatcagaatcgcccatttggggcatgggtagccaacgaagcactagccacccctcccctgaaaagttacagagctcaagcgtactgatgtcactggaggctgaagccaggacctgctgtatgggtagtgggggggacggagggctcccttctcctcttagctctggtcagagactcctgaaggcacgagcagtctag

SEQ ID NO: 310675 - DNA, 456 bp, Artificial Sequence
  derived and/or modified sequence
atgaagacaggcccctttgctgagcacagcaaccagctgtggaacatctctgctgtgcccagctggagcaaggtgaaccagggcctcatccgcatgtacaaggccgaggtgtctgggggctggcctgtgtgccccagcctgctgccccacctggtgctgggctggggccagagcaagagatgtggcacctggggcagctgcttcctgctgccccactgctttgccctgaacctgcggcctgcccccctgaccctgggcgccagcgagagccccatctggggcatgggcagccagaggagcaccagccaccccagccctgagaagctgcagagcagctctgtgctgatgagcctggaggccgaggcccggacctgctgcatgggcagcggaggagatggcggcctgcccagccccctgagcagcggccagaggctgctgaaggcccgggctgtgtag

SEQ ID NO: 310676 - DNA, 456 bp, Artificial Sequence
  derived and/or modified sequence
atgaagaccggccccttcgccgagcacagcaaccagctgtggaacatttctgcggtaccaagctggagcaaggttaatcagggcctgattaggatgtacaaagccgaggtctcaggaggatggcccgtctgtccctcccttttacctcacttagtcctgggctgggggcaaagcaaacgctgcggcacttgggggagctgcttcctattgcctcattgctttgccttgaacctgaggcccgctccactgaccctgggagcaagcgagtcccccatatggggtatgggctcccaacgcagtacatctcacccgagccccgaaaaactgcaatcatcatccgtactaatgtcgctcgaggctgaggctagaacctgctgtatgggatccgggggggatggtgggctaccatccccattgagttctggacagaggctattgaaagcgagagccgtgtag

SEQ ID NO: 310677 - DNA, 456 bp, Artificial Sequence
  derived and/or modified sequence
atgaagacggggcctttcgcggagcacagtaaccaactgtggaatatatccgctgtgcctagttggtcaaaggtgaaccagggattgatacgcatgtataaagcggaagtgagcgggggatggcctgtatgtccttcactattacctcacttggtgttggggtggggccaaagcaagaggtgtgggacatggggttcctgcttcctgctcccccattgcttcgcgctgaatttaagaccagcccctctgaccctcggagcatcagagtcacccatatggggtatgggttcccagcgcagcacctcgcaccccagccctgaaaaactccagtcttctagcgtgcttatgtctctcgaggccgaagctcggacttgttgcatggggagcggaggcgacgggggactgcccagccccttgtccagcggacagagattgctcaaagcgcgtgctgtgtag

SEQ ID NO: 310678 - DNA, 1204 bp, Artificial Sequence
  derived and/or modified sequence
tttgggtctaggctcttgggcatggtgttcaacagtagaccctaggaggagtgtgcccaggagccggggtggctgcagcaagggcccatcttgccacgtggccgctggttgcagcacacgttgtgttggttctccagagcgcccaccctcttccacctcggagcagtgagcagcattttgcagtccctagttgatgaagactggcccatttgcagagcactccaaccagctgtggaacatcagcgccgtcccttcctggtccaaagtgaaccagggtctcatccgcatgtataaggccgaggtgagtgggggctggccagtgtgcccgtccctgctgccgcacttggtcctgggctggggacaaagcaaaagatgtggaacctggggctcctgcttcctcctaccccactgttttgctctgaatcttaggccagcccctctgacacttggggcctcggaatctcccatctggggcatgggcagtcagagaagcaccagccaccccagccccgaaaagctgcagtccagctctgtcctgatgagcttggaggctgaggcaaggacctgctgcatggggagtgggggcgatgggggcctcccttctcctttatcaagtggccaaaggctcctcaaagctcgggcagtctgagtctggctctcccatggcatacctgggaagggtcttaccctttggaggcatctccaaagtgctgccttcaaatgttagtgtgtatgatcactgagtggtgggaggtctgagggtaggccgagaattggcatttttatggaccgcttcagggattttgatgcaaatggttttccctgctctcaaatcagatgctgaggagaggagagctgaggcttcctggagctccccctgctggcaggcagccgagggtgtctcctgccctcttggcactgttctcccagccaaggaggtggccttttctctcttccaagtggggaggagacattttatttctactctgtcccttctgctagctcctcccacttcctgggaagactaattctagaactgcttgaccttggccagggaagggctggatgtgaagttccacacctggagtgatgggtccttaaagtcccttctttctgttctcaggctggcccttgtgactagttcatggcctcagacactgtactgtgggcaccatctcttgactcctggccggccttctcttct

SEQ ID NO: 310679 - DNA, 456 bp, Artificial Sequence
  derived and/or modified sequence
atgaagaccggccccttcgccgagcacagcaaccagctgtggaacatcagcgccgtgcccagctggagcaaggtgaaccagggcctgatcagaatgtacaaggccgaggtgagcggcggctggcccgtgtgccccagcctgctgccccacctggtgctgggctggggccagagcaagagatgcggcacctggggcagctgcttcctgctgccccactgcttcgccctgaacctgagacccgcccccctgaccctgggcgccagcgagagccccatctggggcatgggcagccagagaagcaccagccaccccagccccgagaagctgcagagcagcagcgtgctgatgagcctggaggccgaggccagaacctgctgcatgggcagcggcggcgacggcggcctgcccagccccctgagcagcggccagagactgctgaaggccagagccgtgtag

SEQ ID NO: 310680 - protein, 374 aa, Artificial Sequence
  derived and/or modified sequence
MAEGERQPPPDSSEEAPPATQNFIIPKKEIHTVPDMGKWKRSQAYADYIGFILTLNEGVKGKKLTFEYRVSEMWNEVHEEKEQAAKQSVSCDECIPLPRAGHCAPSEAIEKLVALLNTLDRWIDETPPVDQPSRFGNKAYRTWYAKLDEEAENLVATVVPTHLAAAVPEVAVYLKESVGNSTRIDYGTGHEAAFAAFLCCLCKIGVLRVDDQIAIVFKVFNRYLEVMRKLQKTYRMEPAGSQGVWGLDDFQFLPFIWGSSQLIDHPYLEPRHFVDEKAVNENHKDYMFLECILFITEMKTGPFAEHSNQLWNISAVPSWSKVNQGLIRMYKAEASPSDTWGLGISHLGHGQSEKHQPPQPRKAAVQLCPDELGG

SEQ ID NO: 310681 - DNA, 1125 bp, Artificial Sequence
  derived and/or modified sequence
atggccgaaggggaacgtcagccgccccctgatagctccgaggaggccccccccgccacccagaactttatcatccctaaaaaagaaattcatacagtccccgacatggggaagtggaaaaggtcccaggcctacgccgattacattggcttcattctgacgttgaacgagggtgtgaaaggtaagaaactgaccttcgaataccgcgtgtccgaaatgtggaatgaagtccacgaggaaaaggagcaagcggctaagcagtcggtatcatgcgacgagtgcatcccactcccccgcgcaggtcactgtgctccttccgaagccattgaaaaattggtggcactcctgaacaccctggaccgatggatagatgagacaccacccgtggatcagccaagccggtttgggaataaagcctatcgaacttggtatgcgaagctggatgaggaggccgaaaatctggttgcgaccgtcgttcccacacatctggcagcagccgtgccggaggtggcggtgtacctaaaggagtcggtgggaaattccacaaggatcgattatggcaccgggcacgaggccgcttttgccgcctttttgtgctgcctgtgtaagatcggggtgctgcgcgtcgacgaccaaattgctatcgttttcaaggtctttaacagatacctagaggtgatgcggaaactgcaaaagacctaccgaatggagcctgcaggctctcagggggtctgggggcttgacgactttcaatttctaccatttatctggggttcctcccagctgatcgaccatccgtatcttgaaccacgacattttgtcgacgaaaaggctgtgaacgagaaccacaaggactatatgtttctcgagtgcattctttttatcaccgaaatgaaaaccgggccgtttgccgagcacagtaatcagttatggaatatttccgccgtgcccagctggtcgaaggtcaatcagggcttaatcaggatgtacaaagcggaggcttccccatctgatacctggggactggggatatcacacctggggcacgggcagtcggaaaagcatcaacccccccagcccaggaaggctgctgtgcagctttgtcctgacgagctgggtggctag

SEQ ID NO: 310682 - DNA, 1125 bp, Artificial Sequence
  derived and/or modified sequence
atggccgagggggagcggcagcccccaccagacagcagcgaggaggcccccccagccacccagaacttcatcatccccaagaaggagatccacacagtgcctgacatgggcaagtggaagaggagccaggcctatgctgactacatcggcttcatcctgaccctgaatgaaggagtgaagggcaagaagctgacctttgagtacagagtgtctgagatgtggaatgaggtgcatgaggagaaggagcaggccgccaagcagagcgtgtcctgtgatgagtgcatccccctgccccgggccggccactgtgcccccagcgaggccatcgagaagctggtggccctgctgaacaccctggaccgctggattgatgagaccccacctgtggaccagcccagcagatttggaaacaaggcctaccgcacctggtacgccaagctggatgaggaggccgagaacctggtggccaccgtggtgcccacccacctggccgctgctgtgcctgaggtggccgtgtacctgaaggagagcgtgggcaacagcaccagaattgattatggcaccggccacgaggccgcctttgctgccttcctgtgctgcctgtgcaagattggagtgctgcgggtggatgaccagatcgccatcgtgttcaaggtgttcaaccgctacctggaggtgatgaggaagctgcagaagacctacaggatggagcctgctggcagccagggcgtgtggggcctggatgacttccagttcctgcccttcatctggggcagcagccagctgattgaccacccctacctggagcccaggcactttgtggatgagaaggctgtgaatgaaaaccacaaggactacatgttcctggagtgcatcctcttcatcacagagatgaagacaggcccctttgctgagcacagcaaccagctgtggaacatctctgctgtgcccagctggagcaaggtgaaccagggcctcatccgcatgtacaaggccgaggccagccccagcgacacctggggcctgggcatcagccacctgggccacggccagagcgagaagcaccagcccccccagcccaggaaggctgctgtgcagctgtgcccagatgagctgggcggctag

SEQ ID NO: 310683 - DNA, 1125 bp, Artificial Sequence
  derived and/or modified sequence
atggccgagggcgagcggcagcccccccccgacagcagcgaggaggccccccccgccacccaaaacttcatcatccccaaaaaagagatccacactgtgcccgacatgggtaagtggaagcgtagccaggcctatgccgactacattggtttcatcctgacacttaacgagggggtcaaagggaaaaaattgacctttgagtatagagtgagtgaaatgtggaacgaggtccatgaggagaaagagcaggcagctaagcagtcagtgtcctgtgatgagtgcattccccttccgcgcgcaggacattgcgcgccatctgaggccatagagaaactggttgccctgcttaatactctggaccgctggatcgatgaaaccccaccagtggatcagccgtcgcgttttggaaataaagcctatcggacttggtatgccaaacttgatgaagaggcggaaaacctagtcgccactgtggtgcctactcacctggccgctgccgtgccagaggtggccgtgtacttaaaagagagcgtcggcaattcaaccaggattgattatggaacaggccacgaggccgccttcgccgcttttttgtgttgcctgtgcaagattggggtgctgcgagtagacgatcagatcgccattgtcttcaaagtctttaatagatatctcgaagtcatgcgtaagctgcagaaaacatatcgtatggagcctgctggctcccagggggtatggggcttggatgactttcagtttcttccctttatctggggatctagtcagctcatcgaccatccatatctggaacctagacatttcgtggatgaaaaagcagtgaatgagaaccacaaggactatatgttcctggaatgcatcctcttcatcactgagatgaagaccgggccctttgcagaacactcaaatcagttgtggaacatctccgcagtcccaagttggagcaaagtcaatcagggccttataaggatgtataaagctgaagctagtccttccgatacctggggtttggggatcagccacctcgggcacggacagtccgagaaacaccagccgccacagccccgcaaggccgctgtccagctttgccctgatgaacttggcgggtag

SEQ ID NO: 310684 - DNA, 1125 bp, Artificial Sequence
  derived and/or modified sequence
atggcagagggcgaacgtcagccaccccctgatagttccgaagaagccccaccggcaactcagaacttcatcatcccaaagaaagagattcatactgtcccagacatgggaaaatggaagagatcccaggcatatgctgattatatcgggttcattctcactctgaatgagggcgtcaagggtaagaagctcacatttgaatatcgcgtctcagagatgtggaatgaggttcacgaagagaaagaacaggccgctaagcagagtgtgagttgcgatgagtgtatccctctcccaagggctgggcactgtgcaccttctgaagccatcgaaaagcttgtggcattgctcaacacgctcgatcggtggattgacgagacaccgccagtagaccaaccaagtaggtttggtaacaaagcataccgaacctggtacgccaaattggatgaggaagccgaaaatttagtggctactgttgtccctacacacctggccgcagcggtgcctgaagtagcagtctacctgaaagagtcggtgggcaattctacccgtatcgattatggaaccggccatgaggccgcattcgctgccttcctctgctgcctctgtaaaatcggggtgctaagagtggatgaccagatcgctattgtgttcaaagtgttcaaccggtatttggaagtgatgaggaagcttcagaagacgtacaggatggaaccggctggcagccagggggtttgggggctcgacgactttcagttccttccttttatctgggggtcatctcagctcatcgaccacccatatctagagccaagacactttgtggacgaaaaggcagtcaatgaaaatcacaaagattatatgttcctcgaatgtattctctttataacagaaatgaagaccggcccattcgcagagcatagtaaccagctgtggaatatctccgctgttccgtcatggtctaaggttaaccaaggcctcattaggatgtacaaagcagaggcaagcccttcggatacatggggactggggatcagccatcttggacatgggcagtcggaaaaacatcaacctccacagccacgcaaggctgctgttcagctctgccccgacgaactaggcggatag

SEQ ID NO: 310685 - DNA, 1837 bp, Artificial Sequence
  derived and/or modified sequence
aataggcttgctccctgagcgccccgcaccgacatggcggccgtcttcgctgtggtgactttaactctcggttttcggttatagccggccggcgctcacttgtcttcaggaagctcggagcctttggtggagccggggagaggaagggtgggtgcaagagtgaaaggcgagaggggactgcaagcatccgggtcggctcctggccggagcaagatggctgagggcgagcggcagccgccgccagattcttcagaggaggcccctccagccactcagaacttcatcattccaaaaaaggagatccacacagttccagacatgggcaaatggaagcgttctcaggcatacgctgactacatcggattcatccttaccctcaacgaaggtgtgaaggggaagaagctgaccttcgagtacagagtctccgagatgtggaatgaggttcatgaggaaaaggagcaggctgcaaagcagagtgtgtcctgcgatgaatgcataccattaccccgcgccgggcactgtgcaccttcggaggccattgagaaactagtcgctcttctcaacacgctggacaggtggattgatgagactcctccagtggaccagccctctcggtttgggaataaggcatacaggacctggtatgccaaacttgatgaggaagcagaaaacttggtggccacagtggtccctacccatctggcagctgctgtgcctgaggtggctgtttacctaaaggagtcagtggggaactccacgcgcattgactacggcacagggcatgaggcagccttcgctgctttcctctgctgtctctgcaagattggggtgctccgggtggatgaccaaatagctattgtcttcaaggtgttcaatcggtaccttgaggttatgcggaaactccagaaaacatacaggatggagccagccggcagccagggagtgtggggtctggatgacttccagtttctgcccttcatctggggcagttcgcagctgatagaccacccatacctggagcccagacactttgtggatgagaaggccgtgaatgagaaccacaaggactacatgttcctggagtgtatcctgtttattaccgagatgaagactggcccatttgcagagcactccaaccagctgtggaacatcagcgccgtcccttcctggtccaaagtgaaccagggtctcatccgcatgtataaggccgaggccagcccctctgacacttggggcctcggaatctcccatctggggcatgggcagtcagagaagcaccagccaccccagccccgaaaagctgcagtccagctctgtcctgatgagcttggaggctgaggcaaggacctgctgcatggggagtgggggcgatgggggcctcccttctcctttatcaagtggccaaaggctcctcaaagctcgggcagtctgagtctggctctcccatggcatacctgggaagggtcttaccctttggaggcatctccaaagtgctgccttcaaatgttagtgtgtatgatcactgagtggtgggaggtctgagggtaggccgagaattggcatttttatggaccgcttcagggattttgatgcaaatggttttccctgctctcaaatcagatgctgaggagaggagagctgaggcttcctggagctccccctgctggcaggcagccgagggtgtctcctgccctcttggcactgttctcccagccaaggaggtggccttttctctcttccaagtggggaggagacattttatttctactctgtcccttctgctagctcctcccacttcctgggaagactaattctagaactgcttgaccttggccag

SEQ ID NO: 310686 - DNA, 1125 bp, Artificial Sequence
  derived and/or modified sequence
atggccgagggcgagagacagcccccccccgacagcagcgaggaggccccccccgccacccagaacttcatcatccccaagaaggagatccacaccgtgcccgacatgggcaagtggaagagaagccaggcctacgccgactacatcggcttcatcctgaccctgaacgagggcgtgaagggcaagaagctgaccttcgagtacagagtgagcgagatgtggaacgaggtgcacgaggagaaggagcaggccgccaagcagagcgtgagctgcgacgagtgcatccccctgcccagagccggccactgcgcccccagcgaggccatcgagaagctggtggccctgctgaacaccctggacagatggatcgacgagaccccccccgtggaccagcccagcagattcggcaacaaggcctacagaacctggtacgccaagctggacgaggaggccgagaacctggtggccaccgtggtgcccacccacctggccgccgccgtgcccgaggtggccgtgtacctgaaggagagcgtgggcaacagcaccagaatcgactacggcaccggccacgaggccgccttcgccgccttcctgtgctgcctgtgcaagatcggcgtgctgagagtggacgaccagatcgccatcgtgttcaaggtgttcaacagatacctggaggtgatgagaaagctgcagaagacctacagaatggagcccgccggcagccagggcgtgtggggcctggacgacttccagttcctgcccttcatctggggcagcagccagctgatcgaccacccctacctggagcccagacacttcgtggacgagaaggccgtgaacgagaaccacaaggactacatgttcctggagtgcatcctgttcatcaccgagatgaagaccggccccttcgccgagcacagcaaccagctgtggaacatcagcgccgtgcccagctggagcaaggtgaaccagggcctgatcagaatgtacaaggccgaggccagccccagcgacacctggggcctgggcatcagccacctgggccacggccagagcgagaagcaccagcccccccagcccagaaaggccgccgtgcagctgtgccccgacgagctgggcggctag

SEQ ID NO: 310687 - protein, 294 aa, Artificial Sequence
  derived and/or modified sequence
MAEGERQPPPDSSEEAPPATQNFIIPKKEIHTVPDMGKWKRSQAIEKLVALLNTLDRWIDETPPVDQPSRFGNKAYRTWYAKLDEEAENLVATVVPTHLAAAVPEVAVYLKESVGNSTRIDYGTGHEAAFAAFLCCLCKIGVLRVDDQIAIVFKVFNRYLEVMRKLQKTYRMEPAGSQGVWGLDDFQFLPFIWGSSQLIDHPYLEPRHFVDEKAVNENHKDYMFLECILFITEMKTGPFAEHSNQLWNISAVPSWSKVNQGLIRMYKAECLEKFPVIQHFKFGSLLPIHPVTSG

SEQ ID NO: 310688 - DNA, 2515 bp, Artificial Sequence
  derived and/or modified sequence
caccgacatggcggccgtcttcgctgtggtgactttaactctcggttttcggttatagccggccggcgctcacttgtcttcaggaagctcggagcctttggtggagccggggagaggaagggtgggtgcaagagtgaaaggcgagaggggactgcaagcatccgggtcggctcctggccggagcaagatggctgagggcgagcggcagccgccgccagattcttcagaggaggcccctccagccactcagaacttcatcattccaaaaaaggagatccacacagttccagacatgggcaaatggaagcgttctcaggcatacgctgactacatcggattcatccttaccctcaacgaaggtgtgaaggggaagaagctgaccttcgagtacagagtctccgaggaagcagaaaacttggtggccacagtggtccctacccatctggcagctgctgtgcctgaggtggctgtttacctaaaggagtcagtggggaactccacgcgcattgactacggcacagggcatgaggcagccttcgctgctttcctctgctgtctctgcaagattggggtgctccgggtggatgaccaaatagctattgtcttcaaggtgttcaatcggtaccttgaggttatgcggaaactccagaaaacatacaggatggagccagccggcagccagggagtgtggggtctggatgacttccagtttctgcccttcatctggggcagttcgcagctgatagaccacccatacctggagcccagacactttgtggatgagaaggccgtgaatgagaaccacaaggactacatgttcctggagtgtatcctgtttattaccgagatgaagactggcccatttgcagagcactccaaccagctgtggaacatcagcgccgtcccttcctggtccaaagtgaaccagggtctcatccgcatgtataaggccgagtgcctggagaagttccctgtgatccagcacttcaagttcgggagcctgctgcccatccatcctgtcacgtcgggctaggaggggccaagccgaagagccacccaggccacagttcctgtgcctgccttccccaccccagcagtggcccctccccatcccctccctctgttcgtcccgtttgatgagaggctgtttactggggtggggtggcgagatgggcttgagggggctcagagcataaggcttcagggcccaagttgggagaagtgaccaaagtgtagccagttttctgagttcccgtgtgctagactggccagaagagagggtctggggcctggtcactcggccactctctcctgtttctggcctcttctcccttcactcccgtccagtctggttttgagagcaggggctgttctgcagcaccgcagggaagggaggagagatacctgctgcttccattgcttttcccttcctggagtcgatgcctttctaagggttggagctgctccttgcaggggcgggtcagtttcccaggccatgccggggtggccatctatggtagggctggaagctgaggctggccgccagctgtgggctggggtggggtgggtggggtcgggtggtggagaggccttagctgtcctggctggtgcccctcccaggctccttttcaccctgccccctgggcctgaggccccctgtgtccaagcctccccctggctcttcagttctctagcccttggctctgctgggtttcctgactgtagccacatctctcccgctccctaagggtaacctagccaatggaagctgccctttgggtaggtgctgggctcctgggagggcccagatgatggggtgaggcatgtctttccagaactttccctggcagggaggggatggcagaaactcagggaggggcttggggcccattgtatctggagagcctggattcctcttggcagtcttaggcccggccacttctgctacctttgcgctgctgtgagcctcaccctgggcccctgggccctgcttctctgctcccctgggtgatgggtgggcccagaaggtggcagtcccacaccttgtcctcccacctccctgaactgtccattgcttttatagggtgaggtaagagacagcctcccaagcccaggctttggcactcagaatgggcccagtgggggctgggcaggcccattgagggccaccgccgaggtttctcctagggctgttcctgggcctggctcttacaggctcgtcccccaggcctgcccttctccactgccccctcctgtgtctgggtccacacacccttcaggaagggggagcactgagaagcacagcacaggggctcagcctgggatccggtgatggtctgggcagaggctgggtcaggagtcccaaaggtcagtgacagtttctcagaagaggcccagcgtccacctctctcccagggccagacagcccttcctggctcccccatccccctatgggctcccagccccttgcaccctcattgctgttcagattaaagcctctgttttgcacctgtca

SEQ ID NO: 310689 - DNA, 2558 bp, Artificial Sequence
  derived and/or modified sequence
ccccgcaccgacatggcggccgtcttcgctgtggtgactttaactctcggttttcggttatagccggccggcgctcacttgtcttcaggaagctcggagcctttggtggagccggggagaggaagggtgggtgcaagagtgaaaggcgagaggggactgcaagcatccgggtcggctcctggccggagcaagatggctgagggcgagcggcagccgccgccagattcttcagaggaggcccctccagccactcagaacttcatcattccaaaaaaggagatccacacagttccagacatgggcaaatggaagcgttctcaggccattgagaaactagtcgctcttctcaacacgctggacaggtggattgatgagactcctccagtggaccagccctctcggtttgggaataaggcatacaggacctggtatgccaaacttgatgaggaagcagaaaacttggtggccacagtggtccctacccatctggcagctgctgtgcctgaggtggctgtttacctaaaggagtcagtggggaactccacgcgcattgactacggcacagggcatgaggcagccttcgctgctttcctctgctgtctctgcaagattggggtgctccgggtggatgaccaaatagctattgtcttcaaggtgttcaatcggtaccttgaggttatgcggaaactccagaaaacatacaggatggagccagccggcagccagggagtgtggggtctggatgacttccagtttctgcccttcatctggggcagttcgcagctgatagaccacccatacctggagcccagacactttgtggatgagaaggccgtgaatgagaaccacaaggactacatgttcctggagtgtatcctgtttattaccgagatgaagactggcccatttgcagagcactccaaccagctgtggaacatcagcgccgtcccttcctggtccaaagtgaaccagggtctcatccgcatgtataaggccgagtgcctggagaagttccctgtgatccagcacttcaagttcgggagcctgctgcccatccatcctgtcacgtcgggctaggaggggccaagccgaagagccacccaggccacagttcctgtgcctgccttccccaccccagcagtggcccctccccatcccctccctctgttcgtcccgtttgatgagaggctgtttactggggtggggtggcgagatgggcttgagggggctcagagcataaggcttcagggcccaagttgggagaagtgaccaaagtgtagccagttttctgagttcccgtgtgctagactggccagaagagagggtctggggcctggtcactcggccactctctcctgtttctggcctcttctcccttcactcccgtccagtctggttttgagagcaggggctgttctgcagcaccgcagggaagggaggagagatacctgctgcttccattgcttttcccttcctggagtcgatgcctttctaagggttggagctgctccttgcaggggcgggtcagtttcccaggccatgccggggtggccatctatggtagggctggaagctgaggctggccgccagctgtgggctggggtggggtgggtggggtcgggtggtggagaggccttagctgtcctggctggtgcccctcccaggctccttttcaccctgccccctgggcctgaggccccctgtgtccaagcctccccctggctcttcagttctctagcccttggctctgctgggtttcctgactgtagccacatctctcccgctccctaagggtaacctagccaatggaagctgccctttgggtaggtgctgggctcctgggagggcccagatgatggggtgaggcatgtctttccagaactttccctggcagggaggggatggcagaaactcagggaggggcttggggcccattgtatctggagagcctggattcctcttggcagtcttaggcccggccacttctgctacctttgcgctgctgtgagcctcaccctgggcccctgggccctgcttctctgctcccctgggtgatgggtgggcccagaaggtggcagtcccacaccttgtcctcccacctccctgaactgtccattgcttttatagggtgaggtaagagacagcctcccaagcccaggctttggcactcagaatgggcccagtgggggctgggcaggcccattgagggccaccgccgaggtttctcctagggctgttcctgggcctggctcttacaggctcgtcccccaggcctgcccttctccactgccccctcctgtgtctgggtccacacacccttcaggaagggggagcactgagaagcacagcacaggggctcagcctgggatccggtgatggtctgggcagaggctgggtcaggagtcccaaaggtcagtgacagtttctcagaagaggcccagcgtccacctctctcccagggccagacagcccttcctggctcccccatccccctatgggctcccagccccttgcaccctcattgctgttcagattaaagcctctgttttgcacctgtc

SEQ ID NO: 310690 - protein, 484 aa, Artificial Sequence
  derived and/or modified sequence
MDLGKDQSHLKHHQTPDPHQEENHSPEVIGTWSLRNRELLRKRKAEVHEKETSQWLFGEQKKRKQQRTGKGNRRGRKRQQNTELKVEPQPQIEKEIVEKALAPIEKKTEPPGSITKVFPSVASPQKVVPEEHFSEICQESNIYQENFSEYQEIAVQNHSSETCQHVSEPEDLSPKMYQEISVLQDNSSKICQDMKEPEDNSPNTCQVISVIQDHPFKMYQDMAKREDLAPKMCQEAAVPKILPCPTSEDTADLAGCSLQAYPKPDVPKGYILDTDQNPAEPEEYNETDQGIAETEGLFPKIQEIAEPKDLSTKTHQESAEPKYLPHKTCNEIIVPKAPSHKTIQETPHSEDYSIEINQETPGSEKYSPETYQEIPGLEEYSPEIYQETSQLEEYSPEIYQETPGPEDLSTETYKNKDVPKECFPEPHQETGGPQGQDPKAHQEDAKDAYTFPQEMKEKPKEEPGIPAILNESHPENDVYSYVLF

SEQ ID NO: 310691 - DNA, 1455 bp, Artificial Sequence
  derived and/or modified sequence
atggacttgggcaaggaccagtcccacctgaagcatcatcaaacacccgacccgcaccaagaggagaatcacagtccagaggtcatcggcacctggtctctgcgcaatcgcgagctgctgaggaaaagaaaggccgaagtccacgagaaggagactagccaatggctctttggcgagcagaaaaagcggaagcagcagcgcacggggaagggtaacagacggggcaggaaaaggcagcagaacaccgagctgaaagttgagccccagcctcagattgagaaggagatagttgagaaagcactagcccctatcgagaaaaaaaccgaaccccctgggtctattactaaggtgttcccaagcgtggcgagccctcagaaggttgtgccggaagaacacttcagtgaaatatgccaagagtcaaacatttaccaggagaatttttctgagtaccaagagatcgctgtccagaaccactcctcagaaacctgtcaacacgtctccgaaccagaagatctgtctccaaagatgtatcaggagattagtgtcctccaggataattcatctaagatttgccaggacatgaaagaacctgaggataactcccctaatacttgccaagtgatttctgttattcaggatcatcccttcaagatgtaccaggatatggccaagcgggaggacctcgccccaaaaatgtgtcaggaagccgcagtgccaaaaattctgccatgtccgaccagcgaggatacagccgatctggctggttgctctttacaagcatacccaaagcctgatgtacctaaggggtacatattggacactgaccagaaccccgccgaacccgaagaatacaatgaaacagatcagggcatcgcggagacggaaggcttattcccgaaaatccaagaaatagccgagccaaaggacttgtcaacaaagacccatcaggaaagtgccgagcccaagtatcttccgcataagacctgcaacgaaattatcgtacccaaggccccctctcataaaaccattcaagagacaccacactcagaagactacagtatcgaaatcaaccaggagacacctgggagtgagaagtactcacctgaaacttaccaggaaatacccggactggaagagtattctccagagatttatcaagaaaccagtcagctggaggaatactctcccgagatttaccaggaaactccaggccccgaagacttatccacagaaacttacaagaacaaagatgttccaaaggagtgctttcctgaacctcatcaggagacagggggtccccaaggacaggaccctaaagcacaccaagaggatgctaaagatgcgtatacgttcccccaggagatgaaagaaaagcctaaggaagagccgggtattcccgctatcttgaacgaaagccacccggagaacgatgtgtactcttacgtgctgttttag

SEQ ID NO: 310692 - DNA, 1455 bp, Artificial Sequence
  derived and/or modified sequence
atggatctcggcaaggatcagtcccacctgaagcatcatcagactcccgatccccatcaggaagaaaaccattcgccggaagtgatcggcacgtggtctctccggaatagagagctgttgcgtaaaaggaaggcagaagtgcatgaaaaagaaaccagccagtggctgttcggggagcagaaaaaaaggaagcagcaacgcacagggaaaggaaatcggcggggccggaagagacagcagaacacggagcttaaggttgaacctcaacctcagatagagaaggagattgtggagaaagctctcgctcctattgaaaaaaagactgaacccccaggtagtatcacaaaggttttcccgtctgtcgctagtcctcaaaaggttgtccccgaagagcattttagcgagatctgccaggagagcaacatatatcaagaaaacttctcggagtaccaggagatagcagttcagaaccactcttcagaaacttgccaacatgtgagtgagcccgaggacctgagcccaaaaatgtatcaggagatcagtgtcctgcaagacaattcgagcaagatttgtcaggacatgaaagaaccagaagacaactctccgaatacttgccaagtgataagtgtcatccaggaccacccgttcaagatgtaccaggacatggcaaaacgcgaagatcttgccccaaagatgtgccaagaggccgctgtgcccaagattttgccctgtcccacgagcgaggatactgccgatctcgcaggctgctcactccaggcctacccgaagcctgatgttcctaaagggtacatccttgacaccgaccagaatcctgcggaaccagaggaatacaatgaaactgatcagggcatcgccgagactgaaggcctgttccccaaaatccaggagatagccgaacccaaagaccttagtaccaagacacatcaggaaagcgctgagcccaagtacctcccacacaagacgtgtaatgagatcatcgtccccaaggcgccctctcataaaaccattcaggaaactcctcacagcgaggattactccattgagattaaccaggagactccggggtccgagaagtatagcccagagacctatcaggagatccctggtttggaagaatactcacctgaaatataccaagaaacaagccagctggaggaatatagtcccgaaatctatcaggaaacccccggtcccgaggatctctcaaccgagacatacaagaacaaggatgttcccaaagagtgcttccctgagcctcatcaggagactggaggcccacaaggccaagacccaaaagctcatcaggaggatgctaaagacgcatacactttcccacaagaaatgaaagaaaagccgaaggaggagcctgggatcccagcaattcttaacgagagtcacccggaaaatgatgtttattcgtacgtgttattctag

SEQ ID NO: 310693 - DNA, 2186 bp, Artificial Sequence
  derived and/or modified sequence
agacatatgacagaagactgaacaaccagaagttatgaagataggtactgtgggtgttagaaagattcacggcaaaacagggaagcatctaggctgcttgtggaagtcagaccaaaatagcaggaaggtattgcagcaagatggatttgggaaaggaccaatctcatttgaagcaccatcagacacctgaccctcatcaagaagagaaccattctccagaagtcattggaacctggagtttgagaaacagagaactacttagaaaaagaaaagctgaagtgcatgaaaaggaaacatcacaatggctatttggagaacagaaaaaacgcaagcagcagagaacaggaaaaggaaatcgaagaggcagaaagagacaacaaaacacagaattgaaggtggagcctcagccacagatagaaaaggaaatagtggagaaagcactggcacctatagagaaaaaaactgagccacctgggagcataaccaaagtatttccttcagtagcctccccgcaaaaagttgtgcctgaggaacacttttctgaaatatgtcaagaaagtaacatatatcaggagaatttttctgagtaccaagaaatagcagtacaaaaccattcttctgaaacatgccaacatgtgtctgaacctgaagacctctctcctaaaatgtaccaagaaatatctgtacttcaagacaattcttccaaaatatgccaagacatgaaggaacctgaagacaactctcctaacacatgccaagtaatatctgtaattcaagaccatcctttcaaaatgtaccaagatatggctaaacgagaagatctggctcctaaaatgtgccaagaagctgctgtacccaaaatccttccttgtccaacatctgaagacacagctgatctggcaggatgctctcttcaagcatatccaaaaccagatgtgcctaaaggctatattcttgacacagaccaaaatccagcagaaccagaggaatacaatgaaacagatcaaggaatagctgagacagaaggcctttttcctaaaatacaagaaatagctgagcctaaagacctttctacaaaaacacaccaagaatcagctgaacctaaataccttcctcataaaacatgtaacgaaattattgtgcctaaagccccctctcataaaacaatccaagaaacacctcattctgaagactattcaattgaaataaaccaagaaactcctgggtctgaaaaatattcacctgaaacgtatcaagaaatacctgggcttgaagaatattcacctgaaatataccaagaaacatcccagcttgaagaatattcacctgaaatataccaagaaacaccggggcctgaagacctctctactgagacatataaaaataaggatgtgcctaaagaatgctttccagaaccacaccaagaaacaggtgggccccaaggccaggatcctaaagcacaccaggaagatgctaaagatgcttatacttttcctcaagaaatgaaagaaaaacccaaagaagagccaggaataccagcaattctgaatgagagtcatccagaaaatgatgtctatagttatgttttgttttaacaatgctcaaccataaagttgtggtccaatggaacatacagcttaatagtttatgcgtgattttctcaaaatattgtaaaacttttgacaatgctcattaatattattttttctatttgtagaccatatctgaaagaaataacattttttaaggctctaccacatagacaatatcatgctagaatgtgtgtgtgtgtgtgtgtgtgtgtgtgtgtatgtatgtataggtcggggagaggatagtggtgggaacagacaaataaggaagcggggaggactggataattggttttcccccctaagaacatttatttacgtcttaagagcagataagtgactaagactgaacacatacattttgtggagtatatagttttcttgtaaatgctgttcaattattaatgtaacagtagcatcaaaattttattcaggctttagttgactcttttggtcagttttaacaattctccttaaaagatattttggagtgatgaatgtagtttacttttgtatttgaattttgattttctatttttattttttaaatattgtatttgtgcacaatgtacattaaatcattattacatgctt

SEQ ID NO: 310694 - DNA, 2290 bp, Artificial Sequence
  derived and/or modified sequence
cggcagacatatgacagaagactgaacaaccagaagttatgaagataggtactgtgggtgttagaaagattcacggcaaaacagggaaggcaagggcgattatggggactacagtgagccaagcctcccaccggatcatactgtggagacagaaaagtgaatcaggagctgtatctgctctctaaggcatctaggctgcttgtggaagtcagaccaaaatagcaggaaggtattgcagcaagatggatttgggaaaggaccaatctcatttgaagcaccatcagacacctgaccctcatcaagaagagaaccattctccagaagtcattggaacctggagtttgagaaacagagaactacttagaaaaagaaaagctgaagtgcatgaaaaggaaacatcacaatggctatttggagaacagaaaaaacgcaagcagcagagaacaggaaaaggaaatcgaagaggcagaaagagacaacaaaacacagaattgaaggtggagcctcagccacagatagaaaaggaaatagtggagaaagcactggcacctatagagaaaaaaactgagccacctgggagcataaccaaagtatttccttcagtagcctccccgcaaaaagttgtgcctgaggaacacttttctgaaatatgtcaagaaagtaacatatatcaggagaatttttctgagtaccaagaaatagcagtacaaaaccattcttctgaaacatgccaacatgtgtctgaacctgaagacctctctcctaaaatgtaccaagaaatatctgtacttcaagacaattcttccaaaatatgccaagacatgaaggaacctgaagacaactctcctaacacatgccaagtaatatctgtaattcaagaccatcctttcaaaatgtaccaagatatggctaaacgagaagatctggctcctaaaatgtgccaagaagctgctgtacccaaaatccttccttgtccaacatctgaagacacagctgatctggcaggatgctctcttcaagcatatccaaaaccagatgtgcctaaaggctatattcttgacacagaccaaaatccagcagaaccagaggaatacaatgaaacagatcaaggaatagctgagacagaaggcctttttcctaaaatacaagaaatagctgagcctaaagacctttctacaaaaacacaccaagaatcagctgaacctaaataccttcctcataaaacatgtaacgaaattattgtgcctaaagccccctctcataaaacaatccaagaaacacctcattctgaagactattcaattgaaataaaccaagaaactcctgggtctgaaaaatattcacctgaaacgtatcaagaaatacctgggcttgaagaatattcacctgaaatataccaagaaacatcccagcttgaagaatattcacctgaaatataccaagaaacaccggggcctgaagacctctctactgagacatataaaaataaggatgtgcctaaagaatgctttccagaaccacaccaagaaacaggtgggccccaaggccaggatcctaaagcacaccaggaagatgctaaagatgcttatacttttcctcaagaaatgaaagaaaaacccaaagaagagccaggaataccagcaattctgaatgagagtcatccagaaaatgatgtctatagttatgttttgttttaacaatgctcaaccataaagttgtggtccaatggaacatacagcttaatagtttatgcgtgattttctcaaaatattgtaaaacttttgacaatgctcattaatattattttttctatttgtagaccatatctgaaagaaataacattttttaaggctctaccacatagacaatatcatgctagaatgtgtgtgtgtgtgtgtgtgtgtgtgtgtgtatgtatgtataggtcggggagaggatagtggtgggaacagacaaataaggaagcggggaggactggataattggttttcccccctaagaacatttatttacgtcttaagagcagataagtgactaagactgaacacatacattttgtggagtatatagttttcttgtaaatgctgttcaattattaatgtaacagtagcatcaaaattttattcaggctttagttgactcttttggtcagttttaacaattctccttaaaagatattttggagtgatgaatgtagtttacttttgtatttgaattttgattttctatttttattttttaaatattgtatttgtgcacaatgtacattaaatcattattacatgcttaa

SEQ ID NO: 310695 - DNA, 1455 bp, Artificial Sequence
  derived and/or modified sequence
atggacctgggcaaggaccagagccacctgaagcaccaccagaccccagacccccaccaggaggagaaccacagccctgaggtgattggcacctggagcctgaggaaccgggagctgctgaggaagaggaaggccgaggtgcatgagaaggagaccagccagtggctgtttggagagcagaagaagaggaagcagcagaggacaggcaagggcaacagaagaggaaggaagaggcagcagaacacagagctgaaggtggagccccagccccagatcgagaaggagatcgtggagaaggccctggcccccatcgagaagaagacagagcccccaggcagcatcaccaaggtgttccccagcgtggccagcccccagaaggtggtgcctgaggagcacttcagcgagatctgccaggagagcaacatctaccaggagaacttcagcgagtaccaggagattgctgtgcagaaccacagcagcgagacctgccagcacgtgtctgagcctgaggacctgagccccaagatgtaccaggagatctctgtgctgcaggacaacagcagcaagatctgccaggacatgaaggagcctgaggacaacagccccaacacctgccaggtgatcagcgtcatccaggaccaccccttcaagatgtaccaggacatggccaagcgggaggacctggcccccaagatgtgccaggaggccgctgtgcccaagatcctgccctgccccaccagcgaggacacagctgacctggccggctgcagcctgcaggcctaccccaagccagatgtgcccaagggctacatcctggacacagaccagaacccagctgagcctgaggagtacaatgaaacagaccagggcattgctgagacagagggcctcttccccaagatccaggagattgctgagcccaaggacctgagcaccaagacccaccaggagagcgctgagcccaagtacctgccccacaagacctgcaatgagatcatcgtgcccaaggcccccagccacaagaccatccaggagaccccccacagcgaggactacagcattgagatcaaccaggagaccccaggcagcgagaagtacagccctgagacctaccaggagatccctggcctggaggagtacagccctgagatctaccaggagaccagccagctggaggagtacagccctgagatctaccaggagaccccaggccctgaggacctgagcacagagacctacaagaacaaggatgtgcccaaggagtgcttccctgagccccaccaggagaccggcggcccccagggccaggaccccaaggcccaccaggaggatgccaaggatgcctacaccttcccccaggagatgaaggagaagcccaaggaggagcccggcatcccagccatcctgaatgaaagccacccagaaaatgatgtgtacagctatgtgctcttctag

SEQ ID NO: 310696 - DNA, 1455 bp, Artificial Sequence
  derived and/or modified sequence
atggacctgggcaaggaccagagccacctgaagcaccaccagacccctgatcctcaccaggaagagaatcactctcctgaggtgatcggtacatggtctctgcgaaaccgtgagctcctgaggaagcgcaaagcagaggtccacgagaaggaaacctctcagtggctcttcggagaacagaagaaacggaaacaacagaggaccggaaaggggaataggagggggcgaaaacgccagcagaataccgaattgaaagtcgagccccaacctcagatcgagaaggagatcgtcgagaaggcattagcccccattgagaaaaagactgagccaccagggagtatcaccaaggtcttcccctccgtagctagtccccagaaagtggtgcctgaggagcatttttcagaaatctgccaggaatcaaacatctaccaggaaaatttctctgaataccaagaaatagcggtccagaaccatagtagcgaaacctgccagcacgtgtccgagccagaggatctgtccccaaaaatgtaccaggaaatttcagtgctacaagacaacagctcaaaaatctgtcaggacatgaaggagcctgaggacaacagtccaaatacctgtcaggtcatctccgtcatccaagaccatcctttcaagatgtaccaggatatggcaaaaagagaagacttggccccgaagatgtgtcaagaggccgccgtccccaaaatcctcccttgcccaacctcagaagatacagctgatttggcaggatgctcacttcaggcttaccctaagcctgacgtccccaaaggctatattctggacacagaccagaatcctgctgaaccagaagagtacaacgaaactgaccagggcattgctgagactgaaggactgtttcctaagattcaggaaatcgccgaacctaaagatctatcaaccaagacccatcaggagagtgcagaacccaagtacttgcctcacaaaacttgcaacgaaatcatcgtccccaaggctccttcccataagaccatccaggagacgccacactcagaagattactcaatcgaaattaaccaagagactccagggagtgaaaagtactctcctgagacgtaccaggagattcctgggctcgaagagtacagccccgaaatctatcaggaaacctcccagctggaagagtactccccagaaatttatcaagaaacccccgggcctgaggacctgagcaccgagacatacaaaaacaaggacgtgccaaaagagtgcttccccgaaccacaccaggaaaccggaggcccacagggacaggaccccaaggcccatcaggaagacgcgaaagacgcctacacattcccacaggagatgaaggagaagcctaaggaggaaccagggatacctgccattcttaacgaatcccaccctgagaatgatgtttatagttacgtgctgttttag

SEQ ID NO: 310697 - DNA, 1455 bp, Artificial Sequence
  derived and/or modified sequence
atggacctgggcaaggaccagagccacctgaagcaccaccagaccccggaccctcaccaggaggagaatcattctccagaggtgatcgggacctggtcccttagaaatcgtgagttgctgcgcaaaagaaaagccgaggttcatgagaaggagacctctcagtggctgtttggggaacagaagaaacgcaagcagcagcgaaccggcaagggaaacaggcgggggcgtaaaaggcagcaaaacacagagctgaaggttgaacctcagccacagattgagaaggagatagtggaaaaggctctggctcccatcgagaaaaaaaccgaacccccaggcagcatcacaaaggttttcccttccgtcgctagtccacaaaaagtggtcccagaggaacacttcagtgaaatctgtcaggagtcaaatatctatcaggagaattttagtgagtaccaggagatagccgtgcagaaccatagttccgagacatgtcagcacgtaagtgaaccagaagacttatcgcctaagatgtatcaggagatctctgtcctgcaggacaactctagcaagatttgccaagatatgaaggagcccgaggataatagtccgaatacctgccaggttattagcgtgattcaggaccacccattcaaaatgtaccaagacatggcaaagcgggaagacttggcacccaagatgtgtcaggaggccgctgtgcccaaaatactgccctgtcccacgagcgaagacacagctgacttagccgggtgctctcttcaggcttacccaaagccagacgttccgaaggggtatattctggacaccgatcagaaccccgcagaacctgaggagtataatgaaactgatcagggcatcgctgagacagagggcctattcccaaaaattcaggaaatagcagagcctaaggatctgtcaaccaagacccatcaggaaagcgccgaaccaaaatacctaccccacaagacttgtaacgagattatcgtcccaaaagcgccatcccacaagacgattcaggaaactcctcacagcgaagactatagcatagagataaatcaggaaacaccaggctccgaaaaatattcccccgagacgtaccaggagatccccggcctcgaagagtacagtccagagatctaccaggagacctcgcagctggaggaatatagcccagaaatttatcaggaaacgccaggccctgaggacttaagcaccgagacttataagaataaggacgtacccaaggagtgctttccagagcctcatcaggagaccgggggcccacagggccaagatcctaaggcacaccaggaggacgcaaaggacgcctatacattcccacaggaaatgaaggagaaacctaaagaagagcccggtatccccgcaatactgaacgaatcgcacccagaaaatgatgtttattcatatgtgttgttctag

SEQ ID NO: 310698 - DNA, 1455 bp, Artificial Sequence
  derived and/or modified sequence
atggatcttgggaaagaccagtctcatttgaagcatcaccagacccccgatccacaccaggaggagaatcacagtccagaagtcattgggacctggagcctgagaaacagggaactgctgcgcaagaggaaggctgaagtgcatgagaaagagactagccagtggctcttcggagagcagaaaaaacggaagcagcagcgcaccgggaaaggcaaccgaagaggccgtaagaggcaacagaatactgagctgaaagtggagcctcagcctcaaattgagaaagagatcgtcgagaaggctctggcccctatagagaaaaagactgagcctcctggttctataacgaaggtctttccttcggtggcaagcccacaaaaagtagttcccgaagagcacttttctgagatctgccaggagagtaacatttaccaggaaaacttttctgagtaccaggagatcgcagttcagaaccatagctctgagacatgtcagcacgtcagcgagcccgaggatttgagccccaagatgtaccaagaaatctccgttctgcaagacaattcaagcaagatttgtcaggacatgaaagagcccgaggacaacagccccaatacatgccaggtgatctcagtcattcaggatcacccttttaagatgtaccaggacatggcaaagcgcgaagacttggcacccaagatgtgccaggaagcagcagtgcccaagattctaccatgtcctacgagtgaggacacagcagacttggccggttgttcgctccaggcctatcccaagcctgacgttcctaagggctatatccttgatactgatcaaaaccccgcagaacctgaggaatataacgaaactgaccagggtatcgcagaaaccgagggcctctttccaaaaatccaggagatcgcagagccaaaggacctctctacgaagacccatcaggagagtgccgaacccaagtatcttccacataaaacctgtaacgaaatcatagttcctaaggcaccttcccataaaaccatccaggagacaccccactctgaggattatagcatcgaaatcaaccaagagactcctggctccgaaaagtactcgcctgagacctatcaggagatccccggactggaggagtactcgcccgaaatttaccaggagactagccaacttgaggaatacagtccagaaatttaccaagaaaccccaggccctgaggatctctcaaccgagacttataaaaacaaggatgtgcctaaggagtgcttccctgagccccaccaggaaaccggcggtcctcagggacaagacccaaaagcacatcaggaggatgccaaagacgcttataccttcccccaggaaatgaaggaaaagcccaaggaggagccaggcattccagccattcttaacgaaagccaccctgagaacgatgtgtattcctacgtgctcttttag

SEQ ID NO: 310699 - DNA, 1455 bp, Artificial Sequence
  derived and/or modified sequence
atggacctggggaaagatcagtcccacctaaagcaccaccaaacacccgacccccaccaagaggagaaccacagtccggaggtgattggaacttggagtctgcggaatagggagctcctccggaaacgaaaagccgaggtgcacgagaaagaaacctcccagtggctatttggcgagcagaagaagaggaaacagcagaggactggcaaaggcaaccggaggggcagaaaacgccagcagaacaccgagctgaaagtggagccacaaccgcagatcgaaaaggagattgtggagaaggctctggccccaattgaaaagaagaccgaaccgccagggtccatcaccaaggtgttcccttcagtggcttcacctcaaaaggtggtccccgaggaacatttctccgagatatgtcaggaatccaatatttaccaggaaaacttctctgaatatcaggaaatcgcagtccaaaatcattcatcagagacatgccagcacgtgtctgagccggaggacttaagtccgaaaatgtatcaggagatttcagtactacaggataactccagcaagatttgtcaagacatgaaagagcccgaggacaactcgcccaatacctgtcaggttattagcgtgattcaggaccatcccttcaagatgtaccaggacatggctaagagagaggatctcgcccctaagatgtgccaagaagccgctgtgccaaagatcctgccttgccctacctctgaggataccgcggacctggcgggatgtagtctgcaggcctaccctaagccagatgtccctaaagggtacatcctcgacacagatcagaatcctgctgaacccgaagaatataatgagaccgatcaaggcattgccgaaaccgagggcctgttccccaagatccaggagattgctgagcctaaggatctgtccaccaagacacaccaagaaagtgccgagcccaaatatcttcctcacaagacatgtaacgagatcatagtgcccaaggccccatcccacaagacaatccaggagacaccccactcagaggactatagtattgagataaatcaggagacacccggatccgagaagtattcacccgagacataccaggagattcccggactggaggagtattcaccagagatttaccaagaaacgtctcagctagaggaatattcacccgagatttaccaagagacccccggacccgaggacctctccaccgagacctataagaataaggatgtgcctaaggaatgcttccccgagccccatcaagagaccggaggaccccaagggcaagatcccaaagcccatcaggaggacgctaaagacgcttatacctttccacaagagatgaaggaaaaacctaaggaagagccgggaatccccgcaatcctgaacgaatcccatccagaaaacgacgtgtactcttatgtgctgttctag

SEQ ID NO: 310700 - DNA, 1455 bp, Artificial Sequence
  derived and/or modified sequence
atggacctgggcaaggaccagagccacctgaagcaccaccagacccccgacccccaccaggaggagaaccacagccccgaggtgatcggcacctggagcctgagaaacagagagctgctgagaaagagaaaggccgaggtgcacgagaaggagaccagccagtggctgttcggcgagcagaagaagagaaagcagcagagaaccggcaagggcaacagaagaggcagaaagagacagcagaacaccgagctgaaggtggagccccagccccagatcgagaaggagatcgtggagaaggccctggcccccatcgagaagaagaccgagccccccggcagcatcaccaaggtgttccccagcgtggccagcccccagaaggtggtgcccgaggagcacttcagcgagatctgccaggagagcaacatctaccaggagaacttcagcgagtaccaggagatcgccgtgcagaaccacagcagcgagacctgccagcacgtgagcgagcccgaggacctgagccccaagatgtaccaggagatcagcgtgctgcaggacaacagcagcaagatctgccaggacatgaaggagcccgaggacaacagccccaacacctgccaggtgatcagcgtgatccaggaccaccccttcaagatgtaccaggacatggccaagagagaggacctggcccccaagatgtgccaggaggccgccgtgcccaagatcctgccctgccccaccagcgaggacaccgccgacctggccggctgcagcctgcaggcctaccccaagcccgacgtgcccaagggctacatcctggacaccgaccagaaccccgccgagcccgaggagtacaacgagaccgaccagggcatcgccgagaccgagggcctgttccccaagatccaggagatcgccgagcccaaggacctgagcaccaagacccaccaggagagcgccgagcccaagtacctgccccacaagacctgcaacgagatcatcgtgcccaaggcccccagccacaagaccatccaggagaccccccacagcgaggactacagcatcgagatcaaccaggagacccccggcagcgagaagtacagccccgagacctaccaggagatccccggcctggaggagtacagccccgagatctaccaggagaccagccagctggaggagtacagccccgagatctaccaggagacccccggccccgaggacctgagcaccgagacctacaagaacaaggacgtgcccaaggagtgcttccccgagccccaccaggagaccggcggcccccagggccaggaccccaaggcccaccaggaggacgccaaggacgcctacaccttcccccaggagatgaaggagaagcccaaggaggagcccggcatccccgccatcctgaacgagagccaccccgagaacgacgtgtacagctacgtgctgttctag

SEQ ID NO: 310701 - protein, 158 aa, Artificial Sequence
  derived and/or modified sequence
MLTVAALIDEQILCVHGGLSPDIKTLDQIRTIERNQEIPHKGAFCDLVWSDPEDVDTWAISPRGAGWLFGAKVTNEFVHINNLKLICRAHQLVHEGYKFMFDEKLVTVWSAPNYCYRCGNIASIMVFKDVNTREPKLFRAVPDSERVIPPRTTTPYFL

SEQ ID NO: 310702 - protein, 125 aa, Artificial Sequence
  derived and/or modified sequence
MFLLPRLQLLGQMRLCDYVCDLLLEESNVQPVSTPVTVCGDIHGQFYDLCELFRTGGQVPDTNYIFMGDFVDRGYYSLETFTYLLALKAKWPDRITLLRGNHESRQITQVYGFYDECQTKYGNAN

SEQ ID NO: 310703 - DNA, 378 bp, Artificial Sequence
  derived and/or modified sequence
atgtttcttctgcctaggctccaactgcttggtcaaatgcggctctgtgattatgtatgtgacttgttgctagaggaatccaacgtgcagccagtgtctactccggtaactgtgtgtggcgacattcatggccaattctacgacctttgtgagctgtttaggactgggggccaggtgccagacaccaattacatctttatgggagattttgtggatagaggttattattccctggagaccttcacttatctcctggctcttaaggcaaagtggcctgatagaatcacgctgcttcgcggaaatcacgaatctcggcagatcacccaagtgtatggtttttacgatgaatgtcagactaagtatgggaatgccaactag

SEQ ID NO: 310704 - DNA, 378 bp, Artificial Sequence
  derived and/or modified sequence
atgttcctgctgccccggctgcagctgctgggccagatgaggctgtgtgactatgtgtgtgacctgctgctggaggagagcaatgtgcagcctgtgtccacccctgtgacagtgtgtggggacatccacggccagttctatgacctgtgtgagctgttcagaactggaggccaggtgcctgacaccaactacatcttcatgggagactttgtggaccggggctactacagcctggagaccttcacctacctgctggccctgaaggccaagtggccagaccgcatcaccctgctgcggggcaaccacgagagccggcagatcacccaggtgtatggcttctatgatgagtgccagaccaagtatggaaatgccaactag

SEQ ID NO: 310705 - DNA, 378 bp, Artificial Sequence
  derived and/or modified sequence
atgttcctgctgccccggctgcagctgctgggccagatgcggctgtgcgattacgtgtgcgatctgctactcgaagagtccaacgtccagccagtgtccacacctgtcactgtttgtggggatattcatggccagttttacgacctgtgtgaacttttccgtaccggtgggcaggtcccggatacgaactatattttcatgggcgattttgtcgacagggggtactactccctggaaacttttacttacttactggcactgaaagccaaatggccagatcgtatcactctgctcagaggcaatcatgagagcaggcagatcactcaggtctatggattttatgatgagtgccagactaagtacgggaatgctaattag

SEQ ID NO: 310706 - DNA, 378 bp, Artificial Sequence
  derived and/or modified sequence
atgttcctgttgcctcgtctccagctactaggtcagatgcgcttatgtgactacgtttgtgacctgttgctggaggagtcaaatgtgcaacctgtctccactcctgttacagtttgcggagacatccacgggcagttttacgatttgtgtgaattgttccggaccggcggtcaggttccagatacaaactatatttttatgggagactttgttgaccgcggatactactccctggagacctttacatacctgctggccttgaaagcaaaatggcccgacagaataacactcctgcgcggtaatcacgagtcccgccagattactcaagtgtacgggttttatgacgagtgccagactaaatacggcaacgccaattag

SEQ ID NO: 310707 - DNA, 378 bp, Artificial Sequence
  derived and/or modified sequence
atgttcctgctgcccagactgcagctgctgggccagatgagactgtgcgactacgtgtgcgacctgctgctggaggagagcaacgtgcagcccgtgagcacccccgtgaccgtgtgcggcgacatccacggccagttctacgacctgtgcgagctgttcagaaccggcggccaggtgcccgacaccaactacatcttcatgggcgacttcgtggacagaggctactacagcctggagaccttcacctacctgctggccctgaaggccaagtggcccgacagaatcaccctgctgagaggcaaccacgagagcagacagatcacccaggtgtacggcttctacgacgagtgccagaccaagtacggcaacgccaactag

SEQ ID NO: 310708 - protein, 352 aa, Artificial Sequence
  derived and/or modified sequence
KAEVGHGYMDRPCLNPADPDCPATAPNKNSTKPLDMALVLNGGCHGLSRKYMHWQEELIVGGTVKNSTGKLVSAHALQTMFQLMTPKQMYEHFKGYEYVSHINWNEDKAAAILEAWQRTYVEVVHQSVAQNSTQKVLSFTTTTLDDILKSFSDVSVIRVASGYLLMVLPFLALGVGVDDVFLLAHAFSETGQNKRIPFEDRTGECLKRTGASVALTSISNVTAFFMAALIPIPALRAFSLQAAVVVVFNFAMVLLIFPAILSMDLYRREDRRLDIFCCFTSPCVSRVIQVEPQAYTDTHDNTRYSPPPPYSSHSFAHETQITMQSTVQLRTEYDPHTHVYYTTAEPRSEISV

SEQ ID NO: 310709 - DNA, 1059 bp, Artificial Sequence
  derived and/or modified sequence
aaggccgaggtgggccacggctacatggacagaccctgcctgaaccccgccgaccccgactgccccgccaccgcccccaacaagaacagcaccaagcccctggacatggccctggtgctgaacggcggctgccacggcctgagcagaaagtacatgcactggcaggaggagctgatcgtgggcggcaccgtgaagaacagcaccggcaagctggtgagcgcccacgccctgcagaccatgttccagctgatgacccccaagcagatgtacgagcacttcaagggctacgagtacgtgagccacatcaactggaacgaggacaaggccgccgccatcctggaggcctggcagagaacctacgtggaggtggtgcaccagagcgtggcccagaacagcacccagaaggtgctgagcttcaccaccaccaccctggacgacatcctgaagagcttcagcgacgtgagcgtgatcagagtggccagcggctacctgctgatggtgctgcccttcctggccctgggcgtgggcgtggacgacgtgttcctgctggcccacgccttcagcgagaccggccagaacaagagaatccccttcgaggacagaaccggcgagtgcctgaagagaaccggcgccagcgtggccctgaccagcatcagcaacgtgaccgccttcttcatggccgccctgatccccatccccgccctgagagccttcagcctgcaggccgccgtggtggtggtgttcaacttcgccatggtgctgctgatcttccccgccatcctgagcatggacctgtacagaagagaggacagaagactggacatcttctgctgcttcaccagcccctgcgtgagcagagtgatccaggtggagccccaggcctacaccgacacccacgacaacaccagatacagccccccccccccctacagcagccacagcttcgcccacgagacccagatcaccatgcagagcaccgtgcagctgagaaccgagtacgacccccacacccacgtgtactacaccaccgccgagcccagaagcgagatcagcgtgtag

SEQ ID NO: 310710 - DNA, 1059 bp, Artificial Sequence
  derived and/or modified sequence
aaggcggaagtgggccatggatacatggatagaccatgtctcaatcctgccgatcccgattgcccagctacggctccaaataagaactccacgaaacccctggacatggccctcgtattgaacggaggatgccacggtctttctagaaagtacatgcactggcaggaggaactgatcgttgggggcactgttaagaacagtactggcaaactggtgtctgcccacgccctgcagactatgtttcagctgatgacaccgaagcagatgtatgagcatttcaaggggtatgaatatgtctcacacattaactggaacgaggataaagcagccgcaatcctggaggcctggcagcgcacttacgttgaagtagttcatcagtctgtggcccagaactctacacagaaggtattgtccttcacaaccaccaccctcgatgacattttaaaaagctttagcgatgtgtcagtcatcagggtcgccagtggctacctgcttatggtcctccccttcttggccctcggggtcggagttgatgacgttttcctactcgctcatgccttttcagaaactggccaaaacaaacggatccccttcgaggaccgcacaggcgagtgcttgaaacgtaccggcgctagcgtggctcttacatctattagcaacgtgaccgcctttttcatggctgctttaatccccatccccgccctgagagcattctctttgcaggcagcagtggtagtcgtgttcaatttcgccatggtgctgctgatttttcctgccatcctgagtatggacctgtatcggagagaagatagaagattggatattttctgttgcttcacaagcccctgcgtgtcccgggtgatccaagtggagccacaggcatatactgacactcacgacaacacaaggtactccccgccacctccctactcctcgcactcctttgcgcacgagactcagatcaccatgcaatctacggttcagctgcggacagagtacgatccccacactcacgtctattataccaccgcagagccccgctcagaaatctccgtgtag

SEQ ID NO: 310711 - DNA, 1059 bp, Artificial Sequence
  derived and/or modified sequence
aaggccgaggtgggccacggctacatggaccggccctgcctgaacccagctgaccctgactgcccagccacagcccccaacaagaacagcaccaagcccctggacatggccctggtgctgaatggaggctgccacggcctgagcaggaagtacatgcactggcaggaggagctgattgtgggcggcaccgtgaagaacagcacaggcaagctggtgtctgcccacgccctgcagaccatgttccagctgatgacccccaagcagatgtatgagcacttcaagggctatgaatatgtgagccacatcaactggaatgaagacaaggccgccgccatcctggaggcctggcagaggacctacgtggaggtggtgcaccagagcgtggcccagaacagcacccagaaggtgctgtccttcaccaccaccaccctggatgacatcctgaagagcttcagtgatgtgtctgtcatccgggtggccagcggctacctgctgatggtgctgcccttcctggccctgggcgtgggcgtggatgatgtgttcctgctggcccacgccttcagcgagaccggccagaacaagaggatcccctttgaggacagaactggagagtgcctgaagaggactggagcctctgtggccctgaccagcatcagcaatgtgacagccttcttcatggccgccctgatccccatcccagccctgcgggccttcagcctgcaggccgctgtggtggtggtgttcaactttgccatggtgctgctgatcttccctgccatcctgtccatggacctgtacagaagagaagatagaaggctggacatcttctgctgcttcaccagcccctgtgtgtccagggtcatccaggtggagccccaggcctacacagacacccatgacaacacccgctacagccccccaccaccctacagcagccacagctttgcccacgagacccagatcaccatgcagagcacagtgcagctgaggacagaatatgacccccacacccacgtgtactacaccacagctgagcccaggtctgagatctctgtgtag

SEQ ID NO: 310712 - DNA, 1059 bp, Artificial Sequence
  derived and/or modified sequence
aaggccgaggtgggccacggctacatggaccggccctgcctgaaccctgccgatcctgattgtcccgcgacagcacccaataaaaacagcactaaacctctggacatggccctggtgttaaatggggggtgtcatggtttgtcccgcaagtatatgcattggcaggaggaattgatcgttggagggactgtgaaaaattcaactgggaaactagtgtctgctcatgccctccagacaatgttccagctgatgacacctaaacaaatgtacgagcacttcaagggctacgagtacgtgtctcatatcaactggaacgaagacaaagctgccgccattctggaggcctggcaaagaacatatgtcgaagttgtgcaccagagtgttgcccaaaatagcacccagaaggtgctgtctttcacgacaaccacactcgacgatatactgaagtccttttccgatgtgtccgttatacgggtggccagcggctacctgttgatggtgctcccattcctagccctgggcgtgggcgtggacgacgtttttctgcttgcgcatgcattctccgagacaggacaaaacaagcgcataccttttgaagaccggaccggtgagtgcctgaaacggaccggtgcctcagtggcccttacgagcatatccaacgtgaccgctttttttatggcagcgttgatccctatccctgcactacgcgcattttccctgcaagctgctgtggtggttgtcttcaatttcgccatggtgttattaatcttccccgcaattctgtccatggatctgtaccgaagagaagacagaaggctggacattttctgctgctttacctcgccttgtgtgtctagagtcatccaggtcgagccccaagcctacaccgacactcacgacaacacgaggtactcacccccgcctccatattccagtcacagctttgcccatgaaacccagatcaccatgcagtccactgtccagctaagaaccgagtatgaccctcatacccacgtgtattataccactgcagaacctcgctcagagatttcggtctag

SEQ ID NO: 310713 - DNA, 1059 bp, Artificial Sequence
  derived and/or modified sequence
aaagccgaagtggggcacgggtatatggatcggccttgtctgaatccagccgatcctgactgccccgcaacagccccaaataaaaacagcactaagcccctggatatggccctggtgctgaacggcggttgtcatggtttatcacggaagtacatgcattggcaagaagagttgattgtcgggggtactgtcaagaactcaactggtaagcttgtgtctgctcacgccctccaaacaatgtttcaattgatgacacccaagcagatgtacgaacacttcaaaggctacgagtacgtaagccatattaattggaacgaggataaggctgcagctatccttgaagcatggcagcgcacttacgtcgaggtggtccatcagagtgttgcgcagaactcgacgcagaaagtgttgtcattcaccacaaccacgctggacgacatcctcaagtccttctccgatgtgtcagtgatccgcgtggcaagtggctatcttctgatggtgcttcctttcctggctttgggtgttggggtagatgacgtgttcctgcttgcccacgcattttctgagacgggccaaaacaagaggataccattcgaagatcgtacaggcgaatgcctgaagcgcacaggggcatccgtagcccttaccagcatctccaacgtgactgcattcttcatggcggctctgatccccattcctgctctgcgcgctttcagtctccaggcagcggtggtagtggtatttaacttcgcaatggttctgctaatcttccccgcaatcctgtccatggacttatatagacgcgaggaccggagactggacattttctgctgttttacatctccttgcgtgtctagagtaatacaggtcgaacctcaggcctacaccgacacccatgacaacactcgctattcacccccacccccttactcctcacattctttcgcacacgaaactcagattaccatgcagtctactgtccagcttcggaccgaatatgaccctcacactcatgtatactatactaccgccgaaccgagatcggaaatatcagtatag

SEQ ID NO: 310714 - DNA, 1058 bp, Artificial Sequence
  derived and/or modified sequence
aaggctgaggttggtcatggttacatggaccgcccctgcctcaatccggccgatccagactgccccgccacagcccccaacaaaaattcaaccaaacctcttgatatggcccttgttttgaatggtggatgtcatggcttatccagaaagtatatgcactggcaggaggagttgattgtgggtggcacagtcaagaacagcactggaaaactcgtcagcgcccatgccctgcagaccatgttccagttaatgactcccaagcaaatgtacgagcacttcaaggggtacgagtatgtctcacacatcaactggaacgaggacaaagcggcagccatcctggaggcctggcagaggacatatgtggaggtggttcatcagagtgtcgcacagaactccactcaaaaggtgctttccttcaccaccacgaccctggacgacatcctgaaatccttctctgacgtcagtgtcatccgcgtggccagcggctacttactcatggttttgccatttctcgctcttggtgttggtgtggatgatgtttttcttctggcccacgccttcagtgaaacaggacagaataaaagaatcccttttgaggacaggaccggggagtgcctgaagcgcacaggagccagcgtggccctcacgtccatcagcaatgtcacagccttcttcatggccgcgttaatcccaattcccgctctgcgggcgttctccctccaggcagcggtagtagtggtgttcaattttgccatggttctgctcatttttcctgcaattctcagcatggatttatatcgacgcgaggacaggagactggatattttctgctgttttacaagcccctgcgtcagcagagtgattcaggttgaacctcaggcctacaccgacacacacgacaatacccgctacagccccccacctccctacagcagccacagctttgcccatgaaacgcagattaccatgcagtccactgtccagctccgcacggagtacgacccccacacgcacgtgtactacaccaccgctgagccgcgctccgagatctctgtgca

SEQ ID NO: 310715 - DNA, 3891 bp, Artificial Sequence
  derived and/or modified sequence
atgttcaacccccagctgatgatccagacccccaaggaggagggcgccaacgtgctgaccaccgaggccctgctgcagcacctggacagcgccctgcaggccagcagagtgcacgtgtacatgtacaacagacagtggaagctggagcacctgtgctacaagagcggcgagctgatcaccgagaccggctacatggaccagatcatcgagtacctgtacccctgcctgatcatcacccccctggactgcttctgggagggcgccaagctgcagagcggcaccgcctacctgctgggcaagccccccctgagatggaccaacttcgaccccctggagttcctggaggagctgaagaagatcaactaccaggtggacagctgggaggagatgctgaacaaggccgaggtgggccacggctacatggacagaccctgcctgaaccccgccgaccccgactgccccgccaccgcccccaacaagaacagcaccaagcccctggacatggccctggtgctgaacggcggctgccacggcctgagcagaaagtacatgcactggcaggaggagctgatcgtgggcggcaccgtgaagaacagcaccggcaagctggtgagcgcccacgccctgcagaccatgttccagctgatgacccccaagcagatgtacgagcacttcaagggctacgagtacgtgagccacatcaactggaacgaggacaaggccgccgccatcctggaggcctggcagagaacctacgtggaggtggtgcaccagagcgtggcccagaacagcacccagaaggtgctgagcttcaccaccaccaccctggacgacatcctgaagagcttcagcgacgtgagcgtgatcagagtggccagcggctacctgctgatgctggcctacgcctgcctgaccatgctgagatgggactgcagcaagagccagggcgccgtgggcctggccggcgtgctgctggtggccctgagcgtggccgccggcctgggcctgtgcagcctgatcggcatcagcttcaacgccgccaccacccaggtgctgcccttcctggccctgggcgtgggcgtggacgacgtgttcctgctggcccacgccttcagcgagaccggccagaacaagagaatccccttcgaggacagaaccggcgagtgcctgaagagaaccggcgccagcgtggccctgaccagcatcagcaacgtgaccgccttcttcatggccgccctgatccccatccccgccctgagagccttcagcctgcaggccgccgtggtggtggtgttcaacttcgccatggtgctgctgatcttccccgccatcctgagcatggacctgtacagaagagaggacagaagactggacatcttctgctgcttcaccagcccctgcgtgagcagagtgatccaggtggagccccaggcctacaccgacacccacgacaacaccagatacagccccccccccccctacagcagccacagcttcgcccacgagacccagatcaccatgcagagcaccgtgcagctgagaaccgagtacgacccccacacccacgtgtactacaccaccgccgagcccagaagcgagatcagcgtgcagcccgtgaccgtgacccaggacaccctgagctgccagagccccgagagcaccagcagcaccagagacctgctgagccagttcagcgacagcagcctgcactgcctggagcccccctgcaccaagtggaccctgagcagcttcgccgagaagcactacgcccccttcctgctgaagcccaaggccaaggtggtggtgatcttcctgttcctgggcctgctgggcgtgagcctgtacggcaccaccagagtgagagacggcctggacctgaccgacatcgtgcccagagagaccagagagtacgacttcatcgccgcccagttcaagtacttcagcttctacaacatgtacatcgtgacccagaaggccgactaccccaacatccagcacctgctgtacgacctgcacagaagcttcagcaacgtgaagtacgtgatgctggaggagaacaagcagctgcccaagatgtggctgcactacttcagagactggctgcagggcctgcaggacgccttcgacagcgactgggagaccggcaagatcatgcccaacaactacaagaacggcagcgacgacggcgtgctggcctacaagctgctggtgcagaccggcagcagagacaagcccatcgacatcagccagctgaccaagcagagactggtggacgccgacggcatcatcaaccccagcgccttctacatctacctgaccgcctgggtgagcaacgaccccgtggcctacgccgccagccaggccaacatcagaccccacagacccgagtgggtgcacgacaaggccgactacatgcccgagaccagactgagaatccccgccgccgagcccatcgagtacgcccagttccccttctacctgaacggcctgagagacaccagcgacttcgtggaggccatcgagaaggtgagaaccatctgcagcaactacaccagcctgggcctgagcagctaccccaacggctaccccttcctgttctgggagcagtacatcggcctgagacactggctgctgctgttcatcagcgtggtgctggcctgcaccttcctggtgtgcgccgtgttcctgctgaacccctggaccgccggcatcatcgtgatggtgctggccctgatgaccgtggagctgttcggcatgatgggcctgatcggcatcaagctgagcgccgtgcccgtggtgatcctgatcgccagcgtgggcatcggcgtggagttcaccgtgcacgtggccctggccttcctgaccgccatcggcgacaagaacagaagagccgtgctggccctggagcacatgttcgcccccgtgctggacggcgccgtgagcaccctgctgggcgtgctgatgctggccggcagcgagttcgacttcatcgtgagatacttcttcgccgtgctggccatcctgaccatcctgggcgtgctgaacggcctggtgctgctgcccgtgctgctgagcttcttcggcccctaccccgaggtgagccccgccaacggcctgaacagactgcccacccccagccccgagcccccccccagcgtggtgagattcgccatgccccccggccacacccacagcggcagcgacagcagcgacagcgagtacagcagccagaccaccgtgagcggcctgagcgaggagctgagacactacgaggcccagcagggcgccggcggccccgcccaccaggtgatcgtggaggccaccgagaaccccgtgttcgcccacagcaccgtggtgcaccccgagagcagacaccacccccccagcaaccccagacagcagccccacctggacagcggcagcctgccccccggcagacagggccagcagcccagaagagacccccccagagagggcctgtggccccccccctacagacccagaagagacgccttcgagatcagcaccgagggccacagcggccccagcaacagagccagatggggccccagaggcgccagaagccacaaccccagaaaccccgccagcaccgccatgggcagcagcgtgcccggctactgccagcccatcaccaccgtgaccgccagcgccagcgtgaccgtggccgtgcaccccccccccgtgcccggccccggcagaaaccccagaggcggcctgtgccccggctaccccgagaccgaccacggcctgttcgaggacccccacgtgcccttccacgtgagatgcgagagaagagacagcaaggtggaggtgatcgagctgcaggacgtggagtgcgaggagagacccagaggcagcagcagcaactag

SEQ ID NO: 310716 - DNA, 3891 bp, Artificial Sequence
  derived and/or modified sequence
atgtttaatccacagctgatgatccaaacacccaaagaggaaggtgctaacgttctgacaactgaagccctgctccagcatttggatagcgcactccaggcttccagagtgcatgtgtatatgtacaatcgccagtggaagctggaacatttgtgctataagtcaggtgagctgattactgaaacggggtatatggaccaaataatcgaatatctgtacccatgtctcatcatcacccccctcgactgcttctgggaaggggcaaagctacagtcagggacggcctacttactgggaaagccccctctcagatggacaaacttcgaccctctggaatttcttgaagagctcaaaaagatcaattatcaggtggactcatgggaagagatgctgaacaaggccgaggtgggccacggctacatggacagaccctgtttgaatcccgctgaccctgactgcccggcaactgcccctaacaaaaatagcaccaaaccactcgacatggctctggtgctgaatgggggatgtcacggcctgagccgaaaatacatgcactggcaagaagagctcatagtcggtggaactgtcaaaaacagtaccgggaagctggtttccgctcacgccctgcaaacaatgtttcagctgatgacccctaagcagatgtatgagcacttcaagggttacgagtacgtgtcccacataaattggaacgaagataaagccgcagcgatacttgaagcctggcagagaacttatgtcgaggtggtgcaccagtctgtggcgcagaattcaacgcagaaagtactgagcttcaccaccaccacccttgatgatattctgaagtcattttcagatgtgagcgttattcgagtggccagcggatacctgttgatgctggcctatgcatgccttaccatgcttaggtgggattgttcgaaatctcaaggagccgttggtctggctggcgtgctattggtcgccctgtccgttgccgcagggctcggactatgctccctgatcggcattagcttcaacgcggccacaacgcaggtccttcccttcttagcccttggtgttggcgtagacgacgtgttcctgctagcacacgctttcagcgaaacaggacagaataagaggataccctttgaagatcgtacaggggaatgcctgaaaagaaccggcgcatcagtcgccctcacttcaatttccaacgtgacggccttctttatggccgcactcatccccatcccagcacttagagctttttccctccaggccgccgtggtggtggtgttcaattttgccatggtcctactgatcttccctgcgatactatctatggacttgtaccgccgcgaggatcgtagattagacattttttgctgtttcacatcgccctgcgtgagtagagtgatacaggtcgagcctcaggcatacaccgatacgcacgataacacgagatatagcccaccgcctccatattcttcacacagcttcgcccacgagactcagattactatgcagagtacagtgcagctcagaacagagtacgatccccacacacatgtctactacacgactgccgagccccgatccgagatttcggtgcagcctgtgaccgttactcaggacactctgagctgtcagagcccagagtccaccagctctacgcgggacctcctgtcacagttttccgattcgagcctacattgcctcgagccgccctgcaccaagtggactctgagcagcttcgcagagaagcactacgcacccttcctgctgaagccaaaggctaaggtggtcgtgatctttctttttctaggcctgctgggggtgagtttatacggcacgaccagagtccgggacggcctggatctcacagacatcgtgccccgagaaacgcgcgagtacgactttatcgccgcccagtttaagtacttttccttctataacatgtacattgtaacacagaaggccgactaccccaatattcaacacctgttgtatgatttacaccgctcgttttcaaacgtcaagtacgtaatgctggaggagaataaacagctgccaaagatgtggctccattacttcagggactggctccagggactacaggatgcgtttgactcagactgggaaacagggaagataatgcccaacaattacaaaaacgggtccgacgacggagttctggcgtataagttgttagtccagacagggtctagagacaagcccatcgatatatctcagttgaccaagcagcgccttgttgacgctgatggcataattaacccatccgcattctatatttacctaacagcctgggtgtctaatgaccctgttgcttacgccgcgagccaagccaacattagacctcacagacccgaatgggtacacgacaaagctgattacatgcctgaaaccagactgcgcattcccgccgccgagcccattgaatacgctcaatttcccttctatctgaatggtctccgtgacacgtctgactttgtcgaagccattgagaaagtgcggaccatttgctccaactatacttctctcggattgtccagctaccccaatggctacccttttctgttttgggagcagtatattgggctgcgccactggctgctcctattcattagtgtcgtgctcgcttgtacattcctggtctgcgctgtgttcctactgaacccgtggaccgcgggtataatagtcatggtgctggcactcatgaccgtggagttgttcggcatgatgggcctgatcggaatcaagctttcagctgtgccggtagtgattttgatcgcttctgtgggcatcggcgtggaattcaccgtccacgtagctctggcctttcttaccgctatcggagacaaaaacaggagagcggtgctggcactagaacatatgttcgcccccgtcctcgacggtgccgtctcaacactgctgggagtgttgatgttggccggctcagagttcgatttcattgtgagatatttttttgcagttctggcaatactcactattctgggtgtcctaaacgggctcgtactgctccctgtgctcctctcattttttggtccctaccctgaggtgtccccggccaacggcttgaatagactccctacaccttctcctgaaccacctccgagcgtggtgcggtttgctatgccacctgggcatacccattcgggcagtgatagctccgactcggagtatagctctcagactacagtttctgggctgagtgaggaactgcgccattacgaagctcaacaaggtgcgggaggccctgcgcatcaagtgatagtagaggcaacagaaaatcctgtcttcgctcattcaactgtggttcatcccgaatcgcgacatcaccccccgtccaacccccgtcagcagccgcacctggacagtggtagtttacctcctggacgccagggacagcagcccagaagggaccctcccagagagggtttgtggcctcctccctaccgcccccggcgcgatgcattcgagatctccactgaggggcattccggacctagtaatcgcgcacgatggggcccacgcggtgctcgctctcacaatccccgaaatcctgcgtctactgcaatggggagcagtgtgcccgggtattgccaacccattacaactgttacagcaagtgcaagcgtcactgtagccgtgcatcccccacccgtgcctggcccagggagaaatccccgcggcggcctatgccctggataccctgaaacggaccatgggctgtttgaggacccccacgtcccttttcacgtgcgatgtgaacgtagagacagcaaggtcgaggtgatcgaactgcaagacgtggagtgtgaggagcgaccacgtggtagcagctcaaattag

SEQ ID NO: 310717 - DNA, 3891 bp, Artificial Sequence
  derived and/or modified sequence
atgtttaacccccagctaatgattcagacgcccaaggaggaaggtgcaaacgttcttacaacagaggcactcctacaacacttggacagcgctcttcaggctagcagagtgcatgtgtatatgtacaacagacagtggaaactggagcatttatgttacaaaagcggggaactgattaccgaaacaggatacatggaccagatcattgagtacttatatccctgcctgattattacaccactggattgtttttgggaaggggccaaattgcagagtggcacagcatatctgctgggcaagccgcctctgcgctggaccaactttgatccattagaatttctggaggagttgaagaaaattaattaccaggttgacagctgggaggagatgttgaataaagccgaggtgggtcacggttacatggaccggccatgtcttaatccagccgatccagattgtccagctacggcccccaataaaaacagcactaaaccactagatatggccctggttctgaacggcggctgccacggactttcaaggaagtatatgcattggcaggaagagctgatcgtcggcggcactgtcaagaactcgacaggcaagcttgtgtcagctcacgcactgcagactatgtttcagctcatgacaccgaagcaaatgtacgagcacttcaaagggtatgagtatgttagtcatatcaactggaatgaggacaaagcagctgcaattttagaggcctggcagaggacgtatgtagaagttgttcatcagagtgttgcccaaaatagcacacagaaggtattatcattcacgaccactacactcgatgatattcttaagagctttagtgatgtttctgtcatcagagtggcctccggctatcttctgatgctcgcttatgcttgcctcacaatgttacggtgggattgtagcaagagtcagggggccgtgggtctggctggggtacttttagttgcattgtcagttgccgccggcttgggcctttgttcactgatcggaatttctttcaacgctgctaccacacaagttctgccattcctggcccttggagttggtgtggatgacgtgttcctgctggctcatgcctttagcgaaacaggacagaacaagcggatccctttcgaggaccggacaggggagtgcctcaagcggaccggcgcctcagtggcactgacatcgatcagcaacgtgaccgcgttttttatggcagccctgatccctatccctgccctcagagctttttcccttcaagccgccgtggtggtggtcttcaattttgctatggtgctcctgatttttcccgcaattctctcaatggacttgtatcggcgcgaggatcgtcggctagatatcttttgctgttttaccagtccttgtgtttcccgagttatccaggtggagccacaggcatacacagacactcacgacaacacaagatattcccccccgcccccatattccagtcactctttcgctcatgaaacacagattacgatgcagagcacggtccaactgagaaccgagtacgatccccacacacacgtgtactacactactgcggagcctagatctgaaataagcgttcagcccgtgaccgtaacccaagacacgctaagctgccagtcgcctgaaagcacctcctccacgagggatctgcttagtcaattttcagactcctctctgcactgcctagaacccccatgtacaaaatggacactatcgtctttcgcagaaaagcattatgcccccttccttttgaagccgaaggccaaggttgtagtgatcttcctctttctgggcctattgggggtctccctgtacggaacaacaagagttcgcgacggtctagacctgactgatatcgtacctagagagactagagaatacgattttattgcagcccagttcaagtacttcagtttttataacatgtacatcgtgacccagaaggctgactacccgaacatacaacacttactctacgacttacaccgaagtttcagcaatgtgaagtatgtcatgctggaagaaaacaaacagctgcccaaaatgtggctccattattttcgcgattggctgcaagggctgcaggatgcctttgacagcgactgggagactggtaagattatgccgaacaattacaagaatggtagcgatgatggagtccttgcctataaactgctagtgcaaacagggtcaagagacaagccaatagatatttcgcagctcaccaaacaacggctggtggacgccgatggaatcatcaatcctagtgccttctacatttacctgacggcctgggtctcaaatgaccctgtcgcatacgcagcaagccaggcgaatatccgccctcatcgtcctgagtgggtccacgataaggcagattatatgcccgaaacacggctgcgtattcccgcagctgaaccgattgaatatgcgcagtttcccttttatttaaatggactgagagacactagtgacttcgtcgaggctatagagaaagtgaggaccatctgctccaactatacatccctgggactgtcctcctatcccaacggttatccatttctattctgggagcagtacattggcctcagacattggttactgctctttatttcagtggttctggcctgtacttttctggtctgcgctgtgtttttgcttaacccttggacggccggcattattgtgatggtgcttgccttgatgaccgtggaactattcggaatgatggggcttattgggataaagctaagtgccgttccggttgtgatcctgatcgccagtgttggcatcggcgtggagtttactgtgcatgtggccctggcgtttttgaccgcaatcggcgacaaaaacagaagagcggtgctcgctcttgagcacatgtttgccccagtcctggacggcgcagtgtccacactcctaggggtcctgatgctggctggaagcgagttcgacttcatagtgcggtatttctttgccgtactcgccattttaaccatactgggagtgctcaatgggttggtgctattgcccgtgctgctctctttctttggtccatatcctgaggtcagtcccgccaacggactaaatcgtttgcccacccccagtcctgagccccctccgagtgtggttcgatttgcaatgcccccaggccacacacatagtggatctgattcatcggattcagagtactccagccaaaccaccgtgagcggcttaagtgaagaactgaggcactatgaggcccagcagggcgcaggcggacccgcccaccaagtcatcgttgaagcgacggagaacccggtttttgcccactctaccgtggtgcaccccgagagccggcaccacccaccaagcaacccaagacagcagccccatttggactccggcagtttaccacccggcagacaggggcagcagccacgacgcgatccgccgcgcgaggggctttggcctccaccatatcggcccagaagggacgcttttgaaatatcaacagagggccactcaggaccttcgaacagggcacggtggggccccaggggtgctcggtcccataatcccaggaatccggcgagcacagccatggggtcaagcgtgcccggctactgtcaaccgatcaccaccgtaactgcatctgcatccgtaacagttgccgtgcatcccccacctgttccggggcctgggcggaatccccggggcggactgtgtcctggatatcccgagaccgatcatggcctatttgaggacccccatgtgccattccatgtgcggtgtgagcgtagggattcaaaggttgaagttatcgagctacaagacgttgagtgcgaggagagacctcggggctcatccagcaattag

SEQ ID NO: 310718 - DNA, 3891 bp, Artificial Sequence
  derived and/or modified sequence
atgttcaatccacagttgatgattcagacacctaaagaagaaggagccaatgttctcacaacggaggcgctgctgcaacatttggacagtgccctgcaggcgtccagagtgcacgtgtatatgtacaataggcagtggaaactggaacacttatgctacaagtccggggaactgatcacggaaacaggctatatggaccaaatcatagagtatctgtacccttgccttatcattacacctttggattgcttctgggagggcgctaaacttcagtccggcactgcctaccttctgggcaaacctccccttaggtggactaactttgaccctctggaattcctagaagaactgaagaagatcaactatcaggtcgatagctgggaagagatgctgaataaagccgaagtgggccatggttacatggaccgcccctgtctgaatcccgctgatcctgattgcccggctacagctcctaataaaaattccactaaaccattagacatggctcttgtattaaacggtggatgccacggtttaagccggaagtacatgcactggcaagaagaacttatagttggcggaaccgtgaagaactcaacagggaaactggtctctgcccatgctctccaaacgatgtttcagttgatgaccccgaagcagatgtacgaacattttaagggctacgaatacgtaagtcatattaattggaacgaggataaagccgctgccattctcgaagcgtggcagaggacatacgtagaagtggttcaccaaagcgtggcacagaactccacacagaaggtgcttagttttaccacaaccaccctcgacgatattcttaaaagcttctccgatgtatccgtcattcgcgtggcctcaggatacctcctgatgctcgcttacgcatgtctcacaatgctacgctgggattgcagcaagagccagggcgcagtcggtctggccggagtgctgctcgtcgccctgagcgtagcggccgggctgggtttatgctcccttatcggtattagctttaacgcagctaccacccaggtcctgccatttcttgccctgggagtgggggtagacgatgtatttttactcgcccatgcgtttagtgaaacaggccagaataagcgcatcccgtttgaagacaggaccggcgagtgtctcaagaggacaggagcaagtgtcgccttaacctcgatttcgaatgtcacagccttttttatggctgccctgattcctatccctgccctccgcgctttctccctacaagctgcagtcgtagtggtattcaattttgccatggtgctcctgatatttccagctatccttagtatggatctttaccgtcgcgaggatcggcggctcgatatcttctgttgttttacaagcccatgcgtctctagagtcatacaggttgagccccaggcatacaccgatacccacgataacaccaggtacagtcccccacccccctactcttcccactcttttgcccacgagacgcaaattacgatgcagagcaccgtacagctgcgaacagaatacgatccccacacacacgtgtactacacaacagccgagcctcgctccgaaattagcgtgcagcccgtgactgtgactcaggacaccctgtcctgtcagtctcctgaaagcacatcttccacccgggatctcctttcacagttttcagactctagcctccattgcctggagcccccgtgtaccaagtggacgctgtcttccttcgctgaaaagcactatgcaccttttttgctcaaacccaaggccaaggtggtggtgatatttttgttcttaggcctcctgggggtgtccctttacggtacaacacgcgtgagggatggactggacttgactgacattgtacctcgggagacccgggaatacgattttattgcagcccaattcaaatacttctcattttacaatatgtacatcgtaacccagaaagccgattacccgaatatccagcaccttctctatgatctacaccggtccttcagtaatgtaaagtacgtgatgcttgaagagaacaaacagctccccaagatgtggctgcattacttccgcgattggcttcagggtctgcaggatgcgtttgactctgactgggagaccggcaaaatcatgccaaataactacaagaatggtagcgacgatggagttctagcttataaacttctggtgcagacaggatcccgagacaagccgatcgatatttcacaactgacaaaacagcgcctcgtcgacgccgatggcatcatcaaccctagtgcgttttacatctaccttaccgcgtgggtgtctaacgaccctgttgcatatgctgcttcacaggcaaatatcaggccgcataggcccgagtgggtgcatgataaagctgattatatgcccgaaacccggcttagaatcccggcagcagaacctattgagtacgcacagtttcccttttacttaaacggattaagagacacatccgatttcgtcgaggccattgagaaggtccgaaccatctgctctaattacacatctctcggcctatcctcttatcctaatggctatcccttcctcttctgggagcagtatattgggcttaggcactggctgctgctattcatctccgtagtgctggcttgcacattcctcgtctgcgctgtattcctgctgaacccctggaccgcaggcatcattgtgatggtcctggctttaatgaccgtagaactatttgggatgatgggccttataggaatcaagctcagtgccgtgcctgtcgtgatcttgatcgccagtgtggggatcggggttgagtttaccgtgcacgttgccctggcatttctgacggcaattggtgataaaaaccgacgagcagtgcttgctctcgaacacatgtttgccccagtccttgacggcgctgtgagcaccctacttggtgttttaatgctggccgggagtgagtttgacttcattgtgcggtacttcttcgctgtactcgctattctgactatcctgggcgtgctcaacggcttggtattactacctgtgctgttatccttttttggcccatatcctgaagtctctcctgccaacggactgaacagactgcctaccccttccccagaaccaccaccctccgtggtgaggttcgccatgccgccgggccacactcattccggcagcgattcttctgactcagaatattcctcgcagacgacagtgtccggtctgtccgaagagctgagacactacgaggcccagcagggggcaggcgggcctgcacaccaggtgatcgtggaagcaactgaaaatcccgtattcgcacatagcaccgtggtgcatcctgaatctcgacaccatccaccttctaaccctcgccagcaaccccacctggactccggctctttgccaccgggacgacaaggccaacagccccgtcgggaccccccccgggagggtctctggccccctccctaccgcccacggcgcgatgcttttgagatctccaccgaaggtcacagcggaccatcgaatcgtgcccgctggggacccagaggcgctcgttcccacaatccaagaaacccagcctcgacagcaatgggaagttctgtccccggctactgccaaccgatcaccactgtgactgcatccgcgagcgtcacagtggccgtgcaccccccacctgtgccaggcccgggcaggaacccccgcggaggcctctgtcccgggtatccagaaactgaccacggcctgtttgaggacccccatgtgccattccacgtgagatgcgagcggcgcgactcgaaggtggaagtaatcgagctgcaggacgtagaatgtgaagaacggccgcgcggtagcagcagtaattag

SEQ ID NO: 310719 - DNA, 3891 bp, Artificial Sequence
  derived and/or modified sequence
atgttcaacccccagctgatgatccagacccccaaggaggagggcgccaacgtgctgaccacagaggccctgctgcagcacctggacagcgccctgcaggccagccgggtgcacgtgtacatgtacaaccggcagtggaagctggagcacctgtgctacaagtctggagagctgatcacagagaccggctacatggaccagatcatcgagtacctgtacccctgcctgatcatcacccccctggactgcttctgggagggcgccaagctgcagagcggcacagcctacctgctgggcaagccacccctgcgctggaccaactttgaccccctggagttcctggaggagctgaagaagatcaactaccaggtggacagctgggaggagatgctgaacaaggccgaggtgggccacggctacatggaccggccctgcctgaacccagctgaccctgactgcccagccacagcccccaacaagaacagcaccaagcccctggacatggccctggtgctgaatggaggctgccacggcctgagcaggaagtacatgcactggcaggaggagctgattgtgggcggcaccgtgaagaacagcacaggcaagctggtgtctgcccacgccctgcagaccatgttccagctgatgacccccaagcagatgtatgagcacttcaagggctatgaatatgtgagccacatcaactggaatgaagacaaggccgccgccatcctggaggcctggcagaggacctacgtggaggtggtgcaccagagcgtggcccagaacagcacccagaaggtgctgtccttcaccaccaccaccctggatgacatcctgaagagcttcagtgatgtgtctgtcatccgggtggccagcggctacctgctgatgctggcctatgcctgcctgaccatgctgcgctgggactgcagcaagagccagggcgctgtgggcctggccggcgtgctgctggtggccctgtctgtggccgccggcctgggcctgtgcagcctcatcggcatctccttcaatgctgccaccacccaggtgctgcccttcctggccctgggcgtgggcgtggatgatgtgttcctgctggcccacgccttcagcgagaccggccagaacaagaggatcccctttgaggacagaactggagagtgcctgaagaggactggagcctctgtggccctgaccagcatcagcaatgtgacagccttcttcatggccgccctgatccccatcccagccctgcgggccttcagcctgcaggccgctgtggtggtggtgttcaactttgccatggtgctgctgatcttccctgccatcctgtccatggacctgtacagaagagaagatagaaggctggacatcttctgctgcttcaccagcccctgtgtgtccagggtcatccaggtggagccccaggcctacacagacacccatgacaacacccgctacagccccccaccaccctacagcagccacagctttgcccacgagacccagatcaccatgcagagcacagtgcagctgaggacagaatatgacccccacacccacgtgtactacaccacagctgagcccaggtctgagatctctgtgcagcctgtgacagtgacccaggacaccctgagctgccagagccctgagagcaccagcagcacccgggacctgctgagccagttcagtgacagcagcctgcactgcctggagcccccctgcaccaagtggaccctgagcagctttgctgagaagcactacgcccccttcctgctgaagcccaaggccaaggtggtggtgatcttcctgttcctgggcctgctgggcgtgtccctgtatggcaccaccagggtgagagatggcctggacctgacagacatcgtgccccgggagacccgggagtatgacttcatcgccgcccagttcaagtacttctccttctacaacatgtacatcgtgacccagaaggctgactaccccaacatccagcacctgctgtatgacctgcacaggagcttcagcaatgtgaagtatgtgatgctggaggagaacaagcagctgcccaagatgtggctgcactacttccgggactggctgcagggcctgcaggatgcctttgacagcgactgggagaccgggaagatcatgcccaacaactacaagaatggaagtgatgatggagtgctggcctacaagctgctggtgcagacaggcagccgggacaagcccatcgacatcagccagctgaccaagcagaggctggtggatgctgatggcatcatcaaccccagcgccttctacatctacctgacagcctgggtgtccaatgaccctgtggcctatgctgccagccaggccaacatccggccccacaggcctgagtgggtgcatgacaaggctgactacatgcctgagacccggctgcgcatcccagctgctgagcccatcgagtatgcccagttccccttctacctgaatggcctgcgggacaccagtgactttgtggaggccatcgagaaggtgaggaccatctgcagcaactacaccagcctgggcctgagcagctaccccaacggctaccccttcctgttctgggagcagtacatcggcctgcggcactggctgctgctcttcatctctgtggtgctggcctgcaccttcctggtgtgtgctgtgttcctgctgaacccctggacagctggcatcatcgtgatggtgctggccctgatgacagtggagctgtttggcatgatgggcctgattggcatcaagctgtctgctgtgcctgtggtgatcctgattgcctctgtgggcattggagtggagttcaccgtgcacgtggccctggccttcctgacagccatcggggacaagaacagaagagctgtgctggccctggagcacatgtttgcccctgtgctggatggagctgtgtccaccctgctgggcgtgctgatgctggccggcagcgagtttgacttcatcgtgcgctacttctttgctgtgctggccatcctgaccatcctgggcgtgctgaatggcctggtgctgctgcctgtgctgctgtccttcttcggcccctacccagaggtgtccccagccaacggcctgaaccggctgcccacccccagccctgagcccccacccagcgtggtgcgctttgccatgcctcctggccacacccacagcggcagtgacagcagtgacagcgagtacagcagccagaccaccgtgtctggcctgtctgaggagctgcggcactatgaggcccagcagggcgctgggggccctgcccaccaggtgattgtggaggccacagaaaatcctgtgtttgcccacagcacagtggtgcaccctgagagccgccaccacccccccagcaacccccggcagcagccccacctggacagcggcagcctgcccccaggccggcagggccagcagccccggcgggaccccccccgggagggcctgtggcccccaccctaccggcccaggagagatgcctttgagatcagcacagagggccacagcggccccagcaacagagcccgctggggccccaggggggcccggagccacaaccccagaaatcctgccagcacagccatgggcagctctgtgcccggctactgccagcccatcaccaccgtgacagccagcgcctctgtgacagtggccgtgcaccccccacctgtgcccggccctggcaggaacccccggggcggcctgtgccccggctacccagagacagaccacggcctgtttgaggacccccacgtgcccttccacgtgcgctgtgaaagaagagacagcaaggtggaggtgattgagctgcaggatgtggagtgtgaggagcggccccggggcagcagcagcaactag

SEQ ID NO: 310720 - DNA, 3891 bp, Artificial Sequence
  derived and/or modified sequence
atgttcaacccccagctgatgatccagacccccaaggaggagggcgccaatgttctcaccaccgaggcactgcttcagcacctcgattctgccttacaagctagtagggtgcacgtgtacatgtacaatagacagtggaaacttgagcatctgtgttacaagtccggggagctgatcactgagaccggttatatggaccagatcattgagtatctttatccgtgtctcataatcactcccctggactgcttctgggagggagctaaattgcagtcaggaaccgcttacctgcttggcaagccccctctcaggtggacaaactttgatcccttggaatttcttgaggaactgaaaaagattaactatcaggtggatagttgggaggagatgctgaacaaagcggaggtagggcacgggtacatggacaggccctgtctgaacccagcagatccagactgccccgccaccgctccaaataagaacagcaccaagccattagatatggccctggtgctgaacgggggttgccacggcttgtcacggaagtatatgcattggcaagaagaattgatcgtcggtggcaccgtcaagaactcaactgggaagctagtctcagcgcatgcgctgcagacaatgttccaactgatgaccccaaagcagatgtacgagcactttaaggggtacgaatatgttagtcacatcaactggaacgaagacaaggctgcagcaattctggaagcttggcagagaacatacgtggaggttgtacatcagtctgtggctcagaatagcactcaaaaggtcctctcctttaccaccacaactttggatgacattctgaaatctttttctgatgtgtcagtcatccgcgtagcctctggctacctgttaatgctcgcatacgcttgcctgacaatgcttaggtgggattgtagtaagagccagggtgcagttggactggctggcgttctcctcgtggctctctcggtagcagcgggacttggactgtgctcacttattgggatctccttcaacgctgctacgactcaggtgttgccctttctcgccctgggagttggtgtggacgatgtgttccttttggcccatgccttttctgaaactggacagaataaaaggataccttttgaggacaggaccggggagtgcctcaaacggacaggagcctccgtggctctgacatctatttcaaacgttacagctttcttcatggctgcattgatacccataccagccctgcgggccttctccttacaggccgccgtagtggtggtgtttaatttcgccatggtgctgctcatttttcctgctatcctgtcaatggacctctatcgacgcgaggataggaggttggatatcttttgttgcttcacttcgccctgtgtgagtcgagtgatccaggtcgagcctcaggcttacaccgacacacatgacaataccagatacagccccccaccaccctattcttctcattccttcgcacacgaaacacagatcacaatgcagtccacagttcagctgaggaccgagtacgacccgcacacccatgtttactacaccacggcagagccaaggagcgagatctccgtacagcctgttacagtcacacaggatacattgtcttgtcagagtccagaaagcacgtctagcaccagagaccttttgagccagttctcagactccagtttgcactgcctcgaacctccttgcaccaagtggacactgtctagttttgcagaaaagcactatgcaccattcctgctcaaacccaaagccaaggtagtagtaatctttcttttcctgggtctgctcggcgtttccctctacggcacaaccagggttagggatggactggacctcaccgacattgtgccaagggagaccagagaatacgattttattgccgcccagtttaagtatttcagcttttacaacatgtatattgttacccagaaagctgattatcctaacattcaacatctgctctacgatttgcaccgttcttttagcaatgtaaagtacgttatgttggaagaaaacaaacagctgcctaagatgtggctgcactatttccgcgactggctgcaggggctgcaagacgcctttgatagcgactgggaaaccgggaagatcatgccgaataactacaagaatggatccgatgatggcgtgctggcctacaaactgttagtgcaaaccgggtctcgtgataagcccatagatattagccagctcaccaaacagaggctggtagatgctgacgggatcattaacccatccgccttctatatttatttgacggcatgggtgtcaaatgaccccgtggcttacgccgcctcccaggccaatattaggccacaccgtcccgaatgggttcacgacaaagccgattatatgcccgaaacgagactgagaatcccggcagccgaacctatcgaatatgcccagtttccgttctacctgaacgggctgcgggatacttccgacttcgtggaagccattgaaaaggtccgaactatctgcagcaactacacaagtctggggctgtcttcttatcctaacggataccccttcctcttctgggagcagtacatcggcctccggcattggctgctcctgttcatcagcgtggttctagcctgcacctttctcgtctgtgctgtatttctcttgaacccctggactgccggcattatcgtcatggttctggccctgatgactgtggagttgttcggtatgatgggacttatcggaatcaaacttagtgccgtgcccgtcgtgatcctgattgcaagtgtgggtatcggcgtggaattcacagtccacgtagcactcgcatttttgactgcaattggggacaagaatcgacgggcagttctcgccctagagcacatgtttgcaccagttttagatggggccgttagtactcttttgggggttctgatgctcgccggctctgagttcgactttattgtcagatatttttttgccgtgttagctattctgaccatattgggggtcctcaacggtctagtcttactgcctgtactgctctccttctttggaccttatcctgaggtgtcccccgcaaatggtctcaataggctaccaactccatctccagaacctccaccatcggttgtgcgtttcgcgatgccacccggccatacgcattccggcagcgactcttcggatagtgaatactcttctcagacaactgtttcaggactgagcgaagaattgcggcattacgaggcccagcagggtgccggtggccccgctcatcaggtcatcgtggaggctaccgagaacccagtgtttgcacacagtactgtggtccacccagaaagtcggcaccaccctccttccaatccccgtcagcagccgcatctggattccggcagccttccacccgggcgccagggacaacagccccgccgggatccacctcgcgagggcctgtggccacctccatatcgcccgcggcgcgacgcatttgaaatcagcaccgagggacattcaggacccagcaacagagccaggtggggccctcgaggtgcgcgttcacataaccccagaaatccggcctccacggccatggggagctccgtccccggctattgtcagcctataacgacggtgactgcgtcagcaagcgtgaccgtggccgtgcaccccccacccgtgcccggccctggtaggaacccccgaggcgggctgtgtcccggctatcccgagaccgaccacggactcttcgaagatccgcacgtgccattccacgtgaggtgtgaacgccgggatagtaaggtggaggtgatcgaactgcaggatgtcgagtgtgaagaaagaccaagaggcagttcttctaactag

SEQ ID NO: 310721 - DNA, 3891 bp, Artificial Sequence
  derived and/or modified sequence
atgttcaacccccagctgatgatccagacccccaaggaggagggcgctaatgtacttactaccgaagccctcctccagcatcttgacagcgcacttcaggccagccgagtgcatgtgtatatgtacaatagacagtggaagcttgaacacctgtgctataagtcaggcgagttgataactgagaccggctatatggaccaaatcatcgaatatctgtatccatgtttaattatcacaccgctcgactgcttttgggagggcgcaaaactgcagtccggtactgcctatctactcgggaagccccccttgaggtggaccaatttcgacccactcgaatttctcgaagagttgaaaaagattaattaccaagtagattcctgggaagagatgttaaacaaagcagaggtgggccacggatacatggaccggccgtgtctgaatcctgctgatcccgactgccccgcaaccgctccaaacaagaatagcactaagcctctggatatggcactggtgctgaatggtgggtgtcatggcctcagcagaaagtacatgcattggcaggaggagcttatagtaggaggaacagtgaagaatagcactggcaaattggtgtcagctcatgcgttacagaccatgtttcagttgatgaccccaaaacagatgtacgaacacttcaagggatacgaatacgtatcacatatcaattggaacgaagacaaggcagctgcaattctcgaggcttggcagcgtacctatgtcgaagtcgtacatcagtctgtagctcagaatagtactcaaaaggtcctgtcctttaccacaaccacactggatgacattctcaagtcttttagtgacgttagcgtgattcgggttgcttccggataccttctgatgctcgcttacgcctgtctgacaatgttgaggtgggattgcagcaagtcccagggcgccgtggggctggcaggcgttctcctggtggccctttctgtggcggccggacttgggctgtgttctttaattggcatcagttttaatgctgctacaacgcaagtcctgcccttccttgctcttggggtgggcgtagacgacgttttccttctggcacacgcattttctgaaaccggtcaaaacaaacgaattcctttcgaggatcgcacaggtgaatgtctcaaaagaactggtgcgtccgtcgcacttacgagtatttccaacgtgacggcattttttatggccgcgctgatccctattcccgccctgcgtgctttctccctccaggccgccgtggtcgttgtcttcaactttgccatggtcttgctgattttcccggccattctaagtatggacctgtacaggcgcgaggaccgacgactggacattttctgttgcttcacaagcccttgcgttagcagagtgatacaagtggagccgcaagcttacactgacacccacgacaacaccaggtacagtccaccccctccgtacagctcccacagcttcgcccacgagacccagatcaccatgcagagcaccgttcagctcaggacagagtatgacccccacactcatgtgtactacacgacggctgaacctcgatcagagatctctgtacaacctgtgacagtaacccaggatacactgtcctgtcagagtccagaaagcaccagttccactagagacctgctgagccagttctcagatagctccttgcattgtctggaacctccttgtacgaaatggactctgtcctccttcgccgagaagcactacgccccttttctattgaagcctaaagcaaaagtggtggtcatctttctgttcttagggctcctcggtgtttccctctacggcacaactagggtacgggacggactggacctcaccgacatagtcccccgggagactcgagagtacgatttcattgcagcccagtttaaatacttttctttctataatatgtacatcgtgactcagaaagccgattatcctaacatacagcatttgctatacgacctgcaccgctccttctccaacgttaagtatgtaatgctggaggaaaacaaacagctacccaaaatgtggcttcactactttcgcgactggctgcagggcctgcaggacgccttcgactcggactgggaaacaggcaagatcatgccaaataattacaagaacggctccgatgatggtgtgttagcgtacaagctcctcgtccagacaggcagtcgcgacaaacctatagatatcagccagctgactaagcaacgcctcgtggatgctgacggcatcatcaatcccagtgctttctacatctatcttactgcctgggtgagtaacgatccggtcgcatacgccgcctcccaggcgaacattaggccccaccgacctgaatgggtccatgataaagctgactacatgcccgagacccgacttcgtatcccagctgccgagcccatcgagtatgctcagtttccattttatcttaatggacttcgggacacctccgatttcgttgaggctatagagaaggtgagaactatttgtagtaattacactagtctcgggctctccagctaccccaacggttaccccttccttttttgggaacaatatatcggcctgcgccattggctgctactgttcatttctgttgttcttgcctgtaccttcctcgtgtgcgcagtatttctgctgaatccatggaccgcaggaatcatagttatggtcctggcactgatgactgtcgaactctttgggatgatgggtctcatcggcatcaagctgtcagctgtccccgtagtgattctgattgctagcgtcggtattggggttgaattcacggttcacgtggctctcgcatttctaaccgctatcggggacaagaataggagggcagtccttgctctggagcacatgtttgctcctgtacttgatggcgctgtgtcaacattgctgggcgtgctcatgttagccggttcagagttcgatttcattgtgagatacttctttgctgtgttggctatcctcacaattctgggagtcttaaatgggttagtcctgctgccagtgctgctgagctttttcgggccatacccagaagtgagccctgcaaatgggctcaaccgcctgcctacaccatctcccgaacctcccccgtcagtagtgcgattcgctatgccacccggtcatactcacagtggatcagactctagcgattccgaatattcctcacagaccaccgtgtccggcctgtccgaggagctgaggcattatgaggcgcagcaaggggctggtggtcctgctcaccaggtaattgttgaggcaaccgagaatcctgtgtttgctcactccaccgtggtgcaccccgagtccagacatcacccaccgtctaatcccagacaacagcctcacctcgattcaggctctctacccccaggacggcaaggccagcagccacgacgtgaccctcctcgcgaggggctgtggccacctccctaccggcccaggcgggacgccttcgaaattagcactgaaggccactcaggcccgtctaacagagcccgctggggacccagaggagctcgatcgcacaatcctcgaaacccagcttcgacagcgatgggcagttctgttccaggatattgccagccaatcaccactgtaactgccagcgcatccgtcaccgtagccgtgcatccccctccagttcctggtccagggcgtaatccgaggggtggactgtgcccaggctatcctgagacagaccacggtctgtttgaggacccacacgtgcctttccacgtgaggtgcgagcggagagattccaaagtggaagtgatcgaattgcaggacgtggagtgcgaagagaggccaagagggtcctcaagtaactag

SEQ ID NO: 310722 - DNA, 3891 bp, Artificial Sequence
  derived and/or modified sequence
atgttcaacccccagctgatgatccagacccccaaggaggagggcgcaaatgtcttgacaaccgaggcactgttgcagcacctggactctgcgttgcaggctagtcgtgtgcacgtgtatatgtacaatagacagtggaagctcgagcatctttgttacaaatccggagagctgataactgagaccggctacatggaccagatcatagagtacctgtacccttgcttaatcatcacacctctggactgtttctgggagggggccaagcttcagtctgggaccgcctaccttttgggcaagccacctctccgttggacaaactttgatcccctggagtttctggaagaattgaagaagattaactaccaagtggacagctgggaggaaatgctgaacaaggccgaggtgggccacggctatatggatcgcccatgtcttaaccctgccgatccagattgtccagccacggctccaaacaaaaattctaccaaacccttggacatggccctcgtcctcaatggcggatgccacgggctgagccggaagtacatgcactggcaggaggaactaattgtcgggggaactgtcaagaactctaccggaaagctggtgtctgcccatgccctccagaccatgtttcagctcatgactccaaagcaaatgtacgagcactttaaggggtacgagtatgtgagccatatcaattggaacgaagataaggcggccgccatcctggaggcctggcagagaacctatgtcgaggttgtgcaccagagcgtcgcgcagaactctacacagaaggtgctttcctttaccaccactactctggatgacattttgaaatcattctctgatgtctcagttatcagagtagcctcaggctatctcttgatgctcgcctatgcatgtctcaccatgctccggtgggattgcagtaagtcccagggagctgtcggactggccggggtgctgctggtcgccctcagcgtcgcagccggcctgggtctctgctccctaataggcatctctttcaatgccgcaaccactcaggttcttccctttctcgctcttggggtgggagtcgacgatgtgttccttctggcccatgcctttagtgagaccggacagaataagcggatcccatttgaggatcgcacaggcgagtgccttaagcgtaccggagctagcgtagccctgacctccatatctaatgtgactgcctttttcatggctgccctgatcccaatcccagctctcagggccttcagcctgcaagccgccgtggttgtggtgtttaattttgccatggttctcctcatcttccccgcaatccttagcatggacctctaccggcgggaggacaggcgactggatattttttgttgcttcactagtccttgcgtttccagagtaatccaggtcgaaccgcaagcgtataccgatactcacgacaatacaagatatagtcccccccctccttactcttcccacagtttcgcacatgagacacagatcaccatgcagtccactgtccagctgagaaccgaatatgatcctcacacacacgtctactataccacggctgaaccacgctctgagattagtgtgcagcctgtcaccgtgacccaagatactctctcctgccagagcccagagtcaacctccagcactcgggatttgctgagtcagttttccgatagctcactccattgcctggaacccccctgcacgaagtggacgctctccagcttcgccgagaaacattacgcaccgtttcttctgaaacctaaggctaaagttgttgtgatctttttattcttgggactcctgggcgtgagcctgtatggtactactcgcgtccgcgatgggctcgacctaaccgatatagtacctagagaaacaagagaatacgacttcatcgcagcccaatttaagtatttcagcttctacaacatgtatatcgtgacacagaaggcagattatcccaacattcagcacttactctacgatctgcacagatcttttagtaatgtcaagtatgtgatgctggaagagaacaagcaactacctaagatgtggctgcactatttcagggactggttgcaggggctacaggacgctttcgattctgactgggagaccggcaagattatgccaaataattacaaaaacgggtcagacgacggcgttttggcttacaagttgttggtgcagaccggtagccgcgacaaacccatcgacattagtcagctaacaaagcagcgccttgtggacgcagacgggattattaacccgagcgccttttatatctacctgacagcatgggtatctaatgaccctgtggcatacgcagccagccaggcaaacatcaggccacataggccggagtgggtgcacgacaaggccgattatatgcctgagactcggctgcgcattcctgccgcagagccaatagagtacgctcagttccccttttacttaaatggtctgcgcgatacatcagatttcgtggaagctatcgagaaagtccgcacaatctgcagcaattacacgtcgctggggctgtcctcttacccaaacggatacccatttctgttttgggaacagtacattgggctccggcattggttgctgctttttattagcgttgtcctggcctgcacatttttggtgtgcgcagtattcctgctgaacccctggacagccggaattatcgtgatggtactagctctgatgacagtcgagctgtttggaatgatgggtcttatcgggatcaaactgtccgctgtccctgttgtcatactgatagctagcgtagggatcggagtcgaattcaccgtgcacgtagcattggcctttctgactgccatcggagacaaaaatcgtcgcgcagttctcgcattggagcacatgtttgcccccgtgcttgacggagccgtgtccacactattaggggtcctgatgctcgctgggagtgaattcgatttcatagtgagatacttctttgcagtgttagccatcctgacaatactcggcgtattgaatggcctcgttctcctgccagtgttgctgtcttttttcggtccctacccagaggttagtcccgcaaacgggctaaaccgactacctaccccaagtcccgaaccgccaccatctgttgtgcgcttcgcaatgcctccaggccatactcattcaggttccgattcatccgacagcgaatattcgagccagactacagtgagcggcctctccgaggagttgcgtcattacgaggcccagcagggagccggaggtcctgcccatcaggtgatcgttgaggctactgagaatccagtattcgcacacagcacagtggtccatcctgagagcaggcatcacccaccctcaaatccaagacagcagcctcacctggattccgggagtctgcccccagggaggcagggccagcaaccccgccgtgaccctccccgcgaagggctgtggccccctccctataggcctcgcagagatgctttcgagatttccaccgagggtcacagcggaccatctaatcgtgcccggtggggaccccgaggagcaagatcccacaatcctagaaatcccgcatccacagctatgggaagcagtgtccccgggtactgtcaaccaatcaccacagtaacagccagtgcaagcgtgactgtggcagttcacccccctcccgtgcctgggccaggccgtaacccgagagggggcctctgtcctggataccctgagactgatcatggactgtttgaggatccacacgtgccgtttcacgtgcgctgcgaacgaagggacagtaaggtggaagttatagaactgcaggacgtggagtgcgaggaaaggcctcggggaagctcttctaactag

SEQ ID NO: 310723 - DNA, 3891 bp, Artificial Sequence
  derived and/or modified sequence
atgtttaatcctcaactcatgatccagactccaaaggaggagggggcaaacgttcttacaactgaagcactcttacagcaccttgactcagcgctccaggcctcccgggttcatgtgtatatgtacaacagacagtggaagctcgagcatctgtgctacaagagcggagaattgatcaccgagactggttacatggaccagatcatagagtatctctatccttgtctcattattacaccccttgactgcttctgggagggtgccaagctccagagcggcacagcttatctgctgggaaagccccctttgcgctggacaaatttcgaccccctcgagtttttggaagaactcaaaaaaataaactaccaggttgacagctgggaggagatgctcaacaaagcagaggtagggcatggttacatggataggccctgcctgaatcctgccgatccagactgtcctgccacagcgcctaacaaaaattctaccaagcccctggacatggctttagtgctaaacggaggatgtcatggtctctctcgcaaatatatgcactggcaggaggaactgatcgtggggggtacggttaagaattcaacaggcaagctagtctcagctcacgctcttcagactatgttccaactgatgacgcccaaacaaatgtacgagcactttaagggctatgaatacgtgagtcatattaattggaatgaggataaggccgcagctattctggaggcatggcagcgtacatacgtcgaagtggtccaccaaagcgtggcgcaaaatagcacccagaaagttctgtcctttactactaccacgttagatgacattctgaaatcattttcagatgtgtctgttatccgcgtcgctagtggatatctcctcatgttggcctatgcttgtctgaccatgctgagatgggattgcagcaaatctcaaggcgcagtggggcttgccggagtgctgttggtcgctttatctgtggctgcgggactgggactatgtagccttataggaatcagcttcaacgccgcaaccacacaggtgctaccttttttggccctgggtgttggcgtggacgatgtatttctgttagcccacgcttttagtgagaccggccagaacaaaagaattcctttcgaagaccgcacaggagagtgtctgaagcgcacgggtgcttcggtagcactgacttccatctccaacgtgactgccttctttatggcagcccttatcccgattcccgcattgcgagcatttagcctgcaggccgctgtagtggtggtcttcaatttcgcaatggtgcttttgatctttcctgccattctttccatggacctttacaggagagaggatcggagactagatatcttctgttgctttacgagtccctgcgtttcaagggtcattcaggtggagcctcaggcctacaccgacacgcacgataacacccgctattccccaccacctccatatagctcgcactcttttgcccacgaaacacaaatcactatgcagagcacggtccagctgcgcactgaatatgaccctcacacacacgtctactatacaaccgctgagccaagatcagagataagcgtgcaacctgtgacagtaacccaggatacactgtcttgccagtcccccgagtctacatcttcaacacgcgacctgctgtcccagtttagtgacagttcattgcactgcctggagcctccttgcacgaaatggacactgtcttcttttgcagagaaacattacgctcccttcctgctaaaaccgaaagcgaaagtagtagtcatctttttgtttttgggccttcttggcgtgagtctttacggtacgactcgcgtgcgtgacggtctcgacctaaccgacatagtgcccagagagactcgcgagtatgatttcattgccgcacagtttaaatatttttccttctataatatgtacatcgtgacccagaaagctgattatccaaacatacagcatctgctctacgacctgcatcggagcttcagcaacgtcaagtatgtaatgctggaggagaacaagcagctgccgaagatgtggctgcattacttccgcgattggctgcaaggcctgcaagatgccttcgacagcgactgggaaaccgggaagattatgcccaataattataagaacggaagcgacgatggtgtccttgcctacaagcttctcgtgcagacaggtagcagggataaacccatcgatatttcccagttgactaaacaaaggctagttgacgcagatgggatcatcaacccctctgcgttctatatatacttgaccgcttgggtcagtaatgatcctgttgcctacgcggctagccaggccaacatcaggcctcatcgaccagagtgggttcacgacaaggctgattacatgcctgaaactagattaaggattccagctgcggagcctatagagtacgcccagtttcctttctatctcaatgggctgcgtgatacatccgattttgtcgaagctattgagaaagtccgtacaatctgcagcaattacactagcctgggactcagcagctatcccaatggctaccccttcttattttgggaacagtatataggcctgcggcactggttgttactgttcatttcggtggtcttagcctgtaccttcctggtgtgcgccgtctttctgttgaatccgtggacagcgggtatcatcgtgatggtgttagctctgatgaccgtggaattatttgggatgatgggactcatcggcataaagctcagtgctgtgcctgtggtgattttgattgcttctgttgggatcggggtggagttcacagtccatgtggcactggccttcctgaccgccattggagataaaaatcggagggccgtgctcgcgcttgagcacatgttcgcaccagtactggacggagctgtgagtactctccttggagtactgatgctggctggaagcgaatttgactttatagtcagatatttttttgctgttcttgctatccttacaattctgggggtcctcaatggcctcgtactcctgccagtccttctcagcttcttcggaccctacccagaggttagtccggcaaatggactcaatcggctcccgaccccatcgcccgaacccccaccgtccgtggtgcggtttgcgatgccgcctgggcatactcacagcggctcggattcgagtgattccgaatactctagtcagaccaccgtgagtggactgtcggaagagctgcgccattacgaagcacagcaaggggcagggggtccagcgcaccaggtgattgttgaagctaccgagaacccggtgttcgctcactcgaccgtggtgcatcccgaaagccgccaccaccctccctccaatcctcggcagcagcctcatctcgactctgggtctctacctccaggaaggcaaggtcagcagccgcgtagagatcccccaagggaaggactgtggccgcctccataccgtcctaggagggatgctttcgaaatttctacagagggccacagtggcccatctaacagggcgaggtgggggccacgcggagctcggtcccacaatccgcgaaatcctgcctcaactgccatgggaagcagtgtccccggatattgccagccaattacaaccgtgaccgccagtgcctctgtcacggtggccgtccatcctccccctgtgccaggccctgggagaaacccacgcggaggactttgtcctggataccccgaaaccgaccatggcctctttgaagatcctcatgtaccatttcatgtccggtgcgaaagaagggattccaaggttgaggtcattgagctgcaggatgttgagtgcgaagagcgacctcgcggttctagctctaattag

SEQ ID NO: 310724 - DNA, 3891 bp, Artificial Sequence
  derived and/or modified sequence
atgtttaaccctcagttgatgatacaaactccaaaggaggagggagccaatgtgttgacaacagaagcactgttacagcatctagacagtgccctccaagcaagcagagtgcacgtttacatgtataatcgccagtggaagctggagcatctttgctataaatcaggtgagctcataacagaaacagggtacatggatcaaatcattgaatatctctatccgtgtttgataatcacacctctcgattgcttctgggagggggctaagttgcagtcgggaactgcatacctcctgggcaagcctcccctccgctggaccaattttgacccgctcgaatttctcgaagagctaaaaaagattaactaccaggtggatagctgggaagagatgctcaataaggcagaagtgggtcacggatacatggaccgcccttgcctgaaccccgcagatccagactgccctgccacagctcccaataaaaattcaaccaaacctctggacatggctcttgtactcaacggcggatgtcatggactcagccgaaaatacatgcattggcaagaggaattgatcgtagggggaaccgtgaaaaatagcactggaaaactcgtgtctgctcatgcccttcaaaccatgttccagttgatgacacctaaacaaatgtatgaacactttaaaggctacgaatacgtttcacacatcaattggaacgaggacaaagcggctgccatccttgaagcctggcaacggacctacgtcgaagtggttcatcagagtgtggcccagaatagtacccagaaagtgctgtcgttcaccaccacaacactcgatgacattttaaagagcttcagcgacgtctcagtgatcagagtcgctagcggatacttgcttatgctagcctatgcatgcctcacaatgttgcgctgggattgcagcaagtctcagggcgcagtgggactagccggagtgctgcttgtggcactcagcgtggctgcaggactggggttatgcagcctgatcgggatatcattcaatgcagctactacacaggtgctcccatttctagccttaggagtgggggtggacgacgtcttcctgttagcccacgccttttctgagaccggccagaacaagcgtatacctttcgaagataggaccggggagtgtcttaagcgaactggggcatccgtggctctgacgtccatctctaacgttaccgccttttttatggcagccctcattccaatccctgccctcagggccttttccctgcaggccgctgtagttgtcgtcttcaactttgcaatggtgctcctaatttttcccgcaatcctaagcatggatctgtaccgaagggaagatcgcagactggatatcttttgttgtttcactagcccctgtgtgtctagggtcattcaggtggaaccacaggcatacaccgatacacacgacaatacccgttactcaccaccccctccgtattcctctcactcgtttgcccacgagactcagattacaatgcaatccactgtgcaactgcgcacagaatacgatccccacacccacgtttactacaccacggccgagcctcgatctgagatttccgtccagccggtgactgttacccaagatactttaagttgccagtcacccgagtccaccagcagtacaagggacctgctgtcccagttcagtgacagttctctccactgtctagagccaccgtgtacaaagtggaccttatctagcttcgccgagaagcactatgctccgtttctgcttaaaccgaaggccaaagttgtcgttattttcctcttccttgggctgctgggggtgagcctgtacggtaccacccgggtgcgcgacggactagacctgaccgacatagtgcctcgcgagactcgcgaatacgatttcatcgcagctcagttcaagtacttctctttctataacatgtatatcgtgacccagaaggccgattatccaaacatccaacatctgttgtacgatctgcacaggagcttttccaatgtgaaatatgtgatgcttgaagagaataaacagttgccgaagatgtggttgcactatttcagggactggctgcagggactgcaggacgcatttgattcggattgggagactggtaaaatcatgcccaacaactataaaaacggaagcgacgacggagtgctggcctataaactcttagtacagactggctcacgggacaagccgatcgacattagtcagctcacaaagcagcggctggtggacgctgatgggatcatcaacccaagtgccttctatatttacctgactgcctgggtgagtaatgatccagttgcctatgcggcatcacaggccaatattaggcctcataggcctgaatgggttcatgataaggcagactacatgcccgagaccaggttaagaattcctgccgcagaaccgattgaatacgcccaattcccattttaccttaatggcttgcgagatacaagcgacttcgtcgaggccatagagaaagtgcggaccatttgcagcaactatacctcactgggactgagctcatatcccaatggttaccccttcttattttgggaacaatacattgggttgagacactggctcctgttattcatttcggtcgtcctggcttgtacgttcctggtgtgcgcagtctttttgctaaatccatggacagctggtattatcgtgatggtcttggccctcatgactgtcgagctttttggaatgatgggcttgataggaattaaattgagcgcagtgccagttgtgatcctgatcgcatccgttggcattggggtggaattcacggtgcacgtagccctcgcattccttacagccatcggggacaaaaaccggagagctgtgcttgcactggagcacatgttcgcaccagtgctcgatggtgctgtgtccacactgctgggtgttttaatgcttgccggttcagaatttgactttatcgtcaggtatttctttgctgtgttggcgattctgactatcctgggagtgctgaatggccttgtgctactaccggtgttgttatcattctttgggccataccccgaggtgtcccccgctaacggccttaatcgattgcccactccaagccctgaacccccaccatcagtcgtgaggttcgcaatgccacctggacacacccactcaggatcagacagctctgactccgagtattctagtcagactaccgtgtccggactgtcggaggaactgcggcattacgaagcccaacaaggagcaggcggacctgctcatcaggttatagtcgaagccacggagaaccccgttttcgcccattccacagtagtgcatccggaatcgaggcaccaccctccttccaaccccaggcagcagcctcatctcgacagtgggtctctacccccaggccgacagggccaacaacccagacgtgatcctcctcgcgagggactatggcctcccccataccggccacgtcgggacgctttcgagataagcacagaaggacacagcgggccatccaaccgagctcgctggggccctaggggcgcaaggagtcacaaccccaggaaccccgcatcaaccgccatgggctctagcgtaccaggttattgccagccaattaccaccgtcaccgccagcgcgagtgtaacggtcgctgtgcatcctcctccagtgcctggcccagggcgaaacccccgaggcggtctgtgcccaggctaccctgagacagaccacggactttttgaagatccacatgtaccttttcacgttagatgcgagaggcgggatagcaaggtcgaggtaatagaactgcaggatgttgagtgcgaggagaggcccagaggcagcagctccaactag

SEQ ID NO: 310725 - DNA, 3891 bp, Artificial Sequence
  derived and/or modified sequence
atgttcaatccacaactgatgattcaaacacccaaggaggagggggctaatgtattgactactgaagccctcctgcaacacctcgactccgctttgcaggcttctcgcgttcacgtctatatgtacaaccggcagtggaaactggagcacctgtgctataagagcggtgagttaatcactgaaacagggtacatggaccagattattgaatacctttatccatgtctcattataacgcctctcgactgcttctgggagggtgccaagctgcaatcaggcaccgcatatcttctgggcaaaccccctcttcggtggacaaactttgaccccctggagttccttgaggaactgaagaaaataaattaccaagtcgatagctgggaagagatgttgaataaggcagaggtcggacatggctatatggataggccctgcctgaatcccgcagaccccgactgtcctgccacagctcccaacaagaattcgacgaagccgctggacatggcccttgtcctcaacgggggatgtcacgggctcagccgcaaatacatgcattggcaggaagagctcatcgtcgggggaactgtgaaaaactctactgggaaattagtctctgcccacgccctacagactatgttccagctgatgacccccaaacaaatgtacgaacattttaaaggttacgagtatgtctcccatatcaattggaatgaggataaagctgcagctatcttagaggcttggcagcgcacgtacgtggaggtggtccatcaatcagtcgctcaaaactccacccagaaagttctgtctttcactactacaacactcgacgatatcttaaaaagcttctccgacgtatccgttatcagggttgcttcagggtacctgctcatgttagcttacgcatgtcttacaatgctgcgatgggattgtagcaagtcccagggagcagtcggactggccggagttctgcttgttgcattatccgtggctgctggcctcggattgtgctctcttatcggcatctccttcaacgccgctaccacccaggtgctgccattcctggctttgggcgtgggggttgacgacgtgttcctattggcccatgcattctctgagacaggtcagaacaaaagaatcccatttgaagacagaaccggcgagtgcctcaaacgaactggggcatcagtagccctgacaagtatctctaatgtcaccgcattctttatggccgcactgatccccatacctgctctgcgcgcatttagtctgcaggcagcagtggttgtggtatttaacttcgcaatggtgctgcttattttcccagccatcctgtctatggatctgtacagacgggaagaccggcgactggatattttttgctgtttcactagtccatgcgtgtcacgtgtgattcaagttgaaccccaggcttacacagatactcatgataacacccgttatagcccccctccaccatacagctcacattccttcgcacatgagacccaaatcactatgcagagcaccgttcaactcagaaccgagtacgacccgcatacgcatgtctattacacaaccgccgagccacggagcgaaatttcagtccagccggtcactgtgacgcaagataccctgtcgtgtcagtccccagagtccacctcttccacccgagacttattgtctcagttcagcgatagctcgctacattgtcttgaaccgccttgcaccaaatggacactgtcctcatttgctgaaaagcactacgcgcctttcctcctgaaaccaaaagccaaggtggtcgtgatctttctatttctgggtctcctgggagttagcctttacggcaccaccagggtgagagatggactcgatctcaccgacatcgtgcctcgagaaacgcgggagtacgacttcatcgctgctcagttcaagtatttttccttctataatatgtacatcgttacccagaaagccgactatcccaacatccagcacttgttatatgatctgcatcggtcgtttagcaacgtgaagtacgtgatgcttgaggagaataagcagctcccaaagatgtggttacattatttccgggattggttacaggggttacaggacgcctttgatagtgattgggaaaccggaaaaattatgcccaacaattacaagaacggttcagatgacggggtgctggcttataagcttctggtccagacgggcagtcgagataagccgatcgacatctcacagttaaccaagcagcggctggttgatgcagatgggataattaacccatccgctttttacatttatctgacagcctgggtctcaaacgacccagtggcgtacgccgctagccaagccaacatcagaccgcaccggcctgagtgggtgcacgacaaagccgattatatgcctgaaacccgactgcggatccctgctgctgaacctattgaatacgcacagtttcccttttatctgaatggtctgcgggatacttcggactttgtggaggcaattgaaaaagtgcgaacaatctgttcaaactatactagtctgggcctcagcagttatcccaacggatacccctttcttttctgggagcagtatataggcctgagacactggctcctgttatttatttccgtggtccttgcctgcacctttctggtgtgtgccgtgtttctgctaaatccatggaccgcgggtattatcgttatggtcttggccctcatgactgtggaactgtttgggatgatgggcctgattgggattaaactgagtgctgtgcctgtggtgattctaatagccagtgtgggcatcggggttgaattcacggtgcatgttgccctggcattcttgacggcaattggcgacaagaaccggagggctgtgctggcactcgagcatatgtttgcacctgtgctggacggagccgtgtctactttattgggtgtcctcatgttggctggcagcgaattcgattttattgtacgttatttctttgccgtgctggctatcctgaccatattgggggtattgaacggccttgtccttttacccgtgctcctgtcattctttgggccataccccgaagtgagccccgctaacggactgaaccggcttccaacgccctcccctgagcctcctccaagcgtcgtgcggtttgctatgcctcccggtcacacccatagcggtagcgacagctctgacagcgagtatagctctcagaccaccgtctctgggctcagcgaggagctgcggcactacgaggcacagcaaggtgcgggtggccctgcacatcaagtcatagtagaggcaaccgaaaatcccgtttttgcacattccacagtggtgcatcctgaatctcggcatcatcccccatcgaacccaaggcaacaaccgcatctcgactctggctctctgcctcctggacgccaggggcagcagccgaggcgcgatccccctagagagggcctatggcctcctccttacaggcccaggcgcgatgccttcgaaatctcaactgagggtcactccggaccgagcaatcgggcacgctggggtcctcggggagcaagatctcataatcccagaaatccagcatccacagctatgggcagttcggttcccggttactgccagcctatcacaactgtgactgcttctgcgtctgttacagtggccgtgcaccctcctcccgtgccgggtccaggtagaaaccctcggggagggctgtgcccaggttatccagagactgaccatggtctatttgaagatccccatgtcccatttcatgtacggtgtgagcggcgagactccaaggtggaagtgatcgagctccaggatgtcgaatgtgaggaaagaccgcgtggatcttctagtaattag

SEQ ID NO: 310726 - DNA, 729 bp, Artificial Sequence
  derived and/or modified sequence
atgccccccggccacacccacagcggcagcgacagcagcgacagcgagtacagcagccagaccaccgtgagcggcctgagcgaggagctgagacactacgaggcccagcagggcgccggcggccccgcccaccaggtgatcgtggaggccaccgagaaccccgtgttcgcccacagcaccgtggtgcaccccgagagcagacaccacccccccagcaaccccagacagcagccccacctggacagcggcagcctgccccccggcagacagggccagcagcccagaagagacccccccagagagggcctgtggccccccccctacagacccagaagagacgccttcgagatcagcaccgagggccacagcggccccagcaacagagccagatggggccccagaggcgccagaagccacaaccccagaaaccccgccagcaccgccatgggcagcagcgtgcccggctactgccagcccatcaccaccgtgaccgccagcgccagcgtgaccgtggccgtgcaccccccccccgtgcccggccccggcagaaaccccagaggcggcctgtgccccggctaccccgagaccgaccacggcctgttcgaggaccccacctgcctgagcaccagcggcgtgagaggcggcatcagaagatggaagagcctgagctgcagaacctggaacgccagaagaggccccggcgaggccgcccccaccgagggcgactag

SEQ ID NO: 310727 - DNA, 729 bp, Artificial Sequence
  derived and/or modified sequence
atgccccctggtcacacgcattcaggttcagattcttcagactccgagtactcgtctcagactaccgtctcgggattatcggaagagctgcgtcactatgaagcccagcagggcgccggcgggccagcacatcaggttatcgtggaagcaacggaaaatcccgttttcgcacatagtaccgtagtgcacccggagtcgagacatcatcccccatccaatcccaggcagcagcctcacctggacagtggatccctccctccgggccgtcaaggacagcaaccacgccgcgacccgccgcgagaaggactttggcctccaccttatcggccccgccgggacgcctttgagatatctactgagggccactctgggccatccaaccgggcacgatgggggccgaggggcgctagatctcacaaccctcgtaatcctgcttcaaccgcaatgggctccagcgtgcctggctactgccaacccattactacagttaccgcatctgcctcggtgaccgtagccgtgcatcccccgcccgttcccggccctgggaggaacccgcggggggggctctgccccggctatcctgaaacggatcacgggctgtttgaggacccaacctgtctgtcgacctcaggtgtgagaggaggaatccggcgctggaaaagcctcagctgtaggacatggaacgccaggcggggccccggagaagccgcccctaccgaaggggattag

SEQ ID NO: 310728 - DNA, 729 bp, Artificial Sequence
  derived and/or modified sequence
atgcctcctggccacacccacagcggcagtgacagcagtgacagcgagtacagcagccagaccaccgtgtctggcctgtctgaggagctgcggcactatgaggcccagcagggcgccggcggccctgcccaccaggtgattgtggaggccacagagaaccctgtgtttgcccacagcacagtggtgcaccctgagagccgccaccacccccccagcaacccccggcagcagccccacctggacagcggcagcctgcccccaggccggcagggccagcagccccggcgggaccccccccgggagggcctgtggcccccaccctaccggcccaggagagatgcctttgagatcagcacagagggccacagcggccccagcaacagagcccgctggggccccaggggggcccggagccacaaccccaggaacccagccagcacagccatgggcagctctgtgcccggctactgccagcccatcaccaccgtgacagccagcgcctctgtgacagtggccgtgcaccccccacctgtgcccggccctggaagaaacccccggggcggcctgtgccccggctacccagagacagaccacggcctgtttgaggaccccacctgcctgagcaccagcggcgtgcggggcggcatccgccgctggaagagcctgagctgcaggacctggaatgcccggcggggccctggagaggccgcccccacagaaggagactag

SEQ ID NO: 310729 - DNA, 729 bp, Artificial Sequence
  derived and/or modified sequence
atgccccccggccacacccacagcggcagcgacagcagcgacagcgaatacagctctcaaactacagtgtctgggctctccgaggaactcagacactatgaggctcagcagggtgctgggggccccgcgcatcaggttatcgtggaagccaccgaaaaccctgtcttcgcccacagtaccgtggtgcaccccgaaagcagacaccatccaccatctaacccccggcagcagccacacctggacagcgggtcactgccaccaggaagacagggccagcagccacgtcgagatccgcctagagagggcttgtggcctccaccctaccgccccaggcgggacgcctttgagatctccactgaaggccacagtggcccatctaatagggccaggtgggggccaagaggagccaggtctcacaatcctcgtaatcctgctagcaccgctatgggctccagtgtgccaggctactgtcagcctattacaactgtgacagcatcagcaagcgttacggttgccgtccatccacctcccgtcccgggccccgggcgaaatcccagaggcgggctttgcccagggtaccccgagacagaccacggcctgtttgaggacccgacatgcctgtctacttccggggttcgtggaggcatcaggcgatggaaatccctcagctgtagaacttggaacgccaggaggggacccggcgaggccgctcctacagagggcgactag

SEQ ID NO: 310730 - DNA, 729 bp, Artificial Sequence
  derived and/or modified sequence
atgcctccaggccacacccattcgggcagcgattccagcgatagcgagtacagtagccagacaacggtcagcggcctgagtgaggaacttagacactatgaggcacagcagggggctggcggtccagcacaccaggtgattgtcgaagccaccgaaaatccagtcttcgctcattcaactgtagtccacccagagagtaggcatcacccaccctccaatcccagacagcagccacatctcgattctggaagcctaccccctggacggcagggtcagcagccaagaagggaccccccaagagaagggttatggcctccaccctaccgacctcggagggatgcatttgaaatttccaccgaagggcatagcggcccatctaatcgggcaagatgggggcctcgcggagcaaggtctcacaacccaagaaaccctgctagtacggccatggggtccagtgtgccgggatactgccagccaataacaaccgtgaccgcctcggctagcgtgaccgtggccgttcacccccctcccgtacctggccctggcaggaacccacggggaggcctgtgtcctggttacccagagacagaccacgggctgttcgaggatcccacatgcctgtctaccagtggcgttcggggaggcatacgaagatggaagtctttaagctgccgaacctggaatgcccgtagaggtccaggcgaagcggcaccaaccgaaggagattag

SEQ ID NO: 310731 - DNA, 6061 bp, Artificial Sequence
  derived and/or modified sequence
ccttgtagaaaatccagtgcgctaaattctcccaaggcagcggtagtagtggtgttcaattttgccatggttctgctcatttttcctgcaattctcagcatggatttatatcgacgcgaggacaggagactggatattttctgctgttttacaagcccctgcgtcagcagagtgattcaggttgaacctcaggcctacaccgacacacacgacaatacccgctacagccccccacctccctacagcagccacagctttgcccatgaaacgcagattaccatgcagtccactgtccagctccgcacggagtacgacccccacacgcacgtgtactacaccaccgctgagccgcgctccgagatctctgtgcagcccgtcaccgtgacacaggacaccctcagctgccagagcccagagagcaccagctccacaagggacctgctctcccagttctccgactccagcctccactgcctcgagcccccctgtacgaagtggacactctcatcttttgctgagaagcactatgctcctttcctcttgaaaccaaaagccaaggtagtggtgatcttcctttttctgggcttgctgggggtcagcctttatggcaccacccgagtgagagacgggctggaccttacggacattgtacctcgggaaaccagagaatatgactttattgctgcacaattcaaatacttttctttctacaacatgtatatagtcacccagaaagcagactacccgaatatccagcacttactttacgacctacacaggagtttcagtaacgtgaagtatgtcatgttggaagaaaacaaacagcttcccaaaatgtggctgcactacttcagagactggcttcagggacttcaggatgcatttgacagtgactgggaaaccgggaaaatcatgccaaacaattacaagaatggatcagacgatggagtccttgcctacaaactcctggtgcaaaccggcagccgcgataagcccatcgacatcagccagttgactaaacagcgtctggtggatgcagatggcatcattaatcccagcgctttctacatctacctgacggcttgggtcagcaacgaccccgtcgcgtatgctgcctcccaggccaacatccggccacaccgaccagaatgggtccacgacaaagccgactacatgcctgaaacaaggctgagaatcccggcagcagagcccatcgagtatgcccagttccctttctacctcaacggcttgcgggacacctcagactttgtggaggcaattgaaaaagtaaggaccatctgcagcaactatacgagcctggggctgtccagttaccccaacggctaccccttcctcttctgggagcagtacatcggcctccgccactggctgctgctgttcatcagcgtggtgttggcctgcacattcctcgtgtgcgctgtcttccttctgaacccctggacggccgggatcattgtgatggtcctggcgctgatgacggtcgagctgttcggcatgatgggcctcatcggaatcaagctcagtgccgtgcccgtggtcatcctgatcgcttctgttggcataggagtggagttcaccgttcacgttgctttggcctttctgacggccatcggcgacaagaaccgcagggctgtgcttgccctggagcacatgtttgcacccgtcctggatggcgccgtgtccactctgctgggagtgctgatgctggcgggatctgagttcgacttcattgtcaggtatttctttgctgtgctggcgatcctcaccatcctcggcgttctcaatgggctggttttgcttcccgtgcttttgtctttctttggaccatatcctgaggtgtctccagccaacggcttgaaccgcctgcccacaccctcccctgagccaccccccagcgtggtccgcttcgccatgccgcccggccacacgcacagcgggtctgattcctccgactcggagtatagttcccagacgacagtgtcaggcctcagcgaggagcttcggcactacgaggcccagcagggcgcgggaggccctgcccaccaagtgatcgtggaagccacagaaaaccccgtcttcgcccactccactgtggtccatcccgaatccaggcatcacccaccctcgaacccgagacagcagccccacctggactcagggtccctgcctcccggacggcaaggccagcagccccgcagggacccccccagagaaggcttgtggccacccccctacagaccgcgcagagacgcttttgaaatttctactgaagggcattctggccctagcaatagggcccgctggggccctcgcggggcccgttctcacaaccctcggaacccagcgtccactgccatgggcagctccgtgcccggctactgccagcccatcaccactgtgacggcttctgcctccgtgactgtcgccgtgcacccgccgcctgtccctgggcctgggcggaacccccgagggggactctgcccaggctaccctgagactgaccacggcctgtttgaggacccccacgtgcctttccacgtccggtgtgagaggagggattcgaaggtggaagtcattgagctgcaggacgtggaatgcgaggagaggccccggggaagcagctccaactgagggtgattaaaatctgaagcaaagaggccaaagattggaaaccccccacccccacctctttccagaactgcttgaagagaactggttggagttatggaaaagatgccctgtgccaggacagcagttcattgttactgtaaccgattgtattattttgttaaatatttctataaatatttaagagatgtacacatgtgtaatataggaaggaaggatgtaaagtggtatgatctggggcttctccactcctgccccagagtgtggaggccacagtggggcctctccgtatttgtgcattgggctccgtgccacaaccaagcttcattagtcttaaatttcagcatatgttgctgctgcttaaatattgtataatttacttgtataattctatgcaaatattgcttatgtaataggattattttgtaaaggtttctgtttaaaatattttaaatttgcatatcacaaccctgtggtagtatgaaatgttactgttaactttcaaacacgctatgcgtgataatttttttgtttaatgagcagatatgaagaaagcacgttaatcctggtggcttctctaggtgtcgttgtgtgcggtcctcttgtttggctgtgcgtgtgaacacgtgtgtgagttcaccatgtactgtactgtgattttttttttgtcttgttttgtttctctacactgtctgtaacctgtagtaggctctgacctagtcaggctggaagcgtcaggatatcttttcttcgtgctggtgagggctggccctaaacatccacctaatcctttcaaatcagcccggcaaaagctagactctcctcgtgtctacggcatctcttatgatcattggctgccatccaggaccccaatttgtgcttcagggggataatctccttctctcggatcattgtgatggatgctggaacctcagggtatggagctcacatcagttcatcatggtgggtgttagagaattcggtgacatgcctagtgctgagccttggctgggccatgagagtctgtatactctaaaaagcatgcagcatggtgcccctcttctgaccaacacacacacgacccctcccccaacacccccaaattcaagagtggatgtggccctgtcacaggtagaaaaacctatttagttaattctttcttggcccacagtctcccagaaatgatgttttgagtccctatagtttaaactccctctcttaaatggagcagctggttgaggctttctagatctgtttgcatcttctttaaaactaagtggtgagcatgcattgtggtgtagaggcaggcattatgtaggataagagctccggggggattcttcatgcaccagtgtttagggtacgtgcttcctaagtaaatccaaacattgtctccatcctccccgtcattagtgctctttcaatgtgatgtgggaaagcaggaggatggacacaccccactgaaagatgtaggcaggggcaggtctctcaaccaggcatatttttaaaagttgcttctgtactggttctcttcttttgctctgaggtgtgggctccctcatctcgtaaccagagaccagcacatgtcagggaagcacccagtgtcggctccccatccaaatccacaccagcaccttgttacagacaagaagtcagaggaaagggcggggtccctgcagggctgaagcctaagctactgtgaggcgctcacgagtggcagctcctgttactcccttttaaattacctgggaaatcttaacagaaaggtaatgggcccccagaaatacccacagcatagtgacctcagaccctgatactcaccacaaaacttttaagatgctgattgggagccgcttgtggctgctgggtgtgtgtgtgtgtgtgtgcgtgcgtgcgtgtgtgtgtgtctctgctggggaccctggccacccccctgctgctgtcttggtgcctgtcacccacatggtctgccatcctaacacccagctctgctcagaaaacgtcctgcgtggaggagggatgatgcagaattctgaagtcgacttccctctggctcctggcgtgccctcgctcccttcctgagcccagctcgtgttgcgccggaggctgcgcggcccctgatttctgcatggtgtagaactttctccaatagtcacattggcaaagggagaactggggtgggcggggggtggggctggcagggaattagaatttctctctctcttttaatagttttattttgtctgtcctgtttgttcatttggatgttttaatttttaaaaaaaaaaaaactttgctgatatttataattttgtatcataagaatgttttcctctacagtatttgtcatgccagtttataacaaaaaaaaatgcagggattttatttctattggaaacattacagctatgttttacttttggacagaatttttatttgtatagagtgcttactaatgttaaatagttcagagtatataacatttacattaaggactcatggtaggttttagggtaaggagtttaaaggaaataaatattcaaactgggtctcattgccaattttggtggaaatgagtttgtgtcatttcaattacaaagataaaagtatgccatataatttatttatatgaagatttatttttgtagtgtacatagtagtcatcaagtcttttgacagaagtatatttttaaagaatttatatgtgatgaatccataatgtctggaactttgctgagacatgagtgggcacagttttcattgtaaattacagcaaggaaagaaaatgtttaacagtgttaagagagtcagagcagagtggatattcatgcgattatgaagtgtttattagttaccattggcgacctagcatgcttctcatttcaaaccttggaaggtgaaaatgtacaaactctctaaataattaatgttcaaacactgatagaaattctaacatgaataaaaaataatataacttgttggttatatctttgtttgtagaatgctttttttctttaaaatacttgggagagacagttagtgttggagccatcagaaactgttgtttcatcttgctgaccttgtgacactcttcttttttgctctatctgatggagagagttttaggttttcctcctttttgttttgtataaatagtgggtataagcatagctctgttacatggatgtattacaaagtgggggctgagcttttagtgtgatcatcacccaaatagtgtacattgtacccattaattaatttcttatcacctgaccctatttttgttttctcataccaagaaacttcctaagttaaccatcaaaattagtccttctgtcatctctcttagcatacttatttcccttatgtgatgcctaataatgagggaacataaataaagccaaattcaaag

SEQ ID NO: 310732 - DNA, 297 bp, Artificial Sequence
  derived and/or modified sequence
atgctgcggagcaccttcaccgtgcactggaccaccatcctgggcatttgccggcccatcaaaccaatctacaaatctcaggcttgccccctgtccgaaaaacggaacgccgataaccacctcgtgtcggaggacaatacattcaaagagcctgaacggtacatctcttctagctgcgttctgacatccatactatatctgggtgagaagacatttagcttccgcacgctgatcagcccgcgcggtatgaaactggttgaaatacttcagcagccgtcccttacaatggtggcttag

SEQ ID NO: 310733 - protein, 585 aa, Artificial Sequence
  derived and/or modified sequence
PCRKSSALNSPKAAVVVVFNFAMVLLIFPAILSMDLYRREDRRLDIFCCFTSPCVSRVIQVEPQAYTDTHDNTRYSPPPPYSSHSFAHETQITMQSTVQLRTEYDPHTHVYYTTAEPRSEISVQPVTVTQDTLSCQSPESTSSTRDLLSQFSDSSLHCLEPPCTKWTLSSFAEKHYAPFLLKPKAKVVVIFLFLGLLGVSLYGTTRVRDGLDLTDIVPRETREYDFIAAQFKYFSFYNMYIVTQKADYPNIQHLLYDLHRSFSNVKYVMLEENKQLPKMWLHYFRDWLQGLQDAFDSDWETGKIMPNNYKNGSDDGVLAYKLLVQTGSRDKPIDISQLTKQRLVDADGIINPSAFYIYLTAWVSNDPVAYAASQANIRPHRPEWVHDKADYMPETRLRIPAAEPIEYAQFPFYLNGLRDTSDFVEAIEKVRTICSNYTSLGLSSYPNGYPFLFWEQYIGLRHWLLLFISVVLACTFLVCAVFLLNPWTAGIIVMVLALMTVELFGMMGLIGIKLSAVPVVILIASVGIGVEFTVHVALAFLTAIGDKNRRAVLALEHMFAPVLDGAVSTLLGVLMLAGSEFDFIV

SEQ ID NO: 310734 - protein, 486 aa, Artificial Sequence
  derived and/or modified sequence
GKATGRKAPLWLRAKFQRLLFKLGCYIQKNCGKFLVVGLLIFGAFAVGLKAANLETNVEELWVEVGGRVSRELNYTRQKIGEEAMFNPQLMIQTPKEEGANVLTTEALLQHLDSALQASRVHVYMYNRGKPPLRWTNFDPLEFLEELKKINYQVDSWEEMLNKAEVGHGYMDRPCLNPADPDCPATAPNKNSTKPLDMALVLNGGCHGLSRKYMHWQEELIVGGTVKNSTGKLVSAHALQTMFQLMTPKQMYEHFKGYEYVSHINWNEDKAAAILEAWQRTYVEVVHQSVAQNSTQKVLSFTTTTLDDILKSFSDVSVIRVASGYLLMLAYACLTMLRWDCSKSQGAVGLAGVLLVALSVAAGLGLCSLIGISFNAATTQVLPFLALGVGVDDVFLLAHAFSETGQNKRIPFEDRTGECLKRTGASVALTSISNVTAFFMAALIPIPALRAFSLQYILMAHRGRLSFNDTLWCGGLKSYMRFPYEE

SEQ ID NO: 310735 - protein, 174 aa, Artificial Sequence
  derived and/or modified sequence
MFNPQLMIQTPKEEGANVLTTEALLQHLDSALQASRVHVYMYNRQWKLEHLCYKSGELITETGYMDQIIEYLYPCLIITPLDCFWEGAKLQSGTAYLLGKPPLRWTNFDPLEFLEELKKINYQVDSWEEMLNKAEVGHGYMDRPCLNPADPDCPATAPNKNSTKPLDMALVLNG

SEQ ID NO: 310736 - DNA, 1758 bp, Artificial Sequence
  derived and/or modified sequence
ccctgcagaaagagcagcgccctgaacagccccaaggccgccgtggtggtggtgttcaacttcgccatggtgctgctgatcttccccgccatcctgagcatggacctgtacagaagagaggacagaagactggacatcttctgctgcttcaccagcccctgcgtgagcagagtgatccaggtggagccccaggcctacaccgacacccacgacaacaccagatacagccccccccccccctacagcagccacagcttcgcccacgagacccagatcaccatgcagagcaccgtgcagctgagaaccgagtacgacccccacacccacgtgtactacaccaccgccgagcccagaagcgagatcagcgtgcagcccgtgaccgtgacccaggacaccctgagctgccagagccccgagagcaccagcagcaccagagacctgctgagccagttcagcgacagcagcctgcactgcctggagcccccctgcaccaagtggaccctgagcagcttcgccgagaagcactacgcccccttcctgctgaagcccaaggccaaggtggtggtgatcttcctgttcctgggcctgctgggcgtgagcctgtacggcaccaccagagtgagagacggcctggacctgaccgacatcgtgcccagagagaccagagagtacgacttcatcgccgcccagttcaagtacttcagcttctacaacatgtacatcgtgacccagaaggccgactaccccaacatccagcacctgctgtacgacctgcacagaagcttcagcaacgtgaagtacgtgatgctggaggagaacaagcagctgcccaagatgtggctgcactacttcagagactggctgcagggcctgcaggacgccttcgacagcgactgggagaccggcaagatcatgcccaacaactacaagaacggcagcgacgacggcgtgctggcctacaagctgctggtgcagaccggcagcagagacaagcccatcgacatcagccagctgaccaagcagagactggtggacgccgacggcatcatcaaccccagcgccttctacatctacctgaccgcctgggtgagcaacgaccccgtggcctacgccgccagccaggccaacatcagaccccacagacccgagtgggtgcacgacaaggccgactacatgcccgagaccagactgagaatccccgccgccgagcccatcgagtacgcccagttccccttctacctgaacggcctgagagacaccagcgacttcgtggaggccatcgagaaggtgagaaccatctgcagcaactacaccagcctgggcctgagcagctaccccaacggctaccccttcctgttctgggagcagtacatcggcctgagacactggctgctgctgttcatcagcgtggtgctggcctgcaccttcctggtgtgcgccgtgttcctgctgaacccctggaccgccggcatcatcgtgatggtgctggccctgatgaccgtggagctgttcggcatgatgggcctgatcggcatcaagctgagcgccgtgcccgtggtgatcctgatcgccagcgtgggcatcggcgtggagttcaccgtgcacgtggccctggccttcctgaccgccatcggcgacaagaacagaagagccgtgctggccctggagcacatgttcgcccccgtgctggacggcgccgtgagcaccctgctgggcgtgctgatgctggccggcagcgagttcgacttcatcgtgtag

SEQ ID NO: 310737 - DNA, 1461 bp, Artificial Sequence
  derived and/or modified sequence
ggcaaggccaccggcagaaaggcccccctgtggctgagagccaagttccagagactgctgttcaagctgggctgctacatccagaagaactgcggcaagttcctggtggtgggcctgctgatcttcggcgccttcgccgtgggcctgaaggccgccaacctggagaccaacgtggaggagctgtgggtggaggtgggcggcagagtgagcagagagctgaactacaccagacagaagatcggcgaggaggccatgttcaacccccagctgatgatccagacccccaaggaggagggcgccaacgtgctgaccaccgaggccctgctgcagcacctggacagcgccctgcaggccagcagagtgcacgtgtacatgtacaacagaggcaagccccccctgagatggaccaacttcgaccccctggagttcctggaggagctgaagaagatcaactaccaggtggacagctgggaggagatgctgaacaaggccgaggtgggccacggctacatggacagaccctgcctgaaccccgccgaccccgactgccccgccaccgcccccaacaagaacagcaccaagcccctggacatggccctggtgctgaacggcggctgccacggcctgagcagaaagtacatgcactggcaggaggagctgatcgtgggcggcaccgtgaagaacagcaccggcaagctggtgagcgcccacgccctgcagaccatgttccagctgatgacccccaagcagatgtacgagcacttcaagggctacgagtacgtgagccacatcaactggaacgaggacaaggccgccgccatcctggaggcctggcagagaacctacgtggaggtggtgcaccagagcgtggcccagaacagcacccagaaggtgctgagcttcaccaccaccaccctggacgacatcctgaagagcttcagcgacgtgagcgtgatcagagtggccagcggctacctgctgatgctggcctacgcctgcctgaccatgctgagatgggactgcagcaagagccagggcgccgtgggcctggccggcgtgctgctggtggccctgagcgtggccgccggcctgggcctgtgcagcctgatcggcatcagcttcaacgccgccaccacccaggtgctgcccttcctggccctgggcgtgggcgtggacgacgtgttcctgctggcccacgccttcagcgagaccggccagaacaagagaatccccttcgaggacagaaccggcgagtgcctgaagagaaccggcgccagcgtggccctgaccagcatcagcaacgtgaccgccttcttcatggccgccctgatccccatccccgccctgagagccttcagcctgcagtacatcctgatggcccacagaggcagactgagcttcaacgacaccctgtggtgcggcggcctgaagagctacatgagattcccctacgaggagtag

SEQ ID NO: 310738 - DNA, 525 bp, Artificial Sequence
  derived and/or modified sequence
atgttcaacccccagctgatgatccagacccccaaggaggagggcgccaacgtgctgaccaccgaggccctgctgcagcacctggacagcgccctgcaggccagcagagtgcacgtgtacatgtacaacagacagtggaagctggagcacctgtgctacaagagcggcgagctgatcaccgagaccggctacatggaccagatcatcgagtacctgtacccctgcctgatcatcacccccctggactgcttctgggagggcgccaagctgcagagcggcaccgcctacctgctgggcaagccccccctgagatggaccaacttcgaccccctggagttcctggaggagctgaagaagatcaactaccaggtggacagctgggaggagatgctgaacaaggccgaggtgggccacggctacatggacagaccctgcctgaaccccgccgaccccgactgccccgccaccgcccccaacaagaacagcaccaagcccctggacatggccctggtgctgaacggctag

SEQ ID NO: 310739 - DNA, 1758 bp, Artificial Sequence
  derived and/or modified sequence
ccatgccgaaaaagttcagccctgaacagccctaaagctgccgtggtcgtggtcttcaatttcgctatggtcctactgatttttcctgctattctctccatggatctttatcgtcgcgaagacagacgacttgacatcttctgttgcttcacatccccatgtgtctctcgggtgatccaagtggaacctcaggcctacacagacactcatgataacacgagatattctccacctccaccctatagtagccactcctttgctcatgagactcaaatcaccatgcagtccacagtgcagttgcgcacagagtacgacccacatacgcacgtttattatacaaccgccgaaccaaggagcgaaattagtgtgcagccagtgactgtgacgcaagacactctcagctgccagagcccagagagtacgtcaagcacccgcgacttactgtcccagttttccgacagctcactccattgcctcgaacccccatgcacaaaatggaccctgtccagtttcgctgagaagcactatgccccttttcttctcaaaccaaaagctaaggtggttgtaatctttctgttccttggactgctcggtgtgtccctgtatggtactacacgtgtgcgggatggcttggatctgacagacattgtccctcgtgagaccagggaatacgactttatcgcagcccagtttaagtacttttcattttacaatatgtacatagttacacagaaggcggactaccccaacatccaacaccttctgtacgatttgcataggtctttttctaacgtgaaatacgtgatgctcgaggaaaacaaacagctaccaaagatgtggctgcactatttcagggattggttgcaggggctccaggatgcctttgattcagattgggaaaccggcaagattatgcctaacaattataagaatggttccgacgatggggtcctagcgtacaagcttctagtgcagactggtagcagagataaaccaattgatattagtcagttgacaaagcagcgattagttgacgccgacggaataataaatccctctgcgttttatatctaccttactgcctgggtctcaaatgaccctgtagcatacgctgcgtcacaggcaaacatcagaccacaccgacctgagtgggtgcatgataaagcggactatatgcctgagactaggctgaggataccagcagcagaaccaatcgagtacgcccaattccccttttacctgaatggtctacgtgacacttcagattttgtggaggccattgagaaggtgaggaccatatgcagcaactacacgtcccttggcctgtccagttaccctaacggctaccccttcttattttgggaacagtatattggtctccggcattggctgctacttttcatctcagtggtactagcttgtaccttcctggtgtgcgcagtgttcctgttgaatccctggaccgccggcatcatcgttatggtgcttgccctgatgaccgttgagctgtttggcatgatgggcctcattggaattaaactaagcgccgtgcccgtggtcattttgatcgcctcagtgggaattggcgtggaattcactgtgcacgtagcactggcatttctgacagctattggcgataagaaccgccgcgccgtgctggctctcgaacatatgttcgcccctgttctcgacggcgcagtgagcaccctgctgggagtattgatgctggcaggatccgagtttgatttcattgtctag

SEQ ID NO: 310740 - DNA, 1461 bp, Artificial Sequence
  derived and/or modified sequence
ggcaaggccactgggcgcaaagcaccgctgtggctccgtgccaagtttcagcgcttactctttaaactgggttgttacatacaaaagaactgtggcaagtttctcgttgtgggacttctgatcttcggcgcattcgccgtcggcttgaaagcagcgaacctcgaaaccaatgtcgaggaactgtgggtggaggtgggcgggagagtttcacgcgagttgaattatactcgacaaaagataggggaggaggctatgtttaatcctcaattgatgatccagaccccaaaagaggagggcgccaacgtgcttactaccgaggctttgctgcaacatctggacagcgccttacaagcctcgcgcgttcacgtgtatatgtacaaccggggtaaaccccccctgcgttggaccaactttgatcctctcgagtttcttgaggaactgaagaagattaactaccaggttgactcatgggaagaaatgcttaataaggccgaggtcggacacggctacatggatcgcccctgcttgaatccagcagatcccgactgtccagctacagctccaaacaagaacagcactaaacccctcgatatggcacttgtcttgaatggtggctgccatgggctgtctagaaagtatatgcactggcaagaggagcttatcgtaggcggcactgtgaagaatagcaccggaaaacttgtgtctgcccacgccctccagaccatgtttcagctcatgactcccaagcagatgtacgaacactttaaaggttacgaatatgtgagtcacatcaactggaatgaagacaaggccgcagctatcctcgaagcttggcagcgtacctacgtggaagtggtgcaccagagcgtggcccagaattccacccaaaaagttctctctttcacgacgactacgctggacgatatcctaaagtccttttcagatgtctccgttattagggtggcctccggatacctactcatgctggcctatgcatgcctgacaatgctgaggtgggattgtagtaagtcccaaggagcagtggggttagcaggagtccttttggtggccctctcagtcgctgctggactaggtctctgtagcctgattgggatttcgttcaatgcggccactacacaggtgttaccctttttggctctcggcgtcggtgtcgacgatgtgttcctcctggcacatgcgttctctgagaccggtcagaacaaacggattcccttcgaagacagaacgggtgagtgcttgaaacgtactggagcttccgtggccctgacctcgattagcaatgtgaccgccttttttatggccgccttaataccaattccagctttgcgtgccttcagcttacaatacattctgatggcccacagaggcaggctgagtttcaatgacaccctctggtgcggaggcttgaaatcatatatgagattcccatacgaggagtag

SEQ ID NO: 310741 - DNA, 525 bp, Artificial Sequence
  derived and/or modified sequence
atgtttaacccccagttgatgattcaaacacccaaagaggaaggagccaacgtactgactacagaagctctcctgcagcatctcgacagcgccttacaggccagcagggtgcacgtgtatatgtacaaccggcagtggaagctcgaacatctgtgctacaagtccggcgaattaattactgagacaggctacatggaccagattatcgaatatctttacccatgtctgataatcacccctctggactgtttctgggaaggcgccaaattacagtcagggacggcctatctgttaggaaagccccccctccgttggacgaacttcgaccctctcgagtttctggaggagcttaaaaaaatcaactatcaggttgatagctgggaggagatgcttaacaaagctgaggtaggccatggctatatggacagaccttgtctgaatccagccgacccagattgtcctgccactgcacccaataaaaactcaaccaaacccctggacatggccctcgtactcaatgggtag

SEQ ID NO: 310742 - DNA, 525 bp, Artificial Sequence
  derived and/or modified sequence
atgttcaacccccagctgatgatccagacccccaaagaagagggcgcaaacgtcctcacaactgaggctttactccagcatctggattctgctctccaggcttctagagttcacgtttacatgtacaaccgccaatggaaattggagcacctttgttataagtctggggaattgataaccgaaaccggctacatggaccaaatcattgagtatctctacccctgtctgatcataactccgctggactgcttttgggagggcgccaagttgcagtccggcacagcctacctgctgggcaaacctcccctgaggtggaccaacttcgacccgctagaatttttagaggagcttaagaagatcaactaccaggtggactcatgggaagagatgctgaacaaagccgaggtgggtcacggatacatggatagaccttgccttaatcccgcggacccagattgccccgccactgcgcccaacaaaaatagcacaaagcctctggatatggcgctggtgctgaacgggtag

SEQ ID NO: 310743 - DNA, 525 bp, Artificial Sequence
  derived and/or modified sequence
atgtttaatccccagttaatgattcagacccccaaagaggaaggcgctaatgtcctgacaacggaagcgctgcttcaacacctggattctgccctgcaagctagccgagtgcatgtttacatgtataatcgacagtggaaactcgaacatctgtgttacaaatccggcgagttgattacagaaactggctatatggaccagattattgaatacttatacccctgtcttattataactcccctcgattgtttttgggaaggggcgaagttgcagagcggtactgcttacctgcttggaaagcccccactacgctggactaacttcgatcctctggagtttctggaggaactgaaaaaaatcaattaccaagttgactcttgggaggagatgctcaacaaggccgaagttggtcacggatacatggaccgaccctgcctgaaccccgctgatcctgactgcccagccacggcgcctaacaaaaactcaaccaagcctctggacatggcactcgtgctgaacggctag

SEQ ID NO: 310744 - DNA, 525 bp, Artificial Sequence
  derived and/or modified sequence
atgtttaacccccagctcatgattcagaccccaaaggaggaaggcgctaatgttcttaccacagaggctctattacagcacctagattcagcgttgcaggcctccagggtgcatgtatacatgtataaccggcagtggaagctcgaacacctgtgttacaaatccggcgaactgatcacagagaccggatatatggatcagatcatcgaatacctgtatccctgcctgattatcacacccctagactgcttttgggagggagccaagctacagagcggtaccgcttacctgctgggcaagcccccactgcgctggacaaattttgatccactcgagttccttgaagaactgaagaagataaactaccaggttgactcttgggaggaaatgctgaataaggcagaagtggggcacgggtacatggaccggccatgcctgaatcccgcggacccagattgcccagcaacggcccctaataagaacagtaccaagccactggatatggccctggtgttgaatgggtag

SEQ ID NO: 310745 - DNA, 1758 bp, Artificial Sequence
  derived and/or modified sequence
ccctgcaggaagagcagcgccctgaacagccccaaggctgctgtggtggtggtgttcaactttgccatggtgctgctgatcttccctgccatcctgtccatggacctgtaccgccgggaggaccggcggctggacatcttctgctgcttcaccagcccctgtgtgtccagggtcatccaggtggagccccaggcctacacagacacccatgacaacacccgctacagccccccaccaccctacagcagccacagctttgcccacgagacccagatcaccatgcagagcacagtgcagctgaggacagaatatgacccccacacccacgtgtactacaccacagctgagcccaggtctgagatctctgtgcagcctgtgacagtgacccaggacaccctgagctgccagagccctgagagcaccagcagcacccgggacctgctgagccagttcagtgacagcagcctgcactgcctggagcccccctgcaccaagtggaccctgagcagctttgctgagaagcactacgcccccttcctgctgaagcccaaggccaaggtggtggtgatcttcctgttcctgggcctgctgggcgtgtccctgtatggcaccaccagggtgagagatggcctggacctgacagacatcgtgccccgggagacccgggagtatgacttcatcgccgcccagttcaagtacttctccttctacaacatgtacatcgtgacccagaaggctgactaccccaacatccagcacctgctgtatgacctgcaccgctccttcagcaatgtgaagtatgtgatgctggaggagaacaagcagctgcccaagatgtggctgcactacttccgggactggctgcagggcctgcaggatgcctttgacagcgactgggagaccgggaagatcatgcccaacaactacaagaatggaagtgatgatggagtgctggcctacaagctgctggtgcagacaggcagccgggacaagcccatcgacatcagccagctgaccaagcagaggctggtggatgctgatggcatcatcaaccccagcgccttctacatctacctgacagcctgggtgtccaatgaccctgtggcctatgctgccagccaggccaacatccggccccacaggcctgagtgggtgcatgacaaggctgactacatgcctgagacccggctgcgcatcccagctgctgagcccattgaatatgcccagttccccttctacctgaatggcctgcgggacaccagtgactttgtggaggccatcgagaaggtgaggaccatctgcagcaactacaccagcctgggcctgagcagctacccaaatggctaccccttcctgttctgggagcagtacatcggcctgcggcactggctgctgctcttcatctctgtggtgctggcctgcaccttcctggtgtgtgctgtgttcctgctgaacccctggacagctggcatcatcgtgatggtgctggccctgatgacagtggagctgtttggcatgatgggcctcatcggcatcaagctgtctgctgtgcctgtggtgatcctgattgcctctgtgggcatcggcgtggagttcaccgtgcacgtggccctggccttcctgacagccatcggggacaagaacagaagagctgtgctggccctggagcacatgtttgcccctgtgctggatggagctgtgtccaccctgctgggcgtgctgatgctggccggcagcgagtttgacttcatcgtgtag

SEQ ID NO: 310746 - DNA, 1461 bp, Artificial Sequence
  derived and/or modified sequence
gggaaggccaccggcaggaaggcccccctgtggctgcgggccaagttccagaggctgctcttcaagctgggctgctacatccagaagaactgtgggaagttcctggtggtgggcctgctgatctttggagcctttgctgtgggcctgaaggccgccaacctggagaccaacgtggaggagctgtgggtggaggtgggcggccgggtgtcccgggagctgaactacacccggcagaagatcggggaggaggccatgttcaacccccagctgatgatccagacccccaaggaggagggcgccaacgtgctgaccacagaggccctgctgcagcacctggacagcgccctgcaggccagccgggtgcacgtgtacatgtacaacagaggcaagccacccctgcgctggaccaactttgaccccctggagttcctggaggagctgaagaagatcaactaccaggtggacagctgggaggagatgctgaacaaggccgaggtgggccacggctacatggaccggccctgcctgaacccagctgaccctgactgcccagccacagcccccaacaagaacagcaccaagcccctggacatggccctggtgctgaatggaggctgccacggcctgagcaggaagtacatgcactggcaggaggagctgattgtgggcggcaccgtgaagaacagcacaggcaagctggtgtctgcccacgccctgcagaccatgttccagctgatgacccccaagcagatgtatgagcacttcaagggctatgaatatgtgagccacatcaactggaatgaagacaaggccgccgccatcctggaggcctggcagaggacctacgtggaggtggtgcaccagagcgtggcccagaacagcacccagaaggtgctgtccttcaccaccaccaccctggatgacatcctgaagagcttcagtgatgtgtctgtcatccgggtggccagcggctacctgctgatgctggcctatgcctgcctgaccatgctgcgctgggactgcagcaagagccagggcgctgtgggcctggccggcgtgctgctggtggccctgtctgtggccgccggcctgggcctgtgcagcctcatcggcatctccttcaatgctgccaccacccaggtgctgcccttcctggccctgggcgtgggcgtggatgatgtgttcctgctggcccacgccttcagcgagaccggccagaacaagaggatcccctttgaggacagaactggagagtgcctgaagaggactggagcctctgtggccctgaccagcatcagcaatgtgacagccttcttcatggccgccctgatccccatcccagccctgcgggccttcagcctgcagtacatcctgatggcccaccggggccgcctgtccttcaatgacaccctgtggtgtggcggcctgaagagctacatgaggttcccctatgaggagtag

SEQ ID NO: 310747 - DNA, 525 bp, Artificial Sequence
  derived and/or modified sequence
atgttcaacccccagctgatgatccagacccccaaggaggagggcgccaacgtgctgaccacagaggccctgctgcagcacctggacagcgccctgcaggccagccgggtgcacgtgtacatgtacaaccggcagtggaagctggagcacctgtgctacaagtctggagagctgatcacagagaccggctacatggaccagatcatcgagtacctgtacccctgcctgatcatcacccccctggactgcttctgggagggcgccaagctgcagagcggcacagcctacctgctgggcaagccacccctgcgctggaccaactttgaccccctggagttcctggaggagctgaagaagatcaactaccaggtggacagctgggaggagatgctgaacaaggccgaggtgggccacggctacatggaccggccctgcctgaacccagctgaccctgactgcccagccacagcccccaacaagaacagcaccaagcccctggacatggccctggtgctgaatggatag

SEQ ID NO: 310748 - DNA, 1758 bp, Artificial Sequence
  derived and/or modified sequence
ccctgccggaagagcagcgccctgaacagccccaaggccgccgtggtggtggtctttaatttcgcgatggtgcttcttatctttcccgccattctgtccatggatctttatcgtcgggaagataggaggctggacattttctgctgcttcacgagtccgtgcgtttctcgggtcatccaggtggaaccgcaggcctatacagacactcacgacaacactcgatattccccaccacctccttactccagccacagcttcgcgcacgaaacacagatcactatgcaatctaccgtgcagctccggacagagtacgatccccacacccacgtgtattatacgaccgcagagcctcgtagtgaaatttcagtgcaacccgtgaccgtcacccaggatacattatcctgccaaagcccagaatctacgtcttccacccgggacctgctgtcgcagttttccgactcttccttacactgcctagagccaccatgcaccaaatggacacttagctcctttgcagagaaacactacgcaccttttctcttaaaacccaaggccaaggtggtggtgattttcctgtttctcggcctgctcggcgtgtccctgtatggcacaaccagggtcagagacggactcgatctgaccgacatcgtgcccagagaaacgagggagtacgacttcatcgcagcacagttcaagtacttctcattctataacatgtacatcgtgacacagaaggccgactaccccaatatccaacatctcctttacgatctgcatcggagcttttccaacgttaaatacgtcatgctagaagagaataaacaactcccaaaaatgtggctgcactatttcagggactggctgcagggactacaggatgcgttcgattctgactgggaaacaggaaaaattatgccaaataactataaaaacggatcagacgacggagttttggcgtataagcttcttgtccaaacagggagccgagacaagcccatcgacatcagtcagttgactaagcagcggctggtagacgccgatggaattatcaacccatctgcgttttacatctacttaacagcttgggttagcaatgatcctgtggcgtacgcagcttcccaggcaaacatcaggcctcatcgcccggaatgggtgcacgataaagcagactacatgcccgaaacacgcctgcgcatcccagccgcagaaccaattgagtacgcccagttccccttttacctcaacggcctgcgagacactagcgatttcgtggaggctattgagaaagtgcggaccatatgttccaattacacatcactgggactatcaagttatcccaacggctacccttttttgttttgggagcagtacataggtctcagacattggctactgcttttcatttctgtcgtgttggcttgtacctttctcgtgtgcgctgtgttccttctgaatccatggacagccgggataatcgtgatggtgttagctctgatgaccgtggaactttttgggatgatgggcttgattggcataaaactttctgccgtgcctgtcgtaatcctcattgcctcagttggcattggtgtagagttcactgtgcacgtagccttggctttcctgaccgcaattggcgataaaaataggagggcagtgcttgccctcgaacatatgtttgcgccggtactcgatggcgcggtcagcacattattgggagtcctgatgctcgccggttccgaatttgacttcatcgtgtag

SEQ ID NO: 310749 - DNA, 1461 bp, Artificial Sequence
  derived and/or modified sequence
ggcaaggccaccggccggaaggcccccctgtggctgcgggccaagttccagcggctgctgtttaagcttggctgctacattcagaagaattgcggaaagttcctggttgtaggcctgctgatatttggcgcgtttgccgtgggtctgaaggccgcaaacctggagaccaatgttgaggaactttgggtggaggttggaggcagggtaagccgggagctcaattatacccgacaaaagatcggtgaagaggcaatgttcaatcctcagctgatgatacagactccaaaggaagagggagccaacgttttgaccacagaagctctgttgcaacacttagactctgctctgcaggcttcccgcgtccacgtttacatgtacaatcgaggaaagccacccctcagatggaccaattttgatcctctggagtttttagaagagctgaagaagattaattatcaagtggatagctgggaggaaatgctaaataaagcagaggtgggccatggatacatggacagaccttgtttaaaccccgccgacccagactgtcctgctacagcccctaataagaactccaccaagcctttggatatggccctggtgctgaatggtgggtgtcacggcctctcaagaaaatatatgcactggcaggaagaactgatcgtgggaggtactgtgaagaactccacaggaaaactcgtcagcgcacacgctctgcagacaatgtttcagctcatgacaccaaagcagatgtacgaacatttcaagggatatgagtatgtcagtcacattaactggaatgaggacaaggcagccgctatcttagaggcctggcagaggacatacgttgaggtggtacaccagtcggttgcacagaacagcacacagaaagtcctgtcgttcacgaccaccactctggacgatattcttaaaagcttttctgatgtttctgtaatccgtgtagcctctgggtacctcctgatgctggcctacgcctgtctcaccatgttacggtgggattgctcaaaatctcagggggccgttggtctagccggtgtattactggtggctctcagtgtcgccgccgggctggggctgtgttccttgatcggtatctcatttaacgccgcaaccacccaggtgctaccctttctggctctgggagtgggtgtggacgacgtgttcttgctggcgcacgctttcagcgaaaccggtcaaaataagcgcattccattcgaagataggaccggcgaatgcttaaagaggactggggcttccgtggcactaaccagcatcagcaacgtgacggctttttttatggctgccctgatcccaattccagccctgcgggcgttttcactacagtacattctcatggcacatagagggcggttgagcttcaatgacaccctttggtgcggagggttaaagtcgtacatgagattcccttacgaggaatag

SEQ ID NO: 310750 - DNA, 525 bp, Artificial Sequence
  derived and/or modified sequence
atgttcaacccccagctgatgatccagacccccaaggaggagggcgccaatgtacttacgacggaggccttactgcagcatctggactcagccttgcaggcctcacgtgtacacgtctacatgtacaacagacagtggaaactagagcacctatgctacaaatcaggggaactgatcacagagaccggctacatggatcagatcatagaatatctctacccgtgcctgataatcacaccactggactgcttctgggagggagccaagttacaaagtgggactgcttacctcctggggaaacctcctcttaggtggacaaattttgatccactggaatttttggaagagctgaaaaaaattaactatcaggtcgacagttgggaggaaatgctgaacaaggcggaagtgggtcatgggtacatggatcggccatgtctcaaccccgcggacccggattgtccggccactgctcccaacaagaattccaccaagcctctcgacatggcgctcgtgttgaatggctag

SEQ ID NO: 310751 - DNA, 525 bp, Artificial Sequence
  derived and/or modified sequence
atgttcaacccccagctgatgatccagacccccaaggaggagggcgcgaacgtgctgacaaccgaggccctccttcagcacctcgattcagctctccaggctagcagagttcacgtgtacatgtataatcgccagtggaagttagagcacctctgctataaaagtggtgaactgattacagaaacagggtatatggaccaaattatcgagtatctctatccctgtcttatcattacccccttggactgtttttgggaaggggcaaaactgcagtctggcaccgcctatctcctcggcaagcctcctctccggtggacgaacttcgatcccttggagtttctggaagaactgaagaaaataaactaccaggttgatagctgggaagagatgttgaataaggctgaagtgggccacggttatatggaccgaccatgtcttaacccagcagaccctgactgtccagctacggcccccaataaaaatagtaccaagcccctggacatggctttggtcttgaacggttag

SEQ ID NO: 310752 - DNA, 525 bp, Artificial Sequence
  derived and/or modified sequence
atgttcaacccccagctgatgatccagacccccaaggaggagggcgcgaacgtgttaacaaccgaggcacttcttcagcatctggactccgcgctccaagcaagccgagttcacgtgtacatgtacaatagacagtggaaactggagcacctgtgttacaagtctggggagctgatcaccgagacaggatacatggaccagatcattgagtatttgtacccctgcctaataataacacctctcgactgtttttgggagggagcaaaactacaatccgggacagcttacctcctgggcaaacctcctctgcgatggaccaattttgaccccttggagttccttgaggaactgaagaaaattaattatcaggtagacagctgggaggaaatgcttaacaaggccgaagtcggtcacgggtacatggatagaccttgcctgaatcccgcagacccagactgccccgcaaccgccccgaacaagaactcaactaagccactggacatggccttggtccttaacgggtag

SEQ ID NO: 310753 - DNA, 525 bp, Artificial Sequence
  derived and/or modified sequence
atgttcaacccccagctgatgatccagacccccaaggaggagggcgccaacgtcctgactacagaagccctgctccagcatcttgattccgctttgcaagccagcagggtgcacgtgtacatgtacaataggcaatggaagctggaacacctgtgctataagtcgggcgaacttatcacggagactggctacatggatcagatcattgagtacctgtatccgtgcctgattatcactcctcttgattgcttttgggagggggctaaattacagagcgggaccgcttatttgttgggtaagcctccactgcggtggaccaatttcgatcccctggagtttctggaagagctaaagaagatcaattaccaagtggacagctgggaggaaatgctgaacaaggccgaagtgggtcacgggtacatggacagaccgtgtcttaaccctgccgacccagattgccccgcaacagccccaaataaaaactccaccaagccccttgacatggccttggtgctgaacgggtag

SEQ ID NO: 310754 - DNA, 1758 bp, Artificial Sequence
  derived and/or modified sequence
ccctgtcgaaaatcctccgccttgaatagtcctaaggccgctgtggtggtggtgtttaactttgcaatggttctgctgatcttcccggctatactctctatggatttgtatcggagagaggatcgcagacttgacatattctgctgtttcacctctccgtgtgtgtctcgcgtaattcaggtcgaaccccaggcctataccgacacacacgataacacaagatatagtccaccccctccttatagctcccactcttttgcacatgaaacacagataaccatgcagtccactgtacagctgcgcacagagtatgatccccacacccacgtgtattatactacagccgagccaagaagtgagatctcggttcagcccgtgacggtgactcaggataccctgtcctgtcagagcccggagagtacctcatctacccgagacctcctgagtcagttttctgacagctctttgcattgtcttgaaccaccgtgcaccaagtggaccctgagctctttcgccgaaaagcactacgccccttttctcctgaagccaaaagctaaggtggtggtcatcttcttgtttctcggcctgttaggtgtgagtctctatggaacaacacgtgtgcgcgacgggttggacttaaccgacatcgtcccaagggaaaccagggaatatgatttcattgctgcccagttcaaatatttctctttttacaacatgtacatcgtgacacagaaggccgactatcctaacattcaacacctgctctacgaccttcacaggtcattctccaatgtgaaatatgtcatgcttgaggaaaataagcaactgcctaagatgtggctccactactttcgcgactggttacagggacttcaagacgccttcgatagtgactgggaaaccggtaaaattatgccgaataactacaagaatggttctgacgacggtgtgctggcgtacaaactgctggttcaaacaggttctcgagataagcccattgacatcagccagctcacaaagcagagactcgtggacgcagacggaattatcaacccctcagcgttctacatttacttaaccgcttgggtttcaaacgatccggtcgcttacgccgcatcccaggctaacatcaggcctcatcgccctgagtgggtccatgataaagctgattatatgccagagacccgcctgcgcataccggcagccgagcctatagagtatgctcagtttccattttatcttaacggcctccgagacaccagtgactttgtggaagctatagagaaggtgagaacaatttgctccaactatacaagcctaggattgtcttcgtatcccaatgggtatcccttcttgttctgggaacagtatatagggctgcgacactggctactactttttataagcgtggtgttggcctgcacctttttggtttgtgccgtattcttactgaatccatggaccgctggaatcatcgtcatggtcttggccctgatgacagtcgaactctttggcatgatgggcttgatcggcattaagttgtcagcagtaccggtggtgattctcattgcttccgtagggattggtgtggagtttacagtgcatgttgctcttgcattccttacagccattggcgacaagaatcgtagagccgtgctagctctcgaacatatgtttgcacccgtgctcgatggcgctgtcagcacactgcttggggttctcatgctggcaggcagtgagtttgactttatcgtgtag

SEQ ID NO: 310755 - DNA, 1461 bp, Artificial Sequence
  derived and/or modified sequence
ggaaaagccactggcaggaaggctcctctctggctgcgggcaaaatttcagagactgctgtttaagcttggctgctatatccagaaaaattgtgggaaatttctggttgtgggactattgattttcggagccttcgccgtaggtcttaaggccgcaaacctcgaaaccaatgtagaagagctgtgggtcgaagtcggcggacgagtttcaagagagctgaattacacaaggcagaaaattggagaagaagccatgtttaatccacagttgatgattcagactcctaaagaggagggcgctaatgtgctgactaccgaggctctgctccagcatttggactccgccctccaagcttccagggtccacgtgtatatgtataatcggggtaaaccccctctgagatggacaaacttcgatccgctggaattcctcgaggagctcaaaaagattaactatcaagtggatagctgggaagaaatgctgaacaaggccgaggtgggccatggctatatggataggccatgtctcaatcccgctgaccccgattgtccagcgaccgctccaaataagaacagtacgaagccactagacatggccctcgttctgaatggtggctgccacggtctaagcaggaagtacatgcactggcaagaggagctcatcgtaggcggtacagtcaagaactctaccggcaagttggtgagcgctcacgctctgcaaactatgttccagttgatgacgccgaaacaaatgtatgaacacttcaaagggtatgaatatgtttcccacataaactggaatgaagacaaggctgctgccattctggaggcttggcagcggacttatgtggaagtcgtccaccagagtgttgctcaaaattctacgcagaaggtattgagctttacaactacaactctggacgacattttgaagagtttcagcgacgtgtccgtgattcgcgtggccagcggatacttgctgatgctcgcctacgcatgcctgaccatgttgaggtgggactgcagcaagtcccagggcgcagtagggctggctggtgtgctactagttgccctgagcgtggccgctggattggggctctgctctttgattggtatcagcttcaacgccgcaacaactcaggttctcccattcctggcactcggagtgggggtggatgacgtgttcttgctggcgcacgcattttcagaaacaggtcaaaacaagcgaatcccattcgaggataggacgggggaatgtctgaagcgaacgggggcatcggtggcactcacatcgatctccaacgtcaccgctttcttcatggctgccctgatccccatccccgctctgagggcttttagcttacaatacatcttgatggcccataggggaaggctttcattcaacgacactttatggtgcggaggccttaaaagctacatgcgctttccctacgaagaatag

SEQ ID NO: 310756 - DNA, 525 bp, Artificial Sequence
  derived and/or modified sequence
atgtttaatccacaacttatgattcaaacacctaaagaggagggggctaacgtcctgacaacagaggcacttctccagcatttggatagcgcccttcaggctagtagagtccacgtgtatatgtataaccgccaatggaagctggagcatctctgttataagtctggcgaactgatcactgagacgggatatatggaccaaattattgaatacctgtacccatgcctcattatcactcccttggattgcttctgggagggggctaagctccagagcggcacggcgtacctgctcggaaaacccccactgagatggacaaacttcgatcctcttgagtttctggaggagctaaagaagatcaactatcaggtcgactcttgggaggagatgctgaataaggcagaggttgggcacggctacatggacagaccctgtctgaatccggcagatcctgactgtccagccacagcacctaacaagaatagtaccaaaccacttgacatggcattggtgctgaatgggtag

SEQ ID NO: 310757 - DNA, 525 bp, Artificial Sequence
  derived and/or modified sequence
atgtttaatccacagctgatgatacagactcccaaagaagagggggctaacgtgctaaccaccgaagctctgctgcaacaccttgacagcgctctgcaggctagtcgggtccacgtatatatgtacaaccgacagtggaagttggaacatctgtgttacaagtccggggagttgataacagagacagggtacatggaccagataatcgagtacttgtacccatgcctaatcataacccccctcgattgcttctgggagggggcaaaactgcagagcggcacagcctacttacttggtaaaccccctctgcggtggaccaacttcgatcccttggaattcctcgaggagcttaagaaaataaactaccaggttgactcctgggaagagatgctgaacaaggccgaagtgggccacggctacatggacaggccgtgcttgaatcccgcagaccctgactgccctgcgaccgcgcctaacaagaacagcactaagcctcttgacatggcgctagtgctgaatggatag

SEQ ID NO: 310758 - DNA, 525 bp, Artificial Sequence
  derived and/or modified sequence
atgttcaatccacagttgatgatacagaccccgaaagaagagggtgctaatgtgctgactaccgaagctcttttgcaacacctggattctgccctgcaagccagcagggtgcacgtgtacatgtacaacaggcaatggaaacttgagcacctgtgctataagagcggggagctgatcactgaaacagggtacatggaccagatcatcgaatacctgtacccatgcttgattatcacccctcttgattgcttttgggagggcgcaaagctgcagagcggcaccgcatacttgctcggaaagcccccattaaggtggacaaatttcgaccctttggaattcctcgaggaactcaagaagatcaactatcaggtcgactcctgggaggaaatgctcaacaaagccgaggtcggacacgggtacatggacagaccttgcttgaatcccgctgatcccgattgccctgcaaccgctccgaataagaactccaccaaaccgctggacatggcactcgtgctgaatgggtag

SEQ ID NO: 310759 - DNA, 525 bp, Artificial Sequence
  derived and/or modified sequence
atgttcaatccccagctcatgattcaaacccccaaggaagagggtgccaacgttctgactactgaggccctgctgcagcatctggattccgctctgcaagcaagtagggtgcacgtttatatgtacaataggcaatggaagcttgaacacctctgctacaaatctggggaactgatcactgaaacaggttatatggaccaaatcatcgaatacctgtatccctgcctcattataacgccgctcgactgcttttgggaaggcgctaaactgcagagcggcaccgcgtatttgctgggcaagcccccacttcgttggacgaattttgatccgttggaatttcttgaagagctgaagaagatcaattaccaggtagattcctgggaggagatgttgaataaggccgaagtgggccacggatacatggatcgcccttgtctcaacccggctgaccccgactgccccgcaacagcacctaacaagaattcaactaaacccctagacatggccctcgttctgaatggatag

SEQ ID NO: 310760 - DNA, 10631 bp, Artificial Sequence
  derived and/or modified sequence
gggaaggctactggccggaaagcgccgctgtggctgagagcgaagtttcagagactcttatttaaactgggttgttacattcaaaaaaactgcggcaagttcttggttgtgggcctcctcatatttggggccttcgcggtgggattaaaagcagcgaacctcgagaccaacgtggaggagctgtgggtggaagttggaggacgagtaagtcgtgaattaaattatactcgccagaagattggagaagaggctatgtttaatcctcaactcatgatacagacccctaaagaagaaggtgctaatgtcctgaccacagaagcgctcctacaacacctggactcggcactccaggccagccgtgtccatgtatacatgtacaacagaggtaaacctcctttgcggtggacaaacttcgaccctttggaattcctggaagagttaaagaaaataaactatcaagtggacagctgggaggaaatgctgaataaggctgaggttggtcatggttacatggaccgcccctgcctcaatccggccgatccagactgccccgccacagcccccaacaaaaattcaaccaaacctcttgatatggcccttgttttgaatggtggatgtcatggcttatccagaaagtatatgcactggcaggaggagttgattgtgggtggcacagtcaagaacagcactggaaaactcgtcagcgcccatgccctgcagaccatgttccagttaatgactcccaagcaaatgtacgagcacttcaaggggtacgagtatgtctcacacatcaactggaacgaggacaaagcggcagccatcctggaggcctggcagaggacatatgtggaggtggttcatcagagtgtcgcacagaactccactcaaaaggtgctttccttcaccaccacgaccctggacgacatcctgaaatccttctctgacgtcagtgtcatccgcgtggccagcggctacttactcatgctcgcctatgcctgtctaaccatgctgcgctgggactgctccaagtcccagggtgccgtggggctggctggcgtcctgctggttgcactgtcagtggctgcaggactgggcctgtgctcattgatcggaatttcctttaacgctgcaacaactcaggttttgccatttctcgctcttggtgttggtgtggatgatgtttttcttctggcccacgccttcagtgaaacaggacagaataaaagaatcccttttgaggacaggaccggggagtgcctgaagcgcacaggagccagcgtggccctcacgtccatcagcaatgtcacagccttcttcatggccgcgttaatcccaattcccgctctgcgggcgttctccctccagtacatactgatggctcatcgaggccgactctcctttaatgataccctgtggtgtggtggtctgaaaagctacatgaggtttccttacgaggagtagccttgtagaaaatccagtgcgctaaattctcccaaggcagcggtagtagtggtgttcaattttgccatggttctgctcatttttcctgcaattctcagcatggatttatatcgacgcgaggacaggagactggatattttctgctgttttacaagcccctgcgtcagcagagtgattcaggttgaacctcaggcctacaccgacacacacgacaatacccgctacagccccccacctccctacagcagccacagctttgcccatgaaacgcagattaccatgcagtccactgtccagctccgcacggagtacgacccccacacgcacgtgtactacaccaccgctgagccgcgctccgagatctctgtgcagcccgtcaccgtgacacaggacaccctcagctgccagagcccagagagcaccagctccacaagggacctgctctcccagttctccgactccagcctccactgcctcgagcccccctgtacgaagtggacactctcatcttttgctgagaagcactatgctcctttcctcttgaaaccaaaagccaaggtagtggtgatcttcctttttctgggcttgctgggggtcagcctttatggcaccacccgagtgagagacgggctggaccttacggacattgtacctcgggaaaccagagaatatgactttattgctgcacaattcaaatacttttctttctacaacatgtatatagtcacccagaaagcagactacccgaatatccagcacttactttacgacctacacaggagtttcagtaacgtgaagtatgtcatgttggaagaaaacaaacagcttcccaaaatgtggctgcactacttcagagactggcttcagggacttcaggatgcatttgacagtgactgggaaaccgggaaaatcatgccaaacaattacaagaatggatcagacgatggagtccttgcctacaaactcctggtgcaaaccggcagccgcgataagcccatcgacatcagccagttgactaaacagcgtctggtggatgcagatggcatcattaatcccagcgctttctacatctacctgacggcttgggtcagcaacgaccccgtcgcgtatgctgcctcccaggccaacatccggccacaccgaccagaatgggtccacgacaaagccgactacatgcctgaaacaaggctgagaatcccggcagcagagcccatcgagtatgcccagttccctttctacctcaacggcttgcgggacacctcagactttgtggaggcaattgaaaaagtaaggaccatctgcagcaactatacgagcctggggctgtccagttaccccaacggctaccccttcctcttctgggagcagtacatcggcctccgccactggctgctgctgttcatcagcgtggtgttggcctgcacattcctcgtgtgcgctgtcttccttctgaacccctggacggccgggatcattgtgatggtcctggcgctgatgacggtcgagctgttcggcatgatgggcctcatcggaatcaagctcagtgccgtgcccgtggtcatcctgatcgcttctgttggcataggagtggagttcaccgttcacgttgctttggcctttctgacggccatcggcgacaagaaccgcagggctgtgcttgccctggagcacatgtttgcacccgtcctggatggcgccgtgtccactctgctgggagtgctgatgctggcgggatctgagttcgacttcattgtcaggtaagcaggcgtgtgcaaggagacatgttttagaaatcattgtgattgggccgggtgcagtggctcacgcctgtaatcccagcactttaggaggccgaggcgggtggatcagaaggtcaaggagttcaagaccagcctggccaagatggtgaaactcatctccactcaaaatacaaaaattagccgggcgtggtggtgggtgcctgtaatcccagctacttgggaggctgaggcagagaattgctcgaacccgggaggcggaggttgcagtgagctgagattgcgccactacactccagcctgggtgacagagcgagattctgtctcaaaaaaaaaaatattgttattagctcaggtgatcttcgttgcttatttccttctgtatctggtagattgcagcacctcgtcatcgtgactctgctttcttttgaacttgttaacgtagagatattcggaggtataaagacaagctctcttctagagctgtcttggggagtatcttgaaaacagaaggtaaaggatttggggctggcagcaaagacaactctgcagcttgaagccaaaggatcacccaataggtggcccattattgtctcgggttagaaacactgcagaaagaaatgccacatttgacctacgctccctctccttcaaactgtagaaaggaaaacttaaaaatacctaaaattgtcacctgactttattcttttaagaagtgaaaatgacgtgctcagatttcatattcgagtccccacaattaggaagcatttagcattggactttggtgtcaactcttgggaatctaagcctagtttggatctcaaggcaagtcgtttccagttgatttaattaagaatatgactttgtgaaatataaaagaacagtgagttttccttttgaaaagaatttgagaactgcagaggaggaaaccacttgcttctttgagcagcctccatggctttgtgagggacctgctcttggatagaactctgctactttatggagctctaaggccagaatcaccaataagtaaaagatagtccaggattagaaccatgacagggcagaaccagatgtgagaaatgattggtttgtttggcacgcttcagtactgagaggttgtgtgtgtgtgtgtgtgtgtgtgtgtgtcagagagagagatacgcttcttatcttcaagtaaaaagaagagggtttcaactagaagttttagccaaagttttattacgggaaagagatgagtccattggttggcctgtggcatagcccactgggcaatttggcatcatggaggccgccttcttagaatgagtgccaagcttgcttattgtagtttttgcatagagtgaatggtgaagtggaatcgctgtagaccagcgcttctcacaccgatgtgctgaggaatcatctgagggtctaagtgcagggccgatttcggggggcgggaggtgggatgagggctgggtctgcatctccagctacctccctgcaatgtccatggagctagacttctcagcacaaactactgctaagccagcaagccagttcctaaattcctgtttgccaataccaagtagagagttgcccaactgagttaaatgttttggtctgtgttttattttagttcttagtttgattttagcttttcctttgttcttagtatacactttttcaggcactaacgttatcattatgatataaaagctcaatgtcaagtagagtttcttttgcatatttactttctcgtttaacacaaatataacaagcaccccataagtgccatttgcacaacagcaaataatggggacccccatatccctctgtgtagcctaaggtcttttaggggagagacaagttcacaggcaaaaccaggggaaatgcaaggtgtgctggggtctcatgagttacaggagggtctcgctcagccttgtgggggatgctgaatgaggaaacttagcctgaattagagcccccagctggaaacctggcagctggaatcccagcgctctcctctcagccggggttgttcccgcccagaaatatcagggttcctctttcaagcacttaaaagggcttcccattttctaggatgggatggattaacctgataaaggcctcaccaaggtcaaataaatgagcagacactgtatatgctaagccgtcagaaatctaattggcctgtttatgcttcagctagatggatgggatgcaaatgtcttaatgtggctgctgatacatgccccagccgaaagttccagcagtttacattagaccaagacattggctgcttggtttttactaatgtagttcagaagtttctagtgtttacaatagctgtgaggtatttgtatttttatggggattctctctcctttcatctgatgtcaaaacatatatagacatggcagcactggttgcctgttccattttatgaaccagaggaccattaacagatagatatcttgccccccccttcccagaacatcctgagcctctcccctaccccagcccacttccatcagagttgccctagaaatcattagttccagaaacgcatccctgcgtggagtctgtgccctccagccatgcagagtgtctgccagaggctgtccctggctgacaggtttaccttggtattcatgaaggattccagaccttagccctcaatggtgggaaagcagaactacttctgcactctcctcctctgccatggtgctgcggcctttatgtttgaattggctgacgcaaaacaagagtattcagagatgctaaattgttcaacaaaagattggcccgcagagcagccccgccattgtggagtgccctcacccagcacaatgccccagctcccacagaatgggcagcattttctttgcagaaagctggttcctgtgttctaaaaaggttgcaattggagctatttggtaaaactggaactcacagaattctaggcagaaagttgtgattaatgaaaggccagggaaagccttacctgatatgctagagacttaattagagattctgccgtaagatgcagaagcatttcacagtggattagcagcctgcagaagtgggctgcttttcctcctgggctaaattgtttaaattctacacccttcacttcatttgtttgcttctgctgggttttcacgagcggggcccctcggcattgtgtttgtgctttcagtctgcccagccattcaggtcgcattccatatttttgtgtttgtgtaacacattcataaataacattacatgccatcagagttcagcaaattaacaaactaattttttttttcttcccttcatgaactaacactttgggttgtggaatgtagtcctcaaagtcataaggtaaagaaacaaaaagcaaaaactcaccttgtgttgaatgtgaactgcggttggataacagccttttcagtggggtgggttttgttcatttctggcgttgccatgctgctgtgtcgggcacacggagggtggcgcgatccaccctgtcacagcgcgtgttcccgtttcctcttgatctcccaggtatttctttgctgtgctggcgatcctcaccatcctcggcgttctcaatgggctggttttgcttcccgtgcttttgtctttctttggaccatatcctgaggtgtctccagccaacggcttgaaccgcctgcccacaccctcccctgagccaccccccagcgtggtccgcttcgccatgccgcccggccacacgcacagcgggtctgattcctccgactcggagtatagttcccagacgacagtgtcaggcctcagcgaggagcttcggcactacgaggcccagcagggcgcgggaggccctgcccaccaagtgatcgtggaagccacagaaaaccccgtcttcgcccactccactgtggtccatcccgaatccaggcatcacccaccctcgaacccgagacagcagccccacctggactcagggtccctgcctcccggacggcaaggccagcagccccgcagggacccccccagagaaggcttgtggccacccccctacagaccgcgcagagacgcttttgaaatttctactgaagggcattctggccctagcaatagggcccgctggggccctcgcggggcccgttctcacaaccctcggaacccagcgtccactgccatgggcagctccgtgcccggctactgccagcccatcaccactgtgacggcttctgcctccgtgactgtcgccgtgcacccgccgcctgtccctgggcctgggcggaacccccgagggggactctgcccaggctaccctgagactgaccacggcctgtttgaggacccccacgtgcctttccacgtccggtgtgagaggagggattcgaaggtggaagtcattgagctgcaggacgtggaatgcgaggagaggccccggggaagcagctccaactgagggtgattaaaatctgaagcaaagaggccaaagattggaaaccccccacccccacctctttccagaactgcttgaagagaactggttggagttatggaaaagatgccctgtgccaggacagcagttcattgttactgtaaccgattgtattattttgttaaatatttctataaatatttaagagatgtacacatgtgtaatataggaaggaaggatgtaaagtggtatgatctggggcttctccactcctgccccagagtgtggaggccacagtggggcctctccgtatttgtgcattgggctccgtgccacaaccaagcttcattagtcttaaatttcagcatatgttgctgctgcttaaatattgtataatttacttgtataattctatgcaaatattgcttatgtaataggattattttgtaaaggtttctgtttaaaatattttaaatttgcatatcacaaccctgtggtagtatgaaatgttactgttaactttcaaacacgctatgcgtgataatttttttgtttaatgagcagatatgaagaaagcacgttaatcctggtggcttctctaggtgtcgttgtgtgcggtcctcttgtttggctgtgcgtgtgaacacgtgtgtgagttcaccatgtactgtactgtgattttttttttgtcttgttttgtttctctacactgtctgtaacctgtagtaggctctgacctagtcaggctggaagcgtcaggatatcttttcttcgtgctggtgagggctggccctaaacatccacctaatcctttcaaatcagcccggcaaaagctagactctcctcgtgtctacggcatctcttatgatcattggctgccatccaggaccccaatttgtgcttcagggggataatctccttctctcggatcattgtgatggatgctggaacctcagggtatggagctcacatcagttcatcatggtgggtgttagagaattcggtgacatgcctagtgctgagccttggctgggccatgagagtctgtatactctaaaaagcatgcagcatggtgcccctcttctgaccaacacacacacgacccctcccccaacacccccaaattcaagagtggatgtggccctgtcacaggtagaaaaacctatttagttaattctttcttggcccacagtctcccagaaatgatgttttgagtccctatagtttaaactccctctcttaaatggagcagctggttgaggctttctagatctgtttgcatcttctttaaaactaagtggtgagcatgcattgtggtgtagaggcaggcattatgtaggataagagctccggggggattcttcatgcaccagtgtttagggtacgtgcttcctaagtaaatccaaacattgtctccatcctccccgtcattagtgctctttcaatgtgatgtgggaaagcaggaggatggacacaccccactgaaagatgtaggcaggggcaggtctctcaaccaggcatatttttaaaagttgcttctgtactggttctcttcttttgctctgaggtgtgggctccctcatctcgtaaccagagaccagcacatgtcagggaagcacccagtgtcggctccccatccaaatccacaccagcaccttgttacagacaagaagtcagaggaaagggcggggtccctgcagggctgaagcctaagctactgtgaggcgctcacgagtggcagctcctgttactcccttttaaattacctgggaaatcttaacagaaaggtaatgggcccccagaaatacccacagcatagtgacctcagaccctgatactcaccacaaaacttttaagatgctgattgggagccgcttgtggctgctgggtgtgtgtgtgtgtgtgtgcgtgcgtgcgtgtgtgtgtgtctctgctggggaccctggccacccccctgctgctgtcttggtgcctgtcacccacatggtctgccatcctaacacccagctctgctcagaaaacgtcctgcgtggaggagggatgatgcagaattctgaagtcgacttccctctggctcctggcgtgccctcgctcccttcctgagcccagctcgtgttgcgccggaggctgcgcggcccctgatttctgcatggtgtagaactttctccaatagtcacattggcaaagggagaactggggtgggcggggggtggggctggcagggaattagaatttctctctctcttttaatagttttattttgtctgtcctgtttgttcatttggatgttttaatttttaaaaaaaaaaaaactttgctgatatttataattttgtatcataagaatgttttcctctacagtatttgtcatgccagtttataacaaaaaaaaatgcagggattttatttctattggaaacattacagctatgttttacttttggacagaatttttatttgtatagagtgcttactaatgttaaatagttcagagtatataacatttacattaaggactcatggtaggttttagggtaaggagtttaaaggaaataaatattcaaactgggtctcattgccaattttggtggaaatgagtttgtgtcatttcaattacaaagataaaagtatgccatataatttatttatatgaagatttatttttgtagtgtacatagtagtcatcaagtcttttgacagaagtatatttttaaagaatttatatgtgatgaatccataatgtctggaactttgctgagacatgagtgggcacagttttcattgtaaattacagcaaggaaagaaaatgtttaacagtgttaagagagtcagagcagagtggatattcatgcgattatgaagtgtttattagttaccattggcgacctagcatgcttctcatttcaaaccttggaaggtgaaaatgtacaaactctctaaataattaatgttcaaacactgatagaaattctaacatgaataaaaaataatataacttgttggtt

SEQ ID NO: 310761 - DNA, 919 bp, Artificial Sequence
  derived and/or modified sequence
acccaggagggctgtgctgatagcacgttcctcgagtttactttgctttccttgagtttattgtaaaggggtaaagttttcggatccgtcacgtgaccctgacaggtcctgcctatggcgcggcagaccacccacgccgagggccatggaactgcttaatagaaacaggcttgtaattgtgagtccgcgctgcactccgccgaaagcctccggcggcccagcgcgccggggtttttacactttccgttccttttgtaaagacggaggaggaggagaagaagaagaagaaaacggaggagaagaaaaagacgacaggggagacaaagagacccgcagcgacaaggcaagggggagacgagggaagactgggagaagacggaggagcggaggacgaggaaaggggggccagggaaaaaaaaggaattgatgtgaaatccaagcccagcgtccgcgccatcggcacccgcgctccgagcaggggttgacggccggctatggggaaggctactggccggaaagcgccgctgtggctgagagcgaagtttcagagactcttatttaaactgggttgttacattcaaaaaaactgcggcaagttcttggttgtgggcctcctcatatttggggccttcgcggtgggattaaaagcagcgaacctcgagaccaacgtggaggagctgtgggtggaagaggtaaacctcctttgcggtggacaaacttcgaccctttggaattcctggaagagttaaagaaaataaactatcaagtggacagctgggaggaaatgctgaataaggctgaggttggtcatggttacatggaccgcccctgcctcaatccggccgatccagactgccccgccacagcccccaacaaaaattcaaccaaacctcttgatatggcccttgttttgaatggt

SEQ ID NO: 310762 - DNA, 864 bp, Artificial Sequence
  derived and/or modified sequence
actcacacctctccaggaaaagcagcagacaaatggggattgaaaaattcaaaccctccctctggtcctgggaggaaagggctgtctgaggggaaggctactggccggaaagcgccgctgtggctgagagcgaagtttcagagactcttatttaaactgggttgttacattcaaaaaaactgcggcaagttcttggttgtgggcctcctcatatttggggccttcgcggtgggattaaaagcagcgaacctcgagaccaacgtggaggagctgtgggtggaagttggaggacgagtaagtcgtgaattaaattatactcgccagaagattggagaagaggctatgtttaatcctcaactcatgatacagacccctaaagaagaaggtgctaatgtcctgaccacagaagcgctcctacaacacctggactcggcactccaggccagccgtgtccatgtatacatgtacaacaggcagtggaaattggaacatttgtgttacaaatcaggagagcttatcacagaaacaggttacatggatcagataatagaatatctttacccttgtttgattattacacctttggactgcttctgggaaggggcgaaattacagtctgggacagcatacctcctaggtaaacctcctttgcggtggacaaacttcgaccctttggaattcctggaagagttaaagaaaataaactatcaagtggacagctgggaggaaatgctgaataaggctgaggttggtcatggttacatggaccgcccctgcctcaatccggccgatccagactgccccgccacagcccccaacaaaaattcaaccaaacctcttgatatggcccttgttttgaatggt

SEQ ID NO: 310763 - DNA, 881 bp, Artificial Sequence
  derived and/or modified sequence
actcacacctctccaggaaaagcagcagacaaatggggattgaaaaattcaaaccctccctctggtcctgggaggaaagggctgtctgaggtccgcagggggtggaggggaaggctactggccggaaagcgccgctgtggctgagagcgaagtttcagagactcttatttaaactgggttgttacattcaaaaaaactgcggcaagttcttggttgtgggcctcctcatatttggggccttcgcggtgggattaaaagcagcgaacctcgagaccaacgtggaggagctgtgggtggaagttggaggacgagtaagtcgtgaattaaattatactcgccagaagattggagaagaggctatgtttaatcctcaactcatgatacagacccctaaagaagaaggtgctaatgtcctgaccacagaagcgctcctacaacacctggactcggcactccaggccagccgtgtccatgtatacatgtacaacaggcagtggaaattggaacatttgtgttacaaatcaggagagcttatcacagaaacaggttacatggatcagataatagaatatctttacccttgtttgattattacacctttggactgcttctgggaaggggcgaaattacagtctgggacagcatacctcctaggtaaacctcctttgcggtggacaaacttcgaccctttggaattcctggaagagttaaagaaaataaactatcaagtggacagctgggaggaaatgctgaataaggctgaggttggtcatggttacatggaccgcccctgcctcaatccggccgatccagactgccccgccacagcccccaacaaaaattcaaccaaacctcttgatatggcccttgttttgaatggt

SEQ ID NO: 310764 - DNA, 539 bp, Artificial Sequence
  derived and/or modified sequence
ttcgtccccaggggaaggctactggccggaaagcgccgctgtggctgagagcgaagtttcagagactcttatttaaactgggttgttacattcaaaaaaactgcggcaagttcttggttgtgggcctcctcatatttggggccttcgcggtgggattaaaagcagcgaacctcgagaccaacgtggaggagctgtgggtggaagttggaggacgagtaagtcgtgaattaaattatactcgccagaagattggagaagaggctatgtttaatcctcaactcatgatacagacccctaaagaagaaggtgctaatgtcctgaccacagaagcgctcctacaacacctggactcggcactccaggccagccgtgtccatgtatacatgtacaacaggcagtggaaattggaacatttgtgttacaaatcaggagagcttatcacagaaacaggttacatggatcagataatagaatatctttacccttgtttgattattacacctttggactgcttctgggaaggggcgaaattacagtct

SEQ ID NO: 310765 - DNA, 809 bp, Artificial Sequence
  derived and/or modified sequence
atccatgtggctgccctcttccgatcacaaatattgggaaggctactggccggaaagcgccgctgtggctgagagcgaagtttcagagactcttatttaaactgggttgttacattcaaaaaaactgcggcaagttcttggttgtgggcctcctcatatttggggccttcgcggtgggattaaaagcagcgaacctcgagaccaacgtggaggagctgtgggtggaagttggaggacgagtaagtcgtgaattaaattatactcgccagaagattggagaagaggctatgtttaatcctcaactcatgatacagacccctaaagaagaaggtgctaatgtcctgaccacagaagcgctcctacaacacctggactcggcactccaggccagccgtgtccatgtatacatgtacaacaggcagtggaaattggaacatttgtgttacaaatcaggagagcttatcacagaaacaggttacatggatcagataatagaatatctttacccttgtttgattattacacctttggactgcttctgggaaggggcgaaattacagtctgggacagcatacctcctaggtaaacctcctttgcggtggacaaacttcgaccctttggaattcctggaagagttaaagaaaataaactatcaagtggacagctgggaggaaatgctgaataaggctgaggttggtcatggttacatggaccgcccctgcctcaatccggccgatccagactgccccgccacagcccccaacaaaaattcaaccaaacctcttgatatggcccttgttttgaatggt

SEQ ID NO: 310766 - DNA, 1037 bp, Artificial Sequence
  derived and/or modified sequence
aattcagctcacacagcctctccccacgctatggaaatgcgtcgggagtgaactccggcggccgcgctcaccacgtggatccccacttactaccattctcggcgggggtccagttgggggaacccgcaatatgttgttccaaagagcgctcgcccctagcgcccgtccccgagggtgatggacagagcaggactggtttgctggctcctgaaccttgggctccatcgctgggattacgcagcccctcccttctcagctctggggggaaggctactggccggaaagcgccgctgtggctgagagcgaagtttcagagactcttatttaaactgggttgttacattcaaaaaaactgcggcaagttcttggttgtgggcctcctcatatttggggccttcgcggtgggattaaaagcagcgaacctcgagaccaacgtggaggagctgtgggtggaagttggaggacgagtaagtcgtgaattaaattatactcgccagaagattggagaagaggctatgtttaatcctcaactcatgatacagacccctaaagaagaaggtgctaatgtcctgaccacagaagcgctcctacaacacctggactcggcactccaggccagccgtgtccatgtatacatgtacaacaggcagtggaaattggaacatttgtgttacaaatcaggagagcttatcacagaaacaggttacatggatcagataatagaatatctttacccttgtttgattattacacctttggactgcttctgggaaggggcgaaattacagtctgggacagcatacctcctaggtaaacctcctttgcggtggacaaacttcgaccctttggaattcctggaagagttaaagaaaataaactatcaagtggacagctgggaggaaatgctgaataaggctgaggttggtcatggttacatggaccgcccctgcctcaatccggccgatccagactgccccgccacagcccccaacaaaaattcaaccaaacctcttgatatggcccttgttttgaatggt

SEQ ID NO: 310767 - protein, 490 aa, Artificial Sequence
  derived and/or modified sequence
MLMRLVLTVRSNLIPSPPTYNSAHDYISWESFSNVSYYTRILPSVPKDCPTPMGTKGKKQLPDAQLLARRFLLRRKFIPDPQGTNLMFAFFAQHFTHQFFKTSGKMGPGFTKALGHGVDLGHIYGDNLERQYQLRLFKDGKLKYQVLDGEMYPPSVEEAPVLMHYPRGIPPQSQMAVGQEVFGLLPGLMLYATLWLREHNRVCDLLKAEHPTWGDEQLFQTTRLILIGETIKIVIEEYVQQLSGYFLQLKFDPELLFGVQFQYRNRIAMEFNHLYHWHPLMPDSFKVGSQEYSYEQFLFNTSMLVDYGVEALVDAFSRQIAGRIGGGRNMDHHILHVAVDVIRESREMRLQPFNEYRKRFGMKPYTSFQELVGEKEMAAELEELYGDIDALEFYPGLLLEKCHPNSIFGESMIEIGAPFSLKGLLGNPICSPEYWKPSTFGGEVGFNIVKTATLKKLVCLNTKTCPYVSFRVPDASQDDGPAVERPSTEL

SEQ ID NO: 310768 - DNA, 1473 bp, Artificial Sequence
  derived and/or modified sequence
atgctgatgagactggtgctgaccgtgagaagcaacctgatccccagcccccccacctacaacagcgcccacgactacatcagctgggagagcttcagcaacgtgagctactacaccagaatcctgcccagcgtgcccaaggactgccccacccccatgggcaccaagggcaagaagcagctgcccgacgcccagctgctggccagaagattcctgctgagaagaaagttcatccccgacccccagggcaccaacctgatgttcgccttcttcgcccagcacttcacccaccagttcttcaagaccagcggcaagatgggccccggcttcaccaaggccctgggccacggcgtggacctgggccacatctacggcgacaacctggagagacagtaccagctgagactgttcaaggacggcaagctgaagtaccaggtgctggacggcgagatgtacccccccagcgtggaggaggcccccgtgctgatgcactaccccagaggcatccccccccagagccagatggccgtgggccaggaggtgttcggcctgctgcccggcctgatgctgtacgccaccctgtggctgagagagcacaacagagtgtgcgacctgctgaaggccgagcaccccacctggggcgacgagcagctgttccagaccaccagactgatcctgatcggcgagaccatcaagatcgtgatcgaggagtacgtgcagcagctgagcggctacttcctgcagctgaagttcgaccccgagctgctgttcggcgtgcagttccagtacagaaacagaatcgccatggagttcaaccacctgtaccactggcaccccctgatgcccgacagcttcaaggtgggcagccaggagtacagctacgagcagttcctgttcaacaccagcatgctggtggactacggcgtggaggccctggtggacgccttcagcagacagatcgccggcagaatcggcggcggcagaaacatggaccaccacatcctgcacgtggccgtggacgtgatcagagagagcagagagatgagactgcagcccttcaacgagtacagaaagagattcggcatgaagccctacaccagcttccaggagctggtgggcgagaaggagatggccgccgagctggaggagctgtacggcgacatcgacgccctggagttctaccccggcctgctgctggagaagtgccaccccaacagcatcttcggcgagagcatgatcgagatcggcgcccccttcagcctgaagggcctgctgggcaaccccatctgcagccccgagtactggaagcccagcaccttcggcggcgaggtgggcttcaacatcgtgaagaccgccaccctgaagaagctggtgtgcctgaacaccaagacctgcccctacgtgagcttcagagtgcccgacgccagccaggacgacggccccgccgtggagagacccagcaccgagctgtag

SEQ ID NO: 310769 - DNA, 1473 bp, Artificial Sequence
  derived and/or modified sequence
atgctgatgcgcttagtgttaacggtccgtagcaatctcatcccaagccctcccacctataactctgcccacgactacatctcctgggagtcttttagcaatgtctcctattacacgaggatattgccctcagtacccaaagactgccctacacccatggggactaaaggcaagaaacagctgcccgacgcgcagctgctcgcacggaggttcttactcagacgcaagttcatcccggatccccaggggacaaatctcatgttcgcatttttcgcacagcatttcacgcatcagtttttcaagaccagcggcaaaatgggtccaggcttcactaaagccttaggtcacggcgtggacttggggcacatttacggagacaatctggagcggcagtaccagctgagattgttcaaagacgggaagcttaagtaccaagtgctcgacggggagatgtatccaccctccgtcgaggaggcccctgtacttatgcactaccctcgtggtatccccccacagtcgcaaatggctgtcgggcaggaggtgttcggcctgctgcccggcctgatgctctacgccactctgtggctgagggagcataacagggtctgcgatctgcttaaagccgagcaccccacttggggtgatgaacagcttttccagactacccgcctcattctgatcggggagaccattaagattgtgatcgaggagtatgtgcagcagctctctggatactttctgcaactgaaatttgacccagaactcttattcggggtccagttccagtataggaatcgcatcgccatggagttcaaccacctgtaccactggcaccccctgatgccagactcctttaaggtcggttcccaggagtacagttatgagcagtttctctttaacacgtccatgctggtcgattacggcgttgaggcgcttgtggacgctttctcaagacagattgctggcagaatcggcggtggccgcaacatggatcatcatatcctccatgtggccgtggacgtgatccgggagtccagagaaatgcgacttcagcctttcaatgagtataggaaaaggttcggcatgaaaccatatacctcttttcaggagctggtcggcgaaaaggaaatggcagctgagctagaagagctgtatggggacatcgacgcactggagttttacccgggactgctgttagagaagtgccatccgaactccattttcggagagtctatgattgaaatcggggcaccattttctctcaagggactgctcggtaaccccatctgcagccctgagtattggaaaccttcaacattcggaggtgaggtcggtttcaacatcgtcaagactgcgaccctgaagaaactggtatgcttgaacaccaagacctgtccgtacgttagctttagagttcctgacgcctcacaggacgacggacccgccgtcgagcgaccttctacagaattgtag

SEQ ID NO: 310770 - DNA, 1473 bp, Artificial Sequence
  derived and/or modified sequence
atgctgatgaggctggtgctgactgtgcgcagcaacctgatccccagcccccccacctacaacagcgcccatgactacatctcctgggagagcttcagcaatgtgtcctactacacccgcatcctgcccagcgtgcccaaggactgccccacccccatgggcaccaagggcaagaagcagctgcctgatgcccagctgctggcccggcgcttcctgctgcggaggaagttcatcccagacccccagggcaccaacctgatgtttgccttctttgcccagcacttcacccaccagttcttcaagaccagcggcaagatgggccctggcttcaccaaggccctgggccacggcgtggacctgggccacatctacggggacaacctggagcggcagtaccagctgcggctcttcaaggatggcaagctgaagtaccaggtgctggatggagagatgtacccaccttctgtggaggaggcccctgtgctgatgcactacccccggggcatccccccccagagccagatggctgtgggccaggaggtgtttggcctgctgcccggcctgatgctgtatgccaccctgtggctgcgggagcacaacagagtgtgtgacctgctgaaggccgagcaccccacctggggagatgagcagctgttccagaccaccaggctcatcctgattggagagaccatcaagatcgtgattgaggagtatgtgcagcagctgagcggctacttcctgcagctgaagtttgatcctgagctgctgtttggagtgcagttccagtacagaaacagaattgccatggagttcaaccacctgtaccactggcaccccctgatgccagacagcttcaaggtgggcagccaggagtacagctatgagcagttcctgttcaacacctccatgctggtggactatggagtggaggccctggtggatgccttcagccggcagattgctggccgcatcggcggcggcaggaacatggaccaccacatcctgcacgtggccgtggatgtgatccgggagagccgggagatgaggctgcagcccttcaatgagtacaggaagcgcttcggcatgaagccctacaccagcttccaggagctggtgggggagaaggagatggctgctgagctggaggagctgtatggagacattgatgccctggagttctacccaggcctgctgctggagaagtgccaccccaacagcatctttggagagagcatgattgaaattggagcccccttcagcctgaagggcctgctgggcaaccccatctgcagccctgagtactggaagcccagcaccttcggcggggaggtgggcttcaacatcgtgaagacagccaccctgaagaagctggtgtgcctgaacaccaagacctgcccctacgtgtccttccgggtgcctgatgccagccaggatgatggccctgctgtggagcggcccagcacagagctgtag

SEQ ID NO: 310771 - DNA, 1473 bp, Artificial Sequence
  derived and/or modified sequence
atgctgatgcggctggtgctgaccgtgcggagcaacctgatcccctcccctcccacgtacaatagcgcccacgactatatttcttgggagtcattctcaaacgtaagttactatacccgcatcctgccgtctgtccctaaggattgtccgaccccaatgggcaccaaaggcaagaagcagctgcctgatgcacaattgcttgcacgccgttttctgctcaggagaaagttcattcccgacccccagggaacaaatttgatgttcgccttctttgctcagcactttactcatcagttctttaaaacgtctggcaagatggggccggggttcaccaaggccctgggccacggggttgatcttggccatatctacggagacaacctggagcgacagtatcagctccgcctgtttaaggatgggaagctaaagtatcaggtgcttgacggtgagatgtatcctccttccgtggaggaagcgccagtgctcatgcactacccccggggtattcccccacagagccagatggccgttggtcaggaggtcttcggcttgctccccggtctgatgctctacgctacattgtggctgcgggaacataaccgggtctgcgatttgctgaaggccgagcatcctacttggggggacgagcagctgttccagaccaccaggctgatcttgataggtgaaaccataaagattgtgatcgaagaatatgtgcagcaactgagcggatactttttgcagctcaaattcgatccagagctgttgtttggagtgcaattccaatacagaaatcgtattgccatggagttcaaccacctgtaccactggcatcccttaatgcccgatagttttaaagtcggttcccaggagtatagttacgaacagtttctgttcaatacatctatgctggtggactacggggtggaagcactcgtcgacgctttcagtcgacagatagcaggccgcatcggaggaggccgaaacatggatcaccacattctgcacgtggcggtagacgtgatacgcgagtcccgcgagatgaggctacagcccttcaacgaatatcggaaacgctttggcatgaaaccctacaccagctttcaggaactcgtgggagaaaaagagatggctgcagagttagaggaactttacggcgacatcgacgctctggagttctaccctggtctgttgctcgaaaagtgccatcccaattcaatcttcggggagagtatgatcgaaattggcgcacccttcagtttaaaaggtttactgggaaacccaatctgtagccctgagtactggaagcccagcacgttcggtggcgaggtagggttcaacatcgtgaagactgcgactttgaagaagcttgtgtgtcttaatacaaagacatgtccctacgtctctttcagggtcccggacgcaagtcaggacgatgggcctgctgttgaaaggcccagcacagaactctag

SEQ ID NO: 310772 - DNA, 1473 bp, Artificial Sequence
  derived and/or modified sequence
atgctaatgcgccttgtcctaacggtaagaagtaatttgataccttcccctcctacttataacagcgcccatgattacatttcatgggaatccttttccaacgttagctactatactaggatcttaccttccgtacccaaagattgcccaacacctatgggtaccaagggtaaaaagcagctgcctgatgctcagctcttggccaggagattcctccttcgaagaaaattcataccagatccccaggggaccaatcttatgtttgccttcttcgcccagcactttacgcaccaattttttaagacctccggtaaaatgggtccaggctttactaaggccctgggccacggagtggacttgggccacatttacggagacaatctggaaagacaatatcagctgagactgtttaaagacggaaaattaaaataccaggtcctggatggcgagatgtacccacctagtgttgaggaggctccagtgctcatgcattacccacggggaatccctccgcaaagccagatggcggtgggccaggaggtattcggtctcctgccagggctgatgctttacgctacactctggctgcgggagcacaacagggtctgtgacctgctgaaagctgaacacccaacctggggcgatgaacagttattccaaactacgaggcttattctgataggcgagacgataaaaatagtcattgaggagtacgtacagcaactgtccggttactttcttcagcttaaatttgatccagaactgctgtttggcgtgcagtttcaatacagaaaccggatagcaatggagttcaaccatttatatcactggcatccactcatgccggacagctttaaggttggttcacaggagtactcctatgaacagttcctgttcaatacttctatgctggtcgactatggcgtcgaagcgctggtagatgcgttctctcgtcaaatcgccggacgaatagggggagggagaaacatggatcatcacattcttcacgtagccgtcgacgtgataagagagtcccgggagatgcgcctgcagccttttaatgagtaccgaaaaagattcggcatgaagccctacacctccttccaagagctggtcggcgagaaagaaatggcggcagagctggaggagttgtacggggatattgacgccttagagttctatcccggacttctgctcgagaagtgtcacccaaatagcatttttggtgagagtatgatcgaaattggcgctcctttttccttgaaggggctgctcgggaatccaatttgctcgcccgaatactggaaaccctccacctttggcggtgaggtcggatttaacatcgtcaaaactgccacactcaagaagctggtgtgcctgaacaccaagacctgtccatatgtgtccttcagagtgcccgatgcttctcaggacgacggtccagcagtggagaggccctctacggaactatag

SEQ ID NO: 310773 - protein, 1230 aa, Artificial Sequence
  derived and/or modified sequence
MARAKLPRSPSEGKAGPGGAPAGAAAPEEPHGLSPLLPARGGGSVGSDVGQRLPVEDFSLDSSLSQVQVEFYVNENTFKERLKLFFIKNQRSSLRIRLFNFSLKLLTCLLYIVRVLLDDPALGIGCWGCPKQNYSFNDSSSEINWAPILWVERKMTLWAIQVIVAIISFLETMLLIYLSYKGNIWEQIFRVSFVLEMINTLPFIITIFWPPLRNLFIPVFLNCWLAKHALENMINDFHRAILRTQSAMFNQVLILFCTLLCLVFTGTCGIQHLERAGENLSLLTSFYFCIVTFSTVGYGDVTPKIWPSQLLVVIMICVALVVLPLQFEELVYLWMERQKSGGNYSRHRAQTEKHVVLCVSSLKIDLLMDFLNEFYAHPRLQDYYVVILCPTEMDVQVRRVLQIPLWSQRVIYLQGSALKDQDLMRAKMDNGEACFILSSRNEVDRTAADHQTILRAWAVKDFAPNCPLYVQILKPENKFHVKFADHVVCEEECKYAMLALNCICPATSTLITLLVHTSRGQEGQESPEQWQRMYGRCSGNEVYHIRMGDSKFFREYEGKSFTYAAFHAHKKYGVCLIGLKREDNKSILLNPGPRHILAASDTCFYINITKEENSAFIFKQEEKRKKRAFSGQGLHEGPARLPVHSIIASMGTVAMDLQGTEHRPTQSGGGGGGSKLALPTENGSGSRRPSIAPVLELADSSALLPCDLLSDQSEDEVTPSDDEGLSVVEYVKGYPPNSPYIGSSPTLCHLLPVKAPFCCLRLDKGCKHNSYEDAKAYGFKNKLIIVSAETAGNGLYNFIVPLRAYYRSRKELNPIVLLLDNKPDHHFLEAICCFPMVYYMEGSVDNLDSLLQCGIIYADNLVVVDKESTMSAEEDYMADAKTIVNVQTMFRLFPSLSITTELTHPSNMRFMQFRAKDSYSLALSKLEKRERENGSNLAFMFRLPFAAGRVFSISMLDTLLYQSFVKDYMITITRLLLGLDTTPGSGYLCAMKITEGDLWIRTYGRLFQKLCSSSAEIPIGIYRTESHVFSTSESQISVNVEDCEDTREVKGPWGSRAGTGGSSQGRHTGGGDPAEHPLLRRKSLQWARRLSRKAPKQAGRAAAAEWISQQRLSLYRRSERQELSELVKNRMKHLGLPTTGYEDVANLTASDVMNRVNLGYLQDEMNDHQNTLSYVLINPPPDTRLEPSDIVYLIRSDPLAHVASSSQSRKSSCSHKLSSCNPETRDETQL

SEQ ID NO: 310774 - DNA, 3693 bp, Artificial Sequence
  derived and/or modified sequence
atggcgagagcaaagctgcccagatcccctagcgagggcaaagccgggccgggaggagctccagccggcgctgcagcccctgaggaacctcatggtctgagtcctctccttcccgctcgtgggggagggtccgtagggtctgatgtcgggcagcgactccccgtggaggacttttcccttgactccagcctcagccaggtacaggtggaattctatgtgaacgagaatacattcaaggaacggctgaagcttttcttcataaaaaatcagcgaagctccctgcgcatcaggcttttcaatttttcgctcaaacttttaacctgtcttctgtacatcgtacgagtgctcctggatgatccagctttgggtatagggtgctggggctgtccaaagcaaaattactcctttaacgattctagctctgaaattaattgggctccaatcctatgggtagaacgaaaaatgactttgtgggccattcaagtgatcgttgctatcatttcatttttagagacaatgctcctgatctacctctcctacaaggggaatatttgggaacagatctttcgagtgagcttcgtcctcgagatgattaacaccctgccattcatcataacgatcttctggccacccctgcgaaacctgttcatccctgtattcctgaactgttggctggccaaacacgctctggagaacatgataaacgacttccacagggccatcttgcggacacaatcagccatgttcaatcaggtactaattctgttttgtaccctcctttgtctcgtgtttaccgggacttgtggaattcagcatctggagagggccggcgagaacctgtcccttctaacatctttttacttctgtattgtgactttcagcactgtgggatatggcgacgttacaccaaagatttggccttcccagcttctggttgtgattatgatttgcgtggccttagttgtgcttcctctgcaatttgaagagttagtatatctctggatggaaagacaaaagtcaggaggaaactactcccgacacagagcacagacagagaaacatgtagtgctctgcgtgtcgagtctgaaaatagatctgctaatggattttctgaacgaattttatgcgcaccccaggctgcaggactactacgttgtgatattatgccccactgagatggacgttcaggtgcgacgagtgctccaaatccccctgtggtcccaacgtgtgatctatctgcagggtagtgccctcaaagatcaggatttaatgcgagccaagatggacaatggagaggcatgctttattctgagttcccggaatgaggttgatcgtaccgcggcggatcatcagacaatcctgagggcctgggccgttaaggatttcgcccccaattgccctttatacgtacagatcctgaagccggagaacaagtttcacgtgaaatttgcagatcacgttgtgtgtgaggaagagtgcaaatacgcgatgttagcactgaactgtatatgcccagctaccagcacattgatcaccctcctagttcatacatcacgcggtcaggaaggtcaggaatcgccggagcagtggcagcgcatgtacggaagatgctccgggaatgaagtgtaccatatacgaatgggtgacagcaagtttttcagagagtatgaagggaagtcttttacatatgcggctttccatgcccataaaaaatacggagtttgcctgatcgggctcaagagggaggataataaatctatccttctcaaccccgggcctcgccacattttggccgcctcagacacatgcttttacattaatatcaccaaggaggagaactctgcttttatttttaaacaggaggagaaaaggaagaaacgggccttttcaggccaaggcctgcatgagggacctgcccggttaccggttcactcgattattgctagtatggggactgtggcaatggatttgcaagggaccgaacacaggccaacgcagtccggtggtggcgggggaggcagtaaacttgctctgccaacagagaatgggtccgggtcacgccggccctccatcgcacccgttcttgagctagccgacagcagtgcactcctgccatgtgatcttctaagtgatcagtccgaagacgaggtaaccccttccgatgacgagggactgtctgtcgtggagtatgtcaagggctacccccccaacagtccgtatattgggtccagcccgacactctgccacctgctgcctgtcaaagcccccttctgttgcttaaggttggataaaggctgcaagcataacagctacgaagatgccaaagcttacggtttcaagaacaaactcattattgtttcagctgagacagccggcaacggtctttataactttatcgtgcccctgagggcctactacagatctcgtaaggagctgaatcctatagtgttgctgctcgataataagccagatcatcatttccttgaggccatctgctgcttcccaatggtgtactatatggaagggagcgtggacaacttagattctctgctccagtgcggcatcatctacgctgataatctcgtggttgtagataaagaatctacaatgtccgctgaggaggattacatggccgatgctaaaacaattgttaatgtgcaaacaatgtttagactctttccatcactgtccataaccactgagctgactcatcccagcaacatgcgtttcatgcagtttcgggctaaagactcatacagcttggccctttccaagttggaaaaacgggaaagagaaaacggctccaacctggcctttatgttcaggctgccctttgccgccggacgggtcttttccatatcgatgttagacaccctgctctaccaatccttcgtgaaagactacatgataacaatcacaaggctactgctcgggctcgacacaacccctgggtccggctacttgtgtgcgatgaagattacagagggcgatctgtggattcggacttatggtcgcctgtttcagaaactgtgctcctcatccgcagaaattcccatcgggatctacagaaccgagtctcacgtattctcgacctcagaatctcagatctcagtcaatgtcgaagactgcgaagacactagagaagtcaagggaccctggggctcgcgggccggaacaggcggatcctcacaaggcaggcacaccgggggcggggacccggccgaacatccgctgctgcgaagaaagagcctgcagtgggctagaagactaagcaggaaagcccccaagcaagctggcagggcggccgctgctgaatggataagccagcagcgcctttccttgtatcgcagatccgaacgccaggagctttctgaactggtcaagaaccgtatgaaacatctgggcctcccgaccaccggttatgaggatgtcgccaaccttactgcatctgatgtgatgaaccgcgttaatctaggatacctgcaggacgagatgaacgaccaccagaataccctaagctacgtcctgattaaccccccacctgacactcgtctggagcccagcgacatcgtgtaccttatacgctccgatcccttggcccacgtggcctcttcaagccaatctcgaaaaagctcctgctctcacaaactcagctcgtgtaacccggagacccgtgacgagacccaactctag

SEQ ID NO: 310775 - DNA, 3693 bp, Artificial Sequence
  derived and/or modified sequence
atggcccgggccaagctgcccaggagccccagcgagggcaaggccggccctggaggagccccagctggagctgctgcccctgaggagccccacggcctgagccccctgctgcctgcccggggcggcggctctgtgggcagtgatgtgggccagaggctgcctgtggaggacttcagcctggacagcagcctgagccaggtgcaggtggagttctacgtgaatgaaaacaccttcaaggagcggctgaagctgttcttcatcaagaaccagaggagcagcctgcgcatccgcctcttcaacttcagcctgaagctgctgacctgcctgctgtacatcgtgcgggtgctgctggatgatcctgccctgggcatcggctgctggggctgccccaagcagaactacagcttcaatgacagcagcagcgagatcaactgggcccccatcctgtgggtggagaggaagatgaccctgtgggccatccaggtgattgtggccatcatctccttcctggagaccatgctgctgatctacctgagctacaagggcaacatctgggagcagatcttccgggtgtcctttgtgctggagatgatcaacaccctgcccttcatcatcaccatcttctggccacccctgaggaacctcttcatccctgtgttcctgaactgctggctggccaagcacgccctggagaacatgatcaatgacttccaccgggccatcctgcggacccagagcgccatgttcaaccaggtgctgatcctcttctgcaccctgctgtgcctggtgttcaccggcacctgtggcatccagcacctggagcgggccggggagaacctgagcctgctgaccagcttctacttctgcatcgtgaccttcagcacagtgggctatggagatgtgacccccaagatctggcccagccagctgctggtggtgatcatgatctgtgtggccctggtggtgctgcccctgcagtttgaggagctggtgtacctgtggatggagcggcagaagagcggcggcaactacagccgccaccgggcccagacagagaagcacgtggtgctgtgtgtgagcagcctgaagattgacctgctgatggacttcctgaatgagttctacgcccacccccggctgcaggactactacgtggtgatcctgtgccccacagagatggatgtgcaggtgcggcgggtgctgcagatccccctgtggagccagagggtcatctacctgcagggcagcgccctgaaggaccaggacctgatgagggccaagatggacaacggggaggcctgcttcatcctgagcagcagaaatgaggtggacagaacagctgctgaccaccagaccatcctgcgggcctgggccgtgaaggactttgcccccaactgccccctgtatgtgcagatcctgaagccagagaacaagttccacgtgaagtttgctgaccacgtggtgtgtgaggaggagtgcaagtatgccatgctggccctgaactgcatctgcccagccaccagcaccctcatcaccctgctggtgcacaccagccggggccaggagggccaggagagccctgagcagtggcagaggatgtatggccgctgcagcggaaatgaggtgtaccacatccgcatgggagacagcaagttcttccgggagtatgagggcaagagcttcacctacgccgccttccacgcccacaagaagtatggagtgtgcctgattggcctgaagcgggaggacaacaagagcatcctgctgaaccctggccccaggcacatcctggccgccagtgacacctgcttctacatcaacatcaccaaggaggagaacagcgccttcatcttcaagcaggaggagaagaggaagaagagggccttcagcggccagggcctgcacgagggccctgcccggctgcctgtgcacagcatcatcgcctccatgggcaccgtggccatggacctgcagggcacagagcaccggcccacccagagcggcggcggcggcggcggcagcaagctggccctgcccacagaaaatggcagcggcagcagaagacccagcatcgcccctgtgctggagctggccgacagcagcgccctgctgccctgtgacctgctgagtgaccagagtgaagatgaggtgacccccagtgatgatgagggcctgtctgtggtggagtatgtgaagggctacccacccaacagcccctacatcggcagcagccccaccctgtgccacctgctgcctgtgaaggcccccttctgctgcctgcggctggacaagggctgcaagcacaacagctatgaagatgccaaggcctacggcttcaagaacaagctgatcatcgtgtctgctgagacagctggaaatggcctgtacaacttcatcgtgcccctgcgggcctactaccgcagcaggaaggagctgaaccccatcgtgctgctgctggacaacaagccagaccaccacttcctggaggccatctgctgcttccccatggtgtactacatggagggctctgtggacaacctggacagcctgctgcagtgtggcatcatctatgctgacaacctggtggtggtggacaaggagagcaccatgtctgctgaggaggactacatggctgatgccaagaccatcgtgaatgtgcagaccatgttccgcctcttccccagcctgagcatcaccacagagctgacccaccccagcaacatgaggttcatgcagttccgggccaaggacagctacagcctggccctgagcaagctggagaagcgggagcgggagaatggcagcaacctggccttcatgttccggctgccctttgctgctggccgggtcttcagcatctccatgctggacaccctgctgtaccagagctttgtgaaggactacatgatcaccatcacccggctgctgctgggcctggacaccaccccaggcagcggctacctgtgtgccatgaagatcacagaaggagacctgtggatccgcacctacggccgcctcttccagaagctgtgcagcagcagcgctgagatccccatcggcatctacagaacagagagccacgtgttcagcaccagcgagagccagatctctgtgaatgtggaggactgtgaggacacccgggaggtgaagggcccctggggcagcagagctggcactggaggcagcagccagggccgccacactggaggaggagaccctgctgagcaccccctgctgcggaggaagagcctgcagtgggcccggcggctgagcaggaaggcccccaagcaggccggccgggctgctgctgctgagtggatcagccagcagaggctgagcctgtaccgccgctctgagcggcaggagctgtctgagctggtgaagaacaggatgaagcacctgggcctgcccaccaccggctatgaagatgtggccaacctgacagccagtgatgtgatgaacagagtgaacctgggctacctgcaggatgagatgaatgaccaccagaacaccctgtcctatgtgctgatcaaccccccaccagacacccggctggagcccagcgacatcgtgtacctgatccgcagtgaccccctggcccacgtggccagcagcagccagagcaggaagagcagctgcagccacaagctgagcagctgcaaccctgagaccagagatgagacccagctgtag

SEQ ID NO: 310776 - DNA, 3693 bp, Artificial Sequence
  derived and/or modified sequence
atggcccgggccaagctgccccggagccccagcgagggcaaggccggccccggcggtgccccggcgggagccgccgcacctgaggagccacacgggctctcaccgctgctgcctgccagagggggcgggagcgtaggaagtgacgtcggtcagcggttgcctgtcgaagatttcagcctcgattcttcgttaagccaggtacaagtggagttttacgtgaacgagaacacattcaaggagcgcctgaagcttttttttatcaagaaccagagaagctcactgcgcattcggctttttaatttttctctgaagctattgacgtgtctcctctacatagtgagggtcctccttgacgaccctgccctaggtatcggatgctgggggtgtcccaaacagaattacagctttaacgactcaagttctgagatcaactgggcaccaatcctgtgggttgaaaggaaaatgaccctgtgggcgatccaagttatcgtcgctatcatctctttcctcgaaaccatgctcctcatttatctgagctacaagggaaatatctgggagcaaatctttcgggtcagctttgtgcttgaaatgatcaacaccctgccattcattattactatattttggccccccctgcgcaacctatttattccagtttttttgaattgttggcttgcaaaacatgcgctggagaatatgatcaatgacttccaccgagccatcttacgtacacaatctgctatgtttaatcaggtacttattttgttttgcaccctgctttgtctggtgtttacgggaacatgcggaatacaacacttggagcgggccggggaaaatctgtctctgttgacgtcattttacttctgcatcgtaaccttcagcacagtaggctatggtgacgtgaccccaaagatctggccttcgcagctgcttgtggtgataatgatatgcgtggcacttgtcgtgctccctctgcagttcgaagagctggtgtatctgtggatggagaggcagaagtcaggtggaaactactcccgccatcgggctcagacagaaaagcacgtggtgttgtgcgtcagcagcttgaaaatagatctattgatggacttcctcaacgaattctatgcccatcctagattgcaagattattacgtagtcattctctgcccaaccgagatggacgtacaggtgcgaagagttttacagattccactgtggtcccaaagagtgatataccttcagggaagcgctttgaaagatcaggatttgatgagggcgaaaatggacaacggcgaggcctgctttatccttagctcccgcaatgaggtagaccggacagcagctgatcaccaaacaatcctacgtgcctgggcggtgaaggacttcgcacctaattgcccgctgtatgtgcagattttgaaaccagaaaacaaattccatgtaaaattcgctgaccatgtggtttgcgaagaggagtgcaagtacgccatgctggcgctgaattgcatttgcccggccactagcactttaatcacactgttggtccatactagtcgaggccaagagggccaagaatcgcccgagcagtggcagcgaatgtacggcagatgctcgggcaatgaggtgtaccacattaggatgggcgattcgaaattttttcgggagtacgagggcaagagctttacctatgcggcgttccacgcccataagaagtatggcgtgtgcctgatcggcctaaagagggaagataacaagagcatccttctcaaccctggtccacgacatattcttgccgccagcgatacctgtttttacatcaacattaccaaggaggagaactctgcttttatcttcaagcaagaggagaaacggaagaaaagagccttcagtgggcaggggttgcacgaaggtccagcccggctgcccgtgcactctataattgcttcaatgggcaccgtggcaatggatctgcaaggtaccgaacatagacccacacagtcgggcggaggaggcggcgggagcaagctagctctgccaacagaaaacggatctggatctcggcggccatcaattgctccagtcctcgaactcgccgatagttctgcactcttaccttgcgatcttctgtcagatcagagtgaggacgaagtgacaccaagcgacgatgaagggctgagtgtggtggagtacgtgaaagggtatccacccaactcgccttacatcgggagttctcctacgctgtgccacttgctgcctgttaaagctcctttttgctgtctcaggcttgacaagggctgcaagcacaactcttatgaagacgccaaggcctacggctttaaaaataaactaatcatcgtgtctgccgaaaccgcgggcaatggcttatacaattttattgttcctctgagagcatattaccgaagtagaaaagagctcaaccctattgtcctcctgctcgataataaacccgatcatcacttcctggaagctatctgttgcttcccgatggtctattacatggagggaagcgtagataatctggatagtttgctgcagtgtggaattatttacgctgacaacctcgttgttgtggataaagaatctaccatgagcgctgaagaggattatatggccgacgccaaaaccatcgtaaacgtccagacaatgtttaggttgttcccgtctctctccatcaccaccgagctgacccatcctagcaacatgagattcatgcagttcagagccaaggacagttacagcctggccctctcaaaacttgaaaaaagagaaagagagaatggcagtaacctggccttcatgttccgcctcccgttcgcagccggaagggtgttcagtatctccatgctggataccctactttatcaatcttttgttaaagactacatgatcactatcacgcgccttctcctaggactcgatactacacccggcagcggatatctctgtgccatgaaaatcacggagggagatctctggatcagaacctacgggagacttttccagaaactatgctcaagttcagcagagataccaattggaatttatcgcacggagagccacgtgtttagcacatccgagtctcagatcagcgtgaatgtggaagactgtgaagacacaagggaggtgaaggggccttggggcagcagggccggcactggaggaagctctcaaggcaggcacaccggaggtggtgaccctgctgagcatccactccttcggcgcaagagtctgcagtgggcacgtcggctttctcggaaagcccctaagcaggccggcagagccgccgcagccgaatggataagccagcagagactgtctctgtaccggaggagtgaacgccaagagcttagtgaactcgttaagaacaggatgaagcatctggggctccccaccaccggttatgaagatgtggccaatctcacggcatccgacgttatgaatcgtgtgaatcttggttacttacaagacgagatgaatgatcatcagaacacactatcctatgtgctgatcaaccctccgcccgatactaggcttgagccaagtgatatcgtttacctgataagatccgatcccctcgcgcatgtggcaagctcgtctcaaagtcggaaatcaagctgttcgcacaagctcagtagctgtaatcccgaaacccgggatgagacacagctgtag

SEQ ID NO: 310777 - DNA, 4678 bp, Artificial Sequence
  derived and/or modified sequence
atggcgcgggccaagctgccgcgctcgccgtccgagggcaaggcgggcccggggggcgccccagccggcgccgcagcccccgaggagcctcacgggctcagcccgctgctgccggcccgcggcgggggctccgtgggcagcgacgtgggccagaggcttcctgtagaagatttcagcctggactcctccctgtctcaggtccaggtggagttctacgtcaacgagaacaccttcaaggagcggctcaagctgttcttcatcaaaaaccaaagatcgagcctgaggatccggctgttcaacttctccctgaagctgctcacctgcctgctctacattgtgcgcgtcctgctcgatgacccggccctgggcatcggatgctggggctgcccaaagcagaactactccttcaatgactcgtcctccgagatcaactgggctcctattctgtgggtggagagaaagatgacactgtgggcgatccaggtcatcgtggccataataagcttcctggagacgatgcttctcatctacctcagctacaaaggcaacatctgggagcagatcttccgcgtgtccttcgtcctggagatgatcaacactctgcccttcatcatcacgatcttctggccgccgctgcggaacctgttcatccccgtctttctgaactgctggctggccaagcacgcgctggaaaacatgattaatgacttccaccgtgccatcctgcggacacagtcagccatgttcaaccaggtcctcatcctcttctgcaccctgctgtgcctcgttttcacggggacctgcggcatccagcacctggagcgggcgggcgagaacctgtccctcctgacctccttctacttctgcatcgtcaccttctccaccgtgggctacggtgacgtcacgcccaagatctggccatcgcagctgctggtggtcatcatgatctgcgtggccctcgtggtgctcccactgcagttcgaggagctcgtctacctctggatggagcggcagaagtcagggggcaactacagccgccaccgtgcgcagacggagaagcacgtggtcctgtgtgtcagctccctcaagatcgaccttctcatggacttcctgaacgagttctacgcccacccccggctccaggactattacgtggtcatcctgtgccccacggagatggatgtccaggtgcgcagagtcctgcagatccctctgtggtcccagcgggtcatctacctccagggctctgcactcaaagaccaggacctcatgcgagccaagatggacaatggggaggcctgcttcatcctcagcagcaggaacgaggtggaccgcacggctgcagaccaccagaccatcctgcgcgcctgggccgtgaaggacttcgcccccaactgccccctctacgtccagatcctcaaacctgaaaacaagtttcacgtcaagtttgctgaccacgtggtgtgtgaggaggagtgcaagtacgccatgctggcgctgaactgcatctgcccggcgacctccaccctcatcaccctgctggtgcacacgtcccgcggccaggagggacaggagtctccggagcagtggcagcgcatgtatgggcgctgctccggcaacgaggtgtaccacatccgcatgggtgacagcaagttcttccgcgagtacgagggcaagagcttcacctacgcggccttccacgcccacaagaagtatggcgtgtgcctcatcgggctgaagcgggaggacaacaagagcatcctgctgaacccggggccccggcacatcctggccgcctctgacacctgcttctacatcaacatcaccaaggaggagaactcggccttcatcttcaagcaggaggagaagcggaagaagagggccttctcggggcaggggctgcacgagggtccggcccgcctgcccgtgcacagcatcatcgcctccatggggacagtggccatggacctgcagggcacagagcaccggcctacgcagagcggcggtgggggcgggggcagcaagctggcactgcccacggagaacggctcgggcagccggcggcccagcatcgcgcccgtcctggaactggccgacagctcagccctgctgccctgcgacctgctgagcgaccagtcggaggatgaggtgacgccgtcggacgacgaggggctctccgtggtagagtatgtgaagggctaccctcccaactcgccctacatcggcagctccccaaccctgtgccacctcctgcctgtgaaagcccccttctgctgcctgcggctggacaagggctgcaagcacaacagctatgaagacgccaaggcctacgggttcaagaacaagctgatcatcgtctcggcagagacggccggcaatgggctgtacaacttcatcgtgccactgcgggcctactacagatcccgcaaggagctgaaccccatcgtgctgctgctggacaacaagcccgaccaccacttcctggaagccatctgctgcttccccatggtctactacatggagggctctgtggacaacctggacagcctgctgcagtgtggcatcatctatgcggacaacctggtggtggtggacaaggagagcaccatgagcgccgaggaggactacatggcggacgccaagaccatcgtcaacgtgcagaccatgttccggctcttccccagcctcagcatcaccacggagctcacccacccttccaacatgcgcttcatgcagttccgcgccaaggacagctactctctggctctttccaaactagaaaagagggagcgagagaatggctccaacctggccttcatgttccgcctgccgttcgccgccggccgcgtcttcagcatcagcatgttggacacactgctctaccagtccttcgtgaaggactacatgatcaccatcacccggctgctgctgggcctggacaccacgccgggctcggggtacctctgtgccatgaaaatcaccgagggcgacctgtggatccgcacgtacggccgcctcttccagaagctctgctcctccagcgccgagatccccattggcatctaccggacagagagccacgtcttctccacctcggagtcccagatctcggtgaacgtggaggactgtgaggacacacgggaagtgaaggggccctggggctcccgcgctggcaccggaggcagctcccagggccgccacacgggcggcggtgaccccgcagagcacccactgctacggcgcaagagcctgcagtgggcccggaggctgagccgcaaggcgcccaagcaggcaggccgggcggcggccgcggagtggatcagccagcagcgcctcagcctgtaccggcgctctgagcgccaggagctctccgagctggtgaagaaccgcatgaagcacctggggctgcccaccaccggctacgaggacgtagcaaatttaacagccagtgatgtcatgaatcgggtaaacctgggatatttgcaagacgagatgaacgaccaccagaacaccctctcctacgtcctcatcaaccctccgcccgacacgaggctggagcccagtgacattgtctatctcatccgctccgaccccctggctcacgtggccagcagctcccagagccggaagagcagctgcagccacaagctgtcgtcctgcaaccccgagactcgcgacgagacacagctctgagccagccctgcacggagctcaggccaccaagcccggggtcctcaggaaggacgtggaggagcgtgtgaggacacggtggcactagcgtgaccctggggatggcacactctactcaccatggctcctgggactccaccctggaaaggagcccctcatgcggggggagggccagctcacccctgggcacctgcaggctagtgaggagagttttttaacctatttttacacgtcgatgcagtccacttctctttacacagatgtaccgcaactcgtgaccagggctggctgggagggcaacgcagggactggacgccctacagggccgagcccaggctgtgctggagggtggggctggggtgcatggggaggggagcagaacccagaacccaggagccccgcgtgggccacacccaactcagagccggcctgagcgttcacggccaggcagcctcgcttccttgcagccaagggctgggggccagggctgctgttctgcactctggggtgggtgagggggaccctgggctgtttgctgtcccaagccccttctggaagttagaagcagcaaagggcccggggaagccgggcatgtgagaggggtgcgtccccaggtcccccagagggccctgtcgccgaggacctttctgaaggaagcagaagacgccatttcctctacttcacactgaactgtcccagccactgcatctagggggcattgggcggaagatggtgcatttccatggaccattttacacttaccttttaaagcaaagcctcattttctaaacccctgacttgtgaagcacaattcagcctccgggctgggccacgtggagagagaggatcttctcagcaaggcgagatcccgggcggcggctgacatcaggagcgccaccctgcgtcctttgctgctggttccttactggtttgtacggtcagcgctggaaacttctattaaatggatgcattctggaggcatgaagtt

SEQ ID NO: 310778 - DNA, 3693 bp, Artificial Sequence
  derived and/or modified sequence
atggcacgcgcaaaactgccaagatctccctccgagggaaaagctggtcctggaggcgctcccgcaggcgctgccgcaccagaagaaccacatggcctgtctcccctgttgccagctcgcggtggtggctctgtggggtctgacgtgggccagcggctgccagtcgaagacttttccctggatagttcacttagccaggtgcaggtcgaattttatgtgaatgaaaatacttttaaggagagactgaagcttttctttattaagaaccagaggtcttcccttcggatacgactgtttaacttttcactgaagttactcacatgccttttatacatagttcgggtcctgttggatgatccagccctgggtatcggctgctggggttgtccaaaacaaaattattcctttaacgacagcagctctgaaatcaattgggcacccatcctgtgggtggaaagaaaaatgaccctctgggcaatccaggtgatagtggcaatcatctcctttctagagaccatgctgctgatatatttaagctacaaaggcaatatttgggaacagatctttcgtgtttcgtttgtactagagatgataaatacccttccttttattatcacaattttctggcctccactgaggaacttattcattcccgttttcctgaattgctggctcgcaaaacatgccctggaaaacatgattaacgattttcacagagccatactgcgcacgcaatcagccatgttcaaccaggtgctcatcttattctgcacacttctgtgccttgtcttcactggaacgtgtggcatacagcacctagagcgtgctggcgagaatctgtccttactcacttccttttatttctgcatagtcactttctccacagtcgggtatggagatgtgacgcccaaaatatggcctagtcaattgctcgtggtgattatgatctgtgtggcactggtagtgctgcccctgcaattcgaagaattagtctacctgtggatggagcggcagaagtctggcggaaactactctagacacagagcgcagaccgaaaaacacgtggtactgtgtgtttcttctttgaagatcgatttgctgatggacttcttgaatgagttttacgcacatccacggctccaggattactatgttgtgatactgtgcccaaccgaaatggatgtccaagtgagaagggttctccagattcccctctggagccaaagggtgatctacctacaagggtctgctcttaaggaccaggacctaatgcgagccaaaatggacaatggcgaagcatgtttcatcttaagttctcgcaatgaggtggaccggactgcggctgatcaccaaaccatcctaagagcctgggctgtcaaggattttgcaccgaactgtccgctgtatgtccagatactcaaaccagagaacaagtttcatgtgaagtttgctgatcacgtagtctgtgaagaggaatgtaagtatgccatgctggcactcaactgcatctgccccgctacaagtacgctgatcacattactagtccatacttcgagagggcaagaaggccaagaatccccggagcaatggcagcgaatgtatgggagatgctccggaaacgaggtgtatcacattaggatgggagatagtaagttcttcagagagtatgaaggcaagtcatttacttacgctgcgttccacgctcacaaaaagtatggtgtgtgccttatcggcttaaaaagggaggacaataagtctatcctgctgaatccaggcccacgccatatactggccgcttccgatacttgcttctatatcaatatcacaaaggaggaaaactccgcatttattttcaaacaggaggagaaacggaagaaacgagccttctctgggcaggggttgcatgagggaccagccagattgcctgtacattccatcatagcgtccatgggcaccgtcgcgatggacctgcaaggaaccgaacatagacctacccagtctggtggcggtggtggagggtccaaattggcactgcccacggagaatggcagtggatccaggcggccttcgattgcgcctgtactggaacttgctgattcaagtgccttattgccctgcgacttactaagtgaccagtccgaagacgaagtaaccccaagtgacgacgagggactgagtgtcgttgaatacgttaagggttacccgccaaacagcccatacatcggcagctcccctacgctctgccatctgctccccgtgaaggctcccttctgctgtttacggctcgacaaagggtgcaaacacaattcttacgaggacgcaaaagcatacggcttcaagaataagctaatcattgtgagtgcagagactgcaggcaacgggttgtacaacttcatcgtgccgttgagagcttattatcgctccagaaaggagctgaaccccatcgtgctcctgcttgacaacaaaccggaccatcattttcttgaagcgatctgttgttttccaatggtctactatatggaggggtcagtggataatttagatagcctgcttcaatgtggcatcatctatgctgataacctcgttgtagtcgataaggaatccactatgtcggctgaagaggactacatggctgatgccaaaaccattgtgaatgtgcagacaatgttccgcttgttcccaagtctgagtataaccaccgagcttactcatccgtcaaacatgcgttttatgcaatttcgggctaaggattcttactcgctggcattgtctaaactggagaagcgggaacgcgagaacggctctaacctcgcattcatgtttagacttcctttcgccgctggacgtgtcttcagcatctccatgctggacaccctcctgtaccagagtttcgtgaaggactacatgatcactatcacccggctgctgctggggctggataccacgccaggctctggatatttgtgcgcaatgaagatcactgaaggtgatctgtggatccggacatatgggagactgtttcagaagctgtgtagttcaagcgccgaaatccccatcgggatttatcggaccgagtcccatgtatttagtacttccgaaagtcagatcagcgtcaacgtcgaagactgcgaggacacaagggaagttaaaggcccttggggcagccgagccggaaccggtggatcaagtcagggacgccataccggagggggagacccagcagagcaccctctcttgcgccgaaagagcttacagtgggctagacggctctcccggaaggcacccaagcaggccggtagagcggcagccgcagaatggattagccaacagcgattgagtctttacaggcgttcagaacgccaggaactttccgagttggtgaagaatagaatgaaacacttggggttacctacaacagggtacgaagatgtggctaacctgacagcatcagatgtaatgaaccgggtgaacctgggctacctgcaggatgagatgaacgaccaccagaatacattgagttacgtgctgattaatccccctcccgacacaaggctggagcctagtgatatcgtgtatctgattcgtagcgatccactggcgcatgttgcctcttcttctcagtcccggaagagcagttgtagtcacaagttgagctcctgcaacccagagacccgagatgagacacaactatag

SEQ ID NO: 310779 - DNA, 3693 bp, Artificial Sequence
  derived and/or modified sequence
atggccagagccaagctgcccagaagccccagcgagggcaaggccggccccggcggcgcccccgccggcgccgccgcccccgaggagccccacggcctgagccccctgctgcccgccagaggcggcggcagcgtgggcagcgacgtgggccagagactgcccgtggaggacttcagcctggacagcagcctgagccaggtgcaggtggagttctacgtgaacgagaacaccttcaaggagagactgaagctgttcttcatcaagaaccagagaagcagcctgagaatcagactgttcaacttcagcctgaagctgctgacctgcctgctgtacatcgtgagagtgctgctggacgaccccgccctgggcatcggctgctggggctgccccaagcagaactacagcttcaacgacagcagcagcgagatcaactgggcccccatcctgtgggtggagagaaagatgaccctgtgggccatccaggtgatcgtggccatcatcagcttcctggagaccatgctgctgatctacctgagctacaagggcaacatctgggagcagatcttcagagtgagcttcgtgctggagatgatcaacaccctgcccttcatcatcaccatcttctggccccccctgagaaacctgttcatccccgtgttcctgaactgctggctggccaagcacgccctggagaacatgatcaacgacttccacagagccatcctgagaacccagagcgccatgttcaaccaggtgctgatcctgttctgcaccctgctgtgcctggtgttcaccggcacctgcggcatccagcacctggagagagccggcgagaacctgagcctgctgaccagcttctacttctgcatcgtgaccttcagcaccgtgggctacggcgacgtgacccccaagatctggcccagccagctgctggtggtgatcatgatctgcgtggccctggtggtgctgcccctgcagttcgaggagctggtgtacctgtggatggagagacagaagagcggcggcaactacagcagacacagagcccagaccgagaagcacgtggtgctgtgcgtgagcagcctgaagatcgacctgctgatggacttcctgaacgagttctacgcccaccccagactgcaggactactacgtggtgatcctgtgccccaccgagatggacgtgcaggtgagaagagtgctgcagatccccctgtggagccagagagtgatctacctgcagggcagcgccctgaaggaccaggacctgatgagagccaagatggacaacggcgaggcctgcttcatcctgagcagcagaaacgaggtggacagaaccgccgccgaccaccagaccatcctgagagcctgggccgtgaaggacttcgcccccaactgccccctgtacgtgcagatcctgaagcccgagaacaagttccacgtgaagttcgccgaccacgtggtgtgcgaggaggagtgcaagtacgccatgctggccctgaactgcatctgccccgccaccagcaccctgatcaccctgctggtgcacaccagcagaggccaggagggccaggagagccccgagcagtggcagagaatgtacggcagatgcagcggcaacgaggtgtaccacatcagaatgggcgacagcaagttcttcagagagtacgagggcaagagcttcacctacgccgccttccacgcccacaagaagtacggcgtgtgcctgatcggcctgaagagagaggacaacaagagcatcctgctgaaccccggccccagacacatcctggccgccagcgacacctgcttctacatcaacatcaccaaggaggagaacagcgccttcatcttcaagcaggaggagaagagaaagaagagagccttcagcggccagggcctgcacgagggccccgccagactgcccgtgcacagcatcatcgccagcatgggcaccgtggccatggacctgcagggcaccgagcacagacccacccagagcggcggcggcggcggcggcagcaagctggccctgcccaccgagaacggcagcggcagcagaagacccagcatcgcccccgtgctggagctggccgacagcagcgccctgctgccctgcgacctgctgagcgaccagagcgaggacgaggtgacccccagcgacgacgagggcctgagcgtggtggagtacgtgaagggctacccccccaacagcccctacatcggcagcagccccaccctgtgccacctgctgcccgtgaaggcccccttctgctgcctgagactggacaagggctgcaagcacaacagctacgaggacgccaaggcctacggcttcaagaacaagctgatcatcgtgagcgccgagaccgccggcaacggcctgtacaacttcatcgtgcccctgagagcctactacagaagcagaaaggagctgaaccccatcgtgctgctgctggacaacaagcccgaccaccacttcctggaggccatctgctgcttccccatggtgtactacatggagggcagcgtggacaacctggacagcctgctgcagtgcggcatcatctacgccgacaacctggtggtggtggacaaggagagcaccatgagcgccgaggaggactacatggccgacgccaagaccatcgtgaacgtgcagaccatgttcagactgttccccagcctgagcatcaccaccgagctgacccaccccagcaacatgagattcatgcagttcagagccaaggacagctacagcctggccctgagcaagctggagaagagagagagagagaacggcagcaacctggccttcatgttcagactgcccttcgccgccggcagagtgttcagcatcagcatgctggacaccctgctgtaccagagcttcgtgaaggactacatgatcaccatcaccagactgctgctgggcctggacaccacccccggcagcggctacctgtgcgccatgaagatcaccgagggcgacctgtggatcagaacctacggcagactgttccagaagctgtgcagcagcagcgccgagatccccatcggcatctacagaaccgagagccacgtgttcagcaccagcgagagccagatcagcgtgaacgtggaggactgcgaggacaccagagaggtgaagggcccctggggcagcagagccggcaccggcggcagcagccagggcagacacaccggcggcggcgaccccgccgagcaccccctgctgagaagaaagagcctgcagtgggccagaagactgagcagaaaggcccccaagcaggccggcagagccgccgccgccgagtggatcagccagcagagactgagcctgtacagaagaagcgagagacaggagctgagcgagctggtgaagaacagaatgaagcacctgggcctgcccaccaccggctacgaggacgtggccaacctgaccgccagcgacgtgatgaacagagtgaacctgggctacctgcaggacgagatgaacgaccaccagaacaccctgagctacgtgctgatcaaccccccccccgacaccagactggagcccagcgacatcgtgtacctgatcagaagcgaccccctggcccacgtggccagcagcagccagagcagaaagagcagctgcagccacaagctgagcagctgcaaccccgagaccagagacgagacccagctgtag

SEQ ID NO: 310780 - protein, 466 aa, Artificial Sequence
  derived and/or modified sequence
MLKWPIPGQVALFQILRCRGNSRRTTVTSLTVSQVGQNFTFVLTDIDSKQRFGFCRLSSGAKSCFCILSYLPWFEVFYKLLNILADYTTKRQENQWNELLETLHKLPIPDPGVSVHLSVHSYFTVPDTRELPSIPENRNLTEYFVAVDVNNMLHLYASMLYERRILIICSKLSTLTACIHGSAAMLYPMYWQHVYIPVLPPHLLDYCCAPMPYLIGIHLSLMEKVRNMALDDVVILNVDTNTLETPFDDLQSLPNDVISSLKNRLKKVSTTTGDGVARAFLKAQAAFFGSYRNALKIEPEEPITFCEEAFVSHYRSGAMRQFLQNATQLQLFKQFIDGRLDLLNSGEGFSDVFEEEINMGEYAGSDKLYHQWLSTVRKGSGAILNTVKTKANPAMKTVYKFAKDHAKMGIKEVKNRLKQKDIAENGCAPTPEEQLPKTAPSPLVEAKDPKLREDRRPITVHFGQAL

SEQ ID NO: 310781 - DNA, 1401 bp, Artificial Sequence
  derived and/or modified sequence
atgctgaagtggccaattcctggccaagtggccctctttcaaatcctccgatgccggggcaatagccgcaggaccacagtgacgtctctgaccgtcagccaggttggacaaaacttcacgtttgtattgactgacatcgactctaagcaacgctttgggttttgccgtctctctagtggggccaagtcctgcttttgcatcctcagctacctaccatggttcgaagtattctacaaactactgaacatcctggcagactacacaaccaaacggcaagagaaccagtggaatgagcttctggaaaccctccacaagctgcccatacctgacccgggggtgtccgtgcatctgagtgtacatagttactttactgtcccagatacgagagaacttcccagtatccccgaaaatagaaaccttactgaatatttcgtcgccgttgacgtgaataatatgctgcatctctacgcgagcatgctgtatgagcgtcgcattttgatcatctgctccaaactttctacgctgacagcgtgtatacacggaagcgctgccatgctgtatcctatgtactggcagcatgtctatattcccgtactgccgccacatttgctcgattattgctgtgctccgatgccctatctgataggcattcatctctctcttatggaaaaagtgaggaacatggcgttagacgacgtagtaattctcaacgttgacactaatactctcgaaactcctttcgatgatttacaatccctcccaaacgacgttattagttcccttaagaataggcttaagaaggtgagtactaccactggggatggggttgcccgagcgttcttaaaagcacaggctgctttctttgggagctataggaacgcacttaaaatcgagcctgaggagcccattacattttgcgaggaagcctttgtcagccattaccggagtggcgccatgaggcagttcttacagaatgctacccaattacaattattcaaacagttcattgacggaagactggatctcctgaattccggggagggattctccgacgtgttcgaagaagagatcaatatgggcgagtatgctggcagcgacaagctttaccaccagtggcttagcaccgtgcgcaagggcagtggggcaatactgaacactgtgaaaacaaaggctaatccggcgatgaagacagtttacaagttcgctaaggatcatgctaaaatgggcattaaggaggtgaagaatcgattgaaacagaaggatattgcagagaacggttgtgcacctacacctgaagagcaactcccaaagacagctccttctcctctggtggaagcgaaggacccaaagctccgggaggaccgcaggccaattacggtgcacttcggacaagcactgtag

SEQ ID NO: 310782 - DNA, 1401 bp, Artificial Sequence
  derived and/or modified sequence
atgctgaagtggcccatccctggccaggtggccctcttccagatcctgcgctgccggggcaacagcaggaggaccaccgtgaccagcctgactgtgtcccaggtgggccagaacttcacctttgtgctgacagacatcgacagcaagcagcgcttcggcttctgccgcctgagcagcggggccaagagctgcttctgcatcctgagctacctgccctggtttgaggtgttctacaagctgctgaacatcctggccgactacaccaccaagaggcaggagaaccagtggaatgagctgctggagaccctgcacaagctgcccatcccagaccccggggtgtctgtgcacctgtctgtgcacagctacttcaccgtgcctgacacccgggagctgcccagcatccctgagaacagaaacctgacagagtactttgtggccgtggatgtgaacaacatgctgcacctgtatgcctccatgctgtatgaaagacgcatcctgatcatctgcagcaagctgagcaccctgacagcctgcatccacggcagcgctgccatgctgtaccccatgtactggcagcacgtgtacatccctgtgctgcccccccacctgctggactactgctgtgcccccatgccctacctgattggcatccacctgagcctgatggagaaggtgaggaacatggccctggatgatgtggtgatcctgaatgtggacaccaacaccctggagaccccatttgatgacctgcagagcctgcccaatgatgtgatcagcagcctgaagaaccggctgaagaaggtgtccaccaccactggagatggagtggcccgggccttcctgaaggcccaggccgccttcttcggcagctacagaaatgccctgaagattgagcctgaggagcccatcaccttctgtgaggaggcctttgtgagccactaccgcagcggggccatgaggcagttcctgcagaatgccacccagctgcagctgttcaagcagttcattgatggccgcctggacctgctgaacagcggggagggcttcagtgatgtgtttgaggaggagatcaacatgggagaatatgccggcagtgacaagctgtaccaccagtggctgagcacagtgaggaagggcagcggggccatcctgaacacagtgaagaccaaggccaacccagccatgaagacagtgtacaagtttgccaaggaccacgccaagatgggcatcaaggaggtgaagaaccggctgaagcagaaggacattgctgaaaatggctgtgcccccaccccagaggagcagctgcccaagacagcccccagccccctggtggaggccaaggaccccaagctgagagaagatagaagacccatcaccgtgcacttcggccaggccctgtag

SEQ ID NO: 310783 - DNA, 1401 bp, Artificial Sequence
  derived and/or modified sequence
atgctgaagtggcccatccccggccaggtggccctgttccagatcctccggtgtaggggcaactctaggaggacgaccgtgacgtccctaaccgtgagccaggttggccagaattttacatttgtccttacagatatcgacagtaaacagcgttttggtttctgtcggttgtcctccggggccaagtcatgcttttgcattctgagctacctcccctggtttgaggtcttctacaaacttctaaacatcctggccgactacaccaccaagagacaggaaaatcagtggaatgaactactagagacccttcataagctgccaatccccgaccctggggtctccgtgcatctttcggtacattcctattttactgtgccagatacacgtgaacttccctcaattccagagaacagaaaccttaccgaatacttcgtggcagtcgatgtgaacaacatgctccacctatatgcttcaatgctgtacgagcgaagaatcctgattatctgcagtaagctgtccacgctgacagcgtgcatacacggtagtgccgccatgttgtatccgatgtactggcaacatgtctatatccctgtgctcccgccacacctgcttgattattgttgcgcgcctatgccatatctaattggcatccatttatctctaatggagaaggtaaggaacatggcccttgacgatgttgtgatcctaaatgtcgatacaaacacattggagacccccttcgatgatctgcagtctttacctaatgacgtgatcagtagtctgaagaataggctcaaaaaagtatcgaccactacaggtgatggagtggcccgagctttcctcaaagcacaggctgcctttttcggctcttaccgcaatgctctgaagatagaacctgaggagcccatcactttctgtgaagaggcatttgttagtcactatcggtccggcgcgatgagacagttcttgcagaacgcaacacagctccaactgttcaagcagttcatagatggccgtctggacttgctcaatagcggcgagggcttttcagacgtgtttgaggaggagataaatatgggtgaatacgccggaagcgacaaactgtatcatcagtggctctctacggtccgcaagggcagcggagctatccttaacactgtgaagactaaggccaatcccgccatgaagacagtgtataagttcgccaaagaccatgcaaagatgggtattaaagaagtgaagaacagactcaagcaaaaggacattgcagagaatgggtgtgcacctacccctgaggaacaattacccaaaacagcaccgagcccacttgtcgaggccaaggatccaaagctgcgagaggaccgcagaccaatcacagtgcactttggccaagcgctgtag

SEQ ID NO: 310784 - DNA, 1401 bp, Artificial Sequence
  derived and/or modified sequence
atgctcaaatggcccattcccggacaggtcgccttgtttcagattctccgctgccggggtaattctcgtcggacaacggtaacctctctgactgtgtcccaagtgggacagaacttcaccttcgtgctcaccgacatcgattccaaacagaggttcggtttttgccgcctcagcagtggcgctaagagctgcttttgtatactttcttacctgccatggttcgaggtgttttacaagctgctgaatatcctcgcagactacacaactaagaggcaggagaaccagtggaatgagttattggaaacactgcacaaactgccaatccccgacccgggtgtgagtgtacacctgtcagtgcactcctacttcactgtgccagataccagggagcttcccagtattcctgaaaacagaaatttaactgagtattttgtcgccgtggatgtgaataatatgctgcacctatacgctagcatgctatacgagaggaggattctgattatttgctctaaactgtcaacactgactgcctgtattcatggctcagctgccatgttgtacccgatgtattggcagcacgtgtatatccccgtcctgccaccgcatctgttagattactgttgcgcaccgatgccctacctgattggaatacacctgtccctgatggagaaggtacgaaatatggcgctcgatgatgtggtcatcctgaacgttgacacgaacacactggagactccgttcgatgacttgcagagcctcccaaacgacgtcatctcttctttaaagaacagactgaagaaagtctccacaactacgggcgatggggtcgctagagcattccttaaggcacaggccgcatttttcggctcctacagaaatgcacttaaaatcgagccagaagagcccatcactttttgtgaggaggcctttgtgagccattatcgttcaggtgcaatgcgccagttcctccaaaatgcaacacagctccaattgtttaagcaatttatcgacggaaggctcgacctgctgaactcaggcgaggggttctctgacgttttcgaagaggaaatcaatatgggtgaatacgccggatctgacaaactttatcatcagtggctcagtaccgtacgcaagggcagcggcgcaatcctcaatacagtcaagactaaggctaatcctgctatgaaaaccgtgtacaaattcgctaaggaccatgctaagatgggtatcaaggaagtgaagaaccgccttaagcaaaaagatatcgcggagaatggatgcgcacccactcctgaggaacagctcccaaagactgctcccagcccgctcgtggaagcaaaggatcctaagttgagagaagaccgccgacctatcacagtgcattttggacaggccctgtag

SEQ ID NO: 310785 - DNA, 1401 bp, Artificial Sequence
  derived and/or modified sequence
atgctgaagtggcccatccccggccaggtggccctgttccagatcctgagatgcagaggcaacagcagaagaaccaccgtgaccagcctgaccgtgagccaggtgggccagaacttcaccttcgtgctgaccgacatcgacagcaagcagagattcggcttctgcagactgagcagcggcgccaagagctgcttctgcatcctgagctacctgccctggttcgaggtgttctacaagctgctgaacatcctggccgactacaccaccaagagacaggagaaccagtggaacgagctgctggagaccctgcacaagctgcccatccccgaccccggcgtgagcgtgcacctgagcgtgcacagctacttcaccgtgcccgacaccagagagctgcccagcatccccgagaacagaaacctgaccgagtacttcgtggccgtggacgtgaacaacatgctgcacctgtacgccagcatgctgtacgagagaagaatcctgatcatctgcagcaagctgagcaccctgaccgcctgcatccacggcagcgccgccatgctgtaccccatgtactggcagcacgtgtacatccccgtgctgcccccccacctgctggactactgctgcgcccccatgccctacctgatcggcatccacctgagcctgatggagaaggtgagaaacatggccctggacgacgtggtgatcctgaacgtggacaccaacaccctggagacccccttcgacgacctgcagagcctgcccaacgacgtgatcagcagcctgaagaacagactgaagaaggtgagcaccaccaccggcgacggcgtggccagagccttcctgaaggcccaggccgccttcttcggcagctacagaaacgccctgaagatcgagcccgaggagcccatcaccttctgcgaggaggccttcgtgagccactacagaagcggcgccatgagacagttcctgcagaacgccacccagctgcagctgttcaagcagttcatcgacggcagactggacctgctgaacagcggcgagggcttcagcgacgtgttcgaggaggagatcaacatgggcgagtacgccggcagcgacaagctgtaccaccagtggctgagcaccgtgagaaagggcagcggcgccatcctgaacaccgtgaagaccaaggccaaccccgccatgaagaccgtgtacaagttcgccaaggaccacgccaagatgggcatcaaggaggtgaagaacagactgaagcagaaggacatcgccgagaacggctgcgcccccacccccgaggagcagctgcccaagaccgcccccagccccctggtggaggccaaggaccccaagctgagagaggacagaagacccatcaccgtgcacttcggccaggccctgtag

SEQ ID NO: 310786 - DNA, 3003 bp, Artificial Sequence
  derived and/or modified sequence
ggcggagggggcggcgcgcgccgggcacgcgcgccggcgaccatggcgttcgccgggctggagcgagtacattaacccctggaggcggcggcggcggcgagggagcgagcctcgagcgggcgggccccagcctgagggaagggaggaaggggcggggagagcgccagagggaggccggtcggccgcgggcgggcgggcagcgcagcgccgagcggggcccgcgggcccatgaggaggcctggggaccatgggctccaggatcaagcagaatccagagaccacatttgaagtatatgttgaagtggcctatcccaggacaggtggcactctttcagatcctgaggtgcagaggcaattcccggaggactacagtgaccagcctcacagttagccaagttggccagaacttcacattcgtgctcactgacattgacagcaaacagagattcgggttctgccgcttatcttcaggagcgaagagctgcttctgtatcttaagctatctcccctggttcgaggtattttataagctgcttaacatcctggcagattacacgacaaaaagacaggaaaatcagtggaatgagcttcttgaaactctgcacaaacttcccatccctgacccaggagtgtctgtccatctcagcgtgcattcttattttactgtgcctgataccagagaacttcccagcatacctgagaatagaaatctgacagaatattttgtggctgtggatgttaacaacatgttgcatctgtacgccagtatgctgtacgaacgccggatactcatcatttgcagcaaactcagcactctgactgcctgcatccacgggtctgcggcgatgctctaccccatgtactggcagcacgtgtacatccccgtgctgccgccgcatctgctggactactgctgtgctcccatgccctacctcataggaatccatttaagtttaatggagaaagtcagaaacatggccctggatgatgtcgtgatcctgaatgtggacaccaacaccctggaaacccccttcgatgacctccagagcctcccaaacgacgtgatctcttccctgaagaacaggctgaaaaaggtctccacaaccactggggatggtgtggccagagcgttcctcaaggcccaggctgctttcttcggtagctaccgaaacgctctgaaaatcgagccggaggagccgatcactttctgtgaggaagccttcgtgtcccactaccgctccggagccatgaggcagttcctgcagaacgccacacagctgcagctcttcaagcagtttattgatggtcgattagatcttctcaattccggcgaaggtttcagtgatgtttttgaagaggaaatcaacatgggcgagtacgctggcagtgacaaactgtaccatcagtggctctccactgtccggaaaggaagtggagcaattctgaatactgtaaagaccaaagcaaatccggccatgaagactgtctacaagttcgcaaaagatcatgcaaaaatgggaataaaagaggtgaaaaaccgcttgaagcaaaaggacattgccgagaatggctgcgcccccaccccagaagagcagctgccaaagactgcaccgtccccactggtggaggccaaggaccccaagctccgagaagaccggcggccaatcacagtccactttggacaggcgttgtgaatccccaaaaggagcaagacagaagacagcatttctcagatttgcctggctggggaacctccttttttcccttcacacaatgcgtctcccaggatggtgtttctcagcagacaccctgtgagatgccggccttccactgagatgatttcatctgccaagtgccaagactgggtggacatttttttaagtcctctctggaaacaaatgtaggcgatggactgggagggggagaggctggaggcagggaaacctgctgatggtaatggttgctaatgtctgttggtggcactgtgcaaagaacctgacgtccatcatctcgttgaatcttcctaacaggacactcgggtaggcagtgctgttacctgtacttcacagatgaggacagtaaggcttggaatggtcaaatcgtgggcctggagtaacccagggagtaaatgggagaactggggttctctccaaaactgtctgacccctagaggctgcctcccgagcgctctggtgcactgccacccagcaggaatggaaatagcccaagccagaggtgacaagcagtgaagacagtggggctggagaagatggttcccccgaagtagaaaggccaagcataagagaagcagtattgtggggagtggtgtaggagagctgggtgtctagacagggtagcagcctgtgcaccggtggagggggtgggctcccctctccctgatcacctcttcctcttgatgaatggtgtgaattgaggggtgggggggctgttcccctttcccccacacacttcctgtaagccaggaaggggaaaaaacatggtggccttgcccatccctaggcagcacccccaactcccgggtagctgtcagctgaagggtcaccaagcatgggtcagccctcacgcccagctaatggcataggatctgggaagccacggtgtcattctatcccatcgtgttctccatgtgccgccagggaaccctccaccaagtccctggacccgctttcccctcaggctgccccgacaggttccatgcagagcaccagggacccagggacaactgggacacaggccctgccctccaggagtagtggggcaggttcagaaaacaaattctaaggcagatttgagatctgaagtgtcactcccactcagtagagccctatatcagcactgtccaagaaaaacataatgggagcttcatacgggagtcacatgtggaattctgaatgtgaaacataaacaggtgaaattgattttaatataatgaacccaatatatccaaaatattatttcaacatgtaatcaatctaaaaatta

SEQ ID NO: 310787 - DNA, 2742 bp, Artificial Sequence
  derived and/or modified sequence
atgaccagcagactgagagccctgggcggcagaatcaacaacatcagaaccagcgagctgcccaaggagaagaccagaagcgaggtgatctgcagcatccacttcctggacggcgtggtgcagaccttcaaggtgaccaagcaggacaccggccaggtgctgctggacatggtgcacaaccacctgggcgtgaccgagaaggagtacttcggcctgcagcacgacgacgacagcgtggacagccccagatggctggaggccagcaaggccatcagaaagcagctgaagggcggcttcccctgcaccctgcacttcagagtgagattcttcatccccgaccccaacaccctgcagcaggagcagaccagacacctgtacttcctgcagctgaagatggacatctgcgagggcagactgacctgccccctgaacagcgccgtggtgctggccagctacgccgtgcagagccacttcggcgactacaacagcagcatccaccaccccggctacctgagcgacagccacttcatccccgaccagaacgaggacttcctgaccaaggtggagagcctgcacgagcagcacagcggcctgaagcagagcgaggccgagagctgctacatcaacatcgccagaaccctggacttctacggcgtggagctgcacagcggcagagacctgcacaacctggacctgatgatcggcatcgccagcgccggcgtggccgtgtacagaaagtacatctgcaccagcttctacccctgggtgaacatcctgaagatcagcttcaagagaaagaagttcttcatccaccagagacagaagcaggccgagagcagagagcacatcgtggccttcaacatgctgaactacagaagctgcaagaacctgtggaagagctgcgtggagcaccacaccttcttccaggccaagaagctgctgccccaggagaagaacgtgctgagccagtactggaccatgggcagcagaaacaccaagaagagcgtgaacaaccagtactgcaagaaggtgatcggcggcatggtgtggaaccccgccatgagaagaagcctgagcgtggagcacctggagaccaagagcctgcccagcagaagcccccccatcacccccaactggagaagccccagactgagacacgagatcagaaagcccagacacagcagcgccgacaacctggccaacgagatgacctacatcaccgagaccgaggacgtgttctacacctacaagggcagcctggccccccaggacagcgacagcgaggtgagccagaacagaagcccccaccaggagagcctgagcgagaacaaccccgcccagagctacctgacccagaagagcagcagcagcgtgagccccagcagcaacgcccccggcagctgcagccccgacggcgtggaccagcagctgctggacgacttccacagagtgaccaagggcggcagcaccgaggacgccagccagtactactgcgacaagaacgacaacggcgacagctacctggtgctgatcagaatcacccccgacgaggacggcaagttcggcttcaacctgaagggcggcgtggaccagaagatgcccctggtggtgagcagaatcaaccccgagagccccgccgacacctgcatccccaagctgaacgagggcgaccagatcgtgctgatcaacggcagagacatcagcgagcacacccacgaccaggtggtgatgttcatcaaggccagcagagagagccacagcagagagctggccctggtgatcagaagaagagccgtgagaagcttcgccgacttcaagagcgaggacgagctgaaccagctgttccccgaggccatcttccccatgtgccccgagggcggcgacaccctggagggcagcatggcccagctgaagaagggcctggagagcggcaccgtgctgatccagttcgagcagctgtacagaaagaagcccggcctggccatcaccttcgccaagctgccccagaacctggacaagaacagatacaaggacgtgctgccctacgacaccaccagagtgctgctgcagggcaacgaggactacatcaacgccagctacgtgaacatggagatccccgccgccaacctggtgaacaagtacatcgccacccagggccccctgccccacacctgcgcccagttctggcaggtggtgtgggaccagaagctgagcctgatcgtgatgctgaccaccctgaccgagagaggcagaaccaagtgccaccagtactggcccgacccccccgacgtgatgaaccacggcggcttccacatccagtgccagagcgaggactgcaccatcgcctacgtgagcagagagatgctggtgaccaacacccagaccggcgaggagcacaccgtgacccacctgcagtacgtggcctggcccgaccacggcgtgcccgacgacagcagcgacttcctggagttcgtgaactacgtgagaagcctgagagtggacagcgagcccgtgctggtgcactgcagcgccggcatcggcagaaccggcgtgctggtgaccatggagaccgccatgtgcctgaccgagagaaacctgcccatctaccccctggacatcgtgagaaagatgagagaccagagagccatgatggtgcagaccagcagccagtacaagttcgtgtgcgaggccatcctgagagtgtacgaggagggcctggtgcagatgctggaccccagctag

SEQ ID NO: 310788 - DNA, 2742 bp, Artificial Sequence
  derived and/or modified sequence
atgacgtctcgcctgagagcgctaggaggaagaattaataacatcaggacttcagaactgcccaaagagaaaacacgctcagaagtcatctgcagtatacatttcctggacggagtggtgcaaactttcaaagtgacgaaacaggacacggggcaagtcttgctcgacatggttcacaatcacctcggcgtgacagagaaggaatactttggtcttcagcacgatgatgattcagtagacagtcctcggtggctcgaagcctcaaaggccatacgtaagcaactcaagggtggctttccctgtactctgcatttcagggtccgatttttcattcccgatccgaataccttacaacaagagcagacacgacacctgtactttttgcaacttaaaatggatatatgcgaaggcagactgacttgccccctgaactctgctgtcgtgctggcaagttatgccgttcagagccatttcggtgattataactcatccatccaccatccaggttacctgtctgatagccactttatccccgaccagaacgaggacttcctcactaaagtggagtctttacatgagcagcacagtgggcttaagcagtcagaagccgaatcgtgttacatcaacatcgccaggacactcgatttttacggcgtggagctccactcggggagagacctgcacaatttggaccttatgataggcatagcctcagccggcgtcgcggtgtatcgtaaatacatctgcacttcattttatccttgggtcaacattctaaaaatctccttcaagaggaaaaagttttttattcaccagaggcagaaacaagctgaatcgcgcgagcacatcgtggcttttaatatgctcaactatcggagctgcaaaaacttgtggaagtcttgcgtggagcaccataccttctttcaggcgaagaaactccttccccaagagaagaacgtgctgtcgcaatactggactatgggtagtcggaatacgaaaaagtctgtcaacaaccagtactgcaaaaaggtaattggagggatggtatggaaccccgctatgcggagatcactgtccgtggaacacctcgaaactaaatctcttccgtctcggtccccacccattaccccgaattggagatccccacgcctgaggcacgaaataagaaaaccacggcactcctctgccgataatcttgctaacgagatgacctatatcaccgagacagaggatgtgttttacacttacaagggctcacttgcacctcaggacagtgattcagaggtctctcaaaatcggagtccccaccaagaatctttgtctgaaaacaatccagcccagtcctatctaacgcagaaatctagtagctccgtgtctccgagttctaatgctcctggtagttgttcccctgacggcgtggaccagcagttgctagatgactttcaccgcgtgactaaaggggggtctaccgaagacgccagccagtattactgtgataagaacgacaacggggattcctaccttgttctcattcggatcaccccagacgaagacgggaaattcggctttaacttgaaggggggagtggatcagaagatgcctctagtagtaagccgtataaaccctgaaagtcctgctgacacatgcattccaaagctcaatgagggcgaccagatagtgctcattaacgggagagatatttccgagcatacgcacgatcaggtggtgatgttcattaaagccagtcgcgaaagccattcaagggagctggcccttgtaattcgccgcagagctgtccgaagctttgcagatttcaaaagcgaagatgagttaaaccagctttttccggaggcgatcttcccaatgtgcccggaaggaggcgatactctggagggcagcatggcccaattgaagaaaggcctggaatcaggaaccgtgctgatccaattcgagcagctatacagaaaaaaaccagggctcgctataaccttcgccaagttgccgcagaatcttgacaaaaaccggtacaaagatgtcctgccctatgacacgacaagggtcctgctccaaggaaacgaagactacatcaacgctagctacgtgaacatggagatccctgcagccaatctggttaacaaatacattgcgactcagggccccctgccgcatacctgtgcacagttttggcaggtagtctgggaccagaagctttctctcattgttatgcttactaccttgaccgaaagaggtaggactaaatgtcaccagtattggccagaccccccagacgtgatgaaccacgggggattccacatccaatgtcagtccgaagactgtacaattgcttacgtcagcagggagatgctcgtaaccaacacacagaccggggaagagcacaccgtgacccatctgcaatatgtggcctggcccgaccatggagtgcctgatgactcctctgacttcttggaatttgtaaattacgtgagatcgttgagggttgactccgaacccgttctggtgcactgctcagccggcatagggcggaccggggtgctagtcactatggaaacagcaatgtgtctgacagaaagaaacttgcctatctatcctttagatattgtgcgtaaaatgcgcgatcagagggcaatgatggtccagaccagcagtcagtataaattcgtctgcgaggcaatccttcgggtgtacgaggagggtttagtgcagatgttggatccatcttag

SEQ ID NO: 310789 - DNA, 2742 bp, Artificial Sequence
  derived and/or modified sequence
atgacttcccgacttagggcgttaggagggcgaatcaataacatacgtacctccgaacttcctaaggagaagacccggagcgaagtgatatgttctatccacttcttagacggtgtggtacagacctttaaagtcacaaaacaggacaccggccaggttttgctcgacatggtccataaccacctcggtgtaacagaaaaagaatatttcggtttgcaacacgacgacgactcagttgactcgccccgatggctggaggcatcaaaggcaatcagaaagcagctgaaaggaggattcccatgcaccctccactttcgtgtgcggttcttcatcccagatcccaacacattgcagcaggaacaaactcggcacctgtacttcctgcagctcaagatggacatttgcgaggggcgtctcacctgcccccttaatagtgccgtagtgctggcgtcgtacgccgtgcagagccacttcggcgactacaattcgtctatccatcatcctgggtacctgtcggattcccacttcatcccggaccaaaacgaggattttctcacgaaagttgagtcacttcatgagcagcacagcggccttaaacagagcgaggccgaatcatgttatattaacattgcccggacactcgatttttacggagtcgagctccactcaggtagggatctgcataaccttgaccttatgatcggcatcgcatctgcaggggtggccgtgtaccgtaagtatatctgcacgtcgttttacccatgggtcaacatcttaaaaattagctttaagcgaaaaaagtttttcattcatcagcgccagaaacaggcagaaagcagggagcacatagtggctttcaacatgcttaactataggtcatgcaaaaatttgtggaagagttgtgtggagcatcacactttctttcaggctaagaaactgctgccacaagagaagaacgtcttgtcccagtactggacgatgggctctcggaacacaaaaaagagcgtgaataaccaatattgtaagaaagtgataggaggaatggtatggaatcccgccatgcgccgcagtttgtcagtggagcatctcgagaccaagagtctgccatcacgttcgccacctatcactcccaattggcggtctcctcggttaagacacgagattaggaaaccgcgccactctagtgccgataacctggcgaatgagatgacctacattacagagaccgaagatgtgttttacacctataaggggtccctagcaccacaggacagcgactctgaagtttcccagaataggagtcctcaccaagaatccctgagtgaaaacaatccagcccagtcttatttgactcaaaaatctagctcatctgtgagcccaagtagcaacgcgccgggttcatgctcccccgatggggtggaccagcagcttttagatgattttcatcgtgtcaccaagggaggttctaccgaagatgcctcccagtactactgcgataaaaatgataatggcgatagctatttagtgctcatacgaattacccctgacgaggacgggaagtttggcttcaatctaaagggcggagtcgatcaaaagatgcccctcgttgtctctcggattaaccctgaatctcctgctgatacatgtatcccaaagctgaatgagggagatcaaattgtgcttatcaatggccgggacatctctgaacacacacatgaccaggttgtgatgttcatcaaggcatcaagggaatcccacagccgtgagctggcgctggtgattagacgaagggctgtgaggtctttcgcagacttcaagtccgaggatgagcttaaccaactctttcccgaggccattttccccatgtgtcccgagggcggtgatactcttgaagggtcaatggcacaactaaagaaggggcttgaaagcgggaccgtactcattcaattcgagcaactgtataggaagaagccgggcctggctatcacttttgccaaactcccacagaatctggataaaaaccgctacaaggatgtccttccctacgacaccacacgagtcctgttacaaggaaacgaagattatatcaatgcttcttacgttaatatggaaattcccgctgctaatcttgtgaataagtatatcgcaactcaaggaccacttcctcatacctgtgctcagttttggcaggtggtgtgggaccaaaagctgtctctcatcgttatgctgactacactcactgaaagaggccggaccaaatgtcaccagtattggccggacccaccagacgtaatgaatcacggcggctttcacattcagtgccagagcgaggattgtaccattgcttatgttagcagggagatgctcgtcaccaacacccaaacgggggaagagcacactgttactcacttgcaatacgtggcgtggccagaccatggagttcccgacgattcctccgacttcctcgagtttgtgaattacgttcgttctctgcgagtggatagcgagcccgtgctcgtgcattgctctgccggaattggaagaactggcgtccttgtgaccatggaaactgctatgtgtctcaccgagaggaacctgcccatctacccactggatattgtcagaaaaatgagagaccagcgggctatgatggtacaaactagttcccagtataagtttgtatgcgaagccattctgcgggtttatgaggagggtctcgtccagatgctggacccatcatag

SEQ ID NO: 310790 - DNA, 2742 bp, Artificial Sequence
  derived and/or modified sequence
atgaccagccggctgcgggccctgggcggccgcatcaacaacatccgcaccagcgagctgcccaaggagaagaccaggtctgaggtgatctgcagcatccacttcctggatggagtggtgcagaccttcaaggtgaccaagcaggacaccggccaggtgctgctggacatggtgcacaaccacctgggcgtgacagagaaggagtacttcggcctgcagcatgatgatgacagcgtggacagcccccgctggctggaggccagcaaggccatcaggaagcagctgaagggcggcttcccctgcaccctgcacttccgggtgcgcttcttcatcccagaccccaacaccctgcagcaggagcagaccaggcacctgtacttcctgcagctgaagatggacatctgtgagggccgcctgacctgccccctgaacagcgctgtggtgctggccagctatgctgtgcagagccactttggagactacaacagcagcatccaccaccctggctacctgagtgacagccacttcatcccagaccagaatgaagacttcctgaccaaggtggagagcctgcacgagcagcacagcggcctgaagcagagcgaggccgagagctgctacatcaacatcgcccggaccctggacttctatggagtggagctgcacagcggccgggacctgcacaacctggacctgatgattggcatcgccagcgctggggtggccgtgtacaggaagtacatctgcaccagcttctacccctgggtgaacatcctgaagatctccttcaagaggaagaagttcttcatccaccagaggcagaagcaggccgagagccgggagcacatcgtggccttcaacatgctgaactaccgcagctgcaagaacctgtggaagagctgtgtggagcaccacaccttcttccaggccaagaagctgctgccccaggagaagaatgtgctgagccagtactggaccatgggcagcaggaacaccaagaagtctgtgaacaaccagtactgcaagaaggtgattggaggcatggtgtggaacccagccatgagaagaagcctgtctgtggagcacctggagaccaagagcctgcccagccgcagcccccccatcacccccaactggaggagcccccggctgcggcatgagatcaggaagcccaggcacagcagcgctgacaacctggccaatgagatgacctacatcacagaaacagaagatgtgttctacacctacaagggcagcctggccccccaggacagcgacagcgaggtgtcccagaacagaagcccccaccaggagagcctgtctgagaacaacccagcccagagctacctgacccagaagagcagcagctctgtgagccccagcagcaatgcccctggcagctgcagcccagatggagtggaccagcagctgctggatgacttccaccgggtgaccaagggcggcagcacagaagatgccagccagtactactgtgacaagaatgacaatggagacagctacctggtgctgatccgcatcaccccagatgaagatggcaagtttggcttcaacctgaagggcggcgtggaccagaagatgcccctggtggtgagccgcatcaaccctgagagccctgctgacacctgcatccccaagctgaatgaaggagaccagatcgtgctgatcaatggccgggacatcagcgagcacacccatgaccaggtggtgatgttcatcaaggccagccgggagagccacagccgggagctggccctggtgatcagaagaagagctgtgcgcagctttgctgacttcaagtcagaagatgagctgaaccagctgtttcctgaggccatcttccccatgtgcccagagggcggggacaccctggagggctccatggcccagctgaagaagggcctggagagcggcaccgtgctgatccagtttgagcagctgtacaggaagaagccaggcctggccatcacctttgccaagctgccccagaacctggacaagaaccgctacaaggatgtgctgccctatgacaccaccagggtgctgctgcagggcaatgaagactacatcaatgccagctatgtgaacatggagatcccagctgccaacctggtgaacaagtacatcgccacccagggccccctgccccacacctgtgcccagttctggcaggtggtgtgggaccagaagctgagcctcatcgtgatgctgaccaccctgacagagcggggccgcaccaagtgccaccagtactggccagaccccccagatgtgatgaaccacggcggcttccacatccagtgccagagcgaggactgcaccatcgcctacgtgtcccgggagatgctggtgaccaacacccagacaggagaggagcacacagtgacccacctgcagtatgtggcctggccagaccacggcgtgcctgatgacagcagtgacttcctggagtttgtgaactacgtgcgcagcctgcgggtggacagcgagcctgtgctggtgcactgcagcgctggcatcggccgcactggagtgctggtgaccatggagacagccatgtgcctgacagagaggaacctgcccatctaccccctggacatcgtgaggaagatgagggaccagagggccatgatggtgcagaccagcagccagtacaagtttgtgtgtgaggccatcctgcgggtgtatgaggagggcctggtgcagatgctggaccccagctag

SEQ ID NO: 310791 - DNA, 2742 bp, Artificial Sequence
  derived and/or modified sequence
atgaccagccggctgcgggccctgggcggccggatcaacaacatcagaacgagcgaattgcccaaggaaaaaaccagatcggaggtcatttgctcgatccactttctggacggcgtcgtgcagacctttaaggtgaccaagcaagacactggacaggttctcctggacatggtgcacaaccacctaggcgtgaccgaaaaggagtatttcggcttgcagcatgatgacgactccgttgattcacccagatggttagaggcgagtaaagccattagaaagcagctgaaaggtggcttcccttgtactcttcatttcagggtaagattcttcatccccgaccctaacactctccagcaggagcagacaaggcatctgtattttctccaactcaaaatggatatatgtgagggcaggttgacgtgtccactgaactccgcggttgtgctggcaagctatgcagtgcagagtcattttggggactacaatagcagtattcaccatccaggttacctttccgactcccatttcatacctgaccagaacgaggactttctcactaaggtggaatctttgcacgagcaacatagcggactgaagcaatctgaggccgagtcatgctacataaatatcgcaaggacattggatttctacggcgtcgagctccatagcggccgggacttacataacttggacctgatgatcggcatcgcatcagcaggagttgctgtctatcggaagtatatttgtacatccttttacccctgggtgaacatcctgaagatttccttcaaacggaaaaaattcttcattcaccagagacagaagcaagctgagtccagagagcatatcgtcgcattcaacatgctcaactatcgctcatgtaagaatctctggaagtcatgtgtggaacaccacactttctttcaggcgaagaagcttcttccccaggaaaagaacgtgctgagtcagtactggacaatgggcagccgaaacacaaagaagtcagtcaataaccaatactgtaagaaggtgatcggggggatggtgtggaacccggccatgcggaggtccctgtccgttgagcatctggagaccaagtccctacccagccgaagccccccaatcacgccaaactggcgctctcctcgcctgcgccacgaaattcggaagcccagacactcatctgccgataacctggctaatgagatgacttacattaccgaaactgaagacgtattttacacgtataaaggtagtttggcccctcaggattcagatagcgaggtgtcacagaaccggagcccgcatcaggaatccctgtctgagaacaatccagcccaatcctatttgacgcagaagtcttcatcctccgtgagcccctcgtctaatgcccccggcagttgttcacccgatggagttgatcaacagctgctggatgattttcatcgagtgaccaaaggcggatctaccgaggacgcatcacagtattattgcgacaaaaatgataacggtgattcctacctggtgctgatacgcattactcccgatgaggacggaaaattcggcttcaatctcaagggaggagtcgatcagaagatgccgttagtggtgagccgcatcaatcccgaaagcccggctgatacctgtattcccaagttgaacgaaggcgaccagatagttctcataaacggccgcgacataagcgaacacacacacgatcaggttgttatgttcattaaagctagccgggagtctcatagtcgcgagttggctctggtcattcggcgtcgggccgtgcgcagttttgcagacttcaaatctgaggatgaactcaaccagctgttcccagaagctatctttcctatgtgtccagagggcggagacacactggaaggtagcatggcccaactgaagaaagggctggagagcggaaccgtgctaattcagttcgagcagctgtaccgtaaaaaaccggggctggctattaccttcgctaagctccctcaaaatctggacaaaaatcgctacaaggacgtgttgccttatgacaccaccagggtgttactgcaggggaatgaagactatataaacgcttcttacgtgaacatggagataccagccgcgaatctggtgaataagtacatagccacgcagggtcctctgcctcatacctgcgcacagttctggcaggttgtttgggatcagaagctcagtctgatagtcatgctgacaacgctcacagaaagaggaaggactaagtgtcaccagtactggcctgatcctccggatgttatgaatcacggggggtttcatatacagtgtcagtccgaggattgtacaatagcttacgtatctcgagagatgctggttaccaacacccagactggtgaggagcacacggtgacccacctgcagtatgtggcctggcctgatcatggtgtaccagatgactcatccgatttcttagaattcgtgaactacgtccgcagcctgagagtggattccgagccggtactggtacattgctctgccggcattgggcgaactggagtgctggtgacaatggagactgctatgtgcctgacggagaggaacctgcctatctatcccctcgacattgtcaggaagatgagggaccagcgcgctatgatggtgcagacctctagccagtacaagttcgtgtgcgaggctatacttagggtttacgaagaaggccttgttcagatgctggatccaagctag

SEQ ID NO: 310792 - DNA, 2742 bp, Artificial Sequence
  derived and/or modified sequence
atgaccagccggctgcgggccctgggcggccggatcaacaacatccggacttccgagcttccaaaagagaagaccagatccgaagtgatatgctctatccactttcttgatggagtggttcagacctttaaggttacgaagcaggacaccggacaggtcttgctcgatatggttcacaaccatctgggcgttactgagaaagaatacttcggcctgcagcatgacgatgacagcgtcgactcaccccgctggttggaagcaagcaaggctattaggaaacagttgaagggcggatttccctgtactttacatttcagagtccgattttttatacccgaccccaacacgctccaacaggagcagacacgtcatttatatttcctgcaactgaagatggacatctgtgaaggccgcctgacctgccccttgaatagtgctgtcgtgctggctagctatgcggtgcagtcacattttggagattacaattcctctatccaccatcccgggtatctctcggatagccactttataccagaccagaacgaggattttctgacaaaggttgagtctctgcatgaacagcattctggcctgaaacagagcgaggcagaatcctgctatatcaatattgctagaacactggatttttacggggtggagcttcacagcggaagagacctgcataatctagacctgatgatcggaatcgcttcagccggagtagccgtttacaggaagtacatctgcaccagcttttacccttgggtgaacatcctcaaaatctcctttaagaggaaaaaattctttatccaccagcggcaaaagcaggcagagtcacgtgagcatattgtggcatttaacatgcttaactatcgctcgtgcaagaacctttggaaatcatgcgtcgaacatcatacattcttccaagccaaaaaactgttgccacaggagaagaacgtgcttagtcaatactggacgatgggtagccgcaatacaaaaaaatcagttaacaaccagtactgcaagaaagttattggggggatggtctggaatcctgcgatgaggcggtccctgagcgtggagcatctggaaaccaagtcgctgcctagccgttccccccctatcacacccaactggcgctcccctaggctgcgccacgaaatccgcaagcctcgccactcctcggccgacaatctcgcaaatgagatgacttacattaccgaaacagaggacgtgttttatacctataaaggctctttggctccacaggatagtgatagcgaggtcagccagaaccggtccccccaccaggaaagtctctcggagaataaccctgcgcagagttatctcacccagaaatcatccagctcagtctcacctagtagcaatgcgccagggagctgcagccccgacggcgtggatcagcagctgctggacgatttccacagagtgacaaaggggggctccactgaagacgccagccagtattactgcgacaagaatgacaacggagactcttacctcgttctaattaggataacgccagacgaggacggcaagtttgggtttaatctcaagggtggagtggaccagaagatgcctttagtcgtcagccgcattaacccggagtcaccagcagacacatgtattccgaagctgaacgaaggcgatcagattgtgctgattaacgggagggacatatccgagcacacccatgatcaagttgtgatgttcataaaggcatcgagagaaagccactcccgcgagttggccctggtgatcagacggagagcagtacggagctttgcggactttaaaagcgaggacgagctgaatcagctcttccccgaagctatcttccccatgtgtcccgaagggggcgatactctggaagggagtatggctcagctgaaaaagggcttagagtctggaaccgtcctgattcagtttgaacagctttataggaaaaagcctggtctcgcaatcaccttcgctaaacttcctcagaatttagacaagaaccgatacaaagatgtcctgccttacgacacgacgcgtgttctgcttcaaggtaatgaggactacataaacgcatcttatgtgaatatggagatacccgcggcaaaccttgtgaataagtacattgctacccagggacccctccctcatacctgtgctcagttctggcaggttgtatgggaccagaaactctctttgattgtcatgctgaccactcttactgagcgcggcaggacaaagtgccatcagtactggcccgaccccccagatgtcatgaatcatggaggcttccacattcagtgtcagtcagaagactgtactattgcttacgtaagccgcgaaatgctggtgactaacactcagaccggagaagagcacacagtgactcatttgcaatatgtggcctggcctgatcatggcgtccccgatgacagctctgacttcctggagttcgtaaactatgtcaggtctctcagggttgatagcgagccggtcctggttcactgctctgccggaataggacggaccggagtcttagtcaccatggagacagccatgtgccttacagaacgcaatttaccgatctacccgctggacatagtccggaagatgcgtgatcagcgggccatgatggtgcagaccagctcccagtataagtttgtatgtgaggccatcctcagggtgtatgaagaagggctggtgcaaatgttagatccttcatag

SEQ ID NO: 310793 - DNA, 2742 bp, Artificial Sequence
  derived and/or modified sequence
atgactagtcggctacgagcccttggagggagaatcaacaacattagaaccagtgagctgccaaaggagaaaactagaagcgaagtgatatgttctatccatttcttagatggagtggtccagacattcaaagtgacaaaacaggataccggtcaagtgctgcttgatatggtccataatcatttaggtgtgacagaaaaagagtactttggcctgcagcacgacgacgattccgtggattctcccaggtggctggaggccagtaaggccattagaaaacagctgaaaggcggattcccctgcacccttcacttccgcgtcaggttttttattccagacccgaacacattgcaacaggaacagacgcgccatctttattttctgcagctgaagatggatatctgtgaagggagactcacctgtccgctaaacagcgcagtggttctggcctcctacgccgtccagtcacactttggagactacaacagtagcattcaccaccccggttacttgtccgattcacactttatcccggatcagaacgaggatttcttaaccaaagtcgagtctctccatgaacagcactcaggcctgaaacagtctgaggctgaatcatgctacatcaacatcgccagaacccttgacttctacggtgtagagctgcacagcggtcgcgatcttcacaatctggatctgatgatcggtattgcttccgccggtgtcgccgtctacaggaaatacatctgcacctccttctacccatgggtgaatatcctcaagatctcttttaaaagaaagaagttttttatacaccagaggcagaaacaggcggagtcacgcgagcacatcgtggcttttaatatgctgaattaccgttcctgcaagaatctttggaagagctgcgttgaacatcacacttttttccaggccaaaaaattgctgcctcaggagaaaaatgtccttagccagtactggacgatgggctcccgaaataccaagaaatccgtcaacaaccaatactgcaaaaaagttatagggggaatggtctggaatcccgcaatgaggcggtccctcagcgtggagcacttagaaaccaagagcctgccatcacggagtcccccaatcacgcccaactggcgcagcccgagattaagacacgaaatcaggaaaccccgacactcctcagctgataacctcgcaaatgaaatgacttacattaccgagaccgaagatgtgttctacacttataaaggatccctggccccacaggattcggattctgaggtgtctcaaaaccggtcaccacatcaagaaagtttgagcgagaataatccagcccagtcttacctgactcagaagagcagttcatctgtttcccctagcagcaacgcacctggatcatgtagccccgatggcgtggaccagcagctgctcgatgacttccaccgggttaccaagggagggtcaacagaggatgcaagtcagtactattgtgataagaacgataacggcgattcatacctggtgctcattaggatcacccctgacgaagatgggaaatttgggttcaacctgaaaggaggagtggaccagaaaatgccactcgttgtgagtcggataaaccctgaatcacccgcagatacttgcatccctaagttgaatgaaggcgaccagatagtgctcatcaatggaagagatatctccgagcatacgcatgaccaagtggtcatgtttatcaaagcgtcccgggagtcacactcccgggagctggcgctagtgattaggagaagggccgtgcgcagtttcgccgacttcaagtctgaagacgaactcaaccagctgtttccagaagcgatttttccaatgtgccctgaaggcggagacaccctggaaggctccatggcacagctgaagaaaggccttgaatccggtaccgtgctcatccagtttgaacagctgtaccggaagaaacccggtttggctataacattcgcaaaactgcctcaaaacctcgataagaatagatacaaggatgtgttgccatacgacactaccagagtcctgctgcagggcaacgaggattacattaatgctagctacgtgaacatggagatcccagcagccaatctggtaaacaagtacattgccacacaaggtccactgccccatacatgcgcccagttctggcaagtggtgtgggatcagaaactctcactgatagtgatgctcactactctgaccgaacggggacggacaaaatgtcaccagtactggcccgacccacctgatgtgatgaatcacggcggtttccatatccagtgccaaagcgaggactgtaccatcgcctatgtcagcagggaaatgctagtaacaaatactcagactggagaggaacacaccgtgacacacctccagtatgtggcctggcccgatcatggcgtaccagacgatagcagcgatttcttagaatttgttaattacgtacggagtctcagggtggactctgagccagtgctggtccattgctcagccggaataggtagaacaggggtactcgtgacaatggaaaccgccatgtgcctcacggaacggaacctccctatctacccgcttgatatagtccgtaagatgagagatcagagggccatgatggtccagacgagtagccagtataagtttgtatgtgaagccattctgagagtgtatgaggaggggctggtgcaaatgctcgatccgtcttag

SEQ ID NO: 310794 - DNA, 2742 bp, Artificial Sequence
  derived and/or modified sequence
atgactagtcggttgagggcccttggcggacgcattaataacatccgcacaagcgagctcccaaaggaaaaaacccggtctgaggtaatttgctcaatccacttcttagacggcgtggtccagacatttaaggtgaccaaacaggatactggacaggttttactggatatggtgcacaatcacctgggcgtgactgaaaaggaatactttggcttgcagcacgacgatgacagtgttgattctcctaggtggctggaagcctcaaaggctattcggaagcagctcaagggcggtttcccttgcacactgcatttccgcgtaagattcttcattcccgaccccaacactctacaacaagaacaaacacggcacctctatttcctgcagttgaaaatggatatctgcgagggacgtctcacctgccccctcaactccgccgtcgtgttagcctcctacgccgtgcagagtcattttggagattacaactcctctattcaccaccctggctatttgagcgacagccacttcattccagatcagaacgaagatttcctcacaaaggttgaaagtctccatgagcagcattccggcctgaaacaaagcgaggctgagagctgctatatcaatatcgccagaacattggatttctacggtgttgaattgcacagtggcagagacctccacaacctggacttgatgatcggaatcgctagcgctggtgttgctgtctaccgtaagtacatttgtacctccttctatccctgggtgaacattctgaagatttcctttaaacggaagaaattcttcatccaccaacggcagaaacaagccgagtccagggagcatattgtagccttcaacatgctgaattaccgatcttgtaagaacctttggaagagttgcgtagaacaccacacattctttcaggctaagaagctgctgccacaggagaaaaacgttctgagccagtactggacaatgggctcccgcaataccaagaaatctgtgaataaccagtattgcaagaaagtgattggcggaatggtgtggaatccggctatgcggaggtctctgtcagtagaacacctcgagacaaaaagcctgcccagcaggagcccaccgatcaccccgaactggcggtccccacggttgagacatgagattcgaaagcctaggcactcttccgccgacaatctggcaaatgagatgacatacatcacagagaccgaggatgtgttctacacatataaagggtccttggcccctcaggattctgatagcgaggtgtctcagaatagatccccccatcaggagtccctcagcgagaacaaccccgctcagtcataccttacccagaaaagttccagtagtgtctcacccagtagcaacgctcccggatcctgtagccctgacggagtcgaccagcaactcctggatgattttcacagggtgacaaaaggcggatcaacggaagacgcttcacaatattattgcgacaaaaatgacaatggggatagttatctggtgttaatacgcataacccccgatgaagatggcaaatttgggttcaatctgaagggtggtgtcgatcagaagatgcctctggttgtcagtaggataaatcctgagtctccagccgacacctgcattcccaagctcaatgaaggcgatcagattgtgctgataaatggcagagacatctccgagcacacacacgaccaggttgtcatgttcattaaggcatctagagagtcacatagcagagaactggcgctagtgatcaggaggagggccgtgcgaagtttcgcagattttaagagtgaagacgagctgaatcagttgttcccggaggccatattccccatgtgtccagagggtggagataccctggagggttctatggctcagctgaaaaagggtctcgaatccggcacagttttgattcaatttgaacaactgtataggaaaaagccagggcttgcaattacgttcgctaaactgccccagaacctggacaaaaatcggtataaagatgtgctgccctacgacacaactcgagttttgttgcagggtaacgaggattatattaacgctagctatgttaatatggagatcccagctgctaatcttgttaacaagtatatcgccacccaggggcctctgccccatacctgtgcccagttctggcaagttgtgtgggatcagaagctctccttgattgtgatgctgaccaccctcacagagcgaggccgtacaaagtgccaccagtattggcccgatcctccagacgtgatgaaccatgggggatttcacatccaatgccagtcggaagactgcactattgcgtacgtgtcacgcgaaatgctggtgacgaacacacagacaggtgaagagcatacagtcacacatttgcagtacgtggcctggccagatcacggagtccccgatgatagcagcgatttcctggagttcgtcaactatgtcaggagtctccgcgttgattcagaacccgtcctggtgcactgctctgccggaataggccgaacgggggtgctggtaaccatggagaccgccatgtgtttaactgagcgcaatctgcccatatatcccctggatatagtgagaaagatgagggatcagcgtgctatgatggtgcagacaagctcgcagtacaagtttgtttgtgaggcgatcttgagagtctatgaggaaggcctggttcagatgctggacccaagctag

SEQ ID NO: 310795 - DNA, 2214 bp, Artificial Sequence
  derived and/or modified sequence
atggacatctgcgagggcagactgacctgccccctgaacagcgccgtggtgctggccagctacgccgtgcagagccacttcggcgactacaacagcagcatccaccaccccggctacctgagcgacagccacttcatccccgaccagaacgaggacttcctgaccaaggtggagagcctgcacgagcagcacagcggcctgaagcagagcgaggccgagagctgctacatcaacatcgccagaaccctggacttctacggcgtggagctgcacagcggcagagacctgcacaacctggacctgatgatcggcatcgccagcgccggcgtggccgtgtacagaaagtacatctgcaccagcttctacccctgggtgaacatcctgaagatcagcttcaagagaaagaagttcttcatccaccagagacagaagcaggccgagagcagagagcacatcgtggccttcaacatgctgaactacagaagctgcaagaacctgtggaagagctgcgtggagcaccacaccttcttccaggccaagaagctgctgccccaggagaagaacgtgctgagccagtactggaccatgggcagcagaaacaccaagaagagaagccccagactgagacacgagatcagaaagcccagacacagcagcgccgacaacctggccaacgagatgacctacatcaccgagaccgaggacgtgttctacacctacaagggcagcctggccccccaggacagcgacagcgaggtgagccagaacagaagcccccaccaggagagcctgagcgagaacaaccccgcccagagctacctgacccagaagagcagcagcagcgtgagccccagcagcaacgcccccggcagctgcagccccgacggcgtggaccagcagctgctggacgacttccacagagtgaccaagggcggcagcaccgaggacgccagccagtactactgcgacaagaacgacaacggcgacagctacctggtgctgatcagaatcacccccgacgaggacggcaagttcggcttcaacctgaagggcggcgtggaccagaagatgcccctggtggtgagcagaatcaaccccgagagccccgccgacacctgcatccccaagctgaacgagggcgaccagatcgtgctgatcaacggcagagacatcagcgagcacacccacgaccaggtggtgatgttcatcaaggccagcagagagagccacagcagagagctggccctggtgatcagaagaagagccgtgagaagcttcgccgacttcaagagcgaggacgagctgaaccagctgttccccgaggccatcttccccatgtgccccgagggcggcgacaccctggagggcagcatggcccagctgaagaagggcctggagagcggcaccgtgctgatccagttcgagcagctgtacagaaagaagcccggcctggccatcaccttcgccaagctgccccagaacctggacaagaacagatacaaggacgtgctgccctacgacaccaccagagtgctgctgcagggcaacgaggactacatcaacgccagctacgtgaacatggagatccccgccgccaacctggtgaacaagtacatcgccacccagggccccctgccccacacctgcgcccagttctggcaggtggtgtgggaccagaagctgagcctgatcgtgatgctgaccaccctgaccgagagaggcagaaccaagtgccaccagtactggcccgacccccccgacgtgatgaaccacggcggcttccacatccagtgccagagcgaggactgcaccatcgcctacgtgagcagagagatgctggtgaccaacacccagaccggcgaggagcacaccgtgacccacctgcagtacgtggcctggcccgaccacggcgtgcccgacgacagcagcgacttcctggagttcgtgaactacgtgagaagcctgagagtggacagcgagcccgtgctggtgcactgcagcgccggcatcggcagaaccggcgtgctggtgaccatggagaccgccatgtgcctgaccgagagaaacctgcccatctaccccctggacatcgtgagaaagatgagagaccagagagccatgatggtgcagaccagcagccagtacaagttcgtgtgcgaggccatcctgagagtgtacgaggagggcctggtgcagatgctggaccccagctag

SEQ ID NO: 310796 - DNA, 2214 bp, Artificial Sequence
  derived and/or modified sequence
atggatatttgcgaaggccgcttgacctgtcctttaaactccgcagtggtgctagcatcctacgcagtgcagagtcatttcggagactataatagctccatccatcatccaggttacctatctgacagccattttatcccagatcagaacgaagactttctgaccaaagttgagagcctccacgagcagcacagcggcctcaaacagtccgaagctgaatcctgctacatcaatatagcaaggactttggacttctacggtgtcgaactacactctggccgtgacctccataatttagacctaatgataggtatcgcaagtgccggtgttgccgtgtacagaaagtatatatgtacatcattctacccgtgggttaatatcctgaaaatctcctttaagcggaagaagtttttcatacaccagcgtcagaagcaggccgagtctcgagaacatattgtcgcatttaacatgctaaactacaggagctgtaagaacctgtggaaatcctgtgttgagcaccacacgttttttcaggccaaaaagctgctcccacaagaaaaaaacgttttgtcccagtactggacaatgggaagtcgcaacacaaagaaacgctctccacgcctgagacacgagatcagaaagccaagacattccagtgccgacaatctggccaacgaaatgacttatatcacagagacagaagacgtgttctatacctacaaaggcagtttagctccccaggattctgatagcgaggtgagccagaatagatctccacaccaggagagtctgtctgaaaacaatcctgctcagagctaccttacacagaagtcctcgtcctctgtgtctccttcctccaatgccccaggctcttgctcaccagatggcgttgatcagcagctgctggatgatttccatcgcgtcaccaagggagggagtactgaggacgcatctcaatactattgcgataagaatgacaatggcgattcctacttagtgctgatcagaatcacccccgacgaagacggaaagttcggcttcaatttaaagggaggcgtggaccaaaaaatgccactcgttgttagccgtataaatcctgagtcgcctgctgacacctgcatccccaaactaaacgagggggatcaaattgtgctgattaatgggagggatatttccgaacacactcacgaccaggtggtcatgttcattaaggccagccgggagagtcacagccgcgaactggcactggtgatcaggcgtagagcggttagatccttcgcagatttcaagtctgaggacgaattaaaccaactgtttcccgaggctattttccctatgtgtcccgaaggcggggacacactggaggggtctatggcacagttaaaaaaagggctggaatccggaacggtcctgattcagtttgagcagctataccgcaaaaagcctggcctagcgataacctttgccaaactgccacagaatttagataagaatagatacaaggatgtgctcccctacgatacaactcgggtgctgctgcagggtaatgaagactatatcaacgcttcctatgtgaatatggagattcccgcagctaacctcgtgaataaatatatcgccactcaagggccgctgcctcatacatgtgcccagttttggcaggttgtatgggatcagaagctgagcctcattgtgatgctcactaccctaaccgaaagaggtagaaccaagtgccatcagtactggcctgacccccctgacgtgatgaaccacggaggattccacatacagtgtcaaagcgaggactgcactatcgcatatgtgtcgcgggaaatgctggtgacaaatacacaaactggggaggaacacaccgtgacccacctgcagtatgtcgcatggcccgatcacggagtgccagatgacagctcagacttcctagagttcgttaactacgttcgaagccttcgcgtggacagtgaacctgttcttgtgcattgttccgctggtatcggcagaaccggggtgcttgtgactatggagacagccatgtgtcttacagaaagaaatctaccaatttatcccctggacatcgtgagaaagatgcgggaccagagagccatgatggtgcagacaagcagtcagtacaagttcgtctgcgaggctattctgcgcgtctacgaggagggactggtacaaatgctcgacccatcttag

SEQ ID NO: 310797 - DNA, 2214 bp, Artificial Sequence
  derived and/or modified sequence
atggacatctgtgagggccgcctgacctgccccctgaacagcgctgtggtgctggccagctatgctgtgcagagccactttggagactacaacagcagcatccaccaccctggctacctgagtgacagccacttcatcccagaccagaatgaagacttcctgaccaaggtggagagcctgcacgagcagcacagcggcctgaagcagagcgaggccgagagctgctacatcaacatcgcccggaccctggacttctacggcgtggagctgcacagcggccgggacctgcacaacctggacctgatgattggaattgccagcgctggggtggccgtgtacaggaagtacatctgcaccagcttctacccctgggtgaacatcctgaagatctccttcaagaggaagaagttcttcatccaccagaggcagaagcaggccgagagccgggagcacatcgtggccttcaacatgctgaactaccgcagctgcaagaacctgtggaagagctgtgtggagcaccacaccttcttccaggccaagaagctgctgccccaggagaagaatgtgctgagccagtactggaccatgggcagcaggaacaccaagaagaggagcccccggctgcggcatgagatcaggaagcccaggcacagcagcgctgacaacctggccaatgagatgacctacatcacagaaacagaagatgtgttctacacctacaagggcagcctggccccccaggacagcgacagcgaggtgtcccagaacagaagcccccaccaggagagcctgtctgagaacaacccagcccagagctacctgacccagaagagcagcagctctgtgagccccagcagcaatgcccctggcagctgcagcccagatggagtggaccagcagctgctggatgacttccaccgggtgaccaagggcggcagcacagaagatgccagccagtactactgtgacaagaatgacaatggagacagctacctggtgctgatccgcatcaccccagatgaagatggcaagtttggcttcaacctgaagggcggcgtggaccagaagatgcccctggtggtgagccgcatcaaccctgagagccctgctgacacctgcatccccaagctgaatgaaggagaccagatcgtgctgatcaatggccgggacatcagcgagcacacccatgaccaggtggtgatgttcatcaaggccagccgggagagccacagccgggagctggccctggtgatcagaagaagagctgtgcgcagctttgctgacttcaagtcagaagatgagctgaaccagctgtttcctgaggccatcttccccatgtgcccagagggcggggacaccctggagggctccatggcccagctgaagaagggcctggagagcggcaccgtgctgatccagtttgagcagctgtacaggaagaagccaggcctggccatcacctttgccaagctgccccagaacctggacaagaaccgctacaaggatgtgctgccctatgacaccaccagggtgctgctgcagggcaatgaagactacatcaatgccagctatgtgaacatggagatcccagctgccaacctggtgaacaagtacatcgccacccagggccccctgccccacacctgtgcccagttctggcaggtggtgtgggaccagaagctgagcctcatcgtgatgctgaccaccctgacagagcggggccgcaccaagtgccaccagtactggccagaccccccagatgtgatgaaccacggcggcttccacatccagtgccagagcgaggactgcaccatcgcctacgtgtcccgggagatgctggtgaccaacacccagacaggagaggagcacacagtgacccacctgcagtatgtggcctggccagaccacggcgtgcctgatgacagcagtgacttcctggagtttgtgaactacgtgcgcagcctgcgggtggacagcgagcctgtgctggtgcactgcagcgctggcatcggccgcactggagtgctggtgaccatggagacagccatgtgcctgacagagaggaacctgcccatctaccccctggacatcgtgaggaagatgagggaccagagggccatgatggtgcagaccagcagccagtacaagtttgtgtgtgaggccatcctgcgggtgtatgaggagggcctggtgcagatgctggaccccagctag

SEQ ID NO: 310798 - DNA, 2214 bp, Artificial Sequence
  derived and/or modified sequence
atggacatctgcgagggccggctgacctgccccctgaacagcgccgtggttctcgccagttacgcagtccaatcccattttggagattataatagctcaattcaccacccaggttacctttcagacagtcactttatacctgaccaaaatgaagattttctcacaaaggtcgaatcgttacatgaacagcattcaggcctgaaacagagcgaggctgaatcctgctacattaacatagcccggaccctggatttctacggtgtggaacttcattccgggagagatcttcataacttagacttgatgatcgggatcgcctcagccggagttgcagtgtatagaaagtacatatgcacatccttttatccttgggtgaatattctcaaaatcagcttcaaacgcaaaaagttttttatccatcagcggcagaagcaagcggagagccgtgaacacatcgtagcttttaacatgctcaactacagatcctgcaagaatctgtggaagtcttgcgtggagcatcacaccttttttcaggcaaagaagctcctcccccaggaaaaaaacgtattatcacagtattggacaatgggaagccggaacacgaaaaaaaggagccctcgcttgagacacgaaattaggaagccccgccactcatccgctgataacctggcaaatgaaatgacctacataaccgaaactgaggacgtgttttacacttacaaaggaagcctggctccgcaggattccgattcagaagtgtcccagaaccggtcacctcaccaggaaagcctaagcgagaataatccagcccaaagctacctcacccagaagagttccagcagcgtaagtccatcgtcaaatgctcctggtagttgttcacctgatggggtggatcaacagttgctggacgatttccatcgagtgactaaaggcggatcgacagaggatgccagccagtactattgtgacaaaaatgataacggcgacagctacctcgtcttgattcggatcacaccggacgaggatggaaaattcgggttcaacctgaaggggggggtggatcaaaagatgccattggtcgtatcaagaataaatcccgagtctcctgctgacacatgtatccctaagttgaatgagggggaccaaatcgtgctcatcaatgggagagatatttctgagcacactcacgaccaggttgtgatgttcatcaaagcttcaagggaaagccactcccgggaattggccctggtcatcagaagacgggctgtgcgatcatttgccgatttcaaaagcgaagacgagttaaatcagttattccctgaggccatattcccgatgtgtcccgagggtggcgacacacttgaaggcagtatggcacagcttaagaagggcctcgagtcaggtacagtgctgatccaattcgaacagctctatcggaagaaaccaggcctcgccatcacatttgccaaactaccccaaaatctcgacaagaaccggtacaaggatgttctgccttacgacacaacgagagtcttgcttcaggggaatgaagattacattaatgcctcctatgtaaatatggagatcccggcagctaacctcgtaaacaaatatatcgctacccaaggtccgcttcctcatacttgtgcccagttctggcaagttgtgtgggatcagaagctgtccctgattgttatgctcactactctgaccgaacgagggcgtaccaagtgtcatcagtattggcctgacccacccgatgtgatgaatcacggaggattccacattcagtgccagtctgaggattgtacaattgcgtacgtaagtcgggagatgctggtgacaaacacacagacaggcgaagaacacacagtgacacatcttcagtatgtcgcatggccagaccatggcgtgcccgacgactcctcagattttctagaattcgtgaactatgtccgaagcctcagggtcgactccgaacccgtacttgttcactgctccgccggcataggtcggaccggggtcctggtaacgatggaaacagcaatgtgcctcaccgagagaaacctgcctatttatccactggacatagtgcgcaagatgagggaccaaagagctatgatggttcagacttcttcgcagtacaaattcgtttgtgaggcaatcttaagggtgtacgaagagggtctagtgcagatgctggatccctcatag

SEQ ID NO: 310799 - DNA, 8630 bp, Artificial Sequence
  derived and/or modified sequence
gaagggtggtatcccgttgtggagtagaatgtaactatgaccttctgggatttgggcaccagatttatcttactgcaacaggagccatggtgggagccacccccataactcttatagagctggtgggccaccaggactgccagatatatatatatattttttgaaacagggtcttgctatgttgcccagactggcctcaaactcctggactcaaaggatcctccctcagcctcctgagtagctgggattataggcacataccaccacgactagctgccagatcatcttatcttggaccaggcttctaccattaattcacatgctttaaaaaaattaaaaattaaaaaaatgaaaaataaaaaaacttaaaagattttacctatattcctggaacatagttatcttaccccagctttgtagttcctgtttaaggaaattccctctgaaggaaattttagctctcaagagtcaaagaagatgtatagaggtggtatctgttagtttttgtttgtttgttaaggatctaggcagagaggtcattacatttttctgaagttgaggtcacaggtggggtacccacaagagaggtcattacatttctgaagttaggcatcccaggcatctcttctaaagaactatcctgtattctaattgttaaataaatatcttcttcattgtgagcctccacaactgctgtttctgataaatttagatcattctttgcagaattttatatactggcaatctcaaaactaggctccttcaagattcctaggaagtctcccaagctcgggttgggttccactattctagtttctttgtgtatgatgccatggggttgactcagaaactttgctcaatatatgacaaggcagcatttggtgagtggtgatctccacgtttatcttctcatttatatccctaggaagacatactgattagctgagcttgtcaatgaaagcccgggttcaccattggattatctataactctcctttctctttttttctctcagtagcattgtaggaggagagaacacttaattctggttgaatgtcagcttggataaacatagaaacaaactagaaagaactgatgatgttctcctaggtggaaaagatggagattccaataccaaataggtgtgaatcagcaaatgtatgttatactgtctctcaaggccaggtgttcaatacattgtgggtagttaattataatcaaagtaataatattagagttacgacatggatcctaagctttttagccattaaacatataagaaatttgtagcatagtgagtttttttataacatgatcatccaggttaaaataagacacaattgacctcacatatcctatctgagctccgattttgtcatctgtaaaaatggagatagtggtacctaccttacagagttatgaggctgagataagagggaaagttacaaagtagtaccatgtacaaagcccggaactgtgcaaataggaggttgtaatactgtttgaagcattcccatctcaaaaagccagttccttggcctttataaatttgaaggaataatgaaactgatttgtttcaattgtgaaaattatttctctcctgcccctgtgcacttctgccctgtctatattagatttcaagaggtttcccttttgtcatcttggccagacaatggaatgtctatcccgtttgaatctgggtttaaaaaagcatgggagctagtggccaagtgtcacatgtatgccgcatccctaaatagaagtctccccagggcgcttcctgacctgcgcaatgctgccgaaggcctcctttccccgctccccaggcagaggagcaaagtcacaggctgaggggcctgccacgacttgcccacaaaacaggtctggagtttggaagttacatttgctggttgcccagagatgagtgcagaattcagcttggaggtcctggaaacttctagtttactgatgtttatgcttttgctcatgcacccacagttcctgggacacagaatgctcacctgggggtttgtaccccagccaagaaggtgtcttcacagactcccctccttttagcaacttcatgcagatggagcttgggtggatggatcctggcacagtgttcagaacagtggccctgccagtgtgtgggcgccgcttgtgcagagcccctgtgggttctggtcctcaagggcaggggcgctcactgacagcggaacccatagtaccagcccatctttggtgggctgtttccaccccattcatccctgctcagctcttcataggacagcctgtgctggcagaaaattgcccccaccagtcaagacgtagggcatcaacatgagccatcagtaatgacagggcagctttgcagagcgtaaggtagcacctgataccttggaccaaaaccgtatttttatgtatctttcacatgtacagctcttgtctttgactcatcaaactttcttttttttttttttttgcttatttcagtttgagtatgaattaatgaaaacaattgtttcataggcacttgtatttcttacaactgaagatggatatttgcgaaggaaggttaacctgccctcttaactcagcagtggttctagcgtcctatgccgtacaatctcattttggagactataattcttccatacatcatccaggctatctttccgatagtcactttatacccgatcaaaatgaggactttttaacaaaagtcgaatctctgcatgagcagcacagtgggctaaaacaatcagaagcagaatcctgctatatcaacatagcgcggaccctcgacttctatggagtagaactgcacagtggtagggatctgcacaatttagacctaatgattggaattgcttccgcgggtgttgctgtgtaccgaaaatacatttgcacaagtttctatccttgggtgaacattctcaaaatttctttcaaaaggaaaaagttcttcatacatcagcgacagaaacaggctgaatccagggaacatattgtggccttcaacatgctgaattaccgatcttgcaaaaacttgtggaaatcctgtgttgagcaccatacgttctttcaggcaaagaagctactacctcaggaaaagaatgttctgtctcagtactggactatgggctctcggaacaccaaaaagcgaagtcctcggctccggcacgaaatccgaaagccacgccactcttctgcagataaccttgcaaatgaaatgacctacatcacggaaacggaagatgtattttacacgtacaagggctctctggcccctcaagacagcgattctgaagtttctcagaaccgaagcccgcaccaagagagtttatccgagaacaatccggcacaaagctacctgacccagaagtcatccagttctgtgtctccatcttcaaatgctccaggctcctgctcacctgacggcgttgatcagcagctcttagatgacttccacagggtgaccaaagggggctccaccgaggacgccagccagtactactgtgacaagaatgataatggtgacagctacttagtcttgatccgtatcacaccagatgaagatggaaaatttggatttaatcttaagggaggagtggatcaaaagatgcctcttgtggtatcaaggataaacccagagtcacctgcggacacctgcattcctaagctgaacgaaggggatcaaatcgtgttaatcaatggccgggacatctcagaacacacgcatgaccaagtggtgatgttcatcaaagccagccgggagtcccactcacgggagctggccctggtgatcaggaggagagctgtccgctcatttgctgacttcaagtctgaagatgaactgaaccagcttttccccgaagccattttccccatgtgtccggagggtggggacactttggagggatccatggcacagctaaagaagggcctcgaaagcgggacggtgctgatccagtttgagcaactctacagaaaaaagccaggtttggccatcacgtttgcaaagctgcctcaaaatttggacaaaaaccgatataaagatgtgctgccttatgacaccacccgggtattattgcagggaaatgaagattatattaatgcaagttacgtgaacatggaaattcctgctgctaaccttgtgaacaagtacatcgccactcaggggcccctgccgcatacctgtgcacagttttggcaggttgtctgggatcagaagttgtcactcattgtcatgttgacgactctcacagaacgagggcggaccaaatgtcaccagtactggccagatccccccgacgtcatgaaccacggcggctttcacatccagtgtcagtcagaggactgcaccatcgcctatgtgtcccgagaaatgctggtcacaaacacccagaccggggaagaacacacagtgacacatctccagtacgtcgcatggcctgaccacggtgtgcccgatgactcctccgactttctggaatttgtaaactatgtgaggtctctgagagtggacagcgagcccgtcctagttcactgcagtgctggaataggtcgaaccggtgtgttggtcactatggaaacagccatgtgcctaactgagaggaacctgcccatttacccactggatattgtccgaaaaatgcgagaccagcgcgccatgatggtgcagacatcaagccagtacaagtttgtgtgtgaagcgattcttcgtgtgtatgaagaaggtttagtccaaatgctggatcctagttaagacaactgtgaaaaagttcattcctctttcccaagggcatcctccttgaaagaggaggacagacctctctggaagcagcaagaggaaccagtagctgtgggaaaggaatgggcacctctgaacccaggcactttaaacttctatagaaaagatatcgtgtacataggaactggtgtagataagcatgcaattatggcatcatttaggcctgtatttctatggaaagatacaaaaaggatctcagtttggggcctgtcctaatgccttcttccctaacatcaccacacacacccctgtcggcatcctggagcaattgagaccggacacccacagagctgttgtcctcccagcaacaagatggtgtggttatcttgggtcatttggatgttttgtttgtttctgtgtgtcagactgtaagggctgagctttctgtgcttctaggtggagctggaacaattcagattcacccgccctgatgctaaggaaaccctgacgtatgtactagatggcagggcactgggggtcaggctgaaggctgagcaacacctctctgccctccctccctttgtcccatctcccagcgacttccaatattcatgtttctgagaattgtgtccctcttcaggttccctcttggtgcctaacctggattagtaatgtgcattcaggtgaattttcagctgaggctctgagaactggtactctcagtgtgttctggtcatcttgtggcttagttgtagaagcaggtgtgtctcttgcctctgcttgcctcctactgcacactcagcacccaggactggaatcaccgactactgaatctcctacatgtattgctgctacttcaagctcctccacttgaaaccttatgattttcccaaggggagatgggacagtgtcatctaaatattccgaatgtttggccttctgagaaaagagcttctagtaattgaaccatgggaaacccagcttctggagggttggccgtggggctgtgtacatgtgtgtgcccaggggtgagtgtttctcaggattcctaacgattcaaattaccgttgagtatatataaagaatgagtctctgtatggaagaacaaatgtgtgcattcacccccagtcacaatggtctccattgcatttcaaaggagaggatcagactatctgaatataaacacaatctgatgttaatttattctaagaacaccatcattttgattgtcctaaagaattctgcctttgtgaataccgtgttaaatttttttaaatttgtgacaggattgtagcaaattattatttaaggaaaataaattgtgtaaacatttaatgtggtatttttgaacagcggtttttatgtactcagaagaggaagtaaagccaggttcttaatggtatttatagaaaagatgttttcatattataatgcacataaatgaagccattttgatattcagcaaattcggtgccaattgaatagtttgctggtagcaagacggatgaagacctatatgggagattctttatctctagagctagcatatttacttgcatactttgtttcttttccacatggatattttactgctaaatggcagaggtgggagggagatgtcacacagtaccataaccccatattgaaaacaagaaaccaccagaaagtttgcagctaaggggcaggggattcagttcctacgcccactcagcactaactacttgcgggcctggttgcttagaagctctacctctctttcattatctgtaaaatagaaacaatacttaggactttagttggaacatgaggattgaataagatcacgctattcatgtgactttttatcggctagaacagcaacagacactgctgtgggtgagttacttagaaaagtttagttatcagtgattagcccaaaaacacatcagtcaaaaatagaatccactggatttttgtctctctttttagagacagggtctcactgtcgcccaggctggagtacagtggcatgatcattgttcactgcagcctcaaattcctgggctcaagcaatcctcgcacctcagcctcctgagtagccgggactataggcacatgccacctcacctggcttgtgtgtgtgtgtgtgtgtgtgtgtgtgtgtgtgtgtgtgtgtgtgtgtgtgtgtgtgtgtgtagagacaggatcttgatgtgttgcctaggctggtctcaaactcctggcctcaagtgatcttcccacctcagcctccaaaactgttgggattataggcgtgagccactgtgcccagcctaactgggtttttatgagaggaaaatagaaaatgctcttctagaagagagagaacaagagcacaaaataatctggactcacaaaaattcagcaagctccaagaaagggggatggagggaacgctggcaaaaatttaaatgccattaggatatttagcaagttattactgtttggtaaaaatgcatcatcaccctgtgtgcaaaatgcttgcaaagtagtctaaatgtctttggagatgggtgttttactgcttttttccaaaaacaaattgtttattatggttgcagaaatgcagccattacggtcacataaatttctaaaaagcctaccaaaggttgcaagcagtcttctgccactgggcaggccagcagttcagacccagcgaggttgccaggaacaaatccaggaaatactgggaagaacaagacaagagaattacctaaaagagcaaacaattcaagtaaatcctgtagctattaccacttaaaatccgtagctcaagattcctgtttcaccaccttatacacttaagcaattatacttaagcctttttttagtcctaagtgaagaactacatcagaatcaggataagtattttgcctgggaaatttggctgcatatgaatggagaagacatttacatcctatgttctggcactttctgaaagatctaattaaacatgttgatgtgccaatttaatcaagatgagagatccctgctggtgtcaccctctagaacctgcacttggtgttttgactttccagaagaaaaaaatgcaactttggttagggggcagtggttggatcacacagttgtctttcgtttcctaccacagtaattcatatttaaatatgcttttagattagtgtggatactattgctgctgtgttgctacctgacctttttctggggggggtacctcagaaatgagcatttgagggcaagcgaaaaagccctcttcatcctccagaggcaacaaagaggcagcagaaatggggaaagattgtgagaggcagggcttgggtctagacctggacttaggcaagatatgttgccctcaaccctgagttttcttatatgtaaaaagggaaggttgggctggactagatgaggtcaagatttgccattctgggaggctgatattccagagaatcaaaattaatcctaaaccaaagctttatggctgctacagagacatgtcacatttctgagacttgtcaccaagagtttgtccctcagactttggcgctgttgaatgcaaagacaaggatggccaccttctggttcttgcctgttgtcctcagctgagagcagtctcggtaaaggtggcaaagattctgtgacctcagaccggggaccaaatgcttgggagtctgatggccgggctgggccaccattctcatagctctcattctgtttggagcaaccaaaggatttgtgtgaagttatttggaaaaggaccttaactgagcagtaatcttttttctgtatatttggaatgtttttcattctgacctgttctgtcagtgattctactgaaaaacaatttaatcaatataaaaatgttcaagctatgcaacactgt

SEQ ID NO: 310800 - DNA, 2214 bp, Artificial Sequence
  derived and/or modified sequence
atggacatatgcgaaggtagactgacatgtcctctgaacagcgccgtcgtactcgcatcttatgccgtgcaatcccatttcggagactacaactctagcatccaccatccaggttaccttagcgactcccacttcatacctgaccagaacgaagactttctcacgaaggttgaaagcctgcacgagcagcacagcgggcttaagcagtccgaggctgagtcttgctacattaacatagctcggaccttagacttttacggggttgaactgcacagtgggagagacctgcacaacctggacctaatgatcggtatcgctagcgccggagtggccgtctataggaagtatatttgtactagcttctacccatgggtcaatatactcaagatcagttttaagaggaaaaagttcttcatccaccaacgacagaagcaggccgaatccagggaacatatcgtcgcattcaatatgctgaattatagatcctgcaaaaatctgtggaagtcatgtgtggaacatcacacttttttccaagctaaaaagctgttgccccaggagaagaatgtgctgtcccagtactggactatgggttctaggaacactaaaaaacggtctcctcgcctgcgacatgagattcggaaaccgaggcattcatccgcggataaccttgcaaacgagatgacatacatcacagagaccgaggatgttttctatacatataaaggatccttggctccccaggactccgacagcgaagtgtctcagaatcgctcacctcaccaggaatctctgtctgaaaataatccagcccagtcatatctgacccagaagagctctagcagtgtgtccccttccagcaatgcccctggatcctgcagcccggatggcgtggatcaacaactgttggatgactttcatagggtgactaaaggaggaagtacagaggacgcttcgcagtattattgtgacaagaacgacaatggagatagttacctggtgttgataaggatcactcccgacgaggatggaaaatttggctttaatctcaaggggggagttgaccagaaaatgcctttagtcgtatcccgtataaacccggagagccctgcagacacatgcataccaaagctcaacgagggggatcagatcgttctgatcaacggtagagatatcagtgaacacacacatgatcaggtggtgatgttcattaaagcttcccgggagagccacagtcgcgagctggccctcgtgatccgacggagggccgtaaggtccttcgccgatttcaaatctgaagatgaactaaatcaactttttcctgaggcgatcttcccgatgtgccccgagggaggcgacacacttgaaggcagcatggcacagctgaaaaagggtctcgagagcggcacggtgcttattcagtttgagcagctctaccggaagaaacccggtctcgccattacattcgcaaagctcccacagaatttggataaaaaccgatacaaggacgtgttaccctatgacacaacccgcgtactcctccagggtaacgaggattacatcaacgcctcctacgtgaacatggagataccagctgccaatttggtcaataagtacattgcaacccagggtcccctgccacacacctgtgcacagttctggcaggtcgtgtgggatcagaagctcagcctcatagttatgttgaccacattaactgaaaggggtagaaccaagtgccatcagtattggccagatcccccagatgtcatgaatcacggaggcttccatatacagtgtcagtctgaagactgcacaattgcttatgtgtcccgcgagatgctcgtcacgaacacccagacaggggaggaacacactgtaactcatcttcaatacgtggcctggcccgaccacggagtaccggacgactccagtgatttcttggagttcgtaaactatgtgcggtcgctacgggtggatagcgagccggtgctcgtgcactgtagtgccggaattggaaggacgggcgtgctagtgacaatggaaacagccatgtgtctgacagaaaggaatctccccatctacccattagacatcgtccgtaagatgcgggatcagcgagctatgatggtgcagaccagcagccagtataagtttgtatgcgaagccatcctccgagtctacgaggaaggactggtgcagatgttggatccttcctag

SEQ ID NO: 310801 - protein, 290 aa, Artificial Sequence
  derived and/or modified sequence
MAPKRQSPLPPQKKKPRPPPALGPEETSASAGLPKKGEKEQQEAIEHIDEVQNEIDRLNEQASEEILKVEQKYNKLRQPFFQKRSELIAKIPNFWVTTFVNHPQVSALLGEEDEEALHYLTRVEVTEFEDIKSGYRIDFYFDENPYFENKVLSKEFHLNESGDPSSKSTEIKWKSGKDLTKRSSQTQNKASRKRQHEEPESFFTWFTDHSDAGADELGEVIKDDIWPNPLQYYLVPDMDDEEGEGEEDDDDDEEEEGLEDIDEEGDEDEGEEDEDDDEGEEGEEDEGEDD

SEQ ID NO: 310802 - DNA, 873 bp, Artificial Sequence
  derived and/or modified sequence
atggcccccaagagacagagccccctgcccccccagaagaagaagcccagacccccccccgccctgggccccgaggagaccagcgccagcgccggcctgcccaagaagggcgagaaggagcagcaggaggccatcgagcacatcgacgaggtgcagaacgagatcgacagactgaacgagcaggccagcgaggagatcctgaaggtggagcagaagtacaacaagctgagacagcccttcttccagaagagaagcgagctgatcgccaagatccccaacttctgggtgaccaccttcgtgaaccacccccaggtgagcgccctgctgggcgaggaggacgaggaggccctgcactacctgaccagagtggaggtgaccgagttcgaggacatcaagagcggctacagaatcgacttctacttcgacgagaacccctacttcgagaacaaggtgctgagcaaggagttccacctgaacgagagcggcgaccccagcagcaagagcaccgagatcaagtggaagagcggcaaggacctgaccaagagaagcagccagacccagaacaaggccagcagaaagagacagcacgaggagcccgagagcttcttcacctggttcaccgaccacagcgacgccggcgccgacgagctgggcgaggtgatcaaggacgacatctggcccaaccccctgcagtactacctggtgcccgacatggacgacgaggagggcgagggcgaggaggacgacgacgacgacgaggaggaggagggcctggaggacatcgacgaggagggcgacgaggacgagggcgaggaggacgaggacgacgacgagggcgaggagggcgaggaggacgagggcgaggacgactag

SEQ ID NO: 310803 - DNA, 99 bp, Artificial Sequence
  derived and/or modified sequence
atggcccccaagagacagagccccctgcccccccagaagaagaagcccagacccccccccgccctgggccccgaggagaccagcgccagcgccggctag

SEQ ID NO: 310804 - DNA, 873 bp, Artificial Sequence
  derived and/or modified sequence
atggcacccaagaggcagtccccactgccaccacagaagaagaagccccgccctcctccagccctcgggcctgaggaaacctcagccagcgcgggcttgcccaaaaaaggtgagaaagagcagcaggaggctattgaacacattgacgaagtgcagaatgagatagatcgcctgaatgagcaagcgagtgaagagatattaaaagtcgagcagaagtacaataaactgcgacagccgttctttcagaaaagatccgaattgatcgccaaaattcccaacttctgggttacgactttcgtcaaccatcctcaggtgagcgcgctcctgggcgaggaggacgaggaggccttgcactacctcacaagagtggaggtcaccgaatttgaagacataaagagcgggtatcgcatagatttttattttgatgaaaacccttacttcgaaaacaaggtgctgagtaaagagttccacctgaacgaatccggcgatccgagcagcaagtccactgaaatcaagtggaagagcgggaaagacctgaccaagaggtcatcacaaactcaaaacaaggccagcagaaaacgccagcacgaagaacctgaatccttctttacatggttcaccgaccactccgacgcaggcgcggatgagcttggcgaagtcattaaagacgacatatggcctaaccccttgcagtactatcttgtacctgacatggatgacgaggaaggcgagggagaagaagacgacgacgacgatgaggaggaagagggtctagaagatatcgacgaggaaggcgacgaagatgagggtgaagaggacgaggacgatgacgagggagaggaaggagaggaggatgagggggaagatgactag

SEQ ID NO: 310805 - DNA, 873 bp, Artificial Sequence
  derived and/or modified sequence
atggcccccaagaggcagagccccctgcccccccagaagaagaagccccggcccccaccagccctgggccctgaggagaccagcgccagcgctggcctgcccaagaagggggagaaggagcagcaggaggccatcgagcacattgatgaggtgcagaatgaaattgaccggctgaatgagcaggccagcgaggagatcctgaaggtggagcagaagtacaacaagctgcggcagcccttcttccagaagaggtctgagctgattgccaagatccccaacttctgggtgaccacctttgtgaaccacccccaggtgtctgccctgctgggggaggaggatgaggaggccctgcactacctgaccagggtggaggtgacagaatttgaggacatcaagagcggctacagaattgacttctactttgatgagaacccctactttgagaacaaggtgctgagcaaggagttccacctgaatgaaagtggggaccccagcagcaagagcacagagatcaagtggaagagcggcaaggacctgaccaagaggagcagccagacccagaacaaggccagcaggaagaggcagcacgaggagcctgagagcttcttcacctggttcacagaccacagtgatgctggagcagatgagctgggggaggtgatcaaggatgacatctggcccaaccccctgcagtactacctggtgcctgacatggatgatgaggagggggagggggaggaggatgatgatgatgatgaggaggaggagggcctggaggacattgatgaggagggagatgaagatgaaggagaggaggatgaagatgatgatgaaggagaggagggggaggaggatgaaggagaagatgactag

SEQ ID NO: 310806 - DNA, 99 bp, Artificial Sequence
  derived and/or modified sequence
atggcccccaagaggcagagccccctgcccccccagaagaagaagccccggcccccaccagccctgggccctgaggagaccagcgccagcgctggatag

SEQ ID NO: 310807 - DNA, 873 bp, Artificial Sequence
  derived and/or modified sequence
atggcccccaagcggcagagccccctgcccccccagaagaagaagcctcgcccgcctccagcactcggccccgaggagacctcagcaagcgccggcctcccgaagaaaggcgagaaagagcagcaggaggcgattgagcatatcgacgaagtccaaaatgaaatcgaccggctcaacgagcaagcttcggaggaaatcctcaaggtcgagcagaagtataacaaattaaggcagcctttttttcagaagcggagcgagctgatcgccaagatcccaaatttttgggtaactaccttcgtaaaccacccacaggtgagcgcactgcttggagaggaggatgaggaagccctgcactacctaactcgagtggaggtcacggagttcgaggacataaagtccggctacaggatcgacttctatttcgacgaaaatccatatttcgagaacaaagtactttctaaggagttccatcttaatgaaagtggtgacccctcctctaaatcaaccgaaattaaatggaagtccgggaaggacctgacgaagcgttcctctcaaacacagaataaggcttcaagaaaaagacaacatgaagagcccgagtccttctttacttggtttacagaccatagcgatgcaggggctgatgagctcggcgaagttataaaggacgacatctggcctaacccccttcaatactacttggtgccagacatggacgatgaagagggagaaggagaagaagacgacgatgatgacgaagaggaagagggtctagaggatattgatgaggagggcgacgaggacgagggagaggaggacgaggatgatgacgagggagaggagggtgaagaggatgaaggtgaggacgactag

SEQ ID NO: 310808 - DNA, 99 bp, Artificial Sequence
  derived and/or modified sequence
atggcccccaagcggcagagccccctgcccccccagaagaagaagcctaggccaccaccagccctaggtccagaagaaactagcgcaagtgccggatag

SEQ ID NO: 310809 - DNA, 873 bp, Artificial Sequence
  derived and/or modified sequence
atggcccctaagcgacagtcccctctaccgcctcagaagaagaaacccaggcccccacctgccttaggccctgaagagactagcgcttcggccggactgccaaagaaaggcgagaaagagcagcaggaggcaatcgaacatattgacgaggtacagaatgagatcgaccggctgaacgaacaggccagcgaggagattctgaaggtcgagcagaagtataacaagctgagacagcccttctttcagaaacggagcgaactgatcgcgaaaattccgaacttttgggttacaacatttgtgaaccatccccaggtgagcgccttgctcggcgaagaagacgaagaggcactgcattacttgaccagggtcgaggtgacggaatttgaggacatcaagagcgggtatagaatagacttctacttcgacgagaatccttatttcgagaacaaagtgctaagcaaagaatttcacctgaatgaatccggagatcccagcagtaagtcaactgagatcaaatggaaatctgggaaagatttaactaaacggtcaagccaaacccagaacaaggcatccagaaaacgtcagcacgaggaacctgagtccttttttacgtggtttacagatcactcagacgcaggcgcagatgagctgggcgaagtgatcaaagatgatatctggccgaaccccctccagtactacttagtgcctgatatggacgacgaggaaggagagggcgaggaggacgacgacgacgatgaagaagaagagggccttgaagacatcgatgaggagggagatgaggacgagggagaggaggatgaggacgatgatgagggtgaagaaggagaagaggatgaaggtgaggacgactag

SEQ ID NO: 310810 - DNA, 2850 bp, Artificial Sequence
  derived and/or modified sequence
gtgcccctgcagagcgaggcagagagcaactaaaagaaatttctcctgattggagggtgggtgggatgaggctgggggagggggccggggtgtgtgtcccactgtcatgtaaatatcccttccaggcagggcggctccagtgcagatttaagccgctggcacctggggcagtctcagtgttcagcctgcttccggacgggcgaggagactcgtggtctggttctgggacttccctaacagcatggcccctaaacgccagtctccactcccgcctcaaaagaagaaaccaagaccacctcctgctctgggaccggaggagacatcggcctctgcaggcttgccgaagaagggagaaaaagaacagcaagaagcgattgaacacattgatgaagtacaaaatgaaatagacagacttaatgaacaagccagtgaggagattttgaaagtagaacagaaatataacaaactccgccaaccattttttcagaagaggtcagaattgatcgccaaaatcccaaatttttgggtaacaacatttgtcaaccatccacaagtgtctgcactgcttggggaggaagatgaagaggcactgcattatttgaccagagttgaagtgacagaatttgaagatattaaatcaggttacagaatagatttttattttgatgaaaatccttactttgaaaataaagttctctccaaagaatttcatctgaatgagagtggtgatccatcttcgaagtccaccgaaatcaaatggaaatctggaaaggatttgacgaaacgttcgagtcaaacgcagaataaagccagcaggaagaggcagcatgaggaaccagagagcttctttacctggtttactgaccattctgatgcaggtgctgatgagttaggagaggtcatcaaagatgatatttggccaaacccattacagtactacttggttcccgatatggatgatgaagaaggagaaggagaagaagatgatgatgatgatgaagaggaggaaggattagaagatattgacgaagaaggggatgaggatgaaggtgaagaagatgaagatgatgatgaaggggaggaaggagaggaggatgaaggagaagatgactaaatagaacactgatggattccaaccttcctttttttaaattttctccagtccctgggagcaagttgcagtcttttttttttttttttttttttttccctcttgtgctcagtcgccctgttcttgaggtctcttttctctactccatggttctcaatttatttggggggaaataccttgagcagaatacaatgggaaaagagtctctacccctttctgttcgaagttcatttttatcccttcctgtctgaacaaaaactgtatggaatcaacaccaccgagctctgtgggaaaaaagaaaaacctgctcccttcgctctgctggaagctggagggtgctaggcccctgtgtagtagtgcatagaattctagcttttttcctcctttctctgtatattgggctcagagagtacactgtgtctctatgtgaatatggacagttagcatttaccaacatgtatctgtctactttctcttgtttaaaaaaagaaaaaaaaacttaaaaaaatggggttatagaaggtcagcaaagggtgggtttgagatgtttgggtgggttaagtgggcattttgacaacatggcttctcctttggcatgtttaattgtgatatttgacagacatccttgcagtttaagatgacacttttaaaataaattctctcctaatgatgacttgagccctgccactcaatgggagaatcagcagaacctgtaggatcttatttggaattgacattctctattgtaattttgttcctgtttatttttaaattttctttttgtttcactggaaaggaaagatgatgctcagttttaaacgttaaaagtgtacaagttgctttgttacaataaaactaaatgtgtacacaaaggatttgatgcttttctctcagcataggtatgcttactatgaccttccaagtttgacttgtataacatcactgtcaaactttgtcaccctaacttcgtattttttgatacgcactttgcaggatgacctcagggctatgtggattgagtaatgggatttgaatcaatgtattaatatctccatagctgggaaacgtgggttcaatttgccattggtttctgaaagtattcacatcatttgggataccagatagctcaatactctctgagtacattgtgcccttgatttttatctccaagtggcagtttttaaaattggccttttacctggatataaattaattgtgcctgccaccaccatccaacagacctggtgctctaatgccaagttatacacgggacagttgctggcatgtcttcattggctatataaaatgtggccaagaagataggctctcagtaagaagtctgatggtgagcagtaactgtccctgctttctggtataaagctctcaaatgtgaccatgtgaatctgggtgggataatggactcagctctgtctgctcaatgccattgtgcagagaagcaccctaatgcataagctttttaatgctgtaaaatatagtcgctgaaattaaatgccactttttcagaggtgaattaatggacagtctggtgaacttcaaaagctttttgatgtataaaacttgataaatggaactattccatcaataggcaaaagtgtaacaacctatctagatggatagtatgtaatttctgcacaggtctctgtttagtaaatacatcactgtataccgatcaggaatcttgctccaataaaggaacataaagattttttttggactgg

SEQ ID NO: 310811 - protein, 585 aa, Artificial Sequence
  derived and/or modified sequence
MAPDLASQRHSESFPSVNSRPNVILPGREGRREGLPPGGGTRGSLVPTRPVPPSPAPLGTSPYSWSRSGPGRGGGAGSSRVPRGVPGPAVCAPGSLLHHASPTQTMAAADGSLFDNPRTFSRRPPAQASRQAKATKRKYQASSEAPPAKRRNETSFLPAKKTSVKETQRTFKGNAQKMFSPKKHSVSTSDRNQEERQCIKTSSLFKNNPDIPELHRPVVKQVQEKVFTSAAFHELGLHPHLISTINTVLKMSSMTSVQKQSIPVLLEGRDALVRSQTGSGKTLAYCIPVVQSLQAMESKIQRSDGPYALVLVPTRELALQSFDTVQKLLKPFTWIVPGVLMGGEKRKSEKARLRKGINILISTPGRLVDHIKSTKNIHFSRLRWLVFDEADRILDLGFEKDITVILNAVNAECQKRQNVLLSATLTEGVTRLADISLHDPVSISVLDKSHDQLNPKDKAVQEVCPPPAGDKLDSFAIPESLKQHVTVVPSKLRLVCLAAFILQKCKFEEDQKMVVFFSSCELVEFHYSLFLQTLLSSSGAPASGQLPSASMRLKFLRLHGGMEQEERTAVFQEFSHSRRGVLLCT

SEQ ID NO: 310812 - protein, 363 aa, Artificial Sequence
  derived and/or modified sequence
MEQGTSSSMTESSPRSMLGYDRDGRQVASDSHVVPSVPQDVPAFVRPARVEPTDRDGGEAGESSAEPPPSDMGTVGGQASHPQTLGARALGSPRKRPEQQDVSSPAKTVGRFSVVSTQDEWTLASPHSLRYSAPPDVYLDEAPSSPDVKLAVRRAQTASSIEVGVGEPVSSDSGDEGPRARPPVQKQASLPVSGSVAGDFVKKATSCRGLLGPSLGPETPSRVGMKVPTISVTSFHSQSSYISSDNDSELEDADIKKELQSLREKHLKEISELQSQQKQEIEALYRRLGKPLPPNVGFFHTAPPTGRRRKTSKSKLKAGKLLNPLVRQLKVVASSTGHLADSSRGPPAKDPKPVWGSLQTARA

SEQ ID NO: 310813 - DNA, 6821 bp, Artificial Sequence
  derived and/or modified sequence
atggacggcgatggcggccgccgagacgtccccggcacgctgatggagcccgggcgcggcgcggggcccgcgggcatggcggagcctcgggcgaaggcggcgcggccggggccccagcgctttctgcggcgcagcgtggtagagtcggaccaggaggagccgccgggcttggaggcagccgaggcgccgggcccgcagcccccgcagcccctgcagcgccgggtgcttctgctctgcaagacgcgccgcctcatcgcggagcgcgcccgcggacgccccgccgcccccgcgcccgcagcgctggtagcgcagccgggagcccccggagcccccgcggacgccggccccgagcccgtgggcacgcaggagcccggcccggaccccatcgcagccgctgtcgaaaccgcgcctgcccccgacggcggccccagggaggaggcggcggcgaccgtgaggaaggaggatgagggggcggccgaggcgaagcctgagcccgggcgcactcgccgggacgagcccgaagaggaggaggacgacgaggacgacctcaaggccgtggccacctctctggacggccgcttcctcaagttcgacatcgagctgggccgcggttccttcaagacggtctacaaggggctggacacggagacctgggtggaggtggcctggtgtgagctgcaggaccggaagctcaccaagctggagcggcagcggttcaaggaagaggctgagatgctgaaaggcctgcagcaccccaacatcgtgcgcttctacgacttctgggagtccagcgccaagggcaagcggtgcattgtgctggtgacggagctgatgacctcagggacgctgaagacatacctgaagcggttcaaggtgatgaagcccaaggttctccgcagctggtgccggcagatcctgaagggcctgctgttcctgcacacaaggacgccacccatcatccaccgagacctgaaatgtgacaatattttcatcaccggaccaactgggtctgtgaagattggcgacttgggcctggccactctgaaaagagcgtcatttgccaaaagtgtgataggtactcccgagttcatggcgcccgagatgtacgaggagcactacgatgagtccgtggacgtctatgcctttgggatgtgcatgctggagatggccacctcggagtacccctactcggagtgccagaatgcggcccagatctaccgcaaggtcacctgtggtatcaagccggccagctttgagaaagtgcacgatcctgaaatcaaggagattattggggagtgtatctgcaaaaacaaggaggaaaggtacgagatcaaagacctgctgagccacgccttcttcgcagaggacacaggcgtgagggtggagctcgcggaggaggaccacggcaggaagtccaccatcgccctgaggctctgggtggaagaccccaagaaactgaagggaaagcccaaggacaatggagccatagagttcaccttcgacctggagaaggagacgccggatgaggtggcccaagagatgattgagtctggattcttccacgagagtgacgtcaagatcgtggccaagtccatccgtgaccgcgtggccttgatccagtggcggcgggagaggatctggcccgcgctgcagcccaaggagcagcaggatgtgggcagcccggacaaggccaggggtccgccggtgcccctgcaggtccaggtgacctaccatgcacaggctgggcagcccgggccaccagagcccgaggagccggaggccgaccagcacctcctgccacctacgttgccgaccagcgccacctccctggcctcggacagcaccttcgacagcggccagggctctaccgtgtactcagactcgcagagcagccagcagagcgtgatgcttggctcccttgccgacgcagcgccgtccccggcccagtgtgtgtgcagcccccctgtgagcgaggggcccgtcctgccgcagagcctgccctcgctgggggcctaccagcagcccacggctgcacctggcttgccggtgggctctgtcccggcccccgcctgccctccgtccctccagcagcacttcccggatccggccatgagcttcgcccccgtgctgccgccgcccagcacccccatgcccacgggcccaggccagccagcaccccccggccagcagcctcctccgctggcccagccgacacccctgccgcaggtcctggccccacagcccgtggtccccctccagccggttcccccccacctgccaccgtacctggctccagcctcccaggtgggggcccccgctcagctgaagcccctccagatgccacaggcgcccctgcagccgcttgctcaagtccctccgcagatgcccccgattcctgttgtgccccccatcacgcccctggcgggaatcgacggcctccctccggccctcccagacctgccgaccgcgactgtgcctcccgtgccaccacctcagtatttctctccagccgtgatcttgccgagcctcgctgccccactcccccctgcgtccccagccttgcctctgcaggctgtgaagctgccccacccccctggggcgcccctggccatgccctgccggaccattgtgccaaatgcaccggccactatccccctgctggccgtagccccaccgggcgtggctgccctgtccattcattctgccgtggcccagctcccaggccaacctgtgtacccagcggccttcccacagatggcgcctactgacgtccctccttccccccatcacacggtgcagaatatgagggccacccctccacagccggcactgcctccacaacccacactgcccccacaacccgtgctgcccccgcaacccacgctgccccctcaacctgtgttgcccccgcaacccacacggccccctcaacctgtgctgcccccgcaacccatgctgcccccacaacctgtgctgcccccgcagccggcactgcctgtgcgccctgagcccctccagccccaccttcctgaacaagctgctccagctgctacaccagggagccagattctgcttggccacccagctccctatgctgtggacgtcgccgctcaggtccccaccgtgcctgtgccaccggctgcggtcctctcgccgcctctgccggaagtgctgctgcctgccgcccctgagctcctgcctcagttccccagctccctggccacggtgtctgcctctgtgcagagtgtgcccacccagactgccacacttctgccaccagcaaacccaccgctgcctggcgggcccgggatcgccagcccttgcccaactgtccagctgacggtggaaccagtccaagaggagcaggcctcacaggacaagccgcccggcctcccgcagagctgtgagagctatggaggttctgatgtcacttctggaaaagagctgagtgacagctgtgaaggcgcctttggagggggcaggctggagggcagggcagcccgaaaacaccaccgcaggtccacgcgtgcgcgctcccggcaggagagggccagccggccccggcttaccatcttgaacgtgtgcaacactggggacaagatggtggagtgccagctggagacgcacaaccacaagatggtgaccttcaagttcgacttggacggggacgcacccgatgaaattgccacgtatatggtggagcatgactttatcctgcaggccgagcgggaaacgttcatcgagcagatgaaggatgtcatggacaaggcagaggacatgctcagcgaggacacagacgccgaccgtggctccgacccagggaccagcccgccacacctcagcacctgcggcctgggcaccggggaggagagccgacaatcccaagccaacgcccccgtgtatcagcagaacgtcctgcacaccgggaagaggtggttcatcatctgtccggtggctgagcaccccgcccccgaggcccctgaatcttcgcccccacttcctctaagctccctgccgccagaagccagccaagattcagcgccctataaagaccagctgtcctcgaaggaacaacccagctttctagccagtcagcagctcctgagccaggcgggccccagcaaccctcctggggcacccccagcccctttggccccctcctcccctcctgtgactgctctgccccaagatggagcagctccagccaccagcaccatgccagagccagcgtcaggaactgccagccaggcagggggtccagggacacctcaggggctgaccagtgagctcgagacgtctcagccactagcggagactcacgaggccccgcttgctgtgcagcccctcgtggtgggcctagcaccttgcactccagctccagaggctgcctcaaccagggacgccagtgccccaagggagcccctgccacctcctgcacctgagcccagcccccacagcgggaccccacagcccgccttgggtcaacctgctcccctgcttcctgccgcagtgggggccgtcagcctggccacctcccagctcccaagcccacccctggggcccaccgtccccccacagccaccctcggccctggagtcggatggggaagggccgccccccagggtgggctttgtggacagcaccatcaagagcctggacgagaagctgcggactctgctctaccaggagcacgtgcccacctcctcagcctcagctgggacccctgtggaggtgggcgacagagacttcaccctggagcccctgagaggggaccagccccgctcagaggtctgcgggggggacctggccctgcccccagtgcctaaggaggcggtctcagggcgtgtccagctgccccagcccttggtggagaagtcagaactggcccccactcgaggggccgtgatggagcagggcacgtcctcgtcaatgacagagtcgtctcccaggagtatgctaggctatgacagagatggaaggcaggtggcctcagactcccatgtggtccccagcgtcccccaggatgtacctgcttttgtgagacctgcacgtgtggagcccacagacagggatggtggagaagctggagaaagctcggcagagcccccgccgagtgacatgggcacagtggggggccaggctagccacccccagacactcggcgctcgagctttggggtcccctcggaaacgtccagagcagcaggatgtcagctcaccagccaagactgtgggccgtttctcggtggtcagcactcaggacgagtggaccctggcctccccccacagcctgagatactctgccccacccgacgtctacctggacgaggccccctccagccccgacgtgaagctggcagtgcggcgggcgcagacggcctcctccatcgaggtcggcgtgggcgagcccgtgtccagcgactctggggacgagggccctcgggcgagacccccggtgcagaagcaggcgtccctgcccgtgagtggcagcgtggctggcgacttcgtgaagaaggccacctcctgcagaggccttctcgggccgtcgctgggccccgagacacccagcagggtgggcatgaaggtccccacgatcagcgtgacctccttccattcccagtcgtcctacatcagcagcgacaatgattcggagctcgaggatgctgacataaagaaggagctgcagagtctgcgggagaagcacctgaaggagatctcggagctgcagagccagcagaagcaggagatcgaagctctgtaccgccgcctgggcaagccactgccccccaacgtgggcttcttccacacggcaccccccactggccgccggagaaaaaccagcaagagcaagctgaaggcaggcaagctgctaaatcccctggtgcggcagctcaaggtcgtggcctccagcacaggtcacttggctgactccagcagaggccctcccgctaaggaccccaagccagtgtggggctcactgcagacagcacgggcctgagcgggaaggcagtgcagacccagcagccctgctccgtccgggcctccctgtcttcggacatctgctccggcttagccagtgatggaggcggagcgcgtggccaaggctggacggtttaccacccaacgtctgagagagtgacctataagtctagtagcaaacctcgtgctcgattcctcagtggacccgtatctgtgtccatctggtctgccctgaagcgtctctgcctaggcaaagaacacagcagtaggtcctccaccagcagcctggccccaggccctgagccaggcccccagcccgccctgcacgtccaggcgcaggtgaacaacagcaacaacaagaagggtaccttcacggacgacctgcacaagctggtggacgagtggacgagcaagacggtgggggccgcgcagctgaagcccacgctcaaccagctgaagcagacccagaagctgcaagacatggaggcccaggcaggctgggctgcccctggcgaggcgcgggctatgaccgcacctcgagcaggagtggggatgccacgtctgcccccagcgcccggccctctgtccaccacggtcattcccggagccgccccgaccctgtccgtgcccacaccagatcctgagagtgagaagcctgactgaccccgcctagacgccaggcccacttcacgccgtctaagtggagaagtgacggaccctcagggccagctgctcctcctgtccagttcacgctgttttgtaaccactttctaagcattttttattcacaattggaaacacaaatgtaatgcaagaataaaaaatattttggggcagaaagga

SEQ ID NO: 310814 - protein, 779 aa, Artificial Sequence
  derived and/or modified sequence
MEPGRGAGPAGMAEPRAKAARPGPQRFLRRSVVESDQEEPPGLEAAEAPGPQPPQPLQRRVLLLCKTRRLIAERARGRPAAPAPAALVAQPGAPGAPADAGPEPVGTQEPGPDPIAAAVETAPAPDGGPREEAAATVRKEDEGAAEAKPEPGRTRRDEPEEEEDDEDDLKAVATSLDGRFLKFDIELGRGSFKTVYKGLDTETWVEVAWCELQDRKLTKLERQRFKEEAEMLKGLQHPNIVRFYDFWESSAKGKRCIVLVTELMTSGTLKTYLKRFKVMKPKVLRSWCRQILKGLLFLHTRTPPIIHRDLKCDNIFITGPTGSVKIGDLGLATLKRASFAKSVIGTPEFMAPEMYEEHYDESVDVYAFGMCMLEMATSEYPYSECQNAAQIYRKVTCGIKPASFEKVHDPEIKEIIGECICKNKEERYEIKDLLSHAFFAEDTGVRVELAEEDHGRKSTIALRLWVEDPKKLKGKPKDNGAIEFTFDLEKETPDEVAQEMIESGFFHESDVKIVAKSIRDRVALIQWRRERIWPALQPKEQQDVGSPDKARGPPVPLQVQVTYHAQAGQPGPPEPEEPEADQHLLPPTLPTSATSLASDSTFDSGQGSTVYSDSQSSQQSVMLGSLADAAPSPAQCVCSPPVSEGPVLPQSLPSLGAYQQPTAAPPPLAQPTPLPQVLAPQPVVPLQPVPPHLPPYLAPASQVGAPAQLKPLQMPQAPLQPLAQVPPQMPPIPVVPPITPLAGIDGLPPALPDLPTATVPPVPPPQYFSPAVILPSLAA

SEQ ID NO: 310815 - DNA, 2340 bp, Artificial Sequence
  derived and/or modified sequence
atggagcccggcagaggcgccggccccgccggcatggccgagcccagagccaaggccgccagacccggcccccagagattcctgagaagaagcgtggtggagagcgaccaggaggagccccccggcctggaggccgccgaggcccccggcccccagcccccccagcccctgcagagaagagtgctgctgctgtgcaagaccagaagactgatcgccgagagagccagaggcagacccgccgcccccgcccccgccgccctggtggcccagcccggcgcccccggcgcccccgccgacgccggccccgagcccgtgggcacccaggagcccggccccgaccccatcgccgccgccgtggagaccgcccccgcccccgacggcggccccagagaggaggccgccgccaccgtgagaaaggaggacgagggcgccgccgaggccaagcccgagcccggcagaaccagaagagacgagcccgaggaggaggaggacgacgaggacgacctgaaggccgtggccaccagcctggacggcagattcctgaagttcgacatcgagctgggcagaggcagcttcaagaccgtgtacaagggcctggacaccgagacctgggtggaggtggcctggtgcgagctgcaggacagaaagctgaccaagctggagagacagagattcaaggaggaggccgagatgctgaagggcctgcagcaccccaacatcgtgagattctacgacttctgggagagcagcgccaagggcaagagatgcatcgtgctggtgaccgagctgatgaccagcggcaccctgaagacctacctgaagagattcaaggtgatgaagcccaaggtgctgagaagctggtgcagacagatcctgaagggcctgctgttcctgcacaccagaaccccccccatcatccacagagacctgaagtgcgacaacatcttcatcaccggccccaccggcagcgtgaagatcggcgacctgggcctggccaccctgaagagagccagcttcgccaagagcgtgatcggcacccccgagttcatggcccccgagatgtacgaggagcactacgacgagagcgtggacgtgtacgccttcggcatgtgcatgctggagatggccaccagcgagtacccctacagcgagtgccagaacgccgcccagatctacagaaaggtgacctgcggcatcaagcccgccagcttcgagaaggtgcacgaccccgagatcaaggagatcatcggcgagtgcatctgcaagaacaaggaggagagatacgagatcaaggacctgctgagccacgccttcttcgccgaggacaccggcgtgagagtggagctggccgaggaggaccacggcagaaagagcaccatcgccctgagactgtgggtggaggaccccaagaagctgaagggcaagcccaaggacaacggcgccatcgagttcaccttcgacctggagaaggagacccccgacgaggtggcccaggagatgatcgagagcggcttcttccacgagagcgacgtgaagatcgtggccaagagcatcagagacagagtggccctgatccagtggagaagagagagaatctggcccgccctgcagcccaaggagcagcaggacgtgggcagccccgacaaggccagaggcccccccgtgcccctgcaggtgcaggtgacctaccacgcccaggccggccagcccggcccccccgagcccgaggagcccgaggccgaccagcacctgctgccccccaccctgcccaccagcgccaccagcctggccagcgacagcaccttcgacagcggccagggcagcaccgtgtacagcgacagccagagcagccagcagagcgtgatgctgggcagcctggccgacgccgcccccagccccgcccagtgcgtgtgcagcccccccgtgagcgagggccccgtgctgccccagagcctgcccagcctgggcgcctaccagcagcccaccgccgcccccccccccctggcccagcccacccccctgccccaggtgctggccccccagcccgtggtgcccctgcagcccgtgcccccccacctgcccccctacctggcccccgccagccaggtgggcgcccccgcccagctgaagcccctgcagatgccccaggcccccctgcagcccctggcccaggtgcccccccagatgccccccatccccgtggtgccccccatcacccccctggccggcatcgacggcctgccccccgccctgcccgacctgcccaccgccaccgtgccccccgtgccccccccccagtacttcagccccgccgtgatcctgcccagcctggccgcctag

SEQ ID NO: 310816 - DNA, 2340 bp, Artificial Sequence
  derived and/or modified sequence
atggaacctggaagaggcgcaggacccgcaggcatggccgagccccgagccaaggcggcacgcccagggccccagcggttcctgcgccggtcagtagtcgaaagtgatcaggaagagcctccgggccttgaggctgctgaggctcccgggccacagccaccgcagcctctgcagcgccgagtcctccttctgtgtaaaacacgacgccttatcgccgagcgggcccgcggaagaccagcagccccggcccctgctgcactcgttgctcagcctggtgcacccggagctcccgctgacgcgggtcccgagccagtcggtactcaggagcccggaccggacccaatcgctgctgccgtcgaaacagcgccagctccagacggagggcctagggaagaggctgctgcgacagtccgcaaggaggatgagggggcagccgaggcaaagccagagcccggccgcacccggcgcgacgaacccgaggaagaggaagatgatgaagacgatctgaaagcagtggccaccagcttggatggccggtttttgaagtttgacatagaattgggccggggttcgttcaagactgtgtataaggggcttgacaccgaaacctgggtagaggtagcctggtgtgaactgcaagaccgcaagctgacaaaactagaaaggcagaggtttaaagaagaagcagaaatgctcaaaggcctgcagcatcctaacatcgtccgcttctatgacttctgggagtcctctgccaaaggtaagcgatgcatcgttctggtgaccgaactcatgacatccggcaccctgaagacctatctgaaaagattcaaagttatgaagccaaaggtgctcaggtcctggtgtcgccagatcctcaaaggcctgttattcttgcatactcggacccccccgatcattcacagggacctgaaatgtgacaacatctttataacagggcccacaggaagcgtgaagattggggatcttggcttagctaccctgaagcgggcgagctttgcgaagtcagtgattggcacacccgagtttatggctcctgaaatgtatgaagagcactatgacgagtcagtggatgtctatgcattcggcatgtgcatgctggaaatggcaacttccgaatacccatattccgagtgccaaaacgccgcccagatctaccgtaaggtcacctgtggcataaaaccagcctcatttgagaaggtgcatgatcctgagatcaaagaaattataggagagtgtatctgcaagaacaaagaggaacgatacgaaatcaaggatttgttgtcccatgcattcttcgccgaagataccggagttcgggtggaactggccgaggaagaccacggtaggaagagcactattgctctgcgcttatgggtcgaggacccgaaaaaattgaaaggcaaacccaaggataacggggccatcgaattcacatttgatctggaaaaagaaacccccgatgaggtggctcaggaaatgattgaatctggctttttccatgaatccgacgtcaaaatagtcgctaaatcaatccgcgatagagtagcattaattcagtggaggcgagaacgaatctggccagccctccaaccgaaggagcagcaggacgtgggctctcccgacaaagccaggggaccccctgtgcccctgcaagtgcaagtcacttaccacgcccaggctggccagcctgggcctccggaaccagaagagccagaggcagaccagcacttgctgccacccacactacctactagcgccacctctctggcgtctgatagcaccttcgattctggtcagggcagcactgtatactcagactcacagtcgtcccagcagagtgtgatgcttggatcactggctgacgccgcccccagcccggcacagtgcgtgtgctctcctcctgtcagtgaaggcccagtcctgccacaatccctgccaagtttgggcgcctaccagcagcctaccgccgcaccgcccccattagcccagcccactcctctcccgcaggtgcttgctcctcagccggttgtccctctccaacctgtgccacctcacttgcctccttacctggcaccagcgagccaagttggagcaccagcgcagctgaaacccctccaaatgccccaggcccccctacagcctctggcccaagtgcccccccaaatgcctccgattcctgtggttccaccaatcacccctctcgctggcattgacgggctccctccagctctgccagatttacctaccgcaactgtcccacctgtaccccctccacaatacttctcccccgctgtaattctgcctagcctggccgcatag

SEQ ID NO: 310817 - DNA, 2340 bp, Artificial Sequence
  derived and/or modified sequence
atggagcccggcagaggagctggccctgctggcatggccgagccccgggccaaggccgcccggcccggcccccagcgcttcctgcggcgctctgtggtggagagtgaccaggaggagcccccaggcctggaggccgctgaggcccctggcccccagcccccccagcccctgcagaggagagtgctgctgctgtgcaagacccggcggctgattgctgagcgggcccggggccggcctgctgccccagccccagctgccctggtggcccagcccggggcccctggggccccagcagatgctggccctgagcctgtgggcacccaggagcccggccctgaccccatcgctgctgctgtggagacagccccagccccagatggcggcccccgggaggaggccgccgccaccgtgaggaaggaggatgaaggagctgctgaggccaagccagagcccggccgcaccaggagagatgagcctgaggaggaggaggatgatgaagatgacctgaaggctgtggccaccagcctggatggccgcttcctgaagtttgatattgagctgggccggggcagcttcaagacagtgtacaagggcctggacacagagacctgggtggaggtggcctggtgtgagctgcaggacaggaagctgaccaagctggagcggcagcgcttcaaggaggaggccgagatgctgaagggcctgcagcaccccaacatcgtgcgcttctatgacttctgggagagcagcgccaagggcaagcgctgcatcgtgctggtgacagagctgatgaccagcggcaccctgaagacctacctgaagcgcttcaaggtgatgaagcccaaggtgctgcgctcctggtgccggcagatcctgaagggcctgctcttcctgcacaccaggaccccacccatcatccaccgggacctgaagtgtgacaacatcttcatcaccggccccactggatctgtgaagatcggggacctgggcctggccaccctgaagagggccagctttgccaagagcgtcatcggcaccccagagttcatggcccctgagatgtatgaggagcactatgatgagagcgtggatgtgtatgccttcggcatgtgcatgctggagatggccaccagcgagtacccctacagcgagtgccagaatgctgcccagatctacaggaaggtgacctgtggcatcaagccagccagctttgagaaggtgcatgaccctgagatcaaggagatcatcggggagtgcatctgcaagaacaaggaggagagatatgagatcaaggacctgctgagccacgccttctttgctgaagatactggagtgcgggtggagctggccgaggaggaccacggcaggaagagcaccatcgccctgcggctgtgggtggaggaccccaagaagctgaagggcaagcccaaggacaatggagccatcgagttcacctttgacctggagaaggagaccccagatgaggtggcccaggagatgattgaaagtggcttcttccatgaaagtgatgtgaagatcgtggccaagagcatccgggacagagtggccctgatccagtggaggcgggagcgcatctggccagccctgcagcccaaggagcagcaggatgtgggcagcccagacaaggcccggggcccccctgtgcccctgcaggtgcaggtgacctaccacgcccaggccggccagcccggccccccagagcctgaggagcctgaggccgaccagcacctgctgccccccaccctgcccaccagcgccaccagcctggccagtgacagcacctttgacagcggccagggcagcacagtgtacagcgacagccagagcagccagcagagcgtgatgctgggcagcctggctgatgctgcccccagccctgcccagtgtgtgtgcagcccccctgtgtctgagggccctgtgctgccccagagcctgcccagcctgggcgcctaccagcagcccacagctgcccccccacccctggcccagcccacccccctgccccaggtgctggccccccagcctgtggtgcccctgcagcctgtgcccccccacctgcccccctacctggccccagccagccaggtgggcgccccagcccagctgaagcccctgcagatgccccaggcccccctgcagcccctggcccaggtgcccccccagatgccacccatccctgtggtgccccccatcacccccctggccggcattgatggcctgcccccagccctgcctgacctgcccacagccaccgtgccccctgtgcccccaccccagtacttcagccctgctgtgatcctgcccagcctggccgcctag

SEQ ID NO: 310818 - DNA, 2340 bp, Artificial Sequence
  derived and/or modified sequence
atggagcccggccggggcgccggccccgccggcatggccgagccccgcgctaaggccgcaaggccaggcccccagagattcctgcgtagatctgtagtcgaaagtgatcaggaagaacccccggggctggaggctgctgaagcccctgggcctcagcctccccagccacttcagaggcgagtcctgcttctatgcaaaacccggaggctgatcgccgagagagccaggggacgtcccgcggcgccggcacctgccgccctggtcgcgcagcctggggcaccaggcgccccagcagacgccggccccgagccagtcggaacgcaggaacctggacctgacccgatcgcagcagctgttgagaccgcaccagccccagatgggggaccccgtgaggaggctgcggctacagtgagaaaggaagatgagggcgcggccgaagcaaagcccgagccagggaggacaaggagggatgaaccagaggaagaggaagatgatgaggacgatttaaaggcagtcgcaactagtctggatggtcggtttctgaaatttgacatcgagctaggaagagggagtttcaagaccgtgtataagggcctcgatactgagacatgggtcgaggtcgcatggtgcgaactgcaggaccggaagctgactaagctcgaacgccagagattcaaagaggaggctgaaatgctgaaggggctccaacacccaaatatcgtgcggttctacgatttttgggaatccagcgcaaagggaaagagatgtattgtgttagttaccgaactcatgaccagtggcaccctgaaaacatatctgaaacgcttcaaagtgatgaagccaaaggtgctgcggtcctggtgccgccagatcttgaagggactcttgttcctgcacaccagaacaccacccataattcaccgcgatctcaaatgtgataatatcttcatcaccggtccgacaggatcagttaagatcggtgatttagggctggcaaccctaaagcgcgccagctttgcaaagtctgtaattgggactccagagttcatggctccagagatgtacgaggagcattacgatgaatctgtggacgtgtacgccttcgggatgtgcatgctggaaatggcaacgtctgaatacccctactctgaatgtcagaacgccgcgcagatttatcggaaagtcacctgcggcatcaaacctgcaagttttgaaaaggtgcacgatcccgaaattaaagaaattataggcgaatgcatttgtaagaacaaggaggaacggtacgagataaaagatttactctctcatgccttctttgctgaggacactggggtgagagttgagctggcggaggaagatcacggtagaaagagcaccattgccctgcgactgtgggtggaggatcctaagaagctgaagggaaaacccaaagataatggtgccatcgaatttacgtttgatctggagaaggaaacccccgatgaggtggcacaggagatgatagaatcaggattcttccacgagagcgacgttaaaatcgtagccaaatccatacgcgacagagtagcgctgatccagtggcgtagagagcgtatatggccagcacttcagccaaaggagcagcaagatgtcggtagtccagacaaggcacggggacccccagtgcccctgcaggtgcaggtcacttatcatgcccaggctggccagcccggtccaccagagcctgaggagcctgaagctgaccagcacctactgcctcctacgcttcccacgtcagccacgagtctggcctccgattcaaccttcgacagcggccaaggatcgacagtgtactctgattcacagtcaagccagcagtcggtaatgctcgggtccctcgctgatgcggcaccatcccccgcacagtgcgtgtgcagcccgcctgtgagtgaagggcctgtccttccacagtctctacctagccttggagcatatcagcagccaacagccgcccctcctccactagcccaaccaacgccattgccacaagttctggcccctcagcccgtggtacctctgcaaccagttccgccacacttgcccccctacctagctcctgcctcccaggtcggcgcacctgctcagctgaaacccctccaaatgccccaggcacctctgcaacccctggcccaagtccctccacagatgccgcctatccctgtagttcctcctattacccccctcgcggggattgatgggctgccgcctgccctacccgacctgcccacagctacagtgcctcctgttccgcccccacagtacttttcaccagcagtgattctcccatctctggccgcctag

SEQ ID NO: 310819 - DNA, 2340 bp, Artificial Sequence
  derived and/or modified sequence
atggaacccggtcgaggggcagggcctgctggaatggctgaacctcgggcaaaggcagcacggccagggccacaaaggttcctgcggaggtccgtggttgagtcagatcaggaggaaccccctggattggaggccgctgaagcgccaggtccccagcctcctcaaccgctgcagaggagagtgcttctgctgtgcaagaccaggcggctcatcgcagaaagggccaggggaaggccagccgcacccgctcctgcagcgcttgttgcgcaacccggagccccaggcgcacccgcagatgccggtcccgagcccgtgggaactcaagaaccgggtcctgaccctatcgccgctgctgttgagactgcccctgcacccgacggtgggcctagagaagaggccgcagctacggtcaggaaggaggatgagggggcagcggaggctaagcccgagcccggaagaacaaggcgggatgagcccgaggaggaggaggatgatgaggatgatcttaaggccgttgccacaagcctggatggcaggtttctaaaatttgatatagaacttgggcgaggctcttttaaaaccgtgtataagggccttgataccgagacctgggtcgaggtcgcttggtgtgaacttcaggatagaaaactgactaagctggagcgtcagcggtttaaggaagaggcggaaatgctgaaaggactgcagcaccccaatattgtacgcttttatgatttctgggagagttcagcgaagggtaaaaggtgtatcgttctggtgaccgaacttatgacctccggaacgctgaagacatacttaaagcggttcaaggtcatgaaaccaaaagtgttgcgttcttggtgtagacagatcctgaaaggtttgttgttcttacacacccgcactccacctatcatccaccgagatctgaaatgcgataatatctttatcacaggtccgaccgggagcgtcaagataggtgatctgggcttggccacgctaaagcgggctagctttgcgaagtcagtgattggtacccctgagtttatggctcccgagatgtacgaagaacattatgatgaatccgtggacgtgtacgcattcggtatgtgtatgctggagatggctacatctgagtatccttacagcgagtgtcaaaatgccgctcaaatttaccggaaggtgacttgtggcatcaagcctgcgtccttcgaaaaggtgcacgacccagagattaaggagattatcggcgaatgcatctgtaagaacaaagaggaaagatatgaaatcaaggacctgctgagtcatgcattctttgctgaagatacgggcgtacgcgtcgagcttgccgaggaagaccatggtaggaagtccacaatcgcgttacgtctatgggtggaggaccctaagaagctgaaaggcaaacccaaagacaacggggctatcgagttcacctttgacctggagaaggaaacccccgatgaggtggctcaagagatgatcgagtccggtttcttccatgaatccgatgtcaagatcgtggctaaaagtataagggatcgggtggccttaattcagtggcggcgagagcgcatatggccagctctccagcctaaggaacagcaggatgtcggaagtccggacaaagcacgaggccctccagtgccactgcaggtccaggttacctatcacgcccaagcgggacaacccggtccaccagagcccgaagaaccagaagcagatcaacacctgctgccaccaaccttgccaacttctgccacttccctggcctccgactctacttttgattccgggcagggctctactgtctattctgactcccagagcagccagcagtctgttatgctgggtagcctggccgatgctgctccatccccggctcagtgtgtttgttctccacccgtgtctgagggaccagtcctgccccaaagccttccctcgctcggagcttaccagcagcccactgcagctcctccccctcttgctcaaccaacacctctgccccaggtcctggcacctcaacctgtcgtccctctgcaacctgtgcccccacacctgccaccctacctcgcgccagcgagccaggtcggggcaccagcccagctcaagcctcttcaaatgccccaggctccactgcaacctttagcccaagtgcctccacaaatgccacccatcccagttgttcccccaattaccccattggcaggtatcgatggcttgcctcccgctctgcccgacttgccaactgccacagtgccccctgtgccacctcctcaatattttagccccgctgttatcctgccctccctagccgcatag

SEQ ID NO: 310820 - DNA, 288 bp, Artificial Sequence
  derived and/or modified sequence
atggcccacttcaaggacgacctgcagaccaacgtggagatcatccccggcgagagcgcccccagaaaggagagccccagaccccccgccccccccagcagcgccgccggcgtgggcggctgcagcaaccacagccccagcgtgcaggagagccccctgagcccccccgccctggcccagctgggcagcgcccagcagcccagcatgagaaccgagctgagcttcagcgagaagaaggacaccatgatcatctggcagatcaccatcaccgtgtggtgccagagatag

SEQ ID NO: 310821 - DNA, 741 bp, Artificial Sequence
  derived and/or modified sequence
atgagccctaaaccccgcgcttccggcccacctgctaaagccaaggaagcaggtaaacgcaagtcctcttcgcagcctagcccaagcgatccaaaaaaaaaaaccacgaaagtggccaagaagggaaaagccgtccgaaggggtagaagggggaagaaaggagctgcgactaaaatggcagccgtcaccgcccctgaagcagagtccggcccagccgcccctgggccttctgatcagccttcccaggagcttcctcagcacgagttaccccccgaggagcccgttagcgagggcacacagcatgacccacttagtcaggagtcagagcttgaggaacccctgagtcaggagtcagaggtggaagagcctctgagtcaggaatctcaggtggaagaacctctttcccaagagagcgaggtggaggagcctctgtcgcaggagtctcaggtcgaggagccactctctcaagaaagcgaggtagaagagcccttatctcaggagtcagaggtggaggagcccctgtcacaggagtcgcaggttgaagagcccctctctcaggaatccgaggtcgaggagcccctctctcaggagtcccaagtagaggaaccattgtctcaggaaagcgaaatggaggaacctctgagccaggaaagtcaggtcgaagaaccactgtctcaggagtcagagatggaggaaccgttgtcccaggaaagtgagatggaggagctgcctagtgtgtag

SEQ ID NO: 310822 - DNA, 288 bp, Artificial Sequence
  derived and/or modified sequence
atggcccacttcaaggacgacctgcagaccaacgtggagatcatcccaggggagagtgcacctcggaaggagagtccaaggcctccggccccaccctcttcagccgctggggtaggaggctgcagcaaccattctccatctgtacaagaatcaccactgagcccccctgcacttgcccagctgggttcggcacagcagccctctatgcgaacggagctgtcattttccgagaagaaggacacaatgattatctggcagattaccatcactgtgtggtgccagcgctag

SEQ ID NO: 310823 - DNA, 1092 bp, Artificial Sequence
  derived and/or modified sequence
atggagcagggcaccagcagcagcatgaccgagagcagccccagaagcatgctgggctacgacagagacggcagacaggtggccagcgacagccacgtggtgcccagcgtgccccaggacgtgcccgccttcgtgagacccgccagagtggagcccaccgacagagacggcggcgaggccggcgagagcagcgccgagcccccccccagcgacatgggcaccgtgggcggccaggccagccacccccagaccctgggcgccagagccctgggcagccccagaaagagacccgagcagcaggacgtgagcagccccgccaagaccgtgggcagattcagcgtggtgagcacccaggacgagtggaccctggccagcccccacagcctgagatacagcgccccccccgacgtgtacctggacgaggcccccagcagccccgacgtgaagctggccgtgagaagagcccagaccgccagcagcatcgaggtgggcgtgggcgagcccgtgagcagcgacagcggcgacgagggccccagagccagaccccccgtgcagaagcaggccagcctgcccgtgagcggcagcgtggccggcgacttcgtgaagaaggccaccagctgcagaggcctgctgggccccagcctgggccccgagacccccagcagagtgggcatgaaggtgcccaccatcagcgtgaccagcttccacagccagagcagctacatcagcagcgacaacgacagcgagctggaggacgccgacatcaagaaggagctgcagagcctgagagagaagcacctgaaggagatcagcgagctgcagagccagcagaagcaggagatcgaggccctgtacagaagactgggcaagcccctgccccccaacgtgggcttcttccacaccgccccccccaccggcagaagaagaaagaccagcaagagcaagctgaaggccggcaagctgctgaaccccctggtgagacagctgaaggtggtggccagcagcaccggccacctggccgacagcagcagaggcccccccgccaaggaccccaagcccgtgtggggcagcctgcagaccgccagagcctag

SEQ ID NO: 310824 - DNA, 1092 bp, Artificial Sequence
  derived and/or modified sequence
atggagcagggaactagctcttctatgacagagtcctcacctcggagcatgctcggctacgaccgcgatgggcggcaagttgcctccgattctcacgtcgtcccatctgtccctcaggatgtccctgcctttgtgcggccagcacgagtggaacctacagatagggacgggggcgaggcgggcgagtctagtgccgaacccccaccatccgatatggggacagtagggggtcaggcctcacacccccagaccttgggtgcccgagctttgggctcaccccggaaacgccctgagcaacaggacgtgtctagccctgccaagaccgtaggtcgctttagcgttgtgtctacgcaagacgagtggacacttgcttctcctcatagcctcaggtactccgcccccccagacgtgtatttggacgaggctccttcctctcccgatgtgaagcttgctgttcggagagcccagactgcctcaagcattgaagtgggggtgggcgagccagtcagctctgactccggcgatgaaggcccccgcgcccgaccccctgtgcagaaacaggcatccctgccagtgagcggctctgtcgcgggtgatttcgtcaaaaaagccactagctgtcgcggcctgttgggcccgtctctgggacctgaaactccttctagggtcggcatgaaagtgcctacgatatctgtgaccagttttcactcacagtcttcttatatcagctctgataacgattcggaactcgaagatgcggacatcaaaaaggaactgcagtcactgcgggagaagcacctgaaagaaatcagtgaactacaaagtcaacagaagcaagagatcgaagcactttatagacgtctagggaagcccctgcctcccaatgtgggattcttccacacggccccacccacaggtaggagacgcaaaacctctaagagcaaactgaaggcaggaaagttgctgaatcctttagtccgacagctcaaggtggtggcatccagtaccggccatttggctgatagttcccgcggtccaccggccaaggatcccaaaccagtgtggggatctcttcaaaccgcccgggcatag

SEQ ID NO: 310825 - DNA, 1092 bp, Artificial Sequence
  derived and/or modified sequence
atggagcagggcaccagcagctccatgacagagagcagccccaggtccatgctgggctatgacagagatggccggcaggtggccagtgacagccacgtggtgcccagcgtgccccaggatgtgcctgcctttgtgcggcctgcccgggtggagcccacagacagagatggaggagaggccggggagagcagcgctgagcccccacccagcgacatgggcaccgtgggcggccaggccagccacccccagaccctgggcgcccgggccctgggcagccccaggaagaggcctgagcagcaggatgtgagcagccctgccaagacagtgggccgcttctctgtggtgtccacccaggatgagtggaccctggccagcccccacagcctgcgctacagcgcccccccagatgtgtacctggatgaggcccccagcagcccagatgtgaagctggccgtgagaagagcccagacagccagcagcattgaggtgggcgtgggggagcctgtgtccagtgacagcggagatgagggcccccgggcccggccccctgtgcagaagcaggccagcctgcctgtgtctggctctgtggccggggactttgtgaagaaggccaccagctgccggggcctgctgggccccagcctgggccctgagacccccagccgggtgggcatgaaggtgcccaccatctctgtgaccagcttccacagccagagcagctacatcagcagtgacaatgacagcgagctggaggatgctgacatcaagaaggagctgcagagcctgcgggagaagcacctgaaggagatcagcgagctgcagagccagcagaagcaggagattgaggccctgtaccgccgcctgggcaagcccctgcccccaaatgtgggcttcttccacacagcccccccaactggaagaagaaggaagaccagcaagagcaagctgaaggccggcaagctgctgaaccccctggtgcggcagctgaaggtggtggccagcagcacaggccacctggccgacagcagccggggccccccagccaaggaccccaagcctgtgtggggcagcctgcagacagcccgggcctag

SEQ ID NO: 310826 - DNA, 807 bp, Artificial Sequence
  derived and/or modified sequence
atggacacccgggtgggcaccgccatggccagcccccccagcatgttccctagcagcctaaaatcttcctggactaaaaccaagagagtgcggcgttctttcggggccgaggatgagtgcgggctgcggggggctgagcggggcacagccgaggcgcacgccgagcacgagcagagggcccgcgctagcggtgctggcgccggcgcaggcggggcagaagacgcaggggctgccgccgcagcccctggacgcgcccctggagcacacaggcaactgaggttgaccgcgggggcaggccacggacgcaacgcccatgctggacattcaggactactgcatggtccagcaagcaggtctcatcgcgctcgcccccgacccgcccgcgaagcacatcggccacatcagggaaatcccggtcccggtcgacagcgcgcccccgttaggagcgggcgcgcacacgatgcagaagaaaagctttgggcacggccatgtcacactccgccaaggggacgggaagctggaggaccccctggacctggcccgatactacacctgggcgggtcaagtcctcctaagattaagttcttgcaacacccattctccttccagtctccacagcccccagagccagggaaatccaccagagatacacctagacgcactagtcagcccagagtgcccctgctaggcggacagacaagatacacaggttcacccggtcacccccaggacaccggacagacaaaacccacgccttccaccagacaggacccacccaactactctctgcgaggggccgtcccctag

SEQ ID NO: 310827 - DNA, 1092 bp, Artificial Sequence
  derived and/or modified sequence
atggagcagggcaccagcagcagcatgaccgagagcagcccccggagcatgcttggctatgacagggacgggcgccaggtcgcatccgattctcacgttgtgccaagcgttccacaagatgtgcctgccttcgtgaggcctgcccgagtagagccaacggaccgagacggcggggaggctggcgagtcatccgcagagccaccgccctccgatatggggaccgtgggagggcaggctagtcacccccaaaccctgggagccagggcactcggctccccaaggaagcggcctgaacagcaggacgtttcctcacctgccaagacagttgggaggttttcggtggtatctacacaggacgaatggacactggcttccccgcatagtctgaggtacagcgcgccaccagacgtgtacctcgatgaggcaccatcctcacctgacgtgaaacttgcggttagaagagcgcaaactgcttccagtatcgaagttggcgtcggagagccggtgtccagtgatagtggtgatgagggaccgcgagcaagacccccagtccagaagcaggcttccctccctgtgagcgggtctgtggccggtgacttcgtgaagaaagctacatcgtgccgcggccttttagggccaagtctcggcccagagaccccctccagagtcggcatgaaagtgcccaccattagcgttaccagtttccacagtcagtcaagctacattagctccgataatgatagtgaattagaggatgccgatattaaaaaagagctgcagtctctgcgtgagaagcacctgaaggaaattagcgagctccagtctcagcagaaacaagagattgaggctctgtacagacgactgggtaagccactgcctccgaatgtgggattctttcacacagcccctcctacagggcgacggcgcaaaacatccaaatccaaactgaaagcaggcaagctactgaatcctcttgtgaggcagcttaaagtcgtggcctcatctacaggtcatctggcagatagctcaaggggtccacctgcaaaggatcccaaacccgtgtggggtagtctgcagactgcccgcgcatag

SEQ ID NO: 310828 - DNA, 1092 bp, Artificial Sequence
  derived and/or modified sequence
atggaacaaggtacatcctcgtcaatgaccgaatcatcccctcgatcgatgttaggatatgacagagatggcagacaggtggctagcgactcccatgtcgtcccatcggtgccacaggacgttcccgcttttgtacgccctgccagggtggaaccaacagatcgggatggtggcgaagcaggggagtcctcggctgaaccccctccttccgacatgggcactgtgggaggccaggcctcgcacccacagacactgggagcgagggcactagggtctcctcgcaaacgtcctgaacaacaggatgtgtcatctcccgctaagactgtcggccgattctcagtagtcagtactcaagacgaatggaccctggcctccccacacagcctccggtactctgcgcctcctgacgtctacttggatgaagcacctagttctcccgatgttaagcttgcagtgcggagggcccagaccgcatcctcaattgaggtgggggtcggagaaccggtcagctcagacagcggagacgagggcccaagggcccgacctcccgtccagaagcaggcttcgttacctgtttccgggtctgttgcgggtgactttgttaaaaaagccacgtcgtgtcggggattgctagggccaagcctgggtcctgagactccttcacgggttgggatgaaagtgcccacgatctcggtcacttcattccattctcagtcatcttacataagttctgataacgatagtgaattggaagatgccgacatcaagaaggagctccagagcctacgcgagaaacatctcaaagagattagcgagctgcagtcccagcagaaacaggagattgaggccttgtaccgcaggctcgggaaacccttgccccctaacgtaggtttcttccacactgcgcctcctaccgggagaaggagaaagaccagcaagtcaaaattaaaggccggtaagctgctcaatcccctggtccgccagctgaaggtggtggcctccagtacaggccacctggcagatagtagtcgaggccctccagccaaagatccgaagccggtttggggatcacttcaaacagcacgggcatag

SEQ ID NO: 310829 - protein, 260 aa, Artificial Sequence
  derived and/or modified sequence
MRSLATEFLRVTKQYLPHVARLCLISTFLEDGIRMWFQWSEQRDYIDTTWNCGYLLASSFVFLNLLGQLTGCVLVLSRNFVQYACFGLFGIIALQTIAYSILWDLKFLMRNLALGGGLLLLLAESRSEGKSMFAGVPTMRESSPKQYMQLGGRVLLVLMFMTLLHFDASFFSIVQNIVGTALMILVAIGFKTKLAALTLVVWLFAINVYFNAFWTIPVYKPMHDFLKYDFFQTMSVIGGLLLVVALGPGGVSMDEKKKEW

SEQ ID NO: 310830 - DNA, 783 bp, Artificial Sequence
  derived and/or modified sequence
atgagaagcctggccaccgagttcctgagagtgaccaagcagtacctgccccacgtggccagactgtgcctgatcagcaccttcctggaggacggcatcagaatgtggttccagtggagcgagcagagagactacatcgacaccacctggaactgcggctacctgctggccagcagcttcgtgttcctgaacctgctgggccagctgaccggctgcgtgctggtgctgagcagaaacttcgtgcagtacgcctgcttcggcctgttcggcatcatcgccctgcagaccatcgcctacagcatcctgtgggacctgaagttcctgatgagaaacctggccctgggcggcggcctgctgctgctgctggccgagagcagaagcgagggcaagagcatgttcgccggcgtgcccaccatgagagagagcagccccaagcagtacatgcagctgggcggcagagtgctgctggtgctgatgttcatgaccctgctgcacttcgacgccagcttcttcagcatcgtgcagaacatcgtgggcaccgccctgatgatcctggtggccatcggcttcaagaccaagctggccgccctgaccctggtggtgtggctgttcgccatcaacgtgtacttcaacgccttctggaccatccccgtgtacaagcccatgcacgacttcctgaagtacgacttcttccagaccatgagcgtgatcggcggcctgctgctggtggtggccctgggccccggcggcgtgagcatggacgagaagaagaaggagtggtag

SEQ ID NO: 310831 - DNA, 783 bp, Artificial Sequence
  derived and/or modified sequence
atgcgctcattagcaacagagtttttgcgcgtcacgaagcagtacctcccccacgtggctagattgtgcctgatttctaccttcttggaggatgggatccgcatgtggttccagtggtctgaacagagggactacatcgataccacatggaactgcggctatctgctggcttcttctttcgtctttttgaaccttctcggccaactcactgggtgcgtgcttgtcctgagtcgcaactttgtgcaatatgcctgcttcggcctgttcggtatcatcgcgttacagaccatagcatatagtatcctttgggatcttaaatttctcatgcggaaccttgccctgggcggaggtcttctgcttttattggcagaatcccggagcgagggaaagtcaatgtttgccggtgtccctaccatgcgagagagttcccccaaacagtacatgcagcttggcgggcgcgtgctgcttgtcctcatgtttatgactctgctgcatttcgacgcgagttttttttcaatcgtacagaatatagtcggcacagccctgatgatcctggtggccataggcttcaaaaccaagctggcagccctgactctcgtggtttggttgttcgcaattaatgtgtattttaacgcattctggaccatccccgtgtataagccaatgcatgattttctaaagtatgacttcttccagacaatgtccgtcataggcggccttctcctggtggtcgctctaggccctggcggcgtgagtatggatgaaaaaaagaaagaatggtag

SEQ ID NO: 310832 - DNA, 783 bp, Artificial Sequence
  derived and/or modified sequence
atgaggagcctggccacagagttcctgcgggtgaccaagcagtacctgccccacgtggcccggctgtgcctgatcagcaccttcctggaggatggcatccgcatgtggttccagtggagcgagcagagggactacatcgacaccacctggaactgtggctacctgctggccagcagctttgtgttcctgaacctgctgggccagctgaccggctgtgtgctggtgctgagcaggaactttgtgcagtatgcctgcttcggcctgtttggcatcatcgccctgcagaccatcgcctacagcatcctgtgggacctgaagttcctgatgaggaacctggccctgggcggcggcctgctgctgctgctggccgagagccgctctgagggcaagtccatgtttgctggggtgcccaccatgagggagagcagccccaagcagtacatgcagctgggcggccgggtgctgctggtgctgatgttcatgaccctgctgcactttgatgccagcttcttcagcatcgtgcagaacatcgtgggcacagccctgatgatcctggtggccatcggcttcaagaccaagctggccgccctgaccctggtggtgtggctgtttgccatcaacgtgtacttcaatgccttctggaccatccctgtgtacaagcccatgcatgacttcctgaagtatgacttcttccagaccatgtctgtgattggaggcctgctgctggtggtggccctgggccctgggggcgtgtccatggatgagaagaagaaggagtggtag

SEQ ID NO: 310833 - DNA, 783 bp, Artificial Sequence
  derived and/or modified sequence
atgcggagcctggccaccgagttcctgcgggtgaccaagcagtaccttccccacgtagcgagactttgtcttattagtacattcttggaggatggtatcaggatgtggttccagtggagtgaacagcgggactatatcgatacgacttggaactgcgggtatctcttggcatccagcttcgtgttcctgaatctccttggccaactgacaggatgcgtgttggtgctttcacggaactttgtgcagtacgcctgctttggactgtttggtattatagccctgcagacaatcgcatattccatactgtgggaccttaagttcctgatgcgaaatctggcgctgggcggggggttactcctccttctggctgagtcccggtcagagggcaagtccatgtttgcaggagtgcccaccatgagggaatccagtcctaagcagtatatgcagcttggcggtcgggtcctcttggtcttaatgttcatgacccttcttcatttcgatgcatcattcttctcaattgttcagaacattgtaggcactgctctcatgattctggtggccataggctttaagactaagcttgctgcccttacgctggtggtatggctcttcgccattaacgtctacttcaatgccttttggactatcccagtctacaagcctatgcacgacttcctgaaatatgatttctttcagacgatgagcgttattggaggcttactcctagtggtggctctgggcccaggtggcgtctctatggatgaaaagaagaaagagtggtag

SEQ ID NO: 310834 - DNA, 783 bp, Artificial Sequence
  derived and/or modified sequence
atgcgctccttggccactgagttccttcgggtcacaaagcagtacctgcctcatgttgcgcgattatgtctgatctccactttcttggaggacggaatccggatgtggttccagtggtctgagcagagagactacatagacactacttggaactgcggttatctgctcgcaagttcatttgtctttttaaacttgctggggcaactcacaggctgcgtgctagtgctgagtcgcaacttcgtccaatacgcctgtttcggcttgtttggcatcattgcactgcaaacaatagcctattctatattgtgggacttgaaattcttgatgagaaacctggctcttggaggtggtctgctcttactcctggccgagagccgctccgagggtaaatccatgttcgcaggcgtccctaccatgcgggaaagctctccaaagcagtacatgcagctgggagggagagtgttgttggtattaatgttcatgaccttgcttcacttcgacgcctcctttttttcgattgtgcaaaatatcgtgggaactgccctcatgatcctcgtggccattggttttaagaccaaattggcagccctgaccctggtggtgtggctgttcgccattaacgtgtactttaatgccttctggacgatccccgtgtataagcctatgcacgacttcttgaaatacgatttttttcagactatgagtgtcatcggcggactgcttctcgtggtcgctctagggccaggcggtgtgtcaatggatgagaaaaagaaggaatggtag

SEQ ID NO: 310835 - DNA, 1465 bp, Artificial Sequence
  derived and/or modified sequence
ggcgtttggagctgctggggggtccccgcacgtttttcctctcactggggctcccggaggcgggctgggagctcggggacgaacgggggccgggggtcctcccagaggaaagggggcgcgctggcgtgcgccccagctacaggaagccacagcaccttttccttttctctttcccagatgtgctggactcttggggtccctttgaccctgtctgcgtctccctccccgtttggactctgccctgggctggattgagtggggacctgtacacagcctgggaggaggggaagcctatctccctgatagtctccttccagaagtgtccaggtggcattctgagcaacagaaaacaagagcaaaactgaagtgacaagatttgaccagaaagtgtgggctgctgaaagcaagacctaatgtgaagagaaagtggagttttctgtgtggcgtgggagctgcaggtggctgtgacagtgatcactggatgcccaggaagtcatctcaggcccctcagatgctgtcactgcttatgaaccatatcctgcttgatggcgcggttctcggagagacttaatgagaagcttggccacagagttcctccgtgtcacaaagcagtacctgccccacgtggcgcgcctctgtctgatcagcaccttcctggaggacggcatccgtatgtggttccagtggagcgagcagcgcgactacatcgacaccacctggaactgcggctacctgctggcctcgtccttcgtcttcctcaacttgctgggacagctgactggctgcgtcctggtgttgagcaggaacttcgtgcagtacgcctgcttcgggctctttggaatcatagctctgcagacgattgcctacagcattttatgggacttgaagtttttgatgaggaacctggccctgggaggaggcctgttgctgctcctagcagaatcccgttctgaagggaagagcatgtttgcgggcgtccccaccatgcgtgagagctcccccaaacagtacatgcagctcggaggcagggtcttgctggttctgatgttcatgaccctccttcactttgacgccagcttcttttctattgtccagaacatcgtgggcacagctctgatgattttagtggccattggttttaaaaccaagctggctgctttgactcttgttgtgtggctctttgccatcaacgtatatttcaacgccttctggaccattccagtctacaagcccatgcatgacttcctgaaatacgacttcttccagaccatgtcggtgattgggggcttgctcctggtggtggccctgggccctgggggtgtctccatggatgagaagaagaaggagtggtaacagtcacagatccctacctgcctggctaagacccgtggccgtcaaggactggttcggggtggattcaacaaaactgccagcttttatgtatcctcttcccttcccctccctt

SEQ ID NO: 310836 - DNA, 1018 bp, Artificial Sequence
  derived and/or modified sequence
cttcctgtggaggccgcagcgggtgcgggcgccgacgggcgagagccagcgagcgagcgagcgagccgagccgagcctcccgccgtcgccatgggccagaacgacctgatgggcacggccgaggacttcgccgaccagttcctccgtgtcacaaagcagtacctgccccacgtggcgcgcctctgtctgatcagcaccttcctggaggacggcatccgtatgtggttccagtggagcgagcagcgcgactacatcgacaccacctggaactgcggctacctgctggcctcgtccttcgtcttcctcaacttgctgggacagctgactggctgcgtcctggtgttgagcaggaacttcgtgcagtacgcctgcttcgggctctttggaatcatagctctgcagacgattgcctacagcattttatgggacttgaagtttttgatgagattgtccagaacatcgtgggcacagctctgatgattttagtggccattggttttaaaaccaagctggctgctttgactcttgttgtgtggctctttgccatcaacgtatatttcaacgccttctggaccattccagtctacaagcccatgcatgacttcctgaaatacgacttcttccagaccatgtcggtgattgggggcttgctcctggtggtggccctgggccctgggggtgtctccatggatgagaagaagaaggagtggtaacagtcacagatccctacctgcctggctaagacccgtggccgtcaaggactggttcggggtggattcaacaaaactgccagcttttatgtatcctcttcccttcccctcccttggtaaaggcacagatgttttgagaactttatttgcagagacacctgagaatcgatggctcagtctgctctggagccacagtctggcgtctgacccttcagtgcaggccagcctggcagctggaagcctcccccacgccgaggctttggagtgaacagcccgcttggctgtggcatctcagtcctatttttgag

SEQ ID NO: 310837 - protein, 635 aa, Artificial Sequence
  derived and/or modified sequence
MASSGMADSANHLPFFFGNITREEAEDYLVQGGMSDGLYLLRQSRNYLGGFALSVAHGRKAHHYTIERELNGTYAIAGGRTHASPADLCHYHSQESDGLVCLLKKPFNRPQGVQPKTGPFEDLKENLIREYVKQTWNLQGQALEQAIISQKPQLEKLIATTAHEKMPWFHGKISREESEQIVLIGSKTNGKFLIRARDNNGSYALCLLHEGKVLHYRIDKDKTGKLSIPEGKKFDTLWQLVEHYSYKADGLLRVLTVPCQKIGTQGNVNFGGRPQLPGSHPATWSAGGIISRIKSYSFPKPGHRKSSPAQGNRQESTVSFNPYEPELAPWAADKGPQREALPMDTEVYESPYADPEEIRPKEVYLDRKLLTLEDKELGSGNFGTVKKGYYQMKKVVKTVAVKILKNEANDPALKDELLAEANVMQQLDNPYIVRMIGICEAESWMLVMEMAELGPLNKYLQQNRHVKDKNIIELVHQVSMGMKYLEESNFVHRDLAARNVLLVTQHYAKISDFGLSKALRADENYYKAQTHGKWPVKWYAPECINYYKFSSKSDVWSFGVLMWEAFSYGQKPYRGMKGSEVTAMLEKGERMGCPAGCPREMYDLMNLCWTYDVENRPGFAAVELRLRNYYYDVVN

SEQ ID NO: 310838 - DNA, 1908 bp, Artificial Sequence
  derived and/or modified sequence
atggccagcagcggcatggccgacagcgccaaccacctgcccttcttcttcggcaacatcaccagagaggaggccgaggactacctggtgcagggcggcatgagcgacggcctgtacctgctgagacagagcagaaactacctgggcggcttcgccctgagcgtggcccacggcagaaaggcccaccactacaccatcgagagagagctgaacggcacctacgccatcgccggcggcagaacccacgccagccccgccgacctgtgccactaccacagccaggagagcgacggcctggtgtgcctgctgaagaagcccttcaacagaccccagggcgtgcagcccaagaccggccccttcgaggacctgaaggagaacctgatcagagagtacgtgaagcagacctggaacctgcagggccaggccctggagcaggccatcatcagccagaagccccagctggagaagctgatcgccaccaccgcccacgagaagatgccctggttccacggcaagatcagcagagaggagagcgagcagatcgtgctgatcggcagcaagaccaacggcaagttcctgatcagagccagagacaacaacggcagctacgccctgtgcctgctgcacgagggcaaggtgctgcactacagaatcgacaaggacaagaccggcaagctgagcatccccgagggcaagaagttcgacaccctgtggcagctggtggagcactacagctacaaggccgacggcctgctgagagtgctgaccgtgccctgccagaagatcggcacccagggcaacgtgaacttcggcggcagaccccagctgcccggcagccaccccgccacctggagcgccggcggcatcatcagcagaatcaagagctacagcttccccaagcccggccacagaaagagcagccccgcccagggcaacagacaggagagcaccgtgagcttcaacccctacgagcccgagctggccccctgggccgccgacaagggcccccagagagaggccctgcccatggacaccgaggtgtacgagagcccctacgccgaccccgaggagatcagacccaaggaggtgtacctggacagaaagctgctgaccctggaggacaaggagctgggcagcggcaacttcggcaccgtgaagaagggctactaccagatgaagaaggtggtgaagaccgtggccgtgaagatcctgaagaacgaggccaacgaccccgccctgaaggacgagctgctggccgaggccaacgtgatgcagcagctggacaacccctacatcgtgagaatgatcggcatctgcgaggccgagagctggatgctggtgatggagatggccgagctgggccccctgaacaagtacctgcagcagaacagacacgtgaaggacaagaacatcatcgagctggtgcaccaggtgagcatgggcatgaagtacctggaggagagcaacttcgtgcacagagacctggccgccagaaacgtgctgctggtgacccagcactacgccaagatcagcgacttcggcctgagcaaggccctgagagccgacgagaactactacaaggcccagacccacggcaagtggcccgtgaagtggtacgcccccgagtgcatcaactactacaagttcagcagcaagagcgacgtgtggagcttcggcgtgctgatgtgggaggccttcagctacggccagaagccctacagaggcatgaagggcagcgaggtgaccgccatgctggagaagggcgagagaatgggctgccccgccggctgccccagagagatgtacgacctgatgaacctgtgctggacctacgacgtggagaacagacccggcttcgccgccgtggagctgagactgagaaactactactacgacgtggtgaactag

SEQ ID NO: 310839 - DNA, 1908 bp, Artificial Sequence
  derived and/or modified sequence
atggctagctctggaatggcagactctgctaatcacctccctttctttttcggcaacatcaccagagaggaggcggaggattatctagtacagggcggaatgtccgatggactttacctgttacggcagtctcgcaattaccttggcggattcgcgctctccgtggcgcatggacggaaggcccaccattacacgatcgagagggagcttaatgggacctacgccatcgccggtggccggacccacgctagccccgctgatctttgccattaccacagccaagagagtgacggactagtctgtctcctcaaaaaacctttcaacaggccacaaggcgttcagcccaaaactggaccattcgaagaccttaaggaaaacctcataagagaatacgttaagcagacctggaatttgcagggacaagccctcgagcaggcaataatttctcaaaagccacaactggagaagttgattgccactaccgcacacgagaagatgccttggttccatggcaagatttcacgggaggagagtgagcaaatagttttgatcggatccaagacaaatggtaaattcctgatacgggccagggacaataacggatcctacgcactgtgcttattgcacgagggcaaggtgctccactatcgcattgacaaggataaaacaggcaagctttctattcccgagggaaagaagtttgataccctgtggcaactcgtggagcattactcctacaaagcagacggtctcttgcgggtgctgaccgtgccatgccagaaaattggtacacaggggaatgtgaattttggcggaagacctcaactgcctggtagtcaccccgccacttggtccgcaggtggtattattagtcggataaagagctatagcttccctaagcccggccatcgaaagtcctctccagctcagggcaacaggcaggagagtacggtgtctttcaatccctacgaaccagaacttgcaccctgggccgcggacaagggccctcagcgagaggctctcccaatggacaccgaggtgtacgagagcccgtatgcagatcctgaggagatcaggcccaaggaggtctatcttgaccgcaagcttttgactctggaagacaaagagctaggatctggtaacttcggcaccgtaaagaagggctactatcagatgaagaaggttgttaagaccgtggccgtcaagatcctgaaaaacgaagccaatgatcccgctttgaaggacgaactcttagccgaggccaacgtcatgcagcagcttgataacccatacattgttcgcatgattggtatctgcgaggcagaatcttggatgctggtgatggaaatggctgagctggggccattaaataaatacctgcagcaaaatcggcatgtgaaggataagaacatcatcgagctggtccatcaggtgtcaatgggtatgaaatatctggaagaatccaactttgtacaccgggacctggcggcccggaacgtgcttctggtgacacagcattacgccaagatctccgattttggtttaagtaaagctctgcgcgccgatgagaattattacaaagctcaaacccatggaaagtggcccgtgaagtggtacgccccagaatgtataaattattacaagttctcatccaagagcgacgtatggtcattcggagtgctgatgtgggaagccttctcttacgggcaaaagccataccgtggaatgaaaggctccgaggtcaccgccatgctcgaaaaaggcgaacgtatgggctgccccgcgggatgcccacgggaaatgtatgacctgatgaatctgtgctggacatatgatgtggaaaacaggcccggtttcgctgctgtggagctccgccttagaaactactactacgatgttgtgaactag

SEQ ID NO: 310840 - DNA, 1908 bp, Artificial Sequence
  derived and/or modified sequence
atggctagctcggggatggccgactcagccaaccacttgcctttcttcttcggaaatatcacacgtgaggaagcggaggattaccttgtgcagggcgggatgtcagacggactttacttgctgagacaatcacggaactacttaggcggcttcgcactctccgtggctcacggaaggaaagcacaccattacactatagagcgggaattgaacggtacatacgcaatcgccggcggcaggactcatgctagcccagctgatctgtgtcattatcatagccaagagtctgatggcctagtgtgcctactcaagaaacccttcaatcgtccacagggagtgcagcctaaaactggcccgtttgaggacctgaaggagaatctgattcgagaatatgttaaacagacatggaatctgcaggggcaggcgcttgagcaggcgatcataagtcagaagccccagctcgagaaactcatagcgaccaccgcgcacgaaaaaatgccctggtttcatggaaaaatcagtagagaggaatctgaacagattgtactgattggcagtaaaacaaacggaaaatttttgatcagagcaagggataataacgggtcctacgccttatgtttgttgcatgagggcaaagtcctgcactatcggatcgacaaagataagactggcaaactcagtatcccagagggtaagaaattcgacaccctgtggcagctagtggagcactattcctacaaggcagacggactactccgtgtcctgaccgtgccatgccagaagataggtacacagggcaacgtcaatttcggcggacgcccacagctacccggctctcacccggccacctggtccgctggaggtatcatctccaggattaagagctactcattccccaaacccggccaccggaagtcaagtcctgcgcagggaaatcgccaagaatccactgtgtcctttaatccttacgaaccagagctggcaccttgggccgcggacaagggacctcaacgtgaggcactgccaatggatacggaagtatacgaatctccctacgcggacccagaagagatccgcccgaaagaagtctacctcgatcgtaagctcctgacactggaagataaagaacttggcagtggaaacttcggcacagtcaaaaaggggtactatcagatgaagaaggtggtgaagactgtggccgtgaaaattctcaagaacgaggcgaatgaccccgccctgaaagatgagctgctggccgaagccaacgtaatgcaacagctggacaacccctatatagtacgcatgatcggaatttgcgaggccgaaagttggatgctcgttatggagatggccgaactggggcctttgaataagtacttgcagcaaaataggcacgtcaaagacaagaatatcattgagcttgttcatcaggtgtcaatgggtatgaaatatttggaagaatctaattttgttcatcgggatctagctgctcgaaatgtacttttagtgactcagcactacgctaagatcagcgattttgggctgagtaaggccctcagggccgacgaaaactattacaaggcgcagacacatggtaagtggcctgtgaagtggtacgcacctgaatgtatcaattattacaaattctcatctaagtcggatgtgtggagcttcggtgtgctgatgtgggaagctttctcgtacggccaaaagccataccgcggaatgaaggggtccgaagtaacggccatgctcgagaaaggagaaaggatgggctgtcctgccggttgccccagggagatgtacgatcttatgaatctatgctggacgtacgacgtggagaatcgccctggcttcgccgccgtcgaattaaggctgaggaactattactacgacgttgtcaattag

SEQ ID NO: 310841 - DNA, 1908 bp, Artificial Sequence
  derived and/or modified sequence
atggccagcagcggcatggctgacagcgccaaccacctgcccttcttctttggaaacatcacccgggaggaggccgaggactacctggtgcagggcggcatgtctgatggcctgtacctgctgcggcagagcaggaactacctgggcggctttgccctgtctgtggcccacggcaggaaggcccaccactacaccatcgagcgggagctgaatggcacctacgccatcgccggcggccgcacccacgccagccctgctgacctgtgccactaccacagccaggagagtgatggcctggtgtgcctgctgaagaagcccttcaaccggccccagggcgtgcagcccaagacaggcccctttgaggacctgaaggaaaatctcatccgggagtatgtgaagcagacctggaacctgcagggccaggccctggagcaggccatcatcagccagaagccccagctggagaagctgattgccaccacagcccacgagaagatgccctggttccacggcaagatcagccgggaggagagcgagcagatcgtgctgattggcagcaagaccaacgggaagttcctgatccgggcccgggacaacaacggcagctatgccctgtgcctgctgcacgagggcaaggtgctgcactacagaattgacaaggacaagacaggcaagctgagcatccctgagggcaagaagtttgacaccctgtggcagctggtggagcactacagctacaaggcagatggcctgctgcgggtgctgactgtgccctgccagaagattggcacccagggcaatgtgaactttggaggccggccccagctgcccggcagccacccagccacctggagcgctgggggcatcatcagccgcatcaagagctacagcttccccaagccaggccacaggaagagcagccctgcccagggcaaccggcaggagagcacagtgtccttcaacccctatgagcctgagctggccccctgggccgctgacaagggcccccagcgggaggccctgcccatggacacagaggtgtatgagagcccctatgctgaccctgaggagatccggcccaaggaggtgtacctggacaggaagctgctgaccctggaggacaaggagctgggcagcggcaactttggcaccgtgaagaagggctactaccagatgaagaaggtggtgaagacagtggccgtgaagatcctgaagaatgaggccaatgaccctgccctgaaggatgagctgctggccgaggccaacgtgatgcagcagctggacaacccctacatcgtgaggatgattggcatctgtgaggccgagagctggatgctggtgatggagatggccgagctgggccccctgaacaagtacctgcagcagaacagacatgtgaaggacaagaacatcatcgagctggtgcaccaggtgtccatgggcatgaagtacctggaggagagcaactttgtgcaccgggacctggccgccagaaatgtgctgctggtgacccagcactacgccaagatcagtgactttggcctgagcaaggccctgcgggcagatgagaactactacaaggcccagacccacggcaagtggcctgtgaagtggtacgcccctgagtgcatcaactactacaagttcagcagcaagagtgatgtgtggagctttggagtgctgatgtgggaggccttctcctatggccagaagccctaccggggcatgaagggcagcgaggtgacagccatgctggagaagggggagaggatgggctgcccagctggctgcccccgggagatgtatgacctgatgaacctgtgctggacctatgatgtggagaacagacctggctttgctgctgtggagctgcggctgaggaactactactatgatgtggtgaactag

SEQ ID NO: 310842 - DNA, 1908 bp, Artificial Sequence
  derived and/or modified sequence
atggccagcagcggcatggccgacagcgccaaccacctgcccttctttttcggcaacattacaagggaggaggccgaagattatcttgttcaggggggcatgtccgatggactgtatctgttgcgtcagagcaggaactacctcggtggattcgcattgtccgtggcccacgggcgcaaggctcatcactataccattgaacgcgagttaaatggaacatacgctattgccgggggcaggacacatgcttcccctgccgacctgtgtcattaccacagtcaagagtctgatggccttgtctgtctgcttaagaagccctttaaccgcccccagggcgtccagcctaagacaggacccttcgaagacctcaaggaaaacctaatccgcgagtacgtcaaacagacctggaaccttcaggggcaggcgttggaacaagctatcatcagtcagaagccccagttggagaagctgatcgcaactaccgcccacgagaaaatgccgtggttccatggtaagatctcccgtgaagaatcggagcagatcgtgctgatcggaagtaagacaaacgggaagttcctcatcagggcacgggacaacaatggttcctatgcattatgtttgctccatgaggggaaagtgcttcactatcgcattgataaagacaagacaggtaagctgtctatcccggaaggcaaaaagttcgataccctctggcagttggtcgaacattacagctacaaggctgatggactcttgcgcgtgctcacagtcccttgtcagaaaatcggcacacagggaaacgttaacttcgggggacgaccgcagctcccaggaagccaccccgctacatggagcgcaggagggattatcagcagaattaagtcatacagctttccgaaacctgggcatcggaagagtagtcctgcccagggaaaccgccaggaatctaccgtctcgtttaatccatacgaaccagaattggctccgtgggcagctgataaaggacctcagagggaagccctccccatggatactgaggtatatgaaagtccttatgccgatcctgaggagattcggcccaaggaggtctacctggatcgaaaactgctgactctggaagacaaggagctagggtctggaaacttcggtaccgtaaaaaagggttattatcagatgaagaaggtggttaagaccgtggcagttaagattctcaagaacgaggccaacgacccggcattaaaggatgagcttctcgccgaagccaatgtgatgcagcagctcgataacccatacatagtgcgcatgatcggtatctgtgaagctgagtcctggatgctcgtgatggaaatggccgaactggggcccctgaataagtacctgcagcagaataggcacgttaaggacaagaatataattgagctggtccaccaggtgtcaatggggatgaaatacttggaggaaagcaattttgtgcatcgcgatctggctgctcgcaacgttctactcgtgactcagcattacgcgaaaatatctgactttggcctttctaaggccctcagggctgacgaaaactactataaggcacaaacacacggcaaatggccagtcaagtggtacgccccggagtgcattaactattataaattctcttctaagagcgatgtgtggagcttcggagtactaatgtgggaggctttctcctacggacagaaaccttaccggggcatgaaggggtccgaggtcaccgcaatgctggagaaaggcgagcgcatgggctgccctgctgggtgtcctcgggaaatgtacgacctaatgaacctctgctggacatacgacgtggagaatagacctgggttcgccgctgtggagctgagattgagaaactattattacgatgtggtgaactag

SEQ ID NO: 310843 - DNA, 1908 bp, Artificial Sequence
  derived and/or modified sequence
atggccagcagcggcatggccgacagcgccaaccacctgcccttctttttcggaaacatcacccgcgaagaagctgaagactacctcgttcagggtggcatgtccgacgggctgtatctgctgcggcaatctcgaaattatttaggtggcttcgcactctccgtagctcacgggcggaaagcccatcattatacgattgagagagagctcaatggcacatacgcgatagcaggtggccggactcatgcatccccagcagatctttgtcactatcactcacaagagagtgatggcctggtctgtttgctaaagaagcccttcaacaggccgcagggtgtacagcctaagaccggcccttttgaggacttaaaagagaacttaattcgcgagtatgtcaaacagacttggaatttgcagggccaagcattggaacaagctatcatttcgcaaaaaccccagctggagaaactgatagcaactacagcccacgagaagatgccgtggttccatggaaaaatctcacgggaggagagcgaacagatcgtgttaataggaagtaaaacaaatggcaaattcctaattagagcccgggacaataatggcagctacgccttatgcctgctacacgaaggcaaggtgctccactacaggatcgataaggataagacaggtaaactgagtatccctgagggcaaaaagttcgataccctgtggcagctggtcgaacattattcctacaaggccgatggtttacttagggttctgactgttccctgtcagaagattgggactcaagggaatgtcaatttcgggggtagaccccagttgcccggctcccatccggccacctggtccgctgggggcatcatctcccggatcaagtcttacagttttcccaaaccaggccaccgtaagtcaagtcctgcacagggcaatcgacaggagtctactgtgtccttcaacccttatgagcctgagctcgctccgtgggcggcggataagggtcctcagcgggaggcgctgccgatggacaccgaagtgtacgagtccccttatgccgaccctgaggagatccggccaaaggaggtatatcttgatcgaaaactgcttacactggaagacaaggagctgggtagcggcaacttcggcaccgttaagaagggctactaccagatgaagaaggtggtgaagacagttgccgtgaagatcctgaaaaatgaagcaaatgacccggccctcaaggacgaattgctggccgaggcaaacgttatgcagcagctagacaacccgtatatcgtgagaatgattggtatctgcgaggccgaatcatggatgttggtgatggagatggcggagctgggtccgttaaacaaatacctgcagcagaacagacacgtgaaggataaaaacattattgagctggtccaccaggtgagcatgggtatgaaatacctagaggagtccaactttgtccatcgagacctcgccgccagaaacgtgctgcttgtgacgcaacactatgctaaaatatctgacttcggcctgtccaaggccctacgggcggatgagaactattacaaggcccagactcatgggaaatggccagtaaaatggtatgcccccgagtgcatcaattactataaattctcgtctaagagcgacgtgtggagctttggcgtcctgatgtgggaagcgttctcctacggccaaaaaccctaccgcggcatgaaggggtctgaagtgaccgcaatgctggagaagggtgagcgcatgggatgccctgcgggctgcccaagggagatgtacgatcttatgaacctctgctggacttatgacgttgagaatcgacctgggtttgccgccgttgagctaaggttgagaaattactactatgacgttgtcaattag

SEQ ID NO: 310844 - DNA, 1908 bp, Artificial Sequence
  derived and/or modified sequence
atggcctcctcaggaatggccgacagcgcaaatcacctgccatttttcttcggtaacatcactagagaggaggcggaggactatctcgtgcaagggggaatgtccgacgggctctacctgctgagacagtctagaaattatctgggaggtttcgcccttagcgtggcccatggacgtaaagcccaccactatactattgagcgagagctgaatggaacgtatgcaattgctggcggacgcacccatgcttccccggcagacctatgtcattatcacagtcaggagagcgacggcctggtgtgcctgctgaagaaaccatttaatcgcccacagggggtccagcccaaaactggcccattcgaagacctcaaggagaacctcatccgggagtacgtcaaacagacatggaaccttcagggccaagccctggagcaagccattatcagccagaaaccccaactggagaagctgatcgcaacaacggcgcacgaaaagatgccctggttccatggaaaaattagccgggaagagagtgagcagatcgtccttattgggagcaagacaaacggcaagttccttatcagagcgagggacaacaatgggtcctatgcgttgtgcctgttgcacgaagggaaggtgttacactaccgcatcgacaaagacaagactggcaagctctccattcctgaaggtaaaaagtttgatactctctggcagctcgtggagcactactcttataaggcagacggccttcttcgcgttctgactgttccttgccaaaagataggcacccagggcaacgtgaatttcggtggacgcccacagctcccgggaagtcaccccgcaacctggtcagcaggcggtatcatttcccgtattaagtcatattcctttcccaaacctggtcaccgtaagtcaagtcccgcacaggggaatcggcaggaatcgacggtcagtttcaatccttatgagcccgaactggccccttgggctgcagacaagggcccacaaagagaagcgctgcctatggacacagaggtatatgagtccccctacgctgatcctgaagaaatccgtccaaaggaggtgtatcttgataggaaacttctaaccctcgaagacaaggaattaggatcagggaatttcggtactgtgaaaaaagggtattaccagatgaaaaaagtggttaagactgttgcggtgaagatcttgaagaacgaggctaacgatcctgccctgaaagacgaattactggcagaggctaacgttatgcagcaattagataatccttacattgttagaatgattggaatttgcgaggccgagtcctggatgttagtgatggagatggccgaactcgggcctcttaacaagtatctgcaacagaacagacacgtgaaagacaagaatataatcgaactcgtgcaccaagtgtctatggggatgaaatacctggaggagtccaactttgtccatcgtgacctggctgcacgcaacgtgctgctggttactcagcattacgcaaaaatttctgatttcgggctgagtaaagccctgcgcgctgatgaaaattactataaagcccagactcatggcaagtggcccgtaaagtggtatgctcccgaatgcatcaactactataaattcagctccaaatctgacgtctggagttttggcgtcttgatgtgggaagctttctcatacgggcaaaagccttataggggaatgaaggggtcagaagttacagccatgctggagaagggggagcggatgggctgcccagctgggtgtccacgtgagatgtacgatttgatgaatctgtgttggacttacgacgttgaaaatcggcctggtttcgctgctgtcgaattgcgattgagaaattattattacgacgtggttaactag

SEQ ID NO: 310845 - DNA, 1908 bp, Artificial Sequence
  derived and/or modified sequence
atggctagtagtggaatggctgactctgcaaatcacctgccctttttcttcgggaatattactcgagaagaggccgaggattatctggtccagggtggaatgagtgacggcttgtatctattgcggcaaagccgcaactatttgggtgggttcgccctctccgtggcccatggcaggaaggctcatcattatacaattgagcgagagttgaacggcacatatgccatagctggaggcaggacacacgccagtcccgctgacctttgccactatcattcacaggaatctgacggtctcgtttgcctgcttaaaaaaccttttaaccgccctcagggagttcagcctaaaacaggccctttcgaggacttaaaagagaaccttatccgcgaatatgttaagcaaacgtggaacttacaagggcaggctctagaacaagccatcatctcccagaagccacaactggagaaactgattgccaccaccgcccatgagaaaatgccctggttccacggcaaaatttctcgggaggaatcagagcaaatcgtcctgataggatcaaagacaaatggcaagtttttaatcagggctcgcgataacaatggcagttatgcattatgcttgctgcacgagggcaaggttctacattacagaatcgacaaagacaaaacggggaagctgtccattcccgagggcaaaaagtttgataccttgtggcagctggttgaacattacagctacaaagctgatggcttgctcagagttctaacagtcccctgccaaaagattgggacacaaggcaatgtcaacttcgggggtaggccccagttgcctgggtcccatccagccacctggtccgcaggaggcatcatttcgcgcattaagagctacagttttcctaaaccgggtcaccgaaagagctccccagcgcaggggaaccggcaagaatccaccgtgtcctttaacccttacgaacccgagttggctccttgggcagccgataagggacctcaacgcgaggcactccccatggacacagaagtgtacgagagcccctacgctgaccccgaggagatcagacccaaggaggtatacctcgatcggaaactgctgacactcgaggacaaggaactcgggtccggcaactttggcaccgtcaagaaggggtactatcagatgaagaaagtcgtgaagaccgtggctgtgaagattctaaaaaacgaagcgaatgatccagcactgaaggatgagctcttggcagaagccaacgttatgcagcagctcgataatccttacattgtcaggatgatcggaatctgtgaggccgagagttggatgttagttatggagatggcagagctgggtccgttgaacaagtatctgcagcagaacaggcatgttaaagataagaatattatagagctcgtgcatcaagtgtccatgggaatgaaatacctggaggagtccaattttgtccaccgggacctggccgctagaaatgtgctgctcgtcacacagcattacgccaaaatttctgacttcggcctatccaaggctctgagagccgatgaaaactactataaagcacagacacatggcaagtggccggttaaatggtacgccccagagtgcatcaactactacaaatttagtagtaagagcgatgtatggtccttcggcgtgttgatgtgggaggccttttcttacgggcaaaagccatatcgaggcatgaaaggctctgaggttacagccatgctcgaaaagggagagcgaatgggctgtccagcaggttgccctcgggagatgtacgatttaatgaacctttgctggacatatgacgtggaaaaccggccaggatttgctgccgttgaactgcgcctccgaaattactactacgacgtcgtgaattag

SEQ ID NO: 310846 - DNA, 4990 bp, Artificial Sequence
  derived and/or modified sequence
tcctctcagatttgtgtgcttcttcccttcccacattctatactgcccagcgcctgggattccagatctgcgtttgaatccaggaaagggaggtggacacctgcgcaggtgtgtgccctccggcccctgaagcatggccagcagcggcatggctgacagcgccaaccacctgcccttctttttcggcaacatcacccgggaggaggcagaagattacctggtccaggggggcatgagtgatgggctttatttgctgcgccagagccgcaactacctgggtggcttcgccctgtccgtggcccacgggaggaaggcacaccactacaccatcgagcgggagctgaatggcacctacgccatcgccggtggcaggacccatgccagccccgccgacctctgccactaccactcccaggagtctgatggcctggtctgcctcctcaagaagcccttcaaccggccccaaggggtgcagcccaagactgggccctttgaggatttgaaggaaaacctcatcagggaatatgtgaagcagacatggaacctgcagggtcaggctctggagcaggccatcatcagtcagaagcctcagctggagaagctgatcgctaccacagcccatgaaaaaatgccttggttccatggaaaaatctctcgggaagaatctgagcaaattgtcctgataggatcaaagacaaatggaaagttcctgatccgagccagagacaacaacggctcctacgccctgtgcctgctgcacgaagggaaggtgctgcactatcgcatcgacaaagacaagacagggaagctctccatccccgagggaaagaagttcgacacgctctggcagctagtcgagcattattcttataaagcagatggtttgttaagagttcttactgtcccatgtcaaaaaatcggcacacagggaaatgttaattttggaggccgtccacaacttccaggttcccatcctgcgacttggtcagcgggtggaataatctcaagaatcaaatcatactccttcccaaagcctggccacagaaagtcctcccctgcccaagggaaccggcaagagagtactgtgtcattcaatccgtatgagccagaacttgcaccctgggctgcagacaaaggcccccagagagaagccctacccatggacacagaggtgtacgagagcccctacgcggaccccgaggagatcaggcccaaggaggtttacctggaccgaaagctgctgacgctggaagacaaagaactgggctctggtaattttggaactgtgaaaaagggctactaccaaatgaaaaaagttgtgaaaaccgtggctgtgaaaatactgaaaaacgaggccaatgaccccgctcttaaagatgagttattagcagaagcaaatgtcatgcagcagctggacaacccgtacatcgtgcggatgatcgggatatgcgaggccgagtcctggatgctggttatggagatggcagaacttggtcccctcaataagtatttgcagcagaacagacatgtcaaggataagaacatcatagaactggttcatcaggtttccatgggcatgaagtacttggaggagagcaattttgtgcacagagatctggctgcaagaaatgtgttgctagttacccaacattacgccaagatcagtgatttcggactttccaaagcactgcgtgctgatgaaaactactacaaggcccagacccatggaaagtggcctgtcaagtggtacgctccggaatgcatcaactactacaagttctccagcaaaagcgatgtctggagctttggagtgttgatgtgggaagcattctcctatgggcagaagccatatcgagggatgaaaggaagtgaagtcaccgctatgttagagaaaggagagcggatggggtgccctgcagggtgtccaagagagatgtacgatctcatgaatctgtgctggacatacgatgtggaaaacaggcccggattcgcagcagtggaactgcggctgcgcaattactactatgacgtggtgaactaaccgctcccgcacctgtcggtggctgcctttgatcacaggagcaatcacaggaaaatgtatccagaggaattgattgtcagccacctccctctgccagtcgggagagccaggcttggatggaacatgcccacaacttgtcacccaaagcctgtcccaggactcaccctccacaaagcaaaggcagtcccgggagaaaagacggatggcaggatccaaggggctagctggatttgtttgttttcttgtctgtgtgattttcatacaggttatttttacgatctgtttccaaatccctttcatgtctttccacttctctgggtcccggggtgcatttgttactcatcgggcccagggacattgcagagtggcctagagcactctcaccccaagcggccttttccaaatgcccaaggatgccttagcatgtgactcctgaagggaaggcaaaggcagaggaatttggctgcttctacggccatgagactgatccctggccactgaaaagctttcctgacaataaaaatgttttgaggctttaaaaagaaaatcaagtttgaccagtgcagtttctaagcatgtagccagttaaggaaagaaagaaagaaaaaaaaaaaaggcctggatactgcttttgctgtctctgttatgagatggaagacttacatgtttgtgataaaaggggaccatgagaatgaattggcttggcttactttccccctgaaatcctctctcctgcagactgtcttgaagacctggtgactggtaaataaagccctgcatggaggctgcacagcaggggcaagaggcccatcccccagcatctcactgaggacagcttcaggctgccttcctctgaacgtggtccacaccttcctctcctccacagagagggtgccgccagaatcccctgtcgctttctgtgtctgcaatggggggcagcacagggatcaaagccatctaaagagtttccaaagaaagtattaattcagaacaagccaaagaccctgagcctcaccacaaacaggccttttggagtgtgaatttgagttgaagatacaagatcggagaatgattttctggtcttaactaatcctcatcttcatgtttgatctttaagaagtcatcacccattgatttcagttttgctgtacctcttgaaagttaaagagacatctcagcactttaggaggccgaggcgggtggatcacttgaggtaaggagtttgagactagcctggccaatatggtaaaaccccatctctactaaaaatacaaaaattagccgggcatggtggcatgtgtctgtagtcccagctactcgggaggctgaggcaggagaatcgcttgaacccaggaaacggaggtcgcagtgagccaagatcatgccactgcactccagcttgggcatcacagcgagactctgtcaaaacaaacaaacaaaaaaacaacttaaagaggtaatttagccatcattcttatgccagcagatataaataaacttggacccatctggtcttcagctaaacctgagacattttaaagtgcatggacagccatggacagcaggccctcctctaacaggggatgcaaggcatggagaaagacaatcagtacccaagctcagccacagaagacaggagtcactcatataacttgtgtttagaagtttttggtagccacgcacactttctgaaatcacactatctggtggtttaatcatatttttaaagacagaatccctgagtgctgagcagattctcaaaacacatttagaatccctgaaattagaaagatcaatgacaaaatatctgtcagccaggccacaaacaggtgtaaaattatgaaaggagtggttggatgtgccaagtttggtaaagtggtgactgcatctgagaaagaggctgtgaggctgaactcttggtggcttccttctgtaacttccagagggagtcttcaacacaggccccgtgctcgtaggaatacggtagcacctatgtaggaagtgcgtggagttttctgtcttctttctgtgtgatttttggcctttttatcagcacttctcccctcccaggagcctggggatgccaaacatccagaatgtgatgggacaagatgggggcaggggcctcacctccctgcagaggtccggccaggtctccttgtccctggacaatctcctgagcctctctgcttggtggagcaggcacctgtgtgcagaattcccactgtggccagcacgaggaagtcttttctagtgaaaatgtgtcttgtggtcaggaataattatcctttcccctgtagccaccaaggagggcaaatagagaaaggtaacctaattgaaggattggtcatgtgaaaagggctacatttgggaagctgggaaaggcctccaggcttctagagcagctagcttgggctggattctcatacccaggctgccccttggattgttctacccaagcttttccctggggtctgggctcactccataaggtaaggtgccttttaccttatggtccttctttagcaggtaacaaaggagcatcaggggcaggctgccctggtggcatcacactggctagtgaggccgtgaatatcttgtcccccagcagggccgacagtttctatcacagaaaacagtgtgttcagtggtgaaaatcgttgcatgcatgttttcatctgagcgtgtccttctcccatactccctatcagccagccctgcctgtagctgctgtatggtgattgcacttggacatcagtccaatgactgcaagtcggcctggattttcacttgcagaggctacagctgcattgtcaggtctcccagccctgcagagagctccctccactggttagcagtgtgttgtgttttccattcatttcagaagagctacattgtgtcactggacatttttaaaaactgtgatttttaataaaaatttaaaatttg

SEQ ID NO: 310847 - DNA, 5005 bp, Artificial Sequence
  derived and/or modified sequence
gaggaagagccgcgggcccggcggctgaggccaccccggcggcggctggagagcgaggaggagcgggtggccccgcgctgcgcccgccctcgcctcacctggcgcaggtggacacctgcgcaggtgtgtgccctccggcccctgaagcatggccagcagcggcatggctgacagcgccaaccacctgcccttctttttcggcaacatcacccgggaggaggcagaagattacctggtccaggggggcatgagtgatgggctttatttgctgcgccagagccgcaactacctgggtggcttcgccctgtccgtggcccacgggaggaaggcacaccactacaccatcgagcgggagctgaatggcacctacgccatcgccggtggcaggacccatgccagccccgccgacctctgccactaccactcccaggagtctgatggcctggtctgcctcctcaagaagcccttcaaccggccccaaggggtgcagcccaagactgggccctttgaggatttgaaggaaaacctcatcagggaatatgtgaagcagacatggaacctgcagggtcaggctctggagcaggccatcatcagtcagaagcctcagctggagaagctgatcgctaccacagcccatgaaaaaatgccttggttccatggaaaaatctctcgggaagaatctgagcaaattgtcctgataggatcaaagacaaatggaaagttcctgatccgagccagagacaacaacggctcctacgccctgtgcctgctgcacgaagggaaggtgctgcactatcgcatcgacaaagacaagacagggaagctctccatccccgagggaaagaagttcgacacgctctggcagctagtcgagcattattcttataaagcagatggtttgttaagagttcttactgtcccatgtcaaaaaatcggcacacagggaaatgttaattttggaggccgtccacaacttccaggttcccatcctgcgacttggtcagcgggtggaataatctcaagaatcaaatcatactccttcccaaagcctggccacagaaagtcctcccctgcccaagggaaccggcaagagagtactgtgtcattcaatccgtatgagccagaacttgcaccctgggctgcagacaaaggcccccagagagaagccctacccatggacacagaggtgtacgagagcccctacgcggaccccgaggagatcaggcccaaggaggtttacctggaccgaaagctgctgacgctggaagacaaagaactgggctctggtaattttggaactgtgaaaaagggctactaccaaatgaaaaaagttgtgaaaaccgtggctgtgaaaatactgaaaaacgaggccaatgaccccgctcttaaagatgagttattagcagaagcaaatgtcatgcagcagctggacaacccgtacatcgtgcggatgatcgggatatgcgaggccgagtcctggatgctggttatggagatggcagaacttggtcccctcaataagtatttgcagcagaacagacatgtcaaggataagaacatcatagaactggttcatcaggtttccatgggcatgaagtacttggaggagagcaattttgtgcacagagatctggctgcaagaaatgtgttgctagttacccaacattacgccaagatcagtgatttcggactttccaaagcactgcgtgctgatgaaaactactacaaggcccagacccatggaaagtggcctgtcaagtggtacgctccggaatgcatcaactactacaagttctccagcaaaagcgatgtctggagctttggagtgttgatgtgggaagcattctcctatgggcagaagccatatcgagggatgaaaggaagtgaagtcaccgctatgttagagaaaggagagcggatggggtgccctgcagggtgtccaagagagatgtacgatctcatgaatctgtgctggacatacgatgtggaaaacaggcccggattcgcagcagtggaactgcggctgcgcaattactactatgacgtggtgaactaaccgctcccgcacctgtcggtggctgcctttgatcacaggagcaatcacaggaaaatgtatccagaggaattgattgtcagccacctccctctgccagtcgggagagccaggcttggatggaacatgcccacaacttgtcacccaaagcctgtcccaggactcaccctccacaaagcaaaggcagtcccgggagaaaagacggatggcaggatccaaggggctagctggatttgtttgttttcttgtctgtgtgattttcatacaggttatttttacgatctgtttccaaatccctttcatgtctttccacttctctgggtcccggggtgcatttgttactcatcgggcccagggacattgcagagtggcctagagcactctcaccccaagcggccttttccaaatgcccaaggatgccttagcatgtgactcctgaagggaaggcaaaggcagaggaatttggctgcttctacggccatgagactgatccctggccactgaaaagctttcctgacaataaaaatgttttgaggctttaaaaagaaaatcaagtttgaccagtgcagtttctaagcatgtagccagttaaggaaagaaagaaagaaaaaaaaaaaaggcctggatactgcttttgctgtctctgttatgagatggaagacttacatgtttgtgataaaaggggaccatgagaatgaattggcttggcttactttccccctgaaatcctctctcctgcagactgtcttgaagacctggtgactggtaaataaagccctgcatggaggctgcacagcaggggcaagaggcccatcccccagcatctcactgaggacagcttcaggctgccttcctctgaacgtggtccacaccttcctctcctccacagagagggtgccgccagaatcccctgtcgctttctgtgtctgcaatggggggcagcacagggatcaaagccatctaaagagtttccaaagaaagtattaattcagaacaagccaaagaccctgagcctcaccacaaacaggccttttggagtgtgaatttgagttgaagatacaagatcggagaatgattttctggtcttaactaatcctcatcttcatgtttgatctttaagaagtcatcacccattgatttcagttttgctgtacctcttgaaagttaaagagacatctcagcactttaggaggccgaggcgggtggatcacttgaggtaaggagtttgagactagcctggccaatatggtaaaaccccatctctactaaaaatacaaaaattagccgggcatggtggcatgtgtctgtagtcccagctactcgggaggctgaggcaggagaatcgcttgaacccaggaaacggaggtcgcagtgagccaagatcatgccactgcactccagcttgggcatcacagcgagactctgtcaaaacaaacaaacaaaaaaacaacttaaagaggtaatttagccatcattcttatgccagcagatataaataaacttggacccatctggtcttcagctaaacctgagacattttaaagtgcatggacagccatggacagcaggccctcctctaacaggggatgcaaggcatggagaaagacaatcagtacccaagctcagccacagaagacaggagtcactcatataacttgtgtttagaagtttttggtagccacgcacactttctgaaatcacactatctggtggtttaatcatatttttaaagacagaatccctgagtgctgagcagattctcaaaacacatttagaatccctgaaattagaaagatcaatgacaaaatatctgtcagccaggccacaaacaggtgtaaaattatgaaaggagtggttggatgtgccaagtttggtaaagtggtgactgcatctgagaaagaggctgtgaggctgaactcttggtggcttccttctgtaacttccagagggagtcttcaacacaggccccgtgctcgtaggaatacggtagcacctatgtaggaagtgcgtggagttttctgtcttctttctgtgtgatttttggcctttttatcagcacttctcccctcccaggagcctggggatgccaaacatccagaatgtgatgggacaagatgggggcaggggcctcacctccctgcagaggtccggccaggtctccttgtccctggacaatctcctgagcctctctgcttggtggagcaggcacctgtgtgcagaattcccactgtggccagcacgaggaagtcttttctagtgaaaatgtgtcttgtggtcaggaataattatcctttcccctgtagccaccaaggagggcaaatagagaaaggtaacctaattgaaggattggtcatgtgaaaagggctacatttgggaagctgggaaaggcctccaggcttctagagcagctagcttgggctggattctcatacccaggctgccccttggattgttctacccaagcttttccctggggtctgggctcactccataaggtaaggtgccttttaccttatggtccttctttagcaggtaacaaaggagcatcaggggcaggctgccctggtggcatcacactggctagtgaggccgtgaatatcttgtcccccagcagggccgacagtttctatcacagaaaacagtgtgttcagtggtgaaaatcgttgcatgcatgttttcatctgagcgtgtccttctcccatactccctatcagccagccctgcctgtagctgctgtatggtgattgcacttggacatcagtccaatgactgcaagtcggcctggattttcacttgcagaggctacagctgcattgtcaggtctcccagccctgcagagagctccctccactggttagcagtgtgttgtgttttccattcatttcagaagagctacattgtgtcactggacatttttaaaaactgtgatttttaataaaaatttaaaatttg

SEQ ID NO: 310848 - protein, 612 aa, Artificial Sequence
  derived and/or modified sequence
MASSGMADSANHLPFFFGNITREEAEDYLVQGGMSDGLYLLRQSRNYLGGFALSVAHGRKAHHYTIERELNGTYAIAGGRTHASPADLCHYHSQESDGLVCLLKKPFNRPQGVQPKTGPFEDLKENLIREYVKQTWNLQGQALEQAIISQKPQLEKLIATTAHEKMPWFHGKISREESEQIVLIGSKTNGKFLIRARDNNGSYALCLLHEGKVLHYRIDKDKTGKLSIPEGKKFDTLWQLVEHYSYKADGLLRVLTVPCQKIGTQGNVNFGGRPQLPGSHPASSPAQGNRQESTVSFNPYEPELAPWAADKGPQREALPMDTEVYESPYADPEEIRPKEVYLDRKLLTLEDKELGSGNFGTVKKGYYQMKKVVKTVAVKILKNEANDPALKDELLAEANVMQQLDNPYIVRMIGICEAESWMLVMEMAELGPLNKYLQQNRHVKDKNIIELVHQVSMGMKYLEESNFVHRDLAARNVLLVTQHYAKISDFGLSKALRADENYYKAQTHGKWPVKWYAPECINYYKFSSKSDVWSFGVLMWEAFSYGQKPYRGMKGSEVTAMLEKGERMGCPAGCPREMYDLMNLCWTYDVENRPGFAAVELRLRNYYYDVVN

SEQ ID NO: 310849 - DNA, 1839 bp, Artificial Sequence
  derived and/or modified sequence
atggccagcagcggcatggccgacagcgccaaccacctgcccttcttcttcggcaacatcaccagagaggaggccgaggactacctggtgcagggcggcatgagcgacggcctgtacctgctgagacagagcagaaactacctgggcggcttcgccctgagcgtggcccacggcagaaaggcccaccactacaccatcgagagagagctgaacggcacctacgccatcgccggcggcagaacccacgccagccccgccgacctgtgccactaccacagccaggagagcgacggcctggtgtgcctgctgaagaagcccttcaacagaccccagggcgtgcagcccaagaccggccccttcgaggacctgaaggagaacctgatcagagagtacgtgaagcagacctggaacctgcagggccaggccctggagcaggccatcatcagccagaagccccagctggagaagctgatcgccaccaccgcccacgagaagatgccctggttccacggcaagatcagcagagaggagagcgagcagatcgtgctgatcggcagcaagaccaacggcaagttcctgatcagagccagagacaacaacggcagctacgccctgtgcctgctgcacgagggcaaggtgctgcactacagaatcgacaaggacaagaccggcaagctgagcatccccgagggcaagaagttcgacaccctgtggcagctggtggagcactacagctacaaggccgacggcctgctgagagtgctgaccgtgccctgccagaagatcggcacccagggcaacgtgaacttcggcggcagaccccagctgcccggcagccaccccgccagcagccccgcccagggcaacagacaggagagcaccgtgagcttcaacccctacgagcccgagctggccccctgggccgccgacaagggcccccagagagaggccctgcccatggacaccgaggtgtacgagagcccctacgccgaccccgaggagatcagacccaaggaggtgtacctggacagaaagctgctgaccctggaggacaaggagctgggcagcggcaacttcggcaccgtgaagaagggctactaccagatgaagaaggtggtgaagaccgtggccgtgaagatcctgaagaacgaggccaacgaccccgccctgaaggacgagctgctggccgaggccaacgtgatgcagcagctggacaacccctacatcgtgagaatgatcggcatctgcgaggccgagagctggatgctggtgatggagatggccgagctgggccccctgaacaagtacctgcagcagaacagacacgtgaaggacaagaacatcatcgagctggtgcaccaggtgagcatgggcatgaagtacctggaggagagcaacttcgtgcacagagacctggccgccagaaacgtgctgctggtgacccagcactacgccaagatcagcgacttcggcctgagcaaggccctgagagccgacgagaactactacaaggcccagacccacggcaagtggcccgtgaagtggtacgcccccgagtgcatcaactactacaagttcagcagcaagagcgacgtgtggagcttcggcgtgctgatgtgggaggccttcagctacggccagaagccctacagaggcatgaagggcagcgaggtgaccgccatgctggagaagggcgagagaatgggctgccccgccggctgccccagagagatgtacgacctgatgaacctgtgctggacctacgacgtggagaacagacccggcttcgccgccgtggagctgagactgagaaactactactacgacgtggtgaactag

SEQ ID NO: 310850 - DNA, 1839 bp, Artificial Sequence
  derived and/or modified sequence
atggccagctccggcatggccgattccgccaatcacctcccatttttcttcggcaacatcacacgggaggaggccgaggattacctagtgcaagggggcatgtccgatgggctgtatttgctgcgacaaagccgcaattacctgggtgggtttgctcttagcgtggctcacggaagaaaagcacaccattatactatagagcgcgagctgaatggcacctatgccatagccgggggccggacacacgcttctccagctgatctctgccattaccacagtcaggagagtgatggacttgtatgtttactgaagaaaccatttaatagaccccagggagtgcagcctaagacagggcccttcgaagacctcaaagagaacctgatacgggaatatgtgaagcagacatggaacctgcaagggcaggcgttggaacaggctattatctcccagaaaccacagcttgaaaaactaattgccacaactgcgcacgagaagatgccttggttccacggaaagatatctcgcgaggaatccgagcaaatagttctaataggcagcaagaccaatggaaaatttcttataagagcccgcgataacaatggctcctacgccctatgtttattacacgaaggtaaagtgctgcactacagaatcgacaaggataagactggcaaactgagtatcccagaaggcaaaaaatttgacactctttggcagcttgtagaacactacagctacaaggcagacgggctgctgcgtgtgctgaccgtaccatgtcagaagatcggaacccagggaaacgtcaactttggaggaaggccgcagctgcccggtagtcacccagcgtcctcccctgcgcaaggcaaccggcaggagagcaccgtgtcattcaatccatatgagcccgaattggccccttgggccgccgataagggtcctcagcgggaggcactgccaatggatacagaggtgtacgagtcaccatacgccgatccagaggaaatcaggcccaaggaggtgtatttagatcgcaagctcctaactttggaagataaagaactaggttctggaaattttggaaccgtgaaaaagggatattaccagatgaaaaaggtggtaaagaccgtggcggtgaagatccttaagaatgaggccaatgacccggccttgaaggatgaactgttggccgaggctaatgtgatgcagcagctggacaacccatatatcgtgagaatgatcgggatctgcgaagctgagtcttggatgttagtcatggagatggcagaattggggccactgaataagtacctgcagcagaataggcatgtcaaggataagaacattattgagctcgtgcatcaggtgagcatgggtatgaagtatttggaggaatcaaactttgtccatcgagatcttgctgccagaaacgtcctgctggttacccagcactacgccaagatctcagacttcggcttgtctaaggctcttagagctgacgaaaactactacaaagcacagacacacggtaaatggcctgtgaagtggtacgcccctgagtgtatcaattattacaagttttcctctaagagtgatgtctggtctttcggcgtccttatgtgggaagcctttagctacggccagaaaccatacaggggaatgaagggcagcgaagtcacagcgatgcttgaaaagggcgagcggatgggatgtcccgccggttgcccacgggagatgtacgatctgatgaacttgtgctggacgtatgacgtggagaacagaccaggctttgccgccgtggagttaagactgcgcaactactactatgatgtagtgaattag

SEQ ID NO: 310851 - DNA, 1839 bp, Artificial Sequence
  derived and/or modified sequence
atggctagttcgggtatggctgacagtgctaaccacctgccttttttctttggcaatatcactcgcgaggaagccgaggattacctggtgcaggggggaatgtctgatggtctgtacctcctccgacagtctagaaattaccttgggggattcgccctcagcgtagctcacggtaggaaggcccaccactacaccatcgaaagagagctaaatggtacctacgccattgctggcggtagaacacacgcgtccccagccgatctgtgccattatcacagtcaggaatctgatggcctggtctgcttgctcaagaaaccatttaatcgcccacagggagtgcagccaaaaacaggaccgttcgaagatttaaaagagaatctgatccgggaatacgttaaacagacatggaacctgcagggccaggccctggaacaggccattatctcccagaagccgcagctggagaagttaatagctacgacagcccatgaaaagatgccctggttccatggaaaaataagcagggaagaatccgagcaaatcgtgcttatcggctcaaaaaccaatggcaagttcctaattagggcaagggacaacaacggcagttatgcactatgtctccttcatgaggggaaggtgctccactatcggattgataaagataaaactggtaaactgtctatccctgagggtaagaaattcgataccctgtggcagcttgtcgagcattacagctataaggccgatgggttgctaagggtgctgaccgtgccctgccagaaaatcggcactcagggcaacgtgaacttcggagggcggccccagctccccggcagtcaccctgcctccagtccagcacagggcaatagacaggaaagtacagtgagttttaatccctatgagcctgaattggctccatgggctgccgataagggccctcagcgagaagcactccccatggataccgaagtttacgagagcccttatgcagatccagaggagattaggcctaaggaggtttacctcgaccggaaacttttaaccctggaggacaaagagctaggcagcggaaactttggaacagtgaaaaaaggctattatcaaatgaaaaaggtggttaagacagtcgctgtcaagattctgaaaaacgaagcaaatgatcccgcactgaaggacgaattgttagccgaggctaacgtgatgcaacagctggacaacccatatatcgtgagaatgatcggtatttgcgaagctgagagttggatgttggtgatggagatggcagagcttggtcccctgaataagtatctccagcagaacagacatgtaaaagacaagaacatcattgagcttgtccatcaagtcagcatgggtatgaaatacctggaggagtccaatttcgtccaccgagatttagctgcgaggaatgtgcttctggtaacacaacattatgcaaaaatatccgactttggtctgagcaaagccttacgcgcagatgagaactactacaaggcccagacccacggcaaatggcccgtaaagtggtacgcccctgagtgtatcaattattacaaattctcatccaagtccgatgtctggagctttggagtgttaatgtgggaagcctttagctatggacagaagccgtatcgtggaatgaaaggttcagaagtaactgctatgcttgagaagggcgaaagaatggggtgccctgccggatgtccgcgagagatgtatgacctaatgaatctgtgctggacatatgatgtggagaacagaccaggcttcgccgccgtcgagctgcgcttgagaaattattactacgatgtggtgaattag

SEQ ID NO: 310852 - DNA, 1839 bp, Artificial Sequence
  derived and/or modified sequence
atggccagcagcggcatggctgacagcgccaaccacctgcccttcttctttggaaacatcacccgggaggaggccgaggactacctggtgcagggcggcatgtctgatggcctgtacctgctgcggcagagcaggaactacctgggcggctttgccctgtctgtggcccacggcaggaaggcccaccactacaccatcgagcgggagctgaatggcacctacgccatcgccggcggccgcacccacgccagccctgctgacctgtgccactaccacagccaggagagtgatggcctggtgtgcctgctgaagaagcccttcaaccggccccagggcgtgcagcccaagacaggcccctttgaggacctgaaggaaaatctcatccgggagtatgtgaagcagacctggaacctgcagggccaggccctggagcaggccatcatcagccagaagccccagctggagaagctgattgccaccacagcccacgagaagatgccctggttccacggcaagatcagccgggaggagagcgagcagatcgtgctgattggcagcaagaccaacgggaagttcctgatccgggcccgggacaacaacggcagctatgccctgtgcctgctgcacgagggcaaggtgctgcactacagaattgacaaggacaagacaggcaagctgagcatccctgagggcaagaagtttgacaccctgtggcagctggtggagcactacagctacaaggcagatggcctgctgcgggtgctgactgtgccctgccagaagattggcacccagggcaatgtgaactttggaggccggccccagctgcccggcagccacccagccagcagccctgcccagggcaaccggcaggagagcacagtgtccttcaacccctatgagcctgagctggccccctgggccgctgacaagggcccccagcgggaggccctgcccatggacacagaggtgtatgagagcccctatgctgaccctgaggagatccggcccaaggaggtgtacctggacaggaagctgctgaccctggaggacaaggagctgggcagcggcaactttggaacagtgaagaagggctactaccagatgaagaaggtggtgaagacagtggccgtgaagatcctgaagaatgaggccaatgaccctgccctgaaggatgagctgctggccgaggccaacgtgatgcagcagctggacaacccctacatcgtgaggatgattggcatctgtgaggccgagagctggatgctggtgatggagatggccgagctgggccccctgaacaagtacctgcagcagaacagacatgtgaaggacaagaacatcatcgagctggtgcaccaggtgtccatgggcatgaagtacctggaggagagcaactttgtgcaccgggacctggccgccagaaatgtgctgctggtgacccagcactacgccaagatcagtgactttggcctgagcaaggccctgcgggcagatgagaactactacaaggcccagacccacggcaagtggcctgtgaagtggtacgcccctgagtgcatcaactactacaagttcagcagcaagagtgatgtgtggagctttggagtgctgatgtgggaggccttctcctatggccagaagccctaccggggcatgaagggcagcgaggtgacagccatgctggagaagggggagaggatgggctgcccagctggctgcccccgggagatgtatgacctgatgaacctgtgctggacctatgatgtggagaaccggcccggctttgctgctgtggagctgcggctgaggaactactactatgatgtggtgaactag

SEQ ID NO: 310853 - DNA, 1839 bp, Artificial Sequence
  derived and/or modified sequence
atggccagcagcggcatggccgacagcgccaaccacctgcccttctttttcgggaacataactcgcgaggaagccgaggattatcttgtgcaaggcggcatgtccgacggcctgtacctgttgagacaaagccgaaactatttgggaggctttgctcttagcgttgcccacgggagaaaggcccatcactatacaatagaaagggagctcaatggaacctatgccattgctgggggccgaacgcatgcatctcctgccgatctgtgccactaccactcccaagaaagtgacggcctggtttgcctgctgaaaaagccctttaaccgacctcaaggcgtgcaacctaagactgggcccttcgaggacctcaaagagaacttgattcgcgaatacgtgaagcagacttggaaccttcaaggccaggccctggagcaggcgataatctcacaaaaaccacagctggagaagctgattgccacaaccgctcacgaaaaaatgccttggtttcacggcaagattagcagggaggaatctgagcaaatagtactgatcggctccaagaccaacggaaagtttctgatcagggcccgggataacaacggaagctatgcactgtgtttgctgcacgagggtaaggtgttacattatcgcatagacaaggacaaaaccggaaaactctccattcccgaaggcaagaaattcgacactctgtggcagcttgtagagcattacagttataaagctgatggtcttctgagagtactcactgttccgtgtcagaaaatcggtacacagggcaacgtgaacttcggaggccgaccccagctccccggatcacaccccgctagcagtccggcccagggtaataggcaggaatctactgtgtcttttaacccatacgagcctgagcttgccccgtgggctgcagacaaaggcccccaacgggaggcactgccaatggatacagaggtttatgagtctccatatgcagatcccgaggagattagacccaaggaggtgtacctcgacagaaagctgctgacactcgaggacaaagagcttgggagtgggaattttggtacagtgaaaaagggctactaccagatgaaaaaggtggttaagaccgttgcggtgaaaatactgaaaaacgaagctaatgatcctgccttgaaggacgagctgttggcagaggcaaacgtgatgcaacagctggacaacccatatattgtgcggatgatcggaatctgtgaagctgaatcttggatgctggttatggagatggccgagctcggtccgctgaacaaatacttgcaacagaaccgacatgtcaaggataagaacatcatagagctggttcatcaggtatctatgggtatgaagtacttagaggagtcaaattttgtgcatagggatcttgccgcccgcaacgtcctcttagtgacacagcactatgccaaaattagcgatttcggactatctaaagccttacgagctgatgaaaactattacaaagcacagactcatggaaaatggcctgttaaatggtacgcccccgaatgtattaactattataaattcagcagtaaaagtgacgtttggtcattcggagtactgatgtgggaagccttcagctatggccagaagccctaccgagggatgaaagggtctgaggtcacagccatgctggagaaaggtgagaggatgggctgtccagctggatgccctcgcgagatgtacgatctcatgaacttgtgctggacctacgatgtagagaatcggcctgggttcgccgccgttgagcttcgacttaggaactactactacgacgtggttaactag

SEQ ID NO: 310854 - DNA, 1839 bp, Artificial Sequence
  derived and/or modified sequence
atggccagcagcggcatggccgacagcgccaaccacctgcccttcttctttggtaacataactcgggaggaggcagaggattaccttgtgcaaggggggatgagcgacgggctctatttacttaggcaatcccggaactatctgggtggcttcgccctcagtgtcgctcatggccgaaaagctcaccattacactatcgaacgggagttaaatggaacctatgctatcgcagggggccggacccatgctagccccgctgatctgtgtcattatcatagccaggaatccgatggcttggtgtgtctgttgaagaagccttttaatagaccgcagggcgtccagcccaaaaccgggccgttcgaggatctgaaagaaaatttgattcgcgagtacgttaaacagacatggaatcttcagggccaggctctggaacaggctattatatctcagaaaccgcaactcgaaaaattgattgctaccacagcccacgagaaaatgccctggtttcatggtaaaatttccagagaggagagcgagcaaatcgttcttatcggaagcaaaactaacggtaagtttctgattagagccagagataacaatgggtcctacgccttgtgccttctgcatgagggcaaagtgctgcattacaggatcgataaagacaaaacagggaagctgtctatcccagaaggcaagaagtttgacacactctggcagttggtggagcattactcatacaaagcggatggcctgctgagggtgctcaccgtgccgtgccagaaaatcgggactcaaggtaatgtaaattttgggggacgccctcagctgccaggatctcatcccgctagttcacctgcacagggcaacaggcaggaaagcacagtgtcattcaacccttacgaaccagagctggctccttgggcggctgataaggggcctcagcgcgaggcgctgcccatggataccgaggtgtatgaatccccttatgccgatcccgaagagattagaccgaaggaagtgtatctcgatcgcaagctcctcacactggaggacaaggaactcggctcaggcaattttgggaccgtaaaaaaaggatattatcagatgaaaaaggtggtcaaaactgtcgcagttaagatcctgaagaatgaggcaaacgacccagcactcaaagatgagcttctggccgaggccaacgtgatgcagcaactggataatccctacatcgtgagaatgatcggcatctgcgaggccgagtcttggatgcttgtgatggagatggccgagctcggcccattgaacaagtatcttcagcagaataggcatgtcaaagacaaaaacattattgaacttgtccaccaggtgtctatgggaatgaagtatctggaagaatccaacttcgtgcatcgggaccttgctgccagaaatgtgctgctggtgactcagcactatgctaaaatttccgattttgggctttcaaaggcattgcgggccgatgagaactactacaaggcccagactcacggtaagtggcccgtgaaatggtatgcaccagagtgcattaattattataagttctccagcaagagcgacgtttggagctttggcgtgctcatgtgggaggccttctcttacgggcagaaaccatacagaggcatgaagggctctgaagtgacagcaatgttagaaaagggcgaacggatggggtgccctgcggggtgccctagggagatgtatgacttgatgaacctatgttggacttatgatgtcgagaacaggcctggttttgctgctgttgagttgcgcctcaggaactactactatgacgtggtcaattag

SEQ ID NO: 310855 - DNA, 1839 bp, Artificial Sequence
  derived and/or modified sequence
atggcctcctctgggatggccgatagtgcaaatcatctaccatttttcttcggcaatattacgcgcgaggaggctgaggattatttggtccaaggcggaatgtccgacgggctctacctgctgaggcagagccgaaactatctgggcggatttgctctcagtgtggcacatggcagaaaagcacatcactatacaatagaacgagagttgaatggcacctacgcaatcgctggagggaggactcacgccagccccgctgatctgtgtcactatcatagtcaggaatcagatggcctggtgtgccttctaaaaaagcctttcaaccggcctcagggcgttcagcccaagactggcccttttgaagacctaaaggagaacctgatcagagaatatgtcaaacagacctggaacctccagggccaggcgctggagcaggccattatctctcagaagccccaattggaaaagctgatagccacaacagcccacgaaaaaatgccgtggttccacgggaagatatctcgcgaggagtcagagcagattgtactgatcgggtcaaaaacaaatgggaaattcctgatacgggctagggataacaatggctcttacgcattgtgcttgctgcatgaagggaaagtgttacattaccgcatagacaaagacaaaaccggtaagttatccattcctgagggaaagaagttcgataccttgtggcaactcgtggaacattatagctataaggcggatggactgttgcgcgtactgaccgtgccctgtcaaaagatcggaacccaagggaatgtgaatttcggtggcagaccacagcttcctggttcccatcccgctagttctcctgcccagggaaatcgccaggagtctaccgtctcgttcaatccatacgaacccgaacttgcaccctgggcagcagacaagggacctcagcgcgaagccctgcccatggacaccgaggtttatgaaagcccttatgccgatccggaagaaattaggcccaaggaagtttacctggatcggaagctgctcacactggaggacaaggagctgggcagtgggaatttcggtacagtaaagaagggttactaccagatgaaaaaagttgtgaagacggtagccgtgaaaatcctgaagaatgaggccaacgaccctgccctgaaagatgagctattggcggaagcaaatgttatgcagcaattggataacccatacatcgtgagaatgattggaatatgtgaagccgagtcatggatgctggttatggaaatggccgaactcggtcccttgaacaagtacctacagcagaaccgccatgtgaaagataagaacatcatagagttggtgcaccaagtttcgatgggaatgaagtacctcgaggagtccaatttcgtgcacagggatctggccgctagaaacgtcctcttggtgactcagcactacgccaaaatttcagattttggtctgtcaaaagccctgagagccgacgagaactactataaggctcagactcacgggaaatggccggtaaagtggtacgcacctgagtgcataaactactacaagttctccagtaagagcgacgtgtggtctttcggggtcctcatgtgggaggctttttcttacgggcagaaaccatatcgcggtatgaagggatcagaggtcaccgcaatgcttgaaaaaggagaaagaatgggctgccccgctggctgccctagggaaatgtatgacctgatgaatttatgttggacatacgatgtggagaacaggcccggattcgccgctgtggagctaagactgagaaactattattacgacgtcgtgaattag

SEQ ID NO: 310856 - DNA, 1839 bp, Artificial Sequence
  derived and/or modified sequence
atggcctcttcagggatggctgactcagccaaccatctgccctttttctttggcaatattactcgcgaagaagcagaggactatttagtgcaaggcggtatgtcggatggcctctacttgctgcgccagagccgcaactatctaggcggattcgctctgtctgtggcccacggtcggaaagcccaccattacacaatcgaacgggagctgaacgggacatacgctattgctgggggaaggactcacgcttcccccgctgatctgtgccattaccactcacaggagtccgatggactcgtgtgtctcttaaaaaaaccattcaataggccacagggtgtgcagcccaaaacgggcccttttgaagacctgaaggagaacttaatcagggagtacgtaaaacagacttggaacttacagggccaagccctcgaacaggcgattatttcccagaaacctcagctcgagaagctgatcgcaactacagcacacgaaaaaatgccctggttccatgggaagatttcgagagaggaatcagagcagattgtgcttattggatccaagaccaacggcaagtttctcatccgcgcacgagacaataacggcagttatgccttatgtctcttacacgaggggaaggtgcttcactaccgcatcgacaaagataagacaggcaaactctccattcctgagggaaaaaagttcgacactctctggcaactcgtggagcattatagctacaaggctgatggactcctcagggtactgacagtaccttgtcagaagatcggtacacaaggaaacgtcaatttcggtggacggcctcagcttcccggttcccatccggcatcttctccggctcaaggaaatcgccaagagtccaccgtgagctttaacccgtatgagccagaactcgccccttgggccgctgacaaagggcctcagagagaggccctgccaatggacaccgaggtgtacgagtcgccgtatgcagatcccgaggaaattaggcccaaagaggtgtacctggatcgcaagctcctgacactggaggataaagagctcggaagtgggaactttggaaccgtcaagaagggttattatcagatgaagaaggtggtgaagacagtggcggtcaaaatcttaaaaaacgaggcaaatgaccctgcactgaaggatgagttgcttgccgaggccaacgtgatgcagcagctcgataatccttatattgtacgcatgataggaatctgcgaggccgagtcttggatgctcgttatggaaatggctgagctgggaccacttaacaaatacctgcagcagaaccgccacgtgaaggacaaaaatatcatcgagctggtacatcaagtttcaatgggcatgaagtatctggaagagagtaacttcgtgcacagggatctagcagcacgcaacgtccttctcgtgacacaacactacgccaaaatcagcgatttcgggctatccaaggccctgagagccgatgaaaactactataaggctcaaactcatggaaagtggccagtgaagtggtatgccccagagtgtataaattactataaattcagttccaaaagcgacgtgtggagttttggcgttctgatgtgggaagcctttagctatggtcagaaaccttatagaggcatgaagggtagtgaagttacagcgatgcttgagaaaggggagcggatggggtgcccagctgggtgccctcgcgaaatgtacgacctgatgaacttatgctggacctatgacgtggagaacaggccgggatttgccgcagtagagttgcgcttgcgaaactactactatgatgtcgtcaattag

SEQ ID NO: 310857 - DNA, 4908 bp, Artificial Sequence
  derived and/or modified sequence
ctttctggtaaggagaggaggttacggggaacgacgcgctgctttcatgccctttcttgttctaccttcatcggccgaggtggacacctgcgcaggtgtgtgccctccggcccctgaagcatggccagcagcggcatggctgacagcgccaaccacctgcccttctttttcggcaacatcacccgggaggaggcagaagattacctggtccaggggggcatgagtgatgggctttatttgctgcgccagagccgcaactacctgggtggcttcgccctgtccgtggcccacgggaggaaggcacaccactacaccatcgagcgggagctgaatggcacctacgccatcgccggtggcaggacccatgccagccccgccgacctctgccactaccactcccaggagtctgatggcctggtctgcctcctcaagaagcccttcaaccggccccaaggggtgcagcccaagactgggccctttgaggatttgaaggaaaacctcatcagggaatatgtgaagcagacatggaacctgcagggtcaggctctggagcaggccatcatcagtcagaagcctcagctggagaagctgatcgctaccacagcccatgaaaaaatgccttggttccatggaaaaatctctcgggaagaatctgagcaaattgtcctgataggatcaaagacaaatggaaagttcctgatccgagccagagacaacaacggctcctacgccctgtgcctgctgcacgaagggaaggtgctgcactatcgcatcgacaaagacaagacagggaagctctccatccccgagggaaagaagttcgacacgctctggcagctagtcgagcattattcttataaagcagatggtttgttaagagttcttactgtcccatgtcaaaaaatcggcacacagggaaatgttaattttggaggccgtccacaacttccaggttcccatcctgcgtcctcccctgcccaagggaaccggcaagagagtactgtgtcattcaatccgtatgagccagaacttgcaccctgggctgcagacaaaggcccccagagagaagccctacccatggacacagaggtgtacgagagcccctacgcggaccccgaggagatcaggcccaaggaggtttacctggaccgaaagctgctgacgctggaagacaaagaactgggctctggtaattttggaactgtgaaaaagggctactaccaaatgaaaaaagttgtgaaaaccgtggctgtgaaaatactgaaaaacgaggccaatgaccccgctcttaaagatgagttattagcagaagcaaatgtcatgcagcagctggacaacccgtacatcgtgcggatgatcgggatatgcgaggccgagtcctggatgctggttatggagatggcagaacttggtcccctcaataagtatttgcagcagaacagacatgtcaaggataagaacatcatagaactggttcatcaggtttccatgggcatgaagtacttggaggagagcaattttgtgcacagagatctggctgcaagaaatgtgttgctagttacccaacattacgccaagatcagtgatttcggactttccaaagcactgcgtgctgatgaaaactactacaaggcccagacccatggaaagtggcctgtcaagtggtacgctccggaatgcatcaactactacaagttctccagcaaaagcgatgtctggagctttggagtgttgatgtgggaagcattctcctatgggcagaagccatatcgagggatgaaaggaagtgaagtcaccgctatgttagagaaaggagagcggatggggtgccctgcagggtgtccaagagagatgtacgatctcatgaatctgtgctggacatacgatgtggaaaacaggcccggattcgcagcagtggaactgcggctgcgcaattactactatgacgtggtgaactaaccgctcccgcacctgtcggtggctgcctttgatcacaggagcaatcacaggaaaatgtatccagaggaattgattgtcagccacctccctctgccagtcgggagagccaggcttggatggaacatgcccacaacttgtcacccaaagcctgtcccaggactcaccctccacaaagcaaaggcagtcccgggagaaaagacggatggcaggatccaaggggctagctggatttgtttgttttcttgtctgtgtgattttcatacaggttatttttacgatctgtttccaaatccctttcatgtctttccacttctctgggtcccggggtgcatttgttactcatcgggcccagggacattgcagagtggcctagagcactctcaccccaagcggccttttccaaatgcccaaggatgccttagcatgtgactcctgaagggaaggcaaaggcagaggaatttggctgcttctacggccatgagactgatccctggccactgaaaagctttcctgacaataaaaatgttttgaggctttaaaaagaaaatcaagtttgaccagtgcagtttctaagcatgtagccagttaaggaaagaaagaaagaaaaaaaaaaaaggcctggatactgcttttgctgtctctgttatgagatggaagacttacatgtttgtgataaaaggggaccatgagaatgaattggcttggcttactttccccctgaaatcctctctcctgcagactgtcttgaagacctggtgactggtaaataaagccctgcatggaggctgcacagcaggggcaagaggcccatcccccagcatctcactgaggacagcttcaggctgccttcctctgaacgtggtccacaccttcctctcctccacagagagggtgccgccagaatcccctgtcgctttctgtgtctgcaatggggggcagcacagggatcaaagccatctaaagagtttccaaagaaagtattaattcagaacaagccaaagaccctgagcctcaccacaaacaggccttttggagtgtgaatttgagttgaagatacaagatcggagaatgattttctggtcttaactaatcctcatcttcatgtttgatctttaagaagtcatcacccattgatttcagttttgctgtacctcttgaaagttaaagagacatctcagcactttaggaggccgaggcgggtggatcacttgaggtaaggagtttgagactagcctggccaatatggtaaaaccccatctctactaaaaatacaaaaattagccgggcatggtggcatgtgtctgtagtcccagctactcgggaggctgaggcaggagaatcgcttgaacccaggaaacggaggtcgcagtgagccaagatcatgccactgcactccagcttgggcatcacagcgagactctgtcaaaacaaacaaacaaaaaaacaacttaaagaggtaatttagccatcattcttatgccagcagatataaataaacttggacccatctggtcttcagctaaacctgagacattttaaagtgcatggacagccatggacagcaggccctcctctaacaggggatgcaaggcatggagaaagacaatcagtacccaagctcagccacagaagacaggagtcactcatataacttgtgtttagaagtttttggtagccacgcacactttctgaaatcacactatctggtggtttaatcatatttttaaagacagaatccctgagtgctgagcagattctcaaaacacatttagaatccctgaaattagaaagatcaatgacaaaatatctgtcagccaggccacaaacaggtgtaaaattatgaaaggagtggttggatgtgccaagtttggtaaagtggtgactgcatctgagaaagaggctgtgaggctgaactcttggtggcttccttctgtaacttccagagggagtcttcaacacaggccccgtgctcgtaggaatacggtagcacctatgtaggaagtgcgtggagttttctgtcttctttctgtgtgatttttggcctttttatcagcacttctcccctcccaggagcctggggatgccaaacatccagaatgtgatgggacaagatgggggcaggggcctcacctccctgcagaggtccggccaggtctccttgtccctggacaatctcctgagcctctctgcttggtggagcaggcacctgtgtgcagaattcccactgtggccagcacgaggaagtcttttctagtgaaaatgtgtcttgtggtcaggaataattatcctttcccctgtagccaccaaggagggcaaatagagaaaggtaacctaattgaaggattggtcatgtgaaaagggctacatttgggaagctgggaaaggcctccaggcttctagagcagctagcttgggctggattctcatacccaggctgccccttggattgttctacccaagcttttccctggggtctgggctcactccataaggtaaggtgccttttaccttatggtccttctttagcaggtaacaaaggagcatcaggggcaggctgccctggtggcatcacactggctagtgaggccgtgaatatcttgtcccccagcagggccgacagtttctatcacagaaaacagtgtgttcagtggtgaaaatcgttgcatgcatgttttcatctgagcgtgtccttctcccatactccctatcagccagccctgcctgtagctgctgtatggtgattgcacttggacatcagtccaatgactgcaagtcggcctggattttcacttgcagaggctacagctgcattgtcaggtctcccagccctgcagagagctccctccactggttagcagtgtgttgtgttttccattcatttcagaagagctacattgtgtcactggacatttttaaaaactgtgatttttaataaaaatttaaaatttg

SEQ ID NO: 310858 - DNA, 4936 bp, Artificial Sequence
  derived and/or modified sequence
gaggaagagccgcgggcccggcggctgaggccaccccggcggcggctggagagcgaggaggagcgggtggccccgcgctgcgcccgccctcgcctcacctggcgcaggtggacacctgcgcaggtgtgtgccctccggcccctgaagcatggccagcagcggcatggctgacagcgccaaccacctgcccttctttttcggcaacatcacccgggaggaggcagaagattacctggtccaggggggcatgagtgatgggctttatttgctgcgccagagccgcaactacctgggtggcttcgccctgtccgtggcccacgggaggaaggcacaccactacaccatcgagcgggagctgaatggcacctacgccatcgccggtggcaggacccatgccagccccgccgacctctgccactaccactcccaggagtctgatggcctggtctgcctcctcaagaagcccttcaaccggccccaaggggtgcagcccaagactgggccctttgaggatttgaaggaaaacctcatcagggaatatgtgaagcagacatggaacctgcagggtcaggctctggagcaggccatcatcagtcagaagcctcagctggagaagctgatcgctaccacagcccatgaaaaaatgccttggttccatggaaaaatctctcgggaagaatctgagcaaattgtcctgataggatcaaagacaaatggaaagttcctgatccgagccagagacaacaacggctcctacgccctgtgcctgctgcacgaagggaaggtgctgcactatcgcatcgacaaagacaagacagggaagctctccatccccgagggaaagaagttcgacacgctctggcagctagtcgagcattattcttataaagcagatggtttgttaagagttcttactgtcccatgtcaaaaaatcggcacacagggaaatgttaattttggaggccgtccacaacttccaggttcccatcctgcgtcctcccctgcccaagggaaccggcaagagagtactgtgtcattcaatccgtatgagccagaacttgcaccctgggctgcagacaaaggcccccagagagaagccctacccatggacacagaggtgtacgagagcccctacgcggaccccgaggagatcaggcccaaggaggtttacctggaccgaaagctgctgacgctggaagacaaagaactgggctctggtaattttggaactgtgaaaaagggctactaccaaatgaaaaaagttgtgaaaaccgtggctgtgaaaatactgaaaaacgaggccaatgaccccgctcttaaagatgagttattagcagaagcaaatgtcatgcagcagctggacaacccgtacatcgtgcggatgatcgggatatgcgaggccgagtcctggatgctggttatggagatggcagaacttggtcccctcaataagtatttgcagcagaacagacatgtcaaggataagaacatcatagaactggttcatcaggtttccatgggcatgaagtacttggaggagagcaattttgtgcacagagatctggctgcaagaaatgtgttgctagttacccaacattacgccaagatcagtgatttcggactttccaaagcactgcgtgctgatgaaaactactacaaggcccagacccatggaaagtggcctgtcaagtggtacgctccggaatgcatcaactactacaagttctccagcaaaagcgatgtctggagctttggagtgttgatgtgggaagcattctcctatgggcagaagccatatcgagggatgaaaggaagtgaagtcaccgctatgttagagaaaggagagcggatggggtgccctgcagggtgtccaagagagatgtacgatctcatgaatctgtgctggacatacgatgtggaaaacaggcccggattcgcagcagtggaactgcggctgcgcaattactactatgacgtggtgaactaaccgctcccgcacctgtcggtggctgcctttgatcacaggagcaatcacaggaaaatgtatccagaggaattgattgtcagccacctccctctgccagtcgggagagccaggcttggatggaacatgcccacaacttgtcacccaaagcctgtcccaggactcaccctccacaaagcaaaggcagtcccgggagaaaagacggatggcaggatccaaggggctagctggatttgtttgttttcttgtctgtgtgattttcatacaggttatttttacgatctgtttccaaatccctttcatgtctttccacttctctgggtcccggggtgcatttgttactcatcgggcccagggacattgcagagtggcctagagcactctcaccccaagcggccttttccaaatgcccaaggatgccttagcatgtgactcctgaagggaaggcaaaggcagaggaatttggctgcttctacggccatgagactgatccctggccactgaaaagctttcctgacaataaaaatgttttgaggctttaaaaagaaaatcaagtttgaccagtgcagtttctaagcatgtagccagttaaggaaagaaagaaagaaaaaaaaaaaaggcctggatactgcttttgctgtctctgttatgagatggaagacttacatgtttgtgataaaaggggaccatgagaatgaattggcttggcttactttccccctgaaatcctctctcctgcagactgtcttgaagacctggtgactggtaaataaagccctgcatggaggctgcacagcaggggcaagaggcccatcccccagcatctcactgaggacagcttcaggctgccttcctctgaacgtggtccacaccttcctctcctccacagagagggtgccgccagaatcccctgtcgctttctgtgtctgcaatggggggcagcacagggatcaaagccatctaaagagtttccaaagaaagtattaattcagaacaagccaaagaccctgagcctcaccacaaacaggccttttggagtgtgaatttgagttgaagatacaagatcggagaatgattttctggtcttaactaatcctcatcttcatgtttgatctttaagaagtcatcacccattgatttcagttttgctgtacctcttgaaagttaaagagacatctcagcactttaggaggccgaggcgggtggatcacttgaggtaaggagtttgagactagcctggccaatatggtaaaaccccatctctactaaaaatacaaaaattagccgggcatggtggcatgtgtctgtagtcccagctactcgggaggctgaggcaggagaatcgcttgaacccaggaaacggaggtcgcagtgagccaagatcatgccactgcactccagcttgggcatcacagcgagactctgtcaaaacaaacaaacaaaaaaacaacttaaagaggtaatttagccatcattcttatgccagcagatataaataaacttggacccatctggtcttcagctaaacctgagacattttaaagtgcatggacagccatggacagcaggccctcctctaacaggggatgcaaggcatggagaaagacaatcagtacccaagctcagccacagaagacaggagtcactcatataacttgtgtttagaagtttttggtagccacgcacactttctgaaatcacactatctggtggtttaatcatatttttaaagacagaatccctgagtgctgagcagattctcaaaacacatttagaatccctgaaattagaaagatcaatgacaaaatatctgtcagccaggccacaaacaggtgtaaaattatgaaaggagtggttggatgtgccaagtttggtaaagtggtgactgcatctgagaaagaggctgtgaggctgaactcttggtggcttccttctgtaacttccagagggagtcttcaacacaggccccgtgctcgtaggaatacggtagcacctatgtaggaagtgcgtggagttttctgtcttctttctgtgtgatttttggcctttttatcagcacttctcccctcccaggagcctggggatgccaaacatccagaatgtgatgggacaagatgggggcaggggcctcacctccctgcagaggtccggccaggtctccttgtccctggacaatctcctgagcctctctgcttggtggagcaggcacctgtgtgcagaattcccactgtggccagcacgaggaagtcttttctagtgaaaatgtgtcttgtggtcaggaataattatcctttcccctgtagccaccaaggagggcaaatagagaaaggtaacctaattgaaggattggtcatgtgaaaagggctacatttgggaagctgggaaaggcctccaggcttctagagcagctagcttgggctggattctcatacccaggctgccccttggattgttctacccaagcttttccctggggtctgggctcactccataaggtaaggtgccttttaccttatggtccttctttagcaggtaacaaaggagcatcaggggcaggctgccctggtggcatcacactggctagtgaggccgtgaatatcttgtcccccagcagggccgacagtttctatcacagaaaacagtgtgttcagtggtgaaaatcgttgcatgcatgttttcatctgagcgtgtccttctcccatactccctatcagccagccctgcctgtagctgctgtatggtgattgcacttggacatcagtccaatgactgcaagtcggcctggattttcacttgcagaggctacagctgcattgtcaggtctcccagccctgcagagagctccctccactggttagcagtgtgttgtgttttccattcatttcagaagagctacattgtgtcactggacatttttaaaaactgtgatttttaataaaaatttaaaatttg

SEQ ID NO: 310859 - protein, 213 aa, Artificial Sequence
  derived and/or modified sequence
MIRDLSKMYPQTRHPAPHQPAQPFKFTISESCDRIKEEFQFLQAQYHSLKLECEKLASEKTEMQRHYVMYYEMSYGLNIEMHKQAEIVKRLNAICAQVIPFLSQEHQQQVVQAVERAKQVTMAELNAIIGEKKNKSDTPGSLKQQQLQAQHLSHGHGLPVPLTPHPSGLQPPAIPPIGSSAGLLALSSALGGQSHLPIKDEKKHHDNDHQRGE

SEQ ID NO: 310860 - DNA, 642 bp, Artificial Sequence
  derived and/or modified sequence
atgatccgcgacttgtctaagatgtacccccagacaaggcatccggccccccaccagcctgcccagccgttcaaatttaccatctctgagagctgcgatcgcatcaaggaggagttccaatttctacaggctcagtaccactccctcaaactggaatgtgagaagctcgccagcgagaaaacggagatgcagagacactatgtgatgtattatgaaatgtcatatggattaaacatagagatgcataagcaggcggagatcgtaaagagacttaatgctatctgtgcccaggttattccttttctgtcccaggaacatcaacagcaggtggtccaggcagtcgagagggctaaacaagtaacaatggctgaacttaatgcaataattggtgagaaaaaaaacaagagcgacacacccggtagcttgaaacagcagcagctgcaggcacagcatctgagtcatggacatggtttacccgtgcctctgactcctcatcctagcgggcttcagcccccagcaatcccacccattggttcctctgctgggttactcgccctctcttcagccctggggggtcaaagtcacctgcccattaaggacgaaaaaaagcaccatgataatgatcaccaaagaggtgaatag

SEQ ID NO: 310861 - DNA, 642 bp, Artificial Sequence
  derived and/or modified sequence
atgatccgggacctgagcaagatgtacccccagaccaggcacccagccccccaccagcctgcccagcccttcaagttcaccatcagcgagagctgtgaccgcatcaaggaggagttccagttcctgcaggcccagtaccacagcctgaagctggagtgtgagaagctggccagcgagaagacagagatgcagaggcactacgtgatgtactatgagatgtcctatggcctgaacatcgagatgcacaagcaggccgagatcgtgaagaggctgaatgccatctgtgcccaggtgatccccttcctgagccaggagcaccagcagcaggtggtgcaggccgtggagcgggccaagcaggtgaccatggccgagctgaatgccatcattggagagaagaagaacaagagtgacaccccaggcagcctgaagcagcagcagctgcaggcccagcacctgagccacggccacggcctgcctgtgcccctgaccccccaccccagcggcctgcagcccccagccatcccccccatcggcagcagcgctggcctgctggccctgagcagcgccctgggcggccagagccacctgcccatcaaggatgagaagaagcaccacgacaatgaccaccagagaggagagtag

SEQ ID NO: 310862 - DNA, 642 bp, Artificial Sequence
  derived and/or modified sequence
atgatccgggacctgagcaagatgtacccccagacccggcaccccgccccacaccaaccggcccagcccttcaaattcaccatcagcgagtcctgtgaccgaatcaaagaggagtttcagtttctgcaagcacagtatcactccttaaagctggaatgtgagaaactcgccagcgaaaagacggaaatgcagcgccattacgtgatgtactatgagatgagttacggtctgaatatcgaaatgcacaagcaggctgagatcgtcaaaagactgaacgctatctgcgcacaggtcattcccttcttgtctcaggaacaccagcagcaggtggtgcaggctgtcgaacgcgcaaaacaagtgaccatggctgagctgaacgctattatcggcgagaagaagaacaagtccgacacccctggctcgctgaaacaacagcagttacaggctcagcatttgagccatggacatggcttgcccgtaccactcactccccacccatcaggcctgcagccccctgccattccacccattgggtcatccgccggcctgctggctctgagttccgccctgggcggccaaagccatctgcccattaaggatgagaaaaagcaccacgataacgatcatcagagaggggaatag

SEQ ID NO: 310863 - DNA, 642 bp, Artificial Sequence
  derived and/or modified sequence
atgataagagacctgtcaaaaatgtatccccagactcggcatcccgctccccaccaacctgctcagcccttcaaatttaccatatcggaaagttgtgacaggatcaaagaagaattccagtttctgcaggctcaatatcactctctgaaattagagtgtgaaaagcttgcgagcgaaaagaccgagatgcagaggcactacgtgatgtactacgagatgtcttacggtttaaatatcgaaatgcacaagcaagcggagatcgtaaagcgcttgaacgccatttgcgctcaggtgatccctttcctctcccaggagcaccagcaacaggtggtgcaggctgtggagcgggcaaagcaggtgactatggctgaactgaacgctattataggtgagaaaaagaataaaagtgatacaccaggctcattaaagcagcagcagctgcaggcacagcacttgtctcatgggcatggcctgccagtcccactcacaccccacccctctgggctgcagccacctgcaattccacctatcggctcctctgcaggcctattggcgttgagctcagcgctgggagggcaatctcacttgcccataaaggatgagaagaagcaccacgacaatgaccaccagcgaggagaatag

SEQ ID NO: 310864 - DNA, 1470 bp, Artificial Sequence
  derived and/or modified sequence
acagagcgtgttgttagagctgtgctgagcgggtgtttgggttgttggctgctttcttccccctttctcacacacttgtatattattttgaggtggtgttcgcagagtttgaaaggagagagaattaaaaaaaaaagccgcaagcgtttcactcttttatttttataatccccttcaatttggggttaaaaaaaagacaagaaaacaggaaggaagagaaataaggaaatgagatgtggtaaaagaagctaaaaggtgccttttaaaagatcgttgctgtgaagtgaaaaaaatctccagagaaaccaaaaagcaccgccgagacctcttccgaaccaaaggagtttgtgtttgcttttagggaagaagaaagatcattcattcggaggaataacaaccaattaaaagacaaataaaaaaagtttggagtgggacgcagagcgagcgagaggagctgccggcgggcggtggggcgcggagcccgcactttcccggccgggtgagcggcggccgcggcgccgggctcggcgggtgcgcctcggcggagcgaacgtcggagcgttgccttgggagacgcgcgccggacaatgcccgcggcgggccagtgacgcccgcggggaatgcggagcggcccggcagccggcacccagccgccgccgcgcgttcctgccgcccgtgtcacgcgagacccggcgggggccgggaccgcccgagccgcccctcagaccgagccggccgcctccgctgccgcggccgcctcctcttcggggtcattaaagccaatgagccgcgcgcctctgccgagcgcagccaactaaatcggcttggatgattcgcgacctgagcaagatgtacccgcagaccagacacccagcaccgcatcagcctgctcaaccctttaaatttacaatttccgaatcctgtgatcggattaaggaagagtttcagtttttacaggctcaataccacagtctgaagctggaatgtgagaaactcgccagtgagaagacagagatgcagcggcattatgtcatgtattatgaaatgtcctatgggttgaatatagaaatgcacaagcaggcagagattgtcaagaggctgaatgctatctgtgcacaagtcattcctttcctgtcccaagagcaccagcaacaagtggtgcaggctgtggaacgggccaagcaggtgaccatggcagaactgaacgccatcattggggagaaaaagaataaaagtgacacacctggatcattaaagcagcaacaactccaggcccagcatttatcacatggacatggtctccccgtacctctgactccacacccttcagggctccagccccctgccattccacccatcggtagcagtgccgggcttctggccctctccagtgctctaggaggtcagtcccatcttccaattaaagatgagaagaagcaccatgacaatgatcaccaaagaggtgagtaa

SEQ ID NO: 310865 - DNA, 642 bp, Artificial Sequence
  derived and/or modified sequence
atgatcagagacctgagcaagatgtacccccagaccagacaccccgccccccaccagcccgcccagcccttcaagttcaccatcagcgagagctgcgacagaatcaaggaggagttccagttcctgcaggcccagtaccacagcctgaagctggagtgcgagaagctggccagcgagaagaccgagatgcagagacactacgtgatgtactacgagatgagctacggcctgaacatcgagatgcacaagcaggccgagatcgtgaagagactgaacgccatctgcgcccaggtgatccccttcctgagccaggagcaccagcagcaggtggtgcaggccgtggagagagccaagcaggtgaccatggccgagctgaacgccatcatcggcgagaagaagaacaagagcgacacccccggcagcctgaagcagcagcagctgcaggcccagcacctgagccacggccacggcctgcccgtgcccctgaccccccaccccagcggcctgcagccccccgccatcccccccatcggcagcagcgccggcctgctggccctgagcagcgccctgggcggccagagccacctgcccatcaaggacgagaagaagcaccacgacaacgaccaccagagaggcgagtag

SEQ ID NO: 310866 - protein, 501 aa, Artificial Sequence
  derived and/or modified sequence
MAAASVTPPGSLELLQPGFSKTLLGTKLEAKYLCSACRNVLRRPFQAQCGHRYCSFCLASILSSGPQNCAACVHEGIYEEGISILESSSAFPDNAARREVESLPAVCPSDGCTWKGTLKEYESCHEGRCPLMLTECPACKGLVRLGEKERHLEHECPERSLSCRHCRAPCCGADVKAHHEVCPKFPLTCDGCGKKKIPREKFQDHVKTCGKCRVPCRFHAIGCLETVEGEKQQEHEVQWLREHLAMLLSSVLEAKPLLGDQSHAGSELLQRCESLEKKTATFENIVCVLNREVERVAMTAEACSRQHRLDQDKIEALSSKVQQLERSIGLKDLAMADLEQKVLEMEASTYDGVFIWKISDFARKRQEAVAGRIPAIFSPAFYTSRYGYKMCLRIYLNGDGTGRGTHLSLFFVVMKGPNDALLRWPFNQKVTLMLLDQNNREHVIDAFRPDVTSSSFQRPVNDMNIASGCPLFCPVSKMEAKNSYVRDDAIFIKAIVDLTGL

SEQ ID NO: 310867 - protein, 422 aa, Artificial Sequence
  derived and/or modified sequence
MAAASVTPPGSLELLQPGFSKTLLGTKLEAKYLCSACRNVLRRPFQAQCGHRYCSFCLASILSSGPQNCAACVHEGIYEEGISILESSSAFPDNAARREVESLPAVCPSDGCTWKGTLKEYEVKMPACGMVTEAPAVGSRPRSPSSYDLVLHVPLTGAEACLMSVEEETELLLRSCHEGRCPLMLTECPACKGLVRLGEKERHLEHECPERSLSCRHCRAPCCGADVKRLDQDKIEALSSKVQQLERSIGLKDLAMADLEQKVLEMEASTYDGVFIWKISDFARKRQEAVAGRIPAIFSPAFYTSRYGYKMCLRIYLNGDGTGRGTHLSLFFVVMKGPNDALLRWPFNQKVTLMLLDQNNREHVIDAFRPDVTSSSFQRPVNDMNIASGCPLFCPVSKMEAKNSYVRDDAIFIKAIVDLTGL

SEQ ID NO: 310868 - protein, 500 aa, Artificial Sequence
  derived and/or modified sequence
VAGRALSSGRAATVGALFAGVTALMAAASVTPPGSLELLQPGFSKTLLGTKLEAKYLCSACRNVLRRPFQAQCGHRYCSFCLASILSSGPQNCAACVHEGIYEEGISILESSSAFPDNAARREVESLPAVCPSDGCTWKGTLKEYESCHEGRCPLMLTECPACKGLVRLGEKERHLEHECPERSLSCRHCRAPCCGADVKFQDHVKTCGKCRVPCRFHAIGCLETVEGEKQQEHEVQWLREHLAMLLSSVLEAKPLLGDQSHAGSELLQRCESLEKKTATFENIVCVLNREVERVAMTAEACSRQHRLDQDKIEALSSKVQQLERSIGLKDLAMADLEQKVLEMEASTYDGVFIWKISDFARKRQEAVAGRIPAIFSPAFYTSRYGYKMCLRIYLNGDGTGRGTHLSLFFVVMKGPNDALLRWPFNQKVTLMLLDQNNREHVIDAFRPDVTSSSFQRPVNDMNIASGCPLFCPVSKMEAKNSYVRDDAIFIKAIVDLTGL

SEQ ID NO: 310869 - DNA, 1789 bp, Artificial Sequence
  derived and/or modified sequence
gaaaccagcttccctcggaggctgcagcacagggctgacatgcaaacgtctgaaaaagaggcaagctctcggtgtgagcaagtggactgcggctatttgaggaaggagcccacgtgggaatcccctgagctgcgccatggccagaggctttgttcgcgggggtcacagctctcatggctgcagctagcgtgaccccccctggctccctggagttgctacagcccggcttctccaagaccctcctggggaccaagctggaagccaagtacctgtgctccgcctgcagaaacgtcctccgcaggcccttccaggcgcagtgtggccaccggtactgctccttctgcctggccagcatcctcagctctgggcctcagaactgtgctgcctgtgttcacgagggcatatatgaagaaggcatttctattttagaaagcagttcggccttcccagataatgctgcccgcagggaggtggagagcctgccggccgtctgtcccagtgatggatgcacctggaaggggaccctgaaagaatacgagagctgccacgaaggccgctgcccgctcatgctgaccgaatgtcccgcgtgcaaaggcctggtccgccttggtgaaaaggagcgccacctggagcacgagtgcccggagagaagcctgagctgccggcattgccgggcaccctgctgcggagcagacgtgaaggcgcaccacgaggtctgccccaagttccccttaacttgtgacggctgcggcaagaagaagatcccccgggagaagtttcaggaccacgtcaagacttgtggcaagtgtcgagtcccttgcagattccacgccatcggctgcctcgagacggtagagggtgagaaacagcaggagcacgaggtgcagtggctgcgggagcacctggccatgctactgagctcggtgctggaggcaaagcccctcttgggagaccagagccacgcggggtcagagctcctgcagaggtgcgagagcctggagaagaagacggccacttttgagaacattgtctgcgtcctgaaccgggaggtggagagggtggccatgactgccgaggcctgcagccggcagcaccggctggaccaagacaagattgaagccctgagtagcaaggtgcagcagctggagaggagcattggcctcaaggacctggcgatggctgacttggagcagaaggtcttggagatggaggcatccacctacgatggggtcttcatctggaagatctcagacttcgccaggaagcgccaggaagctgtggctggccgcatacccgccatcttctccccagccttctacaccagcaggtacggctacaagatgtgtctgcgtatctacctgaacggcgacggcaccgggcgaggaacacacctgtccctcttctttgtggtgatgaagggcccgaatgacgccctgctgcggtggcccttcaaccagaaggtgaccttaatgctgctcgaccagaataaccgggagcacgtgattgacgccttcaggcccgacgtgacttcatcctcttttcagaggccagtcaacgacatgaacatcgcaagcggctgccccctcttctgccccgtctccaagatggaggcaaagaattcctacgtgcgggacgatgccatcttcatcaaggccattgtggacctgacagggctctaactgccccctactggtgtctgggggttgggggcagccaggcacagccggctcacggaggggccaccacgctgggccagggtctcactgtacaagtgggcaggggccgcgct

SEQ ID NO: 310870 - protein, 1164 aa, Artificial Sequence
  derived and/or modified sequence
MAQQANVGELLAMLDSPMLGVRDDVTAVFKENLNSDRGPMLVNTLVDYYLETSSQPALHILTTLQEPHDKHLLDRINEYVGKAATRLSILSLLGHVIRLQPSWKHKLSQAPLLPSLLKCLKMDTDVVVLTTGVLVLITMLPMIPQSGKQHLLDFFDIFGRLSSWCLKKPGHVAEVYLVHLHASVYALFHRLYGMYPCNFVSFLRSHYSMKENLETFEEVVKPMMEHVRIHPELVTGSKDHELDPRRWKRLETHDVVIECAKISLDPTEASYEDGYSVSHQISARFPHRSADVTTSPYADTQNSYGCATSTPYSTSRLMLLNMPGQLPQTLSSPSTRLITEPPQATLWSPSMVCGMTTPPTSPGNVPPDLSHPYSKVFGTTAGGKGTPLGTPATSPPPAPLCHSDDYVHISLPQATVTPPRKEERMDSARPCLHRQHHLLNDRGSEEPPGSKGSVTLSDLPGFLGDLASEEDSIEKDKEEAAISRELSEITTAEAEPVVPRGGFDSPFYRDSLPGSQRKTHSAASSSQGASVNPEPLHSSLDKLGPDTPKQAFTPIDLPCGSADESPAGDRECQTSLETSIFTPSPCKIPPPTRVGFGSGQPPPYDHLFEVALPKTAHHFVIRKTEELLKKAKGNTEEDGVPSTSPMEVLDRLIQQGADAHSKELNKLPLPSKSVDWTHFGGSPPSDEIRTLRDQLLLLHNQLLYERFKRQQHALRNRRLLRKVIKAAALEEHNAAMKDQLKLQEKDIQMWKVSLQKEQARYNQLQEQRDTMVTKLHSQIRQLQHDREEFYNQSQELQTKLEDCRNMIAELRIELKKANNKVCHTELLLSQVSQKLSNSESVQQQMEFLNRQLLVLGEVNELYLEQLQNKHSDTTKEVEMMKAAYRKELEKNRSHVLQQTQRLDTSQKRILELESHLAKKDHLLLEQKKYLEDVKLQARGQLQAAESRYEAQKRITQVFELEILDLYGRLEKDGLLKKLEEEKAEAAEAAEERLDCCNDGCSDSMVGHNEEASGHNGETKTPRPSSARGSSGSRGGGGSSSSSSELSTPEKPPHQRAGPFSSRWETTMGEASASIPTTVGSLPSSKSFLGMKARELFRNKSESQCDEDGMTSSLSESLKTELGKDLGVEAKIPLNLDGPHPSPPTPDSVGQLHIMDYNETHHEHS

SEQ ID NO: 310871 - protein, 366 aa, Artificial Sequence
  derived and/or modified sequence
MAQQANVGELLAMLDSPMLGVRDDVTAVFKENLNSDRGPMLVNTLVDYYLETSSQPALHILTTLQEPHDKHLLDRINEYVGKAATRLSILSLLGHVIRLQPSWKHKLSQAPLLPSLLKCLKMDTDVVVLTTGVLVLITMLPMIPQSGKQHLLDFFDIFGRLSSWCLKKPGHVAEVYLVHLHASVYALFHRLYGMYPCNFVSFLRSHYSMKENLETFEEVVKPMMEHVRIHPELVTGSKDHELDPRRWKRLETHDVVIECAKISLDPTEASYEDGYSVSHQISARFPHRSADVTTSPYADTQNSYGCATSTPYSTSRLMLLNMPGQLPQTLSSPSTRLITEPPQVWCQLVCLLSPLLSGEADPLGQI

SEQ ID NO: 310872 - DNA, 3495 bp, Artificial Sequence
  derived and/or modified sequence
atggcccagcaggccaacgtgggcgagctgctggccatgctggacagccccatgctgggcgtgagagacgacgtgaccgccgtgttcaaggagaacctgaacagcgacagaggccccatgctggtgaacaccctggtggactactacctggagaccagcagccagcccgccctgcacatcctgaccaccctgcaggagccccacgacaagcacctgctggacagaatcaacgagtacgtgggcaaggccgccaccagactgagcatcctgagcctgctgggccacgtgatcagactgcagcccagctggaagcacaagctgagccaggcccccctgctgcccagcctgctgaagtgcctgaagatggacaccgacgtggtggtgctgaccaccggcgtgctggtgctgatcaccatgctgcccatgatcccccagagcggcaagcagcacctgctggacttcttcgacatcttcggcagactgagcagctggtgcctgaagaagcccggccacgtggccgaggtgtacctggtgcacctgcacgccagcgtgtacgccctgttccacagactgtacggcatgtacccctgcaacttcgtgagcttcctgagaagccactacagcatgaaggagaacctggagaccttcgaggaggtggtgaagcccatgatggagcacgtgagaatccaccccgagctggtgaccggcagcaaggaccacgagctggaccccagaagatggaagagactggagacccacgacgtggtgatcgagtgcgccaagatcagcctggaccccaccgaggccagctacgaggacggctacagcgtgagccaccagatcagcgccagattcccccacagaagcgccgacgtgaccaccagcccctacgccgacacccagaacagctacggctgcgccaccagcaccccctacagcaccagcagactgatgctgctgaacatgcccggccagctgccccagaccctgagcagccccagcaccagactgatcaccgagcccccccaggccaccctgtggagccccagcatggtgtgcggcatgaccaccccccccaccagccccggcaacgtgccccccgacctgagccacccctacagcaaggtgttcggcaccaccgccggcggcaagggcacccccctgggcacccccgccaccagccccccccccgcccccctgtgccacagcgacgactacgtgcacatcagcctgccccaggccaccgtgaccccccccagaaaggaggagagaatggacagcgccagaccctgcctgcacagacagcaccacctgctgaacgacagaggcagcgaggagccccccggcagcaagggcagcgtgaccctgagcgacctgcccggcttcctgggcgacctggccagcgaggaggacagcatcgagaaggacaaggaggaggccgccatcagcagagagctgagcgagatcaccaccgccgaggccgagcccgtggtgcccagaggcggcttcgacagccccttctacagagacagcctgcccggcagccagagaaagacccacagcgccgccagcagcagccagggcgccagcgtgaaccccgagcccctgcacagcagcctggacaagctgggccccgacacccccaagcaggccttcacccccatcgacctgccctgcggcagcgccgacgagagccccgccggcgacagagagtgccagaccagcctggagaccagcatcttcacccccagcccctgcaagatccccccccccaccagagtgggcttcggcagcggccagccccccccctacgaccacctgttcgaggtggccctgcccaagaccgcccaccacttcgtgatcagaaagaccgaggagctgctgaagaaggccaagggcaacaccgaggaggacggcgtgcccagcaccagccccatggaggtgctggacagactgatccagcagggcgccgacgcccacagcaaggagctgaacaagctgcccctgcccagcaagagcgtggactggacccacttcggcggcagcccccccagcgacgagatcagaaccctgagagaccagctgctgctgctgcacaaccagctgctgtacgagagattcaagagacagcagcacgccctgagaaacagaagactgctgagaaaggtgatcaaggccgccgccctggaggagcacaacgccgccatgaaggaccagctgaagctgcaggagaaggacatccagatgtggaaggtgagcctgcagaaggagcaggccagatacaaccagctgcaggagcagagagacaccatggtgaccaagctgcacagccagatcagacagctgcagcacgacagagaggagttctacaaccagagccaggagctgcagaccaagctggaggactgcagaaacatgatcgccgagctgagaatcgagctgaagaaggccaacaacaaggtgtgccacaccgagctgctgctgagccaggtgagccagaagctgagcaacagcgagagcgtgcagcagcagatggagttcctgaacagacagctgctggtgctgggcgaggtgaacgagctgtacctggagcagctgcagaacaagcacagcgacaccaccaaggaggtggagatgatgaaggccgcctacagaaaggagctggagaagaacagaagccacgtgctgcagcagacccagagactggacaccagccagaagagaatcctggagctggagagccacctggccaagaaggaccacctgctgctggagcagaagaagtacctggaggacgtgaagctgcaggccagaggccagctgcaggccgccgagagcagatacgaggcccagaagagaatcacccaggtgttcgagctggagatcctggacctgtacggcagactggagaaggacggcctgctgaagaagctggaggaggagaaggccgaggccgccgaggccgccgaggagagactggactgctgcaacgacggctgcagcgacagcatggtgggccacaacgaggaggccagcggccacaacggcgagaccaagacccccagacccagcagcgccagaggcagcagcggcagcagaggcggcggcggcagcagcagcagcagcagcgagctgagcacccccgagaagcccccccaccagagagccggccccttcagcagcagatgggagaccaccatgggcgaggccagcgccagcatccccaccaccgtgggcagcctgcccagcagcaagagcttcctgggcatgaaggccagagagctgttcagaaacaagagcgagagccagtgcgacgaggacggcatgaccagcagcctgagcgagagcctgaagaccgagctgggcaaggacctgggcgtggaggccaagatccccctgaacctggacggcccccaccccagcccccccacccccgacagcgtgggccagctgcacatcatggactacaacgagacccaccacgagcacagctag

SEQ ID NO: 310873 - DNA, 3495 bp, Artificial Sequence
  derived and/or modified sequence
atggctcagcaggcaaatgtcggagaattgttggctatgttggattctcccatgcttggcgtgcgagatgatgtcactgcagtatttaaggaaaacctaaattctgatcgcggccctatgctcgtgaacactttagtggactactacctggaaacgtcaagccagccagcgcttcatatcctgacaaccctgcaggaaccgcatgacaagcatctgcttgacaggataaatgaatacgtcgggaaggccgctacgaggctgtccatcttgtcccttcttgggcacgtgatacggctccagccttcttggaaacacaagctgagccaggcccccctgctaccttcactgctgaagtgtttgaaaatggacacggacgtggtcgtgttgacaaccggagttttagtcttaattactatgttaccaatgatccctcagtccgggaagcagcatctcttggatttcttcgatatctttggccgtctcagctcctggtgcctcaaaaagcccggacacgtagcagaagtgtatctcgtgcaccttcatgctagcgtatacgctcttttccatagactgtacgggatgtacccctgcaactttgtgtcatttttgagatcacactactctatgaaagagaatttggaaacattcgaggaagtggtcaagcctatgatggagcatgtcagaattcaccctgaactcgtcaccggatccaaagatcacgaactggatccccggagatggaagcgactggagacgcacgacgtggtcattgagtgtgctaaaatcagccttgatccaacggaagcgtcttatgaagacgggtatagcgtgagccaccagatctcagctcggtttcctcaccgttctgctgatgtaactacctccccttacgcagatacacagaacagctatggatgtgcaacatcaacaccctattcaacatcacggttaatgctactgaacatgcctgggcaacttcctcaaacactatccagtccctccactcggcttatcaccgaacctccccaagctaccctttggagccccagcatggtttgtgggatgaccacgccccccacaagccccggcaacgttccacccgatctctcccacccctatagcaaggtgttcgggaccactgctggtggcaaaggcacaccactgggaacaccagctactagccctccccctgccccactgtgccactccgatgattatgttcacataagcctgccacaggcgacagtgactccccccaggaaggaggagcgcatggactctgcccgaccatgccttcatcgccaacaccatctcttgaacgatcggggatcagaggagccacccggttctaaagggagtgttacactctcggatctacccggcttccttggcgacctcgcatctgaggaagactctatcgagaaggacaaagaggaggccgcaatctccagggaactgtcagagatcacgactgctgaggctgaacccgtcgtgcctcgtggggggttcgatagtccattctatagggactccctgccaggctcccaacgtaagacccacagcgccgcctcgagcagccagggagcgtcagttaatcccgagccactgcacagcagcctggacaaactaggtcctgatactccaaaacaggcgttcacccccatcgaccttccctgtggttccgctgatgagtctccagctggcgatcgcgaatgccagacctcattggagacatcaatatttaccccatccccttgcaaaattcctccacccaccagagtcggcttcgggagtggccagccgccaccttatgaccatctcttcgaagtggccctgcctaaaacagcccaccactttgtgattcgcaaaaccgaagagcttcttaaaaaagctaagggcaacactgaagaggatggagtgccctctacatcccccatggaggtcctcgatcgcctcatacagcagggagccgatgctcacagtaaggagctcaacaagctgccacttccaagcaaatctgtggattggacccactttggtggcagtcctcccagtgacgaaatcaggacactcagagatcagctgctgctgctgcacaatcagctcctctatgaacggtttaagcgccagcagcacgccctgcggaatcggcgactcttgcgcaaggtcattaaggccgccgcactagaagagcacaacgccgccatgaaagaccagttgaaactccaggagaaggacattcagatgtggaaagtgagtctgcaaaaggagcaggctagatataaccagctgcaagagcagcgggacaccatggtaaccaaattgcattctcagattcggcaactgcaacatgaccgggaagaattctacaaccagtcccaagaactgcagacaaaacttgaagactgtcgaaacatgatagccgagcttagaattgaactgaagaaagcaaacaataaagtatgccatacagagctcctactctcccaggtgagccaaaaactgtctaattcagagagcgtccagcagcagatggaattcttgaacagacagctcctcgtgcttggcgaagtgaatgagctttatctcgaacaactacagaacaagcacagcgacaccaccaaggaggtagagatgatgaaagcagcatatcgaaaggagctggaaaagaacagaagccatgtgctgcagcagactcagcgattggacacatcccaaaagcgcatcctggagctcgaaagtcacctcgctaagaaagatcatctgttactggagcagaagaagtatctcgaagatgtcaaactgcaggcaaggggccagctccaggccgctgagagcagatacgaggcacagaagagaatcacccaggtcttcgaactcgagatcctggatctctacggtcgtctagaaaaggatggactgctgaaaaagttggaggaggagaaggccgaggccgctgaagccgctgaagaaaggctggactgctgcaacgatggttgttctgacagtatggtaggccacaatgaggaagcctctggccataatggcgaaaccaaaacaccaaggccaagtagcgcccgggggtcctcgggatcccgtgggggcgggggatcatcaagttcatcctcggaattgtccactcccgagaaaccaccccatcaaagagctgggcccttttctagcaggtgggagaccactatgggggaagcatcagccagcatccccactacggtaggaagtcttccctcgtcaaagtcattcctgggaatgaaggctcgagagctctttagaaacaagtccgagtcacagtgtgacgaggatggcatgacctcttcgctctccgagtcccttaaaaccgaactgggcaaggatttgggtgtagaagctaaaatccctctcaacctggatgggcctcatccctcgcctcctacgcctgacagcgtaggacagctgcacattatggactataatgaaacgcaccacgagcactcatag

SEQ ID NO: 310874 - DNA, 3495 bp, Artificial Sequence
  derived and/or modified sequence
atggcccagcaagctaacgttggggaactgctagcaatgctggactcccctatgctgggcgtgcgtgacgatgtgacggcagtgttcaaagaaaatctgaactctgaccgagggcccatgctcgtgaatactctcgtagactattatctcgaaacttcgtcccagcctgctctgcacatcctcaccaccctccaggagcctcacgataagcacctgctggatcgcataaatgaatatgtgggtaaagcagccacccgcctctcaatcttatccctcctgggacacgtgatccggcttcagccaagctggaaacacaagttgagccaggccccactgcttccctccttgctgaagtgcttaaaaatggacactgacgttgtcgtgctgaccactggcgttctcgtcctcatcacaatgctgccaatgataccacagtcagggaaacagcatctattagacttcttcgacatattcggcaggctgagctcttggtgtcttaagaaaccggggcacgtggccgaagtctaccttgtacatcttcatgcctcggtttacgcactgtttcataggctatatggaatgtacccatgcaatttcgtgtccttcctgagatcccactacagcatgaaagagaatctcgagacattcgaggaggttgtgaagcccatgatggaacacgtcagaatccaccccgaattagtcacaggatcaaaggatcatgagctcgacccaagacggtggaaacggctggaaacccacgacgtagtgatcgagtgcgccaaaatctccttggacccaacagaagccagttacgaggatggttactccgttagtcaccagattagcgccaggtttcctcaccgttccgcagacgttactacgagcccttacgccgatacccagaactcatacggctgcgccacgagtaccccatacagcacctcccgcttgatgctgttgaatatgccggggcagctgccacaaaccctctctagccctagtactcgtcttattaccgaaccacctcaagccacattatggagcccttcaatggtatgcggcatgacaaccccccccacaagtcctgggaacgtcccaccagacctttcccatccatacagcaaggtgttcggcacaacagccggagggaaagggacccccctgggcactcccgccacatctcccccgccagctcctctgtgccatagtgatgactacgtccacatatctctcccacaggctaccgtgaccccgcccaggaaggaggagcggatggacagtgcccgcccatgcctgcaccgccagcaccatctactgaatgacagagggagcgaagaacctcccgggtcaaaaggtagcgtgacactgtctgatctgccagggtttttgggcgatctcgcctccgaagaagatagcatagagaaggacaaggaggaggcggcgatttccagggaactgagtgaaatcaccacagctgaagccgaacccgtcgttcctcgcggaggatttgacagccccttctatagagatagtctgccaggctcgcaaagaaagacccatagtgctgcctcgtcttcacagggcgcaagcgtgaacccggagcctcttcactcctcactcgataagttgggcccagacacacccaaacaagccttcactcccattgatctcccatgtggcagtgccgatgaaagccctgctggggaccgcgaatgtcagacgtcactcgagacgagcatttttacgccctcaccgtgcaagatcccgccccctacgcgggtgggtttcgggagcggacagccccctccatatgatcacttgtttgaagtggcattgcctaagaccgctcaccactttgtcattcgtaagaccgaggaactcctgaaaaaagccaagggtaataccgaagaagacggcgtgcccagcacatcacctatggaagtgctggatagactgatacagcagggcgctgacgcccatagtaaggaactcaacaaacttccgcttccttcgaagagcgtcgactggacacatttcggcggatctcccccatcagacgagattagaacactgcgcgatcagttactactactgcacaatcagctactgtacgaacggtttaaaaggcagcaacacgctttgaggaatcgcagactgctgcgcaaagttatcaaagccgccgccctcgaggagcacaacgctgccatgaaggatcagctgaagctccaggagaaagacatccagatgtggaaggtgtctctgcagaaggagcaggcacgatataatcagctgcaggaacagagagacacaatggtaacgaaacttcattctcagatccgccagctccagcatgatagagaggaattctacaatcagtcacaggaactgcaaactaaacttgaggactgtcgcaacatgatcgccgagctaaggatcgagttgaaaaaggctaacaataaggtttgccacaccgaacttctattatcccaggtgagccagaagctgtccaactcagaatcagtgcagcagcaaatggaattcctgaataggcagctgctggttctcggggaggtgaatgagctctatctggaacaacttcagaacaagcacagtgataccacgaaagaagtggagatgatgaaggccgcatacaggaaggagttggaaaaaaataggtcccatgtcctgcagcaaacacagcgccttgatacctcccagaagcgtatcctggagctggagtcacatctcgctaagaaggatcacttactccttgagcagaagaaatatctggaggatgtcaaacttcaggccaggggtcaattacaggctgcggaatcccgatacgaggcacagaagcgaattactcaggttttcgaattagagattctggacctctacggacgtctggagaaggacggccttttaaaaaagctggaggaggagaaggcagaggccgctgaagctgcagaagagcggttagactgctgcaacgacggatgtagcgactccatggtggggcacaatgaggaggcatctgggcataatggcgaaacaaagaccccacggcctagttctgcaagggggagttcggggagcaggggaggcggcggatcttcgtcctccagttctgaactgagcacccctgagaaacccccacaccagcgcgccggcccattttcttcccgatgggaaacaaccatgggtgaggcctctgcctccattcctactaccgtcggtagtctgcccagttccaagagctttctgggcatgaaagcaagagaattgttccgcaacaagagtgagtcgcagtgcgacgaggatgggatgacctcctcattgagtgagagtcttaaaacagagcttggtaaagatctcggggttgaggctaaaatacccttgaacctggatgggccacacccttctccgcccacgcccgactcagttggtcagttacatattatggactacaacgaaacgcaccacgagcatagctag

SEQ ID NO: 310875 - DNA, 3495 bp, Artificial Sequence
  derived and/or modified sequence
atggcccagcaggccaacgtgggggagctgctggccatgctggacagccccatgctgggcgtgagagatgatgtgacagctgtgttcaaggagaacctgaacagcgaccggggccccatgctggtgaacaccctggtggactactacctggagaccagcagccagcctgccctgcacatcctgaccaccctgcaggagccccatgacaagcacctgctggaccgcatcaatgaatatgtgggcaaggccgccacccggctgagcatcctgagcctgctgggccacgtgatccggctgcagcccagctggaagcacaagctgagccaggcccccctgctgcccagcctgctgaagtgcctgaagatggacacagatgtggtggtgctgaccactggagtgctggtgctgatcaccatgctgcccatgatcccccagagcggcaagcagcacctgctggacttctttgacatcttcggccgcctgagctcctggtgcctgaagaagccaggccacgtggccgaggtgtacctggtgcacctgcacgcctctgtgtatgccctcttccaccggctgtatggcatgtacccctgcaactttgtgtccttcctgcggagccactacagcatgaaggagaacctggagacctttgaggaggtggtgaagcccatgatggagcacgtgcgcatccaccctgagctggtgacaggcagcaaggaccacgagctggacccccggcgctggaagaggctggagacccatgatgtggtgattgaatgtgccaagatcagcctggaccccacagaggccagctatgaagatggctacagcgtgagccaccagatcagcgcccgcttcccccacaggtctgcagatgtgaccaccagcccctatgctgacacccagaacagctatggctgtgccaccagcaccccctacagcaccagccggctgatgctgctgaacatgcctggccagctgccccagaccctgagcagccccagcaccaggctcatcacagagcccccccaggccaccctgtggagccccagcatggtgtgtggcatgaccaccccacccaccagccctggaaatgtgcccccagacctgagccacccctacagcaaggtgtttggcaccacagctgggggcaagggcacccccctgggcaccccagccaccagccccccaccagcccccctgtgccacagtgatgattatgtgcacatcagcctgccccaggccaccgtgaccccacccaggaaggaggagaggatggattctgcccggccctgcctgcaccggcagcaccacctgctgaatgaccggggcagcgaggagcccccaggcagcaaaggatctgtgaccctgagtgacctgcccggcttcctgggggacctggccagcgaggaggacagcattgagaaggacaaggaggaggccgccatcagccgggagctgtctgagatcaccacagctgaggccgagcctgtggtgccccggggcggctttgacagccccttctacagagacagcctgcccggcagccagaggaagacccacagcgctgccagcagcagccagggcgcctctgtgaaccctgagcccctgcacagcagcctggacaagctgggccctgacacccccaagcaggccttcacccccatcgacctgccctgtggcagcgcagatgagagccctgctggggaccgggagtgccagaccagcctggagaccagcatcttcacccccagcccctgcaagatccccccacccaccagggtgggcttcggcagcggccagcccccaccctatgaccacctgtttgaggtggccctgcccaagacagcccaccactttgtgatcaggaagacagaggagctgctgaagaaggccaagggcaacacagaagaagatggagtgcccagcaccagccccatggaggtgctggacaggctcatccagcagggcgcagatgcccacagcaaggagctgaacaagctgcccctgcccagcaagtctgtggactggacccactttggaggcagccccccatctgatgagatccgcaccctgcgggaccagctgctgctgctgcacaaccagctgctgtatgagcgcttcaagaggcagcagcacgccctgaggaacagaaggctgctgaggaaggtgatcaaggctgctgccctggaggagcacaatgctgccatgaaggaccagctgaagctgcaggagaaggacatccagatgtggaaggtgtccctgcagaaggagcaggcccgctacaaccagctgcaggagcagagggacaccatggtgaccaagctgcacagccagatccggcagctgcagcacgaccgggaggagttctacaaccagagccaggagctgcagaccaagctggaggactgcaggaacatgattgctgagctgcgcatcgagctgaagaaggccaacaacaaggtgtgccacacagagctgctgctgagccaggtgtcccagaagctgagcaacagcgagagcgtgcagcagcagatggagttcctgaaccggcagctgctggtgctgggggaggtgaatgagctgtacctggagcagctgcagaacaagcacagcgacaccaccaaggaggtggagatgatgaaggccgcctacaggaaggagctggagaagaacagaagccacgtgctgcagcagacccagaggctggacaccagccagaagaggatcctggagctggagagccacctggccaagaaggaccacctgctgctggagcagaagaagtacctggaggatgtgaagctgcaggcccggggccagctgcaggccgctgagagccgctatgaggcccagaagaggatcacccaggtgtttgagctggagatcctggacctgtatggccgcctggagaaggatggcctgctgaagaagctggaggaggagaaggccgaggccgctgaggccgctgaggagcggctggactgctgcaatgatggctgcagcgacagcatggtgggccacaatgaggaggccagcggccacaatggagagaccaagaccccccggcccagcagcgcccggggcagcagcggcagccggggcggcggcggcagcagcagcagcagcagcgagctgagcaccccagagaagccaccccaccagagagctggccccttcagcagccgctgggagaccaccatgggagaggccagcgccagcatccccaccaccgtgggcagcctgcccagcagcaagagcttcctgggcatgaaggcccgggagctgttcaggaacaagtctgagagccagtgtgatgaagatggcatgaccagcagcctgtctgagagcctgaagacagagctgggcaaggacctgggcgtggaggccaagatccccctgaacctggatggcccccaccccagcccccccaccccagattctgtgggccagctgcacatcatggactacaatgagacccaccacgagcacagctag

SEQ ID NO: 310876 - DNA, 3495 bp, Artificial Sequence
  derived and/or modified sequence
atggcccagcaggccaacgtgggcgagctgctggccatgctggactcccccatgttgggggtacgggatgatgtcacagctgtatttaaagagaatttaaacagtgaccgcggtccaatgctggtgaacacactcgttgactactacctggagactagctctcaaccggccctacatatcctgaccaccctccaagaaccacacgacaagcatctactggatcggatcaacgaatatgtgggaaaagccgccaccaggctgagtattctgagtctcttggggcacgtcatcagactgcagccttcttggaaacataaactgagtcaggcacctctgctcccgagcctcttgaagtgtctgaaaatggataccgatgtggtcgtgcttactaccggtgtcctagtgctgattacgatgttacctatgattcctcagtcaggtaagcaacacttgcttgatttctttgacatttttggaagactgtcctcctggtgcctaaagaaacccggtcacgtcgcagaggtgtaccttgtccacctgcacgctagcgtgtacgccctctttcatagactgtatggtatgtacccttgcaactttgtgtccttcttgcgctctcattattcgatgaaagaaaatttagaaacctttgaggaggtagtcaagcccatgatggagcacgttcgaatacatcctgaattggtgactggatctaaggatcacgagttggaccccagaagatggaaaagactggaaacccatgatgtggtcatcgaatgcgccaagattagccttgacccaacagaggcctcatatgaggacggctattccgtaagccaccagatttccgcaaggttcccacaccgatctgccgacgtgactacctccccatacgccgacacacagaactcgtacggctgtgctacatctactccatatagcaccagtagactcatgctgctgaacatgcccggtcaacttccccagacacttagttccccctctacccgcttgattaccgagcccccacaagccaccctatggagcccatcgatggtgtgtggaatgaccacgccccccacctcccctggcaacgtccctcctgacttaagccacccttattcaaaagtcttcggaacaactgctggcggaaaaggaacgcccttgggcacacctgcaactagtccccccccagcccccctctgccactctgatgactacgtgcacatctcgctcccccaagccaccgtgacacccccaagaaaggaagaacggatggattcagctagaccatgtctgcacaggcagcatcacctactgaacgaccgcggaagcgaagaaccacctgggagcaaaggatccgtaaccctcagcgatctgcctggctttcttggagacctggcttctgaagaggactcaatagagaaggataaggaggaagcagccatctcaagagagctaagcgagatcacgacagctgaagcagagccagtcgtcccacgtggcggcttcgacagtcctttctacagagactcactacccggatcccagagaaagacacattccgctgcaagttcatcacagggtgctagtgtcaacccagaacctctccactccagtctggacaagcttggccctgacacccctaagcaagccttcactcctattgacctgccttgcggtagcgccgatgaaagccccgcgggggaccgggagtgccagacctctctggagacatcgatctttactcccagcccctgtaagattccccctccaacacgcgtcggatttggatctgggcagccaccgccttacgaccatctgttcgaggttgctctgcctaagaccgcacaccattttgtcattcggaagactgaggagttgctgaaaaaggctaagggcaatactgaagaggacggggtaccttctacgtccccaatggaggtgttggataggttgattcaacagggggcggacgcacatagtaaggagcttaacaagctcccactgcctagcaagtcagtggattggacacacttcggcgggtctcctccttctgatgaaatacggacgctcagagatcagttgctgttattgcataaccagctgttgtatgaacgctttaagcgccagcagcacgctctcagaaatagacggctccttcgtaaggtcataaaggccgctgctctcgaggaacacaatgcagccatgaaggatcagttgaagctccaagagaaggatattcagatgtggaaggttagtctgcaaaaggagcaagcacgctacaaccagctgcaggagcagcgagataccatggtgactaagttgcactctcagattcggcagctgcaacacgatagagaagagttttataaccagtcccaggagctgcagacaaagctggaggactgccgtaacatgattgcggaactgcgtattgagttgaaaaaagcaaataacaaggtgtgtcacaccgaactgctgttatctcaggtttctcagaaactatctaacagtgagtcagtgcagcagcagatggaattcctaaatcggcagctgctagtgcttggagaagtgaacgaactctatctggagcagctgcagaacaaacacagcgacaccaccaaggaagtagaaatgatgaaagcggcttatagaaaggaattggagaaaaacagaagccacgtcttgcaacagactcagcggctcgatacctcccaaaaaagaatactggagcttgagtcccatctcgcgaagaaggaccacctgcttctcgaacagaaaaagtacctcgaggatgtaaagctgcaagcaagaggacaactacaagctgctgagagccggtatgaggcgcagaagcggattacacaggtctttgaattggaaatcctagatttgtatggacgcctcgaaaaggatggcctgctgaaaaaactggaggaagaaaaggctgaagcagcggaagcggctgaggagcgtctcgattgctgcaatgatgggtgctctgattccatggtgggccacaacgaagaggcttcgggccacaatggcgagacaaagaccccccgcccaagttcagcacggggctcaagtggctctcggggtggggggggatcaagctccagttcgtctgagctgtctactcccgaaaaacctccacaccagagggctggcccgttttcttcaaggtgggagactacaatgggagaggcgagtgcttctattcccaccacagtcggaagtctgccaagcagtaaaagcttccttggcatgaaggcgcgtgaactattccgtaataaatcagaatctcagtgtgatgaagatggcatgacatctagcctcagtgaaagcctgaagactgagctgggcaaagatcttggcgtggaggccaagatccctctcaacctggatggcccacacccatcaccccccacgcctgactcagtggggcagctgcacattatggactataatgagacacaccacgaacactcttag

SEQ ID NO: 310877 - DNA, 3495 bp, Artificial Sequence
  derived and/or modified sequence
atggcccagcaggccaacgtgggcgagctgctggccatgctggactcacctatgctgggtgtcagagatgacgtaaccgctgtatttaaggagaatctgaacagtgaccggggcccgatgctggtgaacactctggtagattactatctagagacgtcctcgcagcccgccctgcatattttgaccacactccaagaaccccacgacaagcatctgttggataggattaatgaatatgtcggtaaagctgctacacgcctctccatcctgagccttctcgggcacgtgatcagactgcagccgagttggaaacataaattatcgcaagccccattgctgcccagtcttctgaagtgtctcaagatggataccgacgtggttgtgcttacaactggagtactagtgctcattacgatgctgcccatgattccgcagtccgggaaacagcaccttttggatttttttgatatttttggccgcttgagctcctggtgccttaagaaacccggccatgtggctgaggtttacctggtgcacctgcatgcttcagtctacgccctgttccaccgcctgtatggaatgtatccttgcaatttcgtgagttttctgcgcagccattactctatgaaagaaaacctcgagactttcgaagaagtcgtgaaacctatgatggagcacgtgcgaatacaccccgaactggtcacaggaagcaaggatcacgagctggaccctcgcaggtggaagcgactggagacacacgacgttgtgatcgagtgtgccaagatctcacttgatccaactgaagcttcctacgaagatggctattccgtgtctcatcagattagcgcccgtttcccccataggtctgccgacgtgaccacatccccatatgctgatactcagaactcctatgggtgtgccacttccaccccctattctacgagtcgacttatgctcttgaacatgcctggtcagctcccccagacactgtcatccccttctacccgcctgattaccgaaccaccgcaggctaccctttggtcaccgtcaatggtatgtggcatgaccactcccccaacgtctccaggtaatgtgccaccagatctctcgcacccgtattccaaagtctttggcacaacggcaggtggaaaaggaacgccactcggcactccagcaacgagccctccacccgcacccctgtgccactcagatgactacgtgcatatcagcttgccccaggcaacagtaactcccccacggaaggaggaaaggatggatagtgctaggccctgcctccaccgccagcaccacctgctcaacgacagaggaagtgaggagcccccagggtctaaaggaagtgtgactctgtcggacttgccaggctttttaggggatttggcgtccgaagaagactcaatcgagaaggataaagaagaggcagcgatctcccgagagctctctgaaattaccactgcagaggctgagcccgtggtccctcggggcgggttcgattcgcctttttaccgcgattcgcttcctgggtctcaacgtaagacacattctgcagcctcatcctctcagggcgcaagcgtcaacccagagccattacattctagcctcgataagctgggacctgacacaccaaaacaggcgtttactcccatcgacctcccctgtggtagcgctgatgagtcacccgctggggacagggagtgtcaaacatctctggagacttcaatcttcacaccctcaccctgtaagatccctcctcccaccagggttggctttgggagcggtcagcctccaccgtatgaccacctgttcgaagtcgccttgccaaagactgcgcaccacttcgtcatcagaaagaccgaagagctactaaagaaggccaaagggaataccgaggaggacggcgttccatctacatccccaatggaagtcctggataggctgatccagcagggagccgacgcccactccaaggagctgaataagcttccgcttccctccaagtccgtggattggacacacttcggcggatctcctccctccgacgagattagaacccttcgcgatcaattgctgctgctacacaaccaacttctgtacgagaggtttaagcgacagcaacacgctctaaggaataggcgccttctgagaaaagtgatcaaggccgctgccttggaggaacataacgcagccatgaaggaccagctcaagcttcaagaaaaggacattcagatgtggaaggtcagcctccagaaggagcaggcaagatacaaccagttgcaggagcaacgcgacacgatggtgactaaactacactcacagatacggcagctccagcacgaccgagaagagttttacaatcaatcacaggagctgcagactaagctcgaagattgcaggaacatgatagctgagctgagaattgagctgaaaaaggccaacaataaagtatgtcacacagaactgctcctctcgcaagtcagccaaaagttaagcaacagcgaatcagtgcaacagcaaatggaattcctgaaccggcagctgctggtcttaggagaggttaatgagctctacctggaacagttgcagaataagcattccgatacaaccaaggaagtggagatgatgaaggcggcataccggaaagagttggagaagaatcgctctcatgtccttcagcagacccagaggcttgacaccagccaaaaaagaattcttgaactggagtcccacttggctaaaaaggaccatttattgctggaacagaagaaatacttagaggacgttaagctgcaggcgcgcggacaactgcaggccgctgagtcaagatacgaggctcagaaaaggatcacacaagtgttcgagctggaaatactggatctctacggtcggcttgagaaggacgggcttctgaaaaagttggaggaagagaaggcggaagccgcagaagccgccgaggaaaggttggactgttgtaacgacggatgttcggatagcatggtaggccacaacgaagaggcatcagggcacaacggcgagactaaaacccctcgcccttccagtgcacgcggctccagtggctcccgggggggtggtggatccagtagcagctcttccgagctgtcaacaccagaaaaaccgccacaccagagagccggccctttcagcagccgctgggaaaccaccatgggtgaggcgtcggctagtatacccaccacggtagggagcctgccgtccagcaagtccttcctgggcatgaaggctagagagctgttcaggaacaaatctgagtcccaatgcgatgaagatgggatgaccagttcactgagcgagtcactaaaaactgagctcggcaaggacctgggggttgaagccaaaatccccctgaatctcgacggacctcatccaagtcctcctacccccgattctgtcggtcagctccacatcatggattacaatgagacccaccacgagcattcctag

SEQ ID NO: 310878 - DNA, 3495 bp, Artificial Sequence
  derived and/or modified sequence
atggcgcaacaggcaaatgtgggtgagctgctggccatgttggatagccccatgctgggcgtgcgagacgacgtgacggccgtctttaaggaaaatctgaatagcgaccgcggacctatgttggtaaataccctggtcgactactacctggagaccagcagccagcctgcgctccacattctcactacgctgcaagaacctcatgataagcatttactcgatcgcattaatgagtacgtggggaaggcagctactcgcttgtcgatcctgtcactcctgggccacgtcatccggctgcagccttcctggaagcataagttgtcccaggctcccttgcttccgtctctgctgaagtgcctgaaaatggatacggatgtggtcgtcctcactacaggcgtcctggtactaatcaccatgctgcctatgatcccgcagagcggcaagcagcaccttttggacttctttgatatattcggacggttgtcttcctggtgtctgaagaagcctggacatgtcgcagaggtttatcttgtccatctgcatgcaagcgtgtatgccctgttccatagattatacggaatgtatccttgtaatttcgtcagcttcctgagatctcactactcaatgaaagaaaacctggaaaccttcgaggaggtagtgaagccaatgatggaacacgtaaggatccatcctgagttagtgaccggctcaaaagatcatgagctggacccccgacgctggaagcgactggaaactcatgacgttgtgatcgagtgcgctaagatctcactggaccctacggaggcgagctacgaggatggttactccgtaagtcaccagatctctgcccgattcccccacagatcagctgatgtcactactagcccttacgccgacacacagaacagctatgggtgtgcaacttctacaccttatagcacatcccgtctcatgctgttaaatatgccgggacagctgccgcagacgctgtccagcccatctacgaggttgattactgaacccccacaggccaccttatggtcacccagtatggtctgtgggatgaccacacccccaaccagtcccggaaatgtgcccccagatttgagccacccatactccaaggtcttcggaacgaccgctggaggaaaagggaccccactgggcaccccggcaacttcccccccacccgctcccctttgtcattccgacgactatgtgcacattagtctgccacaagccactgtgacacctcccaggaaggaggagcggatggactcagcacgaccctgtctgcaccgccaacaccatctactgaacgaccggggttctgaggagccgccaggcagtaagggatcagtaaccctgtccgaccttccgggttttttgggcgatctcgcatcagaagaagacagcatcgaaaaagataaagaagaggcagctatctcccgcgagctgtctgagattaccaccgccgaggcagagccagtcgtcccacggggtgggtttgatagtcccttctatcgggattcactgccaggatctcaacggaagacccactctgccgcatcaagcagccagggggcatccgtcaatcccgagcctttacattcctctctcgacaaattgggcccagacacgcctaagcaagcatttacgccaatagaccttccctgtggaagcgccgacgaatcccccgctggggacagagagtgtcagacatcactggagacttcaattttcaccccatctccttgtaagattcctccgcctacacgggtgggcttcggatccggtcaacccccaccctacgaccacttgttcgaggtggccctcccgaagacagcacatcattttgtcattcgaaagaccgaagaactattgaagaaggctaagggtaatacagaagaggacggggtgcccagtacaagtcccatggaggttctggaccgtttaattcagcaaggggcagacgcacatagcaaagaattgaataaactgcccctgccttcaaagtccgtggattggactcactttggcggttctcctcccagcgatgaaattcgcacccttagagatcagcttttgctgctgcataaccagctcctgtacgagaggttcaagaggcagcagcatgccctgcggaacaggagattgcttcgaaaagtgatcaaagccgctgctctcgaggaacacaacgccgctatgaaagaccaattaaaactccaagagaaggacatccagatgtggaaggtgagcctccagaaagagcaagccagatacaatcagctgcaggagcagcgggatactatggtaaccaagctacatagccaaattcgccagctccagcacgatagggaggaattctacaaccagagtcaggaactgcagacaaaactcgaggattgtcgaaatatgattgctgaactgcgaattgaattgaaaaaggccaacaataaggtatgccacaccgaactgctgctgtcacaagtatcacagaaactcagtaattcggaaagtgtgcagcagcagatggagtttttgaataggcaactcctagtcctgggcgaagtgaacgagttgtaccttgagcagctccagaataaacacagcgataccactaaggaagtggaaatgatgaaggccgcttaccggaaggagctggaaaagaacaggtctcacgtccttcagcagactcagcgcctagacacttcccaaaagcgcatccttgagcttgagagccacctggccaagaaagatcacctgctgctggagcagaagaagtatctggaagacgtcaagctccaggccagagggcagctgcaggctgctgaatcgagatatgaagcacagaagcggattacgcaggtctttgagctggagattttggatttgtacggcagattagaaaaggacggactgctaaaaaagttagaggaggagaaagctgaagcagcggaggccgctgaggaaaggctcgattgctgcaatgatggctgcagcgattcgatggtgggccataacgaagaagcgagtggccacaacggggagacgaagactccacgcccttccagtgcgcgaggatccagcgggtctaggggaggcggagggagctccagttcaagcagcgagttgtccacaccggagaagccccctcaccagcgggcaggcccattcagcagccgctgggaaactaccatgggtgaagctagtgcatccattcctacgactgttgggtcacttcctagttctaagtcattcctgggtatgaaagctagggagttgtttcgcaacaagagtgagtcccagtgtgacgaagatgggatgacttcttccctcagcgagagcctgaaaaccgagctaggaaaggatctgggggtagaggccaaaatacccctcaacctggacggaccccacccaagccccccaacccccgattccgttggacagctccacataatggactacaatgagactcatcacgagcactcttag

SEQ ID NO: 310879 - DNA, 3495 bp, Artificial Sequence
  derived and/or modified sequence
atggcccagcaggccaatgtcggagaactgctggccatgctcgatagtccgatgttgggtgtgcgggacgacgtcactgctgtgtttaaagagaacctgaacagtgatcgagggccaatgctggtgaataccctggtggattactaccttgagacttcatctcagcccgcactccatatcctcacaacgcttcaagagccccacgataaacatctacttgatagaataaacgagtatgttgggaaggctgctacacgcctgtcgatcctctcccttctgggacacgtcataaggctacaaccctcatggaagcataagctgtcacaggcccctctgcttccgagtctgttgaaatgcttaaagatggacactgatgtagtggttctgacaaccggggtgttggtcctgatcaccatgcttccgatgattcctcagagcggaaagcagcatctccttgactttttcgatatttttgggcgtctgtcgtcatggtgtctcaagaagccagggcacgtggctgaagtctatttggtccatctgcacgcctctgtctacgccctgttccataggctttatggaatgtatccctgcaactttgtgtccttcttgagatcgcattactcgatgaaagaaaacctggaaacctttgaggaagtggtgaagccaatgatggaacacgttagaattcaccctgaactcgttactggctccaaagatcacgagctcgatcccaggagatggaaacgcctagagacacatgacgtcgtcattgagtgcgccaagatttctctggatccaacagaggcctcatacgaagacgggtatagcgtgtctcaccagattagcgccaggttcccgcatcgtagcgcggacgtgacaacctcgccgtacgcagacacacagaattcatacgggtgtgcaacctccactccctattcaacgtcaaggctcatgttattaaatatgcccggtcaacttcctcagacacttagctccccaagcacgcgtctcatcaccgagccacctcaagcaacactgtggagcccatcaatggtctgtggcatgactacgcccccaacaagtcccggaaacgtacctccagatctgagccacccatatagcaaggtcttcgggacaaccgccggtggcaagggcacgcctctgggaacccctgcaacctcccccccacctgctccactttgtcattccgatgattacgttcacatcagcctgccacaggccaccgtcaccccaccaagaaaggaagagcggatggattccgctcgtccttgcttgcaccgccagcaccatctgctcaatgatagaggctccgaagaaccgcctgggagtaaaggaagcgtcacgttgagtgacttacctggcttcctcggagatttagcctccgaggaagattccattgagaaggacaaagaagaagcagcaatctcacgggaacttagcgagatcaccacagccgaagcggagcctgttgtgcccagaggcggattcgatagccccttttatcgagactcactgccaggctcacagcggaaaacacactctgctgccagtagttcccaaggagccagcgtaaatccagagccattgcattctagccttgataaactgggcccagacacccccaagcaggcgttcaccccgattgacctcccatgcggcagcgccgacgaaagccccgctggggaccgagaatgtcaaacctccctggagacctctatcttcacaccgtcaccgtgcaagataccgccacccactcgcgtcggcttcgggtcaggccagcccccaccctatgatcatctgttcgaggtggccttaccgaagacggcccaccacttcgtcatacgaaaaacagaggaactgctcaaaaaagccaagggtaacaccgaagaggatggcgtgccttctacttctcccatggaggtactggaccgattgatccaacagggtgccgatgctcattccaaggagctcaataagctccctttgccttccaaatccgttgactggactcatttcggaggttccccccctagtgacgagatcagaactctgcgtgatcagctcctccttttacacaaccagttgttgtatgaacgctttaaaagacagcagcacgccttgcggaaccgccgtctactgcgtaaggttatcaaagcggctgccctggaggagcacaacgccgcaatgaaagaccaacttaagctgcaggaaaaggacatccagatgtggaaagtctcactccaaaaggagcaggcacgttacaatcagttacaagagcagcgcgacacaatggttacaaagctacactcacagattcgccagttgcaacatgaccgcgaggaattctacaatcagagtcaggagctacagaccaagctggaggactgtcgaaacatgatagctgagctcagaatcgaacttaagaaggctaataacaaagtatgtcatacggaactgttactaagtcaggtttcccagaagcttagcaactccgaatccgtgcagcagcaaatggagttcctcaataggcaacttctggtcttaggcgaggtcaatgagctgtacttagagcagctgcagaataaacactctgatactactaaagaagttgaaatgatgaaagcagcctatcggaaggagctcgaaaaaaatagatctcatgtcctgcagcaaactcagcgtctcgacaccagccagaagcggatcctggaacttgagtctcacttagcgaagaaggatcatctactgctcgagcagaaaaaatacctcgaggacgtaaagctgcaggcaagagggcagctgcaggcagcagagtccaggtacgaagcccagaagagaatcactcaggttttcgagctcgagattcttgacctgtatggccgactcgagaaggacgggctcttaaagaagcttgaagaagaaaaggccgaggcagccgaggcagcagaggaacggctcgattgctgcaacgatgggtgttccgattcgatggttggtcataacgaggaggcaagcgggcataacggcgagacaaaaactccaagaccttcttccgcgagggggagttccggctcccgcggtggcggtggcagctcttcttcctcatcagagctgagcacccctgagaagccgcctcaccagagagccggtccctttagtagccgctgggaaacaacaatgggagaggcttcggccagcatcccaaccactgtgggaagtctccccagcagcaaaagctttctcggtatgaaggcaagggaactgttcagaaataaatccgagtctcagtgtgatgaagacgggatgacaagctcattatctgaatcattgaagacagaactaggcaaggatcttggggtcgaggctaaaatcccactgaacctggacggccctcaccccagcccaccgacgcccgactcggtggggcagttacacataatggactacaacgaaacacaccatgagcactcctag

SEQ ID NO: 310880 - DNA, 8604 bp, Artificial Sequence
  derived and/or modified sequence
gtgctgtacgtccaagatggcggcgccctgtaggctggagggactgtgaggtaaacagctgagggggaggagacggtggtgaccatgaaagacaccaggttgacagcactggaaactgaagtaccagttgtcgctagaacagtttggtagtggccccaatgaagaaccttcagaacctgtagcacacgtcctggagccagcacagcgccttcgagcgagagaatggcccaacaagcaaatgtcggggagcttcttgccatgctggactcccccatgctgggtgtgcgggacgacgtgacagctgtctttaaagagaacctcaattctgaccgtggccctatgcttgtaaacaccttggtggattattacctggaaaccagctctcagccggcattgcacatcctgaccaccttgcaagagccacatgacaagcacctcttggacaggattaacgaatatgtgggcaaagccgccactcgtttatccatcctctcgttactgggtcatgtcataagactgcagccatcttggaagcataagctctctcaagcacctcttttgccttctttactaaaatgtctcaagatggacactgacgtcgttgtcctcacaacaggcgtcttggtgttgataaccatgctaccaatgattccacagtctgggaaacagcatcttcttgatttctttgacatttttggccgtctgtcatcatggtgcctgaagaaaccaggccacgtggcggaagtctatctcgtccatctccatgccagtgtgtacgcactctttcatcgcctttatggaatgtacccttgcaacttcgtctcctttttgcgttctcattacagtatgaaagaaaacctggagacttttgaagaagtggtcaagccaatgatggagcatgtgcgaattcatccggaattagtgactggatccaaggaccatgaactggaccctcgaaggtggaagagattagaaactcatgatgttgtgatcgagtgtgccaaaatctctctggatcccacagaagcctcatatgaagatggctattctgtgtctcaccaaatctcagcccgctttcctcatcgttcagccgatgtcaccaccagcccttatgctgacacacagaatagctatgggtgtgctacttctaccccttactccacgtctcggctgatgttgttaaatatgccagggcagctacctcagactctgagttccccatcgacacggctgataactgaaccaccacaagctactctttggagcccatctatggtttgtggtatgaccactcctccaacttctcctggaaatgtcccacctgatctgtcacacccttacagtaaagtctttggtacaactgcaggtggaaaaggaactcctctgggaaccccagcaacctctcctcctccagccccactctgtcattcggatgactacgtgcacatttcactcccccaggccacagtcacaccccccaggaaggaagagagaatggattctgcaagaccatgtctacacagacaacaccatcttctgaatgacagaggatcagaagagccacctggcagcaaaggttctgtcactctaagtgatcttccagggtttttaggtgatctggcctctgaagaagatagtattgaaaaagataaagaagaagctgcaatatctagagaactttctgagatcaccacagcagaggcagagcctgtggttcctcgaggaggctttgactctcccttttaccgagacagtctcccaggttctcagcggaagacccactcggcagcctccagttctcagggcgccagcgtgaaccctgagcctttacactcctccctggacaagcttgggcctgacacaccaaagcaagcctttactcccatagacctgccctgcggcagtgctgatgaaagccctgcgggagacagggaatgccagacttctttggagaccagtatcttcactcccagtccttgtaaaattccacctccgacgagagtgggctttggaagcgggcagcctcccccgtatgatcatctttttgaggtggcattgccaaagacagcccatcattttgtcatcaggaagactgaggagctgttaaagaaagcaaaaggaaacacagaggaagatggtgtgccctctacctccccaatggaagtgctggacagactgatacagcagggagcagacgcgcacagcaaggagctgaacaagttgcctttacccagcaagtctgtcgactggacccactttggaggctctcctccttcagatgagatccgcaccctccgagaccagttgcttttactgcacaaccagttactctatgagcgttttaagaggcagcagcatgccctccggaacaggcggctcctccgcaaggtgatcaaagcagcagctctggaggaacataatgctgccatgaaagatcagttgaagttacaagagaaggacatccagatgtggaaggttagtctgcagaaagaacaagctagatacaatcagctccaggagcagcgtgacactatggtaaccaagctccacagccagatcagacagctgcagcatgaccgagaggaattctacaaccagagccaggaattacagacgaagctggaggactgcaggaacatgattgcggagctgcggatagaactgaagaaggccaacaacaaggtgtgtcacactgagctgctgctcagtcaggtttcccaaaagctctcaaacagtgagtcggtccagcagcagatggagttcttgaacaggcagctgttggttcttggggaggtcaacgagctctatttggaacaactgcagaacaagcactcagataccacaaaggaagtagaaatgatgaaagccgcctatcggaaagagctagaaaaaaacagaagccatgttctccagcagactcagaggcttgatacctcccaaaaacggattttggaactggaatctcacctggccaagaaagaccaccttcttttggaacagaagaaatatctagaggatgtcaaactccaggcaagaggacagctgcaggccgcagagagcaggtatgaggctcagaaaaggataacccaggtgtttgaattggagatcttagatttatatggcaggttggagaaagatggcctcctgaaaaaacttgaagaagaaaaagcagaagcagctgaagcagcagaagaaaggcttgactgttgtaatgacgggtgctcagattccatggtagggcacaatgaagaggcatctggccacaacggtgagaccaagacccccaggcccagcagcgcccggggcagtagtggaagcagaggtggtggaggcagcagcagcagcagcagcgagctttctaccccagagaaacccccacaccagagggcaggcccattcagcagtcggtgggagacgactatgggagaagcgtctgccagcatccccaccactgtgggctcacttcccagttcaaaaagcttcctgggtatgaaggctcgagagttatttcgtaataagagcgagagccagtgtgatgaggacggcatgaccagtagcctttctgagagcctaaagacagaactgggcaaagacttgggtgtggaagccaagattcccctgaacctagatggccctcacccgtctcccccgaccccggacagtgttggacagctacatatcatggactacaatgagactcatcatgaacacagctaaggaatgatggtcaatcagtgttaacttgcatattgttggcacagaacaggaggtgtgaatgcacgtttcaaagctttcctgtttccagggtctgagtgcaagttcatgtgtggaaatgggacggaggtcctttggacagctgactgaatgcagaacggtttttggatctggcattgaaatgcctcttgaccttcccctccacccgccctaaccccctctcatttacctcgcagtgtgttctaatccaagggccagttggtgttcctcagtagctttactttcttcctttcccccccaaatggttgcgtcctttgaacctgtgcaatatgaggccaaatttaatctttgagtctaacacaccactttctgctttcccgaagttcagataactgggttggctctcaattagaccaggtagtttgttgcattgcaggtaagtctggttttgtcccttccaggaggacatagcctgcaaagctggttgtctttacatgaaagcgtttacatgagactttccgactgcttttttgattctgaagttcagcatctaaagcagcaggtctagaagaacaacggtttattcatacttgcattcttttggcagttctgataagcttcctagaaagttctgtgtaaacagaagcctgtttcagaaatctggagctggcactgtggagaccacacaccctttgggaaagctcttgtctcttcttcccccactacctcttatttatttggtgtttgcttgaatgctggtactattgtgaccacaggctggtgtgtaggtggtaaaacctgttctccataggagggaaggagcagtcactgggagaggttacccgagaagcacttgagcatgaggaactgcacctttaggccatctcagcttgctgggccttttgttaaacccttctgtctactggcctccctttgtgtgcatacgcctcttgttcatgtcagcttatatgtgacactgcagcagaaaggctctgaaggtccaaagagtttctgcaaagtgtatgtgaccatcatttcccaggccattagggttgcctcactgtagcaggttctaggctaccagaagaggggcagctttttcataccaattccaactttcaggggctgactctccagggagctgatgtcatcacactctccatgttagtaatggcagagcagtctaaacagagtccgggagaatgctggcaaaggctggctgtgtatacccactaggctgccccacgtgctcccgagagatgacactagtcagaaaattggcagtggcagagaatccaaactcaacaagtgctcctgaaagaaacgctagaagcctaagaactgtggtctggtgttccagctgaggcagggggatttggtaggaaggagccagtgaacttggctttcctgtttctatctttcattaaaaagaatagaaggattcagtcataaagaggtaaaaaactgtcacggtacgaaatcttagtgcccacggaggcctcgagcagagagaatgaaagtcttttttttttttttttttttttagcatggcaataaatattctagcatccctaactaaaggggactagacagttagagactctgtcaccctagctataccagcagaaaacctgttcaggcaggctttctgggtgtgactgattcccagcctgtggcagggcgtggtcccaactactcagcctagcacaggctggcagttggtactgaattgtcagatgtggagtattagtgacaccacacatttaattcagctttgtccaaaggaaagcttaaaacccaatacagtctagtttcctggttccgttttagaaaaggaaaacgtgaacaaacttagaaagggaaggaaatcccatcagtgaatcctgaaactggttttaagtgctttccttctcctcatgcccaagagatctgtgccatagaacaagataccaggcacttaaagccttttcctgaattggaaaggaaaagaggcccaagtgcaaaagaaaaaacattttagaaacggacagcttataaaaataaagggaagaaaggaggcagcatggagagaggcctgtgctagaagctccatggacgtgtctgcacagggtcctcagctcatccatgcggcctgggtgtccttttactcagctttataacaaatgtggctccaagctcaggtgcctttgagttctaggaggctgtgggttttattcaactacggttgggagaatgagacctggagtcatgttgaaggtgcccaacctaaaaatgtaggctttcatgttgcaaagaactccagagtcagtagttaggtttggtttggttttggacatgataaacctgccaagagtcaacaggtcacttgatcatgctgcagtgggtagttctaaggatggaaaggtgacagtattactctcgagaggcaattcagtcctgggcaaaggtattagtacaataagcgttaagggcagagtctaccttgaaaccaattaagcagcttggtattcataaatattgggattggatggcctccatccagaaatcactatgggtgagcatacctgtctcagctgtttggccaatgtgcataacctactcggatccccacctgacactaaccagagtcagcacaggccccgaggagcccgaagtctgctgctgtgcagcatggaattcctttaaaaaggtgcactacagttttagcggggagggggataggaagacgcagagcaaatgagctccggagtccctgcaggtgaataaacacacagatctgcatctgatagaactttgatggattttcaaaaagccgttgacaaggctctgctatacagtctataaaaattgttattatgggattggaagaaacacgtggtcatgaatagaaaaaaaacaaacccaaaggtaggaaggtcaaggtcatttcttagatggagaagttgtgaaagatgtccttggagatgagttttaggaccagcattactaaggcaggtgggcagacagtgacctctctaggtgtgtccacagagtttttcaggagagaaaactgcctgacctttgggactaagctgcggaatcttcttactaagcttgaagagtggagaggcgagaggtgagctactttgtgagccaaagcttatgtgacatggttggggaaacagtccaaactgttctgagaaggtgaactgttacgacccaggacaattagaaaaattcacccaccatgccgcacattactgggtaaaagcagggcagcagggaacaaaactccagactcttgggccgtccccatttgcaacagcacacatagtttctggtatatttgttgggaaagataaaactctagcagttgttgaggggaggatgtataaaatggtcatggggatgaaaggatctctgagaccacagaggctcagactcactgttaagaatagaaaactgggtatgcgtttcatgtagccagcagaactgaagtgtgctgtgacaagccaatgtgaatttctaccaaatagtagagcataccacttgaagaaggaaagaaccgaagagcaaacaaaagttctgcgtaatgagactcaccttttctcgctgaaagcactaagaggtgggaggaggcctgcacaggctggaggagggtttgggcagagcgaagacccggccaggaccttggtgagatggggtgccgcccacctcctgcggatactcttggagagttgttcccccagggggctctgccccacctggagaaggaagctgcctggtgtggagtgactcaaatcagtatacctatctgctgcaccttcactctccagggtacatgctttaaaaccgacccgcaacaagtattggaaaaatgtatccagtctgaagatgtttgtgtatctgtttacatccagagttctgtgacacatgccccccagattgctgcaaagatcccaaggcattgattgcacttgattaagcttttgtctgtaggtgaaagaacaagtttaggtcgaggactggcccctaggctgctgctgtgacccttgtcccatgtggcttgtttgcctgtccgggactcttcgatgtgcccaggggagcgtgttcctgtctcttccatgccgtcctgcagtccttatctgctcgcctgagggaagagtagctgtagctacaagggaagcctgcctggaagagccgagcacctgtgcccatggcttctggtcatgaaacgagttaatgatggcagaggagcttcctccccacttcgcagcgccacattatccatcctctgagataagtaggctggtttaaccattggaatggacctttcagtggaaaccctgagagtctgagaacccccagaccaacccttccctccctttccccacctcttacagtgtttggacaggagggtatggtgctgctctgtgtagcaagtactttggcttatgaaagaggcagccacgcattttgcactaggaagaatcagtaatcacttttcagaagacttctatggaccacaaatatattacggaggaacagattttgctaagacataatctagttttataactcaatcatgaatgaaccatgtgtggcaaacttgcagtttaaaggggtcccatcagtgaaagaaactgattttttttaacggactgcttttagttaaattgaagaaagtcagctcttgtcaaaaggtctaaactttcccgcctcaatcctaaaagcatgtcaacaatccacatcagatgccataaatatgaactgcaggataaaatggtacaatcttagtgaatgggaattggaatcaaaagagtttgctgtccttcttagaatgttctaaaatgtcaaggcagttgcttgtgtttaactgtgaacaaataaaaatttattgttttgcactac

SEQ ID NO: 310881 - DNA, 8463 bp, Artificial Sequence
  derived and/or modified sequence
cagtttggtagtggccccaatgaagaaccttcagaacctgtagcacacgtcctggagccagcacagcgccttcgagcgagagaatggcccaacaagcaaatgtcggggagcttcttgccatgctggactcccccatgctgggtgtgcgggacgacgtgacagctgtctttaaagagaacctcaattctgaccgtggccctatgcttgtaaacaccttggtggattattacctggaaaccagctctcagccggcattgcacatcctgaccaccttgcaagagccacatgacaagcacctcttggacaggattaacgaatatgtgggcaaagccgccactcgtttatccatcctctcgttactgggtcatgtcataagactgcagccatcttggaagcataagctctctcaagcacctcttttgccttctttactaaaatgtctcaagatggacactgacgtcgttgtcctcacaacaggcgtcttggtgttgataaccatgctaccaatgattccacagtctgggaaacagcatcttcttgatttctttgacatttttggccgtctgtcatcatggtgcctgaagaaaccaggccacgtggcggaagtctatctcgtccatctccatgccagtgtgtacgcactctttcatcgcctttatggaatgtacccttgcaacttcgtctcctttttgcgttctcattacagtatgaaagaaaacctggagacttttgaagaagtggtcaagccaatgatggagcatgtgcgaattcatccggaattagtgactggatccaaggaccatgaactggaccctcgaaggtggaagagattagaaactcatgatgttgtgatcgagtgtgccaaaatctctctggatcccacagaagcctcatatgaagatggctattctgtgtctcaccaaatctcagcccgctttcctcatcgttcagccgatgtcaccaccagcccttatgctgacacacagaatagctatgggtgtgctacttctaccccttactccacgtctcggctgatgttgttaaatatgccagggcagctacctcagactctgagttccccatcgacacggctgataactgaaccaccacaagctactctttggagcccatctatggtttgtggtatgaccactcctccaacttctcctggaaatgtcccacctgatctgtcacacccttacagtaaagtctttggtacaactgcaggtggaaaaggaactcctctgggaaccccagcaacctctcctcctccagccccactctgtcattcggatgactacgtgcacatttcactcccccaggccacagtcacaccccccaggaaggaagagagaatggattctgcaagaccatgtctacacagacaacaccatcttctgaatgacagaggatcagaagagccacctggcagcaaaggttctgtcactctaagtgatcttccagggtttttaggtgatctggcctctgaagaagatagtattgaaaaagataaagaagaagctgcaatatctagagaactttctgagatcaccacagcagaggcagagcctgtggttcctcgaggaggctttgactctcccttttaccgagacagtctcccaggttctcagcggaagacccactcggcagcctccagttctcagggcgccagcgtgaaccctgagcctttacactcctccctggacaagcttgggcctgacacaccaaagcaagcctttactcccatagacctgccctgcggcagtgctgatgaaagccctgcgggagacagggaatgccagacttctttggagaccagtatcttcactcccagtccttgtaaaattccacctccgacgagagtgggctttggaagcgggcagcctcccccgtatgatcatctttttgaggtggcattgccaaagacagcccatcattttgtcatcaggaagactgaggagctgttaaagaaagcaaaaggaaacacagaggaagatggtgtgccctctacctccccaatggaagtgctggacagactgatacagcagggagcagacgcgcacagcaaggagctgaacaagttgcctttacccagcaagtctgtcgactggacccactttggaggctctcctccttcagatgagatccgcaccctccgagaccagttgcttttactgcacaaccagttactctatgagcgttttaagaggcagcagcatgccctccggaacaggcggctcctccgcaaggtgatcaaagcagcagctctggaggaacataatgctgccatgaaagatcagttgaagttacaagagaaggacatccagatgtggaaggttagtctgcagaaagaacaagctagatacaatcagctccaggagcagcgtgacactatggtaaccaagctccacagccagatcagacagctgcagcatgaccgagaggaattctacaaccagagccaggaattacagacgaagctggaggactgcaggaacatgattgcggagctgcggatagaactgaagaaggccaacaacaaggtgtgtcacactgagctgctgctcagtcaggtttcccaaaagctctcaaacagtgagtcggtccagcagcagatggagttcttgaacaggcagctgttggttcttggggaggtcaacgagctctatttggaacaactgcagaacaagcactcagataccacaaaggaagtagaaatgatgaaagccgcctatcggaaagagctagaaaaaaacagaagccatgttctccagcagactcagaggcttgatacctcccaaaaacggattttggaactggaatctcacctggccaagaaagaccaccttcttttggaacagaagaaatatctagaggatgtcaaactccaggcaagaggacagctgcaggccgcagagagcaggtatgaggctcagaaaaggataacccaggtgtttgaattggagatcttagatttatatggcaggttggagaaagatggcctcctgaaaaaacttgaagaagaaaaagcagaagcagctgaagcagcagaagaaaggcttgactgttgtaatgacgggtgctcagattccatggtagggcacaatgaagaggcatctggccacaacggtgagaccaagacccccaggcccagcagcgcccggggcagtagtggaagcagaggtggtggaggcagcagcagcagcagcagcgagctttctaccccagagaaacccccacaccagagggcaggcccattcagcagtcggtgggagacgactatgggagaagcgtctgccagcatccccaccactgtgggctcacttcccagttcaaaaagcttcctgggtatgaaggctcgagagttatttcgtaataagagcgagagccagtgtgatgaggacggcatgaccagtagcctttctgagagcctaaagacagaactgggcaaagacttgggtgtggaagccaagattcccctgaacctagatggccctcacccgtctcccccgaccccggacagtgttggacagctacatatcatggactacaatgagactcatcatgaacacagctaaggaatgatggtcaatcagtgttaacttgcatattgttggcacagaacaggaggtgtgaatgcacgtttcaaagctttcctgtttccagggtctgagtgcaagttcatgtgtggaaatgggacggaggtcctttggacagctgactgaatgcagaacggtttttggatctggcattgaaatgcctcttgaccttcccctccacccgccctaaccccctctcatttacctcgcagtgtgttctaatccaagggccagttggtgttcctcagtagctttactttcttcctttcccccccaaatggttgcgtcctttgaacctgtgcaatatgaggccaaatttaatctttgagtctaacacaccactttctgctttcccgaagttcagataactgggttggctctcaattagaccaggtagtttgttgcattgcaggtaagtctggttttgtcccttccaggaggacatagcctgcaaagctggttgtctttacatgaaagcgtttacatgagactttccgactgcttttttgattctgaagttcagcatctaaagcagcaggtctagaagaacaacggtttattcatacttgcattcttttggcagttctgataagcttcctagaaagttctgtgtaaacagaagcctgtttcagaaatctggagctggcactgtggagaccacacaccctttgggaaagctcttgtctcttcttcccccactacctcttatttatttggtgtttgcttgaatgctggtactattgtgaccacaggctggtgtgtaggtggtaaaacctgttctccataggagggaaggagcagtcactgggagaggttacccgagaagcacttgagcatgaggaactgcacctttaggccatctcagcttgctgggccttttgttaaacccttctgtctactggcctccctttgtgtgcatacgcctcttgttcatgtcagcttatatgtgacactgcagcagaaaggctctgaaggtccaaagagtttctgcaaagtgtatgtgaccatcatttcccaggccattagggttgcctcactgtagcaggttctaggctaccagaagaggggcagctttttcataccaattccaactttcaggggctgactctccagggagctgatgtcatcacactctccatgttagtaatggcagagcagtctaaacagagtccgggagaatgctggcaaaggctggctgtgtatacccactaggctgccccacgtgctcccgagagatgacactagtcagaaaattggcagtggcagagaatccaaactcaacaagtgctcctgaaagaaacgctagaagcctaagaactgtggtctggtgttccagctgaggcagggggatttggtaggaaggagccagtgaacttggctttcctgtttctatctttcattaaaaagaatagaaggattcagtcataaagaggtaaaaaactgtcacggtacgaaatcttagtgcccacggaggcctcgagcagagagaatgaaagtcttttttttttttttttttttttagcatggcaataaatattctagcatccctaactaaaggggactagacagttagagactctgtcaccctagctataccagcagaaaacctgttcaggcaggctttctgggtgtgactgattcccagcctgtggcagggcgtggtcccaactactcagcctagcacaggctggcagttggtactgaattgtcagatgtggagtattagtgacaccacacatttaattcagctttgtccaaaggaaagcttaaaacccaatacagtctagtttcctggttccgttttagaaaaggaaaacgtgaacaaacttagaaagggaaggaaatcccatcagtgaatcctgaaactggttttaagtgctttccttctcctcatgcccaagagatctgtgccatagaacaagataccaggcacttaaagccttttcctgaattggaaaggaaaagaggcccaagtgcaaaagaaaaaacattttagaaacggacagcttataaaaataaagggaagaaaggaggcagcatggagagaggcctgtgctagaagctccatggacgtgtctgcacagggtcctcagctcatccatgcggcctgggtgtccttttactcagctttataacaaatgtggctccaagctcaggtgcctttgagttctaggaggctgtgggttttattcaactacggttgggagaatgagacctggagtcatgttgaaggtgcccaacctaaaaatgtaggctttcatgttgcaaagaactccagagtcagtagttaggtttggtttggttttggacatgataaacctgccaagagtcaacaggtcacttgatcatgctgcagtgggtagttctaaggatggaaaggtgacagtattactctcgagaggcaattcagtcctgggcaaaggtattagtacaataagcgttaagggcagagtctaccttgaaaccaattaagcagcttggtattcataaatattgggattggatggcctccatccagaaatcactatgggtgagcatacctgtctcagctgtttggccaatgtgcataacctactcggatccccacctgacactaaccagagtcagcacaggccccgaggagcccgaagtctgctgctgtgcagcatggaattcctttaaaaaggtgcactacagttttagcggggagggggataggaagacgcagagcaaatgagctccggagtccctgcaggtgaataaacacacagatctgcatctgatagaactttgatggattttcaaaaagccgttgacaaggctctgctatacagtctataaaaattgttattatgggattggaagaaacacgtggtcatgaatagaaaaaaaacaaacccaaaggtaggaaggtcaaggtcatttcttagatggagaagttgtgaaagatgtccttggagatgagttttaggaccagcattactaaggcaggtgggcagacagtgacctctctaggtgtgtccacagagtttttcaggagagaaaactgcctgacctttgggactaagctgcggaatcttcttactaagcttgaagagtggagaggcgagaggtgagctactttgtgagccaaagcttatgtgacatggttggggaaacagtccaaactgttctgagaaggtgaactgttacgacccaggacaattagaaaaattcacccaccatgccgcacattactgggtaaaagcagggcagcagggaacaaaactccagactcttgggccgtccccatttgcaacagcacacatagtttctggtatatttgttgggaaagataaaactctagcagttgttgaggggaggatgtataaaatggtcatggggatgaaaggatctctgagaccacagaggctcagactcactgttaagaatagaaaactgggtatgcgtttcatgtagccagcagaactgaagtgtgctgtgacaagccaatgtgaatttctaccaaatagtagagcataccacttgaagaaggaaagaaccgaagagcaaacaaaagttctgcgtaatgagactcaccttttctcgctgaaagcactaagaggtgggaggaggcctgcacaggctggaggagggtttgggcagagcgaagacccggccaggaccttggtgagatggggtgccgcccacctcctgcggatactcttggagagttgttcccccagggggctctgccccacctggagaaggaagctgcctggtgtggagtgactcaaatcagtatacctatctgctgcaccttcactctccagggtacatgctttaaaaccgacccgcaacaagtattggaaaaatgtatccagtctgaagatgtttgtgtatctgtttacatccagagttctgtgacacatgccccccagattgctgcaaagatcccaaggcattgattgcacttgattaagcttttgtctgtaggtgaaagaacaagtttaggtcgaggactggcccctaggctgctgctgtgacccttgtcccatgtggcttgtttgcctgtccgggactcttcgatgtgcccaggggagcgtgttcctgtctcttccatgccgtcctgcagtccttatctgctcgcctgagggaagagtagctgtagctacaagggaagcctgcctggaagagccgagcacctgtgcccatggcttctggtcatgaaacgagttaatgatggcagaggagcttcctccccacttcgcagcgccacattatccatcctctgagataagtaggctggtttaaccattggaatggacctttcagtggaaaccctgagagtctgagaacccccagaccaacccttccctccctttccccacctcttacagtgtttggacaggagggtatggtgctgctctgtgtagcaagtactttggcttatgaaagaggcagccacgcattttgcactaggaagaatcagtaatcacttttcagaagacttctatggaccacaaatatattacggaggaacagattttgctaagacataatctagttttataactcaatcatgaatgaaccatgtgtggcaaacttgcagtttaaaggggtcccatcagtgaaagaaactgattttttttaacggactgcttttagttaaattgaagaaagtcagctcttgtcaaaaggtctaaactttcccgcctcaatcctaaaagcatgtcaacaatccacatcagatgccataaatatgaactgcaggataaaatggtacaatcttagtgaatgggaattggaatcaaaagagtttgctgtccttcttagaatgttctaaaatgtcaaggcagttgcttgtgtttaactgtgaacaaataaaaatttattgttttgcact

SEQ ID NO: 310882 - protein, 525 aa, Artificial Sequence
  derived and/or modified sequence
MSWHPQYRSSKFRHVFGKPASKENCYDSVPITRSVHDNHFCAVNPHFIAVVTECAGGGAFLVIPLHQTGKLDPHYPKVCGHRGNVLDVKWNPFDDFEIASCSEDATIKIWSIPKQLLTRNLTAYRKELVGHARRVGLVEWHPTAANILFSAGYDYKVMIWNLDTKESVITSPMSTISCHQDVILSMSFNTNGSLLATTCKDRKIRVIDPRAGTVLQEASYKGHRASKVLFLGNLKKLMSTGTSRWNNRQVALWDQDNLSVPLMEEDLDGSSGVLFPFYDADTSMLYVVGKGDGNIRYYEVSADKPHLSYLTEYRSYNPQKGIGVMPKRGLDVSSCEIFRFYKLITTKSLIEPISMIVPRRSESYQEDIYPPTAGAQPSLTAQEWLSGMNRDPILVSLRPGSELLRPHPLPAERPIFNSMAPASPRLLNQTEKLAAEDGWRSSSLLEEKMPRWAAEHRLEEKKTWLTNGFDVFECPPPKTENELLQMFYRQQEEIRRLRELLTQREVQAKQLELEIKNLRMGSEQL

SEQ ID NO: 310883 - DNA, 1578 bp, Artificial Sequence
  derived and/or modified sequence
atgtcatggcacccccaatataggtcatctaagtttagacacgtgttcgggaaacccgcttccaaagagaattgttatgacagcgtccctataaccagaagtgtgcacgataaccatttttgtgccgttaatccccactttatcgcagtggtgactgagtgcgctggcggtggcgcttttcttgtgatcccacttcaccagactggaaaactggacccccattaccctaaagtctgcggccaccgcgggaacgtcctggatgtgaagtggaacccgttcgatgacttcgagatcgcatcttgttcagaagatgcgactattaagatctggtccatcccaaaacaactactgacacgcaacctgactgcctaccggaaggaattggttggccacgcgagacgcgtgggccttgtggagtggcatcccaccgctgcaaacatcctcttcagtgccggttatgactataaagtcatgatatggaatcttgacaccaaagagtcagttatcacttcaccaatgagcaccatttcctgtcatcaggatgtgatcctctcaatgagtttcaatacaaacgggtctctattggccaccacctgtaaggatcgaaagatccgcgtgatcgacccccgggccggaactgtgctgcaggaggcatcctataaaggacacagagcctctaaagtgttgtttctggggaatttaaaaaaacttatgagcacgggcacatcccgatggaacaacagacaggttgccctctgggatcaggataatctgtccgtgcccttaatggaggaggacctggacggcagttccggcgtgctgttccccttctatgacgctgatacgtctatgctgtatgtcgttgggaaaggcgacggaaacatccgctattatgaggtttccgcagataagccgcacctgtcttatcttaccgaatatcggagctataatcctcagaaaggtattggtgttatgcccaagagggggttggacgtcagctcctgcgagattttccgcttctacaagctgattactacaaagtcactgattgagcctatatccatgattgtgcctaggcggtctgagtcctatcaggaagatatctatcccccaaccgcgggtgctcagcccagcctgaccgcgcaagagtggttgtctggtatgaatagggatcctatcctggtgtccctcagaccagggtcagaattgcttcggccccatcctttacccgccgagagaccaatttttaactccatggctccagccagcccacgcctgctgaaccagactgagaaattggccgctgaggacggctggcgttcctcgtcactccttgaggaaaagatgccccgatgggcagccgaacaccgcctcgaagagaagaaaacctggctgactaacggatttgatgtattcgagtgtcctccacccaaaaccgaaaatgagctgcttcaaatgttctacaggcagcaagaagagatccgaagactgagagaactattaacgcagcgggaggtccaggccaaacagctcgagctcgaaatcaagaatcttcgaatggggtccgagcagttatag

SEQ ID NO: 310884 - DNA, 1578 bp, Artificial Sequence
  derived and/or modified sequence
atgtcatggcatcctcagtaccgatccagtaaattcaggcacgtatttggaaagcccgcatcgaaagagaattgctacgattccgtgccaatcacacgctcagtccatgataaccacttttgcgcagtgaatccgcactttatcgcagtggtgaccgagtgcgcagggggcggcgccttcttagttataccactccaccaaacaggaaaattggatcctcactacccaaaggtctgcggccacaggggtaacgtcctagatgtcaaatggaacccgttcgacgactttgagatcgcaagctgttccgaagatgcaactatcaagatttggagcattcccaagcaacttctcacacgtaatcttacagcctatagaaaagagctggtaggtcacgcccggagagtggggctggtggagtggcatcctactgctgctaacatactattcagcgccggctacgattataaggtgatgatatggaacctggacaccaaagagagcgtgatcactagtcccatgtcaacgatctcatgccaccaagacgtcatcctgtctatgtcattcaataccaatggctccctgctggctacaacatgcaaagaccgtaaaatccgcgtcattgacccgagagcaggtactgttctccaggaggctagttacaagggtcaccgggcttctaaggtcctgttcctcgggaacctgaaaaagctcatgtcaactggtacttcccgctggaacaatagacaggttgccttgtgggatcaggataatctgtccgtgcccctgatggaggaggacctggacggctcctctggcgtattgttccctttctacgatgcagatacttccatgctttacgtggtcggaaagggggatggcaatattagatactatgaagtgtccgctgataagccgcatctctcgtatctcactgaataccgaagttacaacccacagaagggcataggcgtaatgcctaaacgcggcttggatgttagctcgtgtgaaatttttagattctataaactgatcactactaaaagcctaattgagcccatttctatgattgtgccccggaggtcagagagctatcaggaggacatctacccaccaacagctggagctcaaccctccttgaccgcacaggaatggctatccggcatgaaccgggatcccatcctggtctctttgcggccaggaagtgaacttctaagacctcaccctctccccgctgagaggcccatattcaacagcatggctcccgcatcacctcgactgctgaatcaaactgaaaagttggccgccgaggatggatggcgttcaagctcgttactcgaggagaaaatgcctaggtgggccgctgaacaccgtttggaggagaaaaagacttggcttacaaatgggttcgacgtgttcgaatgccccccgcccaagacagagaacgagcttttgcagatgttctataggcagcaagaggaaattcggcgtttaagagagttgctcacccaacgcgaagtgcaggccaaacagctcgagctcgaaattaagaacctcaggatggggagcgagcagctctag

SEQ ID NO: 310885 - DNA, 1578 bp, Artificial Sequence
  derived and/or modified sequence
atgtcctggcacccccagtaccgcagcagcaagttccgccacgtgtttgggaagccagccagcaaagaaaactgctatgacagcgtgcccatcaccaggtctgtgcatgacaaccacttctgtgctgtgaacccccacttcatcgctgtggtgacagaatgtgccggcggcggggccttcctggtgatccccctgcaccagacaggcaagctggacccccactaccccaaggtgtgtggccacagaggaaatgtgctggatgtgaagtggaacccctttgatgactttgagatcgccagctgcagtgaagatgccaccatcaagatctggagcatccccaagcagctgctgaccaggaacctgacagcctacaggaaggagctggtgggccacgccaggagagtgggcctggtggagtggcaccccacagctgccaacatcctcttctctgctggctatgactacaaggtgatgatctggaacctggacaccaaggagagcgtcatcaccagccccatgagcaccatcagctgccaccaggatgtgatcctgtccatgtccttcaacaccaacggcagcctgctggccaccacctgcaaggacaggaagatccgggtgattgaccccagggctggcaccgtgctgcaggaggccagctacaagggccaccgggccagcaaggtgctcttcctgggcaacctgaagaagctgatgagcacaggcaccagccgctggaacaaccggcaggtggccctgtgggaccaggacaacctgtctgtgcccctgatggaggaggacctggatggcagcagtggagtgctcttccccttctatgatgctgacacctccatgctgtatgtggtgggcaaaggagatggcaacatccgctactatgaggtgtctgctgacaagccccacctgagctacctgacagagtaccgcagctacaacccccagaagggcatcggcgtgatgcccaagaggggcctggatgtgagcagctgtgagatcttccgcttctacaagctgatcaccaccaagagcctcatcgagcccatctccatgattgtgcccaggagaagtgagagctaccaggaggacatctacccacccacagctggggcccagcccagcctgacagcccaggagtggctgagcggcatgaacagagaccccatcctggtgtccctgcggcccggcagcgagctgctgcggccccaccccctgcctgctgagcggcccatcttcaacagcatggccccagccagcccccggctgctgaaccagacagagaagctggccgcagaagatggctggaggagcagcagcctgctggaggagaagatgccccgctgggccgctgagcaccggctggaggagaagaagacctggctgaccaatggatttgatgtgtttgaatgtcctccacccaagacagaaaatgagctgctgcagatgttctaccggcagcaggaggagatccggcggctgcgggagctgctgacccagcgggaggtgcaggccaagcagctggagctggagatcaagaacctgaggatgggcagcgagcagctgtag

SEQ ID NO: 310886 - DNA, 1578 bp, Artificial Sequence
  derived and/or modified sequence
atgagctggcacccccagtaccggagcagcaagttccggcacgtgtttggcaaacccgcatccaaggagaattgctacgacagcgtgcctattacacgaagtgtgcacgacaatcacttttgtgcagtgaatcctcactttatcgcggtggtcaccgagtgcgccggcgggggagccttcctggtcattccccttcaccagacaggcaaacttgacccacattatcccaaagtttgcgggcacagaggcaatgtgctggatgtgaagtggaacccatttgatgattttgagatcgcatcatgctctgaagatgcaactatcaagatctggtccattcctaagcagctgctcaccaggaacctgactgcctatcgcaaagaactcgtgggccacgcaaggcgggtggggctagtggaatggcacccaactgcagcgaacatacttttctcagcagggtatgactacaaggtcatgatttggaatctggacacaaaagaatccgttattacttctcctatgtccactataagctgccaccaggatgttatactcagcatgtcttttaatactaacggctccctcctggcgaccacctgcaaggaccgaaagattcgggttatcgatcctcgtgcgggaacagtcctacaggaagcctcctacaaaggccaccgagcaagtaaggtgctttttttaggcaacctgaagaagctgatgagcacggggacctcaaggtggaataatagacaggtggccctgtgggatcaggacaacttgagtgtcccactgatggaggaggacttggacggcagttctggcgtgcttttccccttttacgatgctgacacctcaatgttgtatgtagtaggaaagggagatggaaacatcagatattacgaggtctcagcagacaagccccatctttcttatctgacagagtatcgcagctataatccccagaagggcatcggagtcatgcccaagcggggcctggatgttagctcgtgtgagatcttccggttttacaagctgattaccactaaaagccttatcgagccaatctcaatgatagtcccacgccggtccgagtcctatcaggaagacatctatcctcccactgctggcgcgcaaccctcgctgaccgcccaggaatggctgagcggtatgaacagggaccctattctggtttcactcagaccagggagcgaactactccgcccccatcccctgcccgctgagagacctatattcaattctatggccccagccagcccacggctgcttaatcaaaccgaaaaactggctgcggaggatggatggcggtcaagtagtctgctggaagaaaaaatgccaagatgggccgccgaacaccgtcttgaggaaaaaaaaacttggcttactaacggttttgatgttttcgaatgtcctcctccaaaaactgagaacgaactgcttcagatgttttaccgccagcaagaagaaattcggcgcttacgggaacttctcactcaacgggaggtacaggctaaacagctcgaactcgaaatcaagaacttgaggatgggcagcgaacaattatag

SEQ ID NO: 310887 - DNA, 1578 bp, Artificial Sequence
  derived and/or modified sequence
atgagctggcacccccagtaccggagcagcaagttccggcacgtgttcggtaagccagcttcaaaagaaaactgttacgacagcgtcccgataaccaggtcagtgcacgataaccacttttgcgccgtaaacccccacttcatagccgtcgtcacggagtgtgccggcggtggcgcctttctcgttatccctctccatcagacaggaaaactcgatcctcactatccgaaagtgtgtggacaccggggaaacgtcttggatgtcaaatggaatccatttgacgactttgagatcgcttcctgttctgaggatgccaccattaagatctggagcatccccaagcagctgttgacaagaaatttaactgcatacaggaaagaattggtcggacacgcgcgccgggtcggacttgtggagtggcatccaaccgccgccaacatcctattctccgcaggctacgactacaaggtgatgatttggaatctggataccaaagaatcagtgatcacctctcctatgagcacaatcagttgtcaccaagatgtcatcctttccatgtcctttaatactaacgggtctttgctagcaaccacatgcaaggatagaaaaattagggttatcgacccgagagctggtacagtgcttcaggaggcgtcctacaagggtcaccgggcttcaaaggtgttgttcctggggaacctgaagaaactgatgtccactgggacatcccgatggaacaatcgccaggtcgctctatgggatcaggataacctctcggtgcctcttatggaggaagacttggatggaagtagcggggtcctctttcccttttatgacgctgacaccagcatgttgtacgtcgtgggtaaaggcgacgggaatataagatactatgaagtttcagcggataaaccccacctgtcttatctgaccgaataccgcagctataatccccagaaagggatcggggtcatgccgaaacgcggactggacgtcagtagctgcgaaatttttcgcttttataagctgatcacaaccaaaagcctgattgagccaatcagcatgatcgtgccacggcgatccgaatcctatcaggaagatatctacccccccacggccggcgcgcaacctagcctgacagcccaggaatggctcagtggtatgaatcgcgatcctattcttgtctcactcaggcccgggtccgaactgctgagaccacatcctctcccagccgagagacccatttttaacagcatggctccagcttcccccaggctactgaatcagactgaaaagctggcagctgaggacggctggcgcagttcctccctgttagaggagaaaatgccccgttgggctgctgagcataggctggaagaaaagaagacctggctgactaatgggttcgacgtttttgaatgccctccccccaagactgagaacgagctgctgcagatgttctatagacagcaggaggagattcgtcgcctgagggaactgttaacacagcgggaggtgcaggccaaacagttagaactggagattaaaaatctgcgtatggggtccgaacagctgtag

SEQ ID NO: 310888 - DNA, 1578 bp, Artificial Sequence
  derived and/or modified sequence
atgtcgtggcaccctcagtataggagctccaaatttcgccatgttttcggaaagcctgcaagcaaggagaactgctatgattccgtgccaatcactcgttcagtccacgataatcatttctgcgctgtgaacccccatttcatagccgtggtgaccgagtgcgccggaggaggagcctttttagttatcccattgcaccagactggcaagctggacccccactaccccaaagtctgcggccatcgcggaaatgtgctcgatgtcaagtggaatcccttcgatgacttcgaaattgcctcatgctctgaagacgctacaatcaagatctggtccatccctaaacagctattgacacggaatctgactgcgtacaggaaagaactggtggggcatgcgaggagagttggattagtggaatggcacccaactgcggcaaacatattgttcagcgcagggtacgattataaggtgatgatctggaacctggataccaaggagtctgttatcacctcccctatgtccacgatctcttgtcaccaggacgtcattctgagtatgtcctttaacactaacggctctctgcttgctactacttgcaaggatcgaaagattagagtgatagatcctagggccggaacagtcctgcaggaggcttcctataagggccatagagccagcaaggtactttttcttggtaatttgaaaaagctcatgagtactggcacctcacgatggaacaatagacaagtggctctgtgggatcaggacaatctgtccgtgccattgatggaggaggacctagacggaagcagcggagtgctgtttcctttttatgatgcagacacttccatgttatacgtggtgggtaagggtgacggcaatattaggtattacgaagtgtcagccgataaaccacatcttagttatctgaccgagtacaggtcttacaaccctcagaagggcataggtgtcatgcctaagcgaggtcttgacgtatcttcctgtgagatttttcggttctacaagctcatcaccaccaaatccttaatagagcctatctccatgatcgtccctaggcgctctgagtcgtaccaagaggacatatacccccctactgcaggggctcagccatctctgactgcgcaagagtggctctcgggcatgaatcgtgacccaatcttggtgagcctgagacctggaagcgaacttctgagaccccatccactgccggcagagcgccctatcttcaactcaatggctcccgcatctccacgattgctgaaccagacggagaaattggccgctgaggacggttggcgcagctcctccctgctggaggagaagatgccgaggtgggctgccgagcacaggttagaggagaagaagacctggcttaccaatgggttcgacgtgtttgaatgccctccccctaagactgagaacgaactgctgcaaatgttttaccgccagcaggaagagataagaagactgagggagttgctaacacagagagaggttcaggcaaagcagctggagctggaaattaagaacttacggatggggagtgaacagctctag

SEQ ID NO: 310889 - DNA, 1578 bp, Artificial Sequence
  derived and/or modified sequence
atgtcttggcacccacagtatcgcagctctaagttccgacacgtgttcggcaaaccagcaagtaaggagaactgctacgattccgtgccgataacacgaagcgtacacgataatcatttttgcgccgtcaacccacacttcattgccgtggtcaccgagtgtgccggtggcggagcatttttggtgattccccttcatcagaccggaaagctggatccccactaccctaaggtttgtggccatcgcggaaacgtgctggatgtgaaatggaatccgttcgatgatttcgagatagcttcttgttctgaagacgcaacaatcaaaatttggtcaattccaaagcagctccttacacgaaatctaaccgcttaccggaaggaactcgtggggcatgccagaagggtggggctggtggagtggcacccaactgcagccaacatccttttcagtgctgggtatgattacaaggtgatgatttggaacctggatacgaaggagagcgtcataacctccccaatgagtacaatttcctgtcatcaagatgtgattctgtctatgtcttttaacacaaatgggtcactgttggctactacgtgcaaagaccgcaaaatccgtgtgattgatcctcgggctgggaccgtgctgcaggaagcttcatacaaaggccacagggcatctaaagtcctcttcctagggaaccttaagaagctaatgtctactgggaccagcagatggaataacaggcaggtggccctatgggatcaggacaacttgtcagtgcccttaatggaagaagatctcgatgggtcgagcggtgttctcttcccattttacgatgctgatacatcaatgttatacgttgtggggaaaggcgatggaaatattcggtattatgaagtcagtgctgataaaccacacctgtcttatcttacagaataccgatcttataacccccagaaggggattggcgtcatgccaaagcgcggactggacgtgtccagctgtgagatttttcggttctataagctgatcactaccaagagcctaatcgaacccatttctatgattgtgcccaggcgcagtgaaagctatcaggaagatatatacccacctacggctggggctcagccttcactcacagcccaggagtggcttagtgggatgaatcgggacccaatcctggtgtcattgcgcccaggctcagagctgctaagacctcaccccctgcctgcggagaggccaatattcaattcaatggccccagcatcacccagattgctcaaccaaaccgagaaattagcagccgaagacggctggagaagcagctctctgctggaggagaaaatgcccaggtgggcggcagagcaccgcctggaagagaagaagacttggctgacgaatggattcgacgttttcgagtgtcctcctcccaagaccgagaatgaactccttcagatgttttataggcagcaggaggagattaggaggcttcgtgaactactgacccagcgcgaggttcaagctaagcagctcgagctcgaaattaaaaaccttagaatggggtcagagcagctttag

SEQ ID NO: 310890 - DNA, 5635 bp, Artificial Sequence
  derived and/or modified sequence
cactgacatctttgctggactcttttaatcctcataaacccaggctgctggcacttgaaatttgagaagggcaatcagtctggcctcctgcctttctggcctgcaggcccagcctggacaaacaatttaggtggagctcctggaggctggaagcagagaggaggtacctcaccatcctctcctgccagctgttgcagactctgcctggggaactgattaagggtgagcagaggcatttatctccatgttaacaagcagatgtcatggcacccccagtaccggagctccaagttccgtcatgtctttggcaaaccagccagcaaggagaactgctacgactccgtgcctatcacccgcagcgttcacgacaaccacttctgtgccgtgaacccccacttcattgcagttgtgactgagtgtgctggtggaggggccttcctcgtcatccccctgcaccagacagggaagttggacccccactacccaaaagtctgcgggcacagaggcaacgttttggatgtcaagtggaacccttttgatgattttgagatcgcctcctgttctgaagatgccacaattaagatctggagcatccccaagcagctgctgaccaggaacctcacggcctacaggaaggaactcgtgggccacgcgcgcagagtaggcctggtggagtggcaccccacggccgccaacatcctcttcagtgctggctatgactacaaggtgatgatctggaacctggatacaaaggagtctgtcatcacaagccccatgagtacgattagctgtcaccaagatgtgatcctctccatgtccttcaacaccaacggcagcctgttggccaccacctgcaaagaccgcaagattcgggttattgacccccgagcagggaccgtcctccaggaggccagctacaaagggcaccgggccagcaaagtgctgtttctggggaacctgaagaagctgatgtccacaggcacatcccgatggaacaaccggcaggtggccttgtgggaccaggataacctctctgtgcctctgatggaggaggacctggacggctcctcgggcgtgctgtttcccttctatgacgcggacaccagcatgctctacgtggtggggaagggagatggcaacatccgctactacgaggtgagcgccgacaagcctcacctgagctacctgactgagtaccgctcctataacccacagaaggggatcggtgtcatgccaaagagaggactcgacgtgtcctcctgcgagatcttccgcttctacaagctgatcacaaccaaaagcctcatcgagcccatctccatgattgtgccccggcggtcagaatcctaccaagaggacatataccctccaacagcaggggcccagccctccctgacggcccaggagtggctcagcgggatgaatcgagacccaatcctggtgtcccttaggcctggctctgagctgctgagaccccacccactgcctgcagagagacctatcttcaattccatggccccagcctcaccccggctcttgaatcagacagaaaagctggctgcagaagatggctggaggtcttcctccctgttggaggagaagatgccaaggtgggcagcagaacacaggctggaggagaagaaaacctggctgacaaatggctttgacgttttcgaatgccccccaccaaagacagagaatgagttgctgcagatgttctaccggcaacaggaggagatccgaaggctccgggagctgttgacccagcgagaggtccaggccaaacagttggaactggagatcaaaaacttgcggatgggctcagagcagctctgagcagagacctctgccctcctcaccctcagggacaccactcggctccatggggaggtttagaaccaaaccacaagtcccctcaaggacaaccactatttctatattttttaccagaaaacaaaactctccatcgctgaaagagattccagtgggacatggtgccgtttttctgtttgccttcttgcaacaacagtttctgaattgactttgttttcagatgatgccttctgttgaattctgttattaagggcccatgatgagctgtaacttctcaagaggaaagaacacagtagaaaactagagctggaaggatctaggttgacctgtctgtgattttcaaactgtggtccagagaataggggaagactgggccagacgcagtggctcatgcctgtaatcccagcactctgggaggctgaggtgggcggattgcttgaggtcgggagtttgaaaccagtctcaccaggcgcagtggctcacgcctgtaattccagcatgttgggaggccgaggctggtggatcacgaggtcagcagttcgagaccagcctgaccaacatggtgaaaccccatctctactaaaaatacaaaaaaattagctgggcgtggtggcaggcgcctgtaattccagcgacttgggaggctgaggcaggagaattgcttgaaaccggaaggcgggggttgcagtgagctgagattgtgccactgcactctaacctgggcaataagagcaaaagtctgtctcaaaaaaaaaaaaaaaagaaagaaaccagcctggccaacatggtgaaaccccgtctctactaaaaatacaaaaattaggcagggcgtggtggttcacgcctataatcccagaactttgggaggccaagctgggcggatcttctgaggtcaggagttcaagaccagcctggccaacatggtgaaaccccgtctccactaaaaataaaaaattaaccaggcatggtggtgcatgcctgtaatcccagctatttgggaggctgaggcaggagaatcgcttgagcctgggaggcggaggttgcagtgaaccaagatcatgccacttcactccagcctgggtgacagagtgagactccgtctcaaaaaaaaaaagttggccagccgtggtggtgagcgtctgtagtccctgctattcgggaggctgagataggagaattgcttgaacctgggaggtggaggttgctatgagccacgattgcggactgcactgcagcctgggtgacagagcgagactccatctccaaaaaaaaaaaaaaaaagagagagagaataggggaagactaagcaggaaggctgtgtctcccttccccacactgtattccaaccagacagctcccttctattttatatgttgggctagtatgaaaaacaattctgctaggaaaaaaaaatttttttagaagtttgaaagctagtgatttgacccaagttcctcattttacagctggggaaactaaggcctagagagaggcaagtgatatttgtttcatggcagggctgggctgagatcctgcttttctgggtctgtctttttgctcttttgggtctgatgcagttctcagcccaaagagtagaaatctgttgcttctggcctcagctgtgccccagcttactcagtgacctcttgcaagtcctgccctctctggtctcagtttcttcatctgaaccaggggtaccctggaacaagctgctctctgcaggatctgccacctgaaaccttgacctaagagaaaactacctgtggggtgatctgggtttgctacagaaactaacggacactggcaaggggtcagaggcattcaacccaattctacaacacaggcaggtggtcaaaaccaacctttccaaccagaatcagcctgatatggatagatgctgtcccttatggagggacgcagacttcagaactgtgcccatgactgctgactgccaccaccaaggccctcaggtacacagcctgcctcctgcaggatgatgtgggcagatttcagccctagttaacagaagagtcccccaggaggtagggggcccccatcactggagacatgccagcagagcctctggccacctaaccaggaggtcttctgaaatgactatacgaggtaaagaagtagtaccagatggtcccaaagttcccttttagcctgaaagcttttctttgtccctccttagtgaatctgtgttccgagccctactctaaagttcagtggtcaatacaatagtccaccaagagactgggaatgattagaagtgaaattggtccctccttaccaaggaggggcagatgatctccattgcacagggcgattagattctggagctgaggtggggactgcaggaggccacctagtctggtaggtttcaacccaagctgtgtacattagaattcccttgggagcgtgcaggaaatacagatgcccatgccacattccagaccaactgaagctgaatctccagagtagggcctgtatggtcatataagctccacaggtgatctgcagtacagtgaagatggaagactgcatgtgtacctatttgcaataaagatgaagaggacagcaagctccagacaggagctgggactcaacccagatctcttaagtcctgcctggtggctccttaaaagtccagaagtgttgccccaagccctccctcaacatctctgggaaccgcagctgcagcacgatgggggttcagtgcccctgtttgccccttacccagctgtggtttattctgcttgtatgtctgcacaggccggatgctcgtgttccttgtcttattctccatttactcagtcactggggctcactcccgtctgatgcactagccaagattgccttagtgtgctccagaaaagaaggccaaatcccaggcattgtcagggcagcagagctctacaggataggcttacctttcccacctgtgtggctagcacttcacagtttacaaattcctcccacctccactcagtgacacatgctgttctaacacaggtcaggcaggcattacagtccccatgttcagaatcaaagacctagcctcagagaagtgaagaaacatcatgccaaggtcattgactgccaagcggtagaggtggggttgcatccagagagcttcccggtatgcctctgcacaatgccattccttggccagctccctccaccccaagggacccagactgcacacttaacaaacaggacacaggtgtctttgaacaaacttttttgtattattatttttacatctagaataaattatttaaattatttcacagcaagggagagggataggtaatttttatcagatatttttttaaaccatctgttttttaaattacatttttgtttatgttcttgagctgatgtagtggaacttgcctagcacattcaggtcccagccagttggcagagcatgctctcatctccttattccataccctgggcgtcccctttctgttgactcaggaactttctgagaatgaggacagcactaggagatgagctttggcaggtatccaccttaacgctacaataattgtgcttcctgaaacaaaacttgagattgtatcatagaaggaaacaggaagtcagaaatcaaatctatgcttttaattgaaaccgtgcctgaaacagtttgaatgattgttttaatgttgtttctgaaattccttgtacctttgtgaaaaataatgataataaataaaagtgaaaataaatagatgtggaatatgcaatggaaataatgtaacaaaataataaacatctggccattttactacaa

SEQ ID NO: 310891 - DNA, 5459 bp, Artificial Sequence
  derived and/or modified sequence
cgggagtcggcgggcggcgaggagcgcggagccggagctggacgccgccgccgccaccgccacctgcgcggcagtcatcaagatgtcatggcacccccagtaccggagctccaagttccgtcatgtctttggcaaaccagccagcaaggagaactgctacgactccgtgcctatcacccgcagcgttcacgacaaccacttctgtgccgtgaacccccacttcattgcagttgtgactgagtgtgctggtggaggggccttcctcgtcatccccctgcaccagacagggaagttggacccccactacccaaaagtctgcgggcacagaggcaacgttttggatgtcaagtggaacccttttgatgattttgagatcgcctcctgttctgaagatgccacaattaagatctggagcatccccaagcagctgctgaccaggaacctcacggcctacaggaaggaactcgtgggccacgcgcgcagagtaggcctggtggagtggcaccccacggccgccaacatcctcttcagtgctggctatgactacaaggtgatgatctggaacctggatacaaaggagtctgtcatcacaagccccatgagtacgattagctgtcaccaagatgtgatcctctccatgtccttcaacaccaacggcagcctgttggccaccacctgcaaagaccgcaagattcgggttattgacccccgagcagggaccgtcctccaggaggccagctacaaagggcaccgggccagcaaagtgctgtttctggggaacctgaagaagctgatgtccacaggcacatcccgatggaacaaccggcaggtggccttgtgggaccaggataacctctctgtgcctctgatggaggaggacctggacggctcctcgggcgtgctgtttcccttctatgacgcggacaccagcatgctctacgtggtggggaagggagatggcaacatccgctactacgaggtgagcgccgacaagcctcacctgagctacctgactgagtaccgctcctataacccacagaaggggatcggtgtcatgccaaagagaggactcgacgtgtcctcctgcgagatcttccgcttctacaagctgatcacaaccaaaagcctcatcgagcccatctccatgattgtgccccggcggtcagaatcctaccaagaggacatataccctccaacagcaggggcccagccctccctgacggcccaggagtggctcagcgggatgaatcgagacccaatcctggtgtcccttaggcctggctctgagctgctgagaccccacccactgcctgcagagagacctatcttcaattccatggccccagcctcaccccggctcttgaatcagacagaaaagctggctgcagaagatggctggaggtcttcctccctgttggaggagaagatgccaaggtgggcagcagaacacaggctggaggagaagaaaacctggctgacaaatggctttgacgttttcgaatgccccccaccaaagacagagaatgagttgctgcagatgttctaccggcaacaggaggagatccgaaggctccgggagctgttgacccagcgagaggtccaggccaaacagttggaactggagatcaaaaacttgcggatgggctcagagcagctctgagcagagacctctgccctcctcaccctcagggacaccactcggctccatggggaggtttagaaccaaaccacaagtcccctcaaggacaaccactatttctatattttttaccagaaaacaaaactctccatcgctgaaagagattccagtgggacatggtgccgtttttctgtttgccttcttgcaacaacagtttctgaattgactttgttttcagatgatgccttctgttgaattctgttattaagggcccatgatgagctgtaacttctcaagaggaaagaacacagtagaaaactagagctggaaggatctaggttgacctgtctgtgattttcaaactgtggtccagagaataggggaagactgggccagacgcagtggctcatgcctgtaatcccagcactctgggaggctgaggtgggcggattgcttgaggtcgggagtttgaaaccagtctcaccaggcgcagtggctcacgcctgtaattccagcatgttgggaggccgaggctggtggatcacgaggtcagcagttcgagaccagcctgaccaacatggtgaaaccccatctctactaaaaatacaaaaaaattagctgggcgtggtggcaggcgcctgtaattccagcgacttgggaggctgaggcaggagaattgcttgaaaccggaaggcgggggttgcagtgagctgagattgtgccactgcactctaacctgggcaataagagcaaaagtctgtctcaaaaaaaaaaaaaaaagaaagaaaccagcctggccaacatggtgaaaccccgtctctactaaaaatacaaaaattaggcagggcgtggtggttcacgcctataatcccagaactttgggaggccaagctgggcggatcttctgaggtcaggagttcaagaccagcctggccaacatggtgaaaccccgtctccactaaaaataaaaaattaaccaggcatggtggtgcatgcctgtaatcccagctatttgggaggctgaggcaggagaatcgcttgagcctgggaggcggaggttgcagtgaaccaagatcatgccacttcactccagcctgggtgacagagtgagactccgtctcaaaaaaaaaaagttggccagccgtggtggtgagcgtctgtagtccctgctattcgggaggctgagataggagaattgcttgaacctgggaggtggaggttgctatgagccacgattgcggactgcactgcagcctgggtgacagagcgagactccatctccaaaaaaaaaaaaaaaaagagagagagaataggggaagactaagcaggaaggctgtgtctcccttccccacactgtattccaaccagacagctcccttctattttatatgttgggctagtatgaaaaacaattctgctaggaaaaaaaaatttttttagaagtttgaaagctagtgatttgacccaagttcctcattttacagctggggaaactaaggcctagagagaggcaagtgatatttgtttcatggcagggctgggctgagatcctgcttttctgggtctgtctttttgctcttttgggtctgatgcagttctcagcccaaagagtagaaatctgttgcttctggcctcagctgtgccccagcttactcagtgacctcttgcaagtcctgccctctctggtctcagtttcttcatctgaaccaggggtaccctggaacaagctgctctctgcaggatctgccacctgaaaccttgacctaagagaaaactacctgtggggtgatctgggtttgctacagaaactaacggacactggcaaggggtcagaggcattcaacccaattctacaacacaggcaggtggtcaaaaccaacctttccaaccagaatcagcctgatatggatagatgctgtcccttatggagggacgcagacttcagaactgtgcccatgactgctgactgccaccaccaaggccctcaggtacacagcctgcctcctgcaggatgatgtgggcagatttcagccctagttaacagaagagtcccccaggaggtagggggcccccatcactggagacatgccagcagagcctctggccacctaaccaggaggtcttctgaaatgactatacgaggtaaagaagtagtaccagatggtcccaaagttcccttttagcctgaaagcttttctttgtccctccttagtgaatctgtgttccgagccctactctaaagttcagtggtcaatacaatagtccaccaagagactgggaatgattagaagtgaaattggtccctccttaccaaggaggggcagatgatctccattgcacagggcgattagattctggagctgaggtggggactgcaggaggccacctagtctggtaggtttcaacccaagctgtgtacattagaattcccttgggagcgtgcaggaaatacagatgcccatgccacattccagaccaactgaagctgaatctccagagtagggcctgtatggtcatataagctccacaggtgatctgcagtacagtgaagatggaagactgcatgtgtacctatttgcaataaagatgaagaggacagcaagctccagacaggagctgggactcaacccagatctcttaagtcctgcctggtggctccttaaaagtccagaagtgttgccccaagccctccctcaacatctctgggaaccgcagctgcagcacgatgggggttcagtgcccctgtttgccccttacccagctgtggtttattctgcttgtatgtctgcacaggccggatgctcgtgttccttgtcttattctccatttactcagtcactggggctcactcccgtctgatgcactagccaagattgccttagtgtgctccagaaaagaaggccaaatcccaggcattgtcagggcagcagagctctacaggataggcttacctttcccacctgtgtggctagcacttcacagtttacaaattcctcccacctccactcagtgacacatgctgttctaacacaggtcaggcaggcattacagtccccatgttcagaatcaaagacctagcctcagagaagtgaagaaacatcatgccaaggtcattgactgccaagcggtagaggtggggttgcatccagagagcttcccggtatgcctctgcacaatgccattccttggccagctccctccaccccaagggacccagactgcacacttaacaaacaggacacaggtgtctttgaacaaacttttttgtattattatttttacatctagaataaattatttaaattatttcacagcaagggagagggataggtaatttttatcagatatttttttaaaccatctgttttttaaattacatttttgtttatgttcttgagctgatgtagtggaacttgcctagcacattcaggtcccagccagttggcagagcatgctctcatctccttattccataccctgggcgtcccctttctgttgactcaggaactttctgagaatgaggacagcactaggagatgagctttggcaggtatccaccttaacgctacaataattgtgcttcctgaaacaaaacttgagattgtatcatagaaggaaacaggaagtcagaaatcaaatctatgcttttaattgaaaccgtgcctgaaacagtttgaatgattgttttaatgttgtttctgaaattccttgtacctttgtgaaaaataatgataataaataaaagtgaaaataaatagatgtggaatatgcaatggaaataatgtaacaaaataataaacatctggccattttactacaa

SEQ ID NO: 310892 - DNA, 1578 bp, Artificial Sequence
  derived and/or modified sequence
atgagctggcacccccagtacagaagcagcaagttcagacacgtgttcggcaagcccgccagcaaggagaactgctacgacagcgtgcccatcaccagaagcgtgcacgacaaccacttctgcgccgtgaacccccacttcatcgccgtggtgaccgagtgcgccggcggcggcgccttcctggtgatccccctgcaccagaccggcaagctggacccccactaccccaaggtgtgcggccacagaggcaacgtgctggacgtgaagtggaaccccttcgacgacttcgagatcgccagctgcagcgaggacgccaccatcaagatctggagcatccccaagcagctgctgaccagaaacctgaccgcctacagaaaggagctggtgggccacgccagaagagtgggcctggtggagtggcaccccaccgccgccaacatcctgttcagcgccggctacgactacaaggtgatgatctggaacctggacaccaaggagagcgtgatcaccagccccatgagcaccatcagctgccaccaggacgtgatcctgagcatgagcttcaacaccaacggcagcctgctggccaccacctgcaaggacagaaagatcagagtgatcgaccccagagccggcaccgtgctgcaggaggccagctacaagggccacagagccagcaaggtgctgttcctgggcaacctgaagaagctgatgagcaccggcaccagcagatggaacaacagacaggtggccctgtgggaccaggacaacctgagcgtgcccctgatggaggaggacctggacggcagcagcggcgtgctgttccccttctacgacgccgacaccagcatgctgtacgtggtgggcaagggcgacggcaacatcagatactacgaggtgagcgccgacaagccccacctgagctacctgaccgagtacagaagctacaacccccagaagggcatcggcgtgatgcccaagagaggcctggacgtgagcagctgcgagatcttcagattctacaagctgatcaccaccaagagcctgatcgagcccatcagcatgatcgtgcccagaagaagcgagagctaccaggaggacatctacccccccaccgccggcgcccagcccagcctgaccgcccaggagtggctgagcggcatgaacagagaccccatcctggtgagcctgagacccggcagcgagctgctgagaccccaccccctgcccgccgagagacccatcttcaacagcatggcccccgccagccccagactgctgaaccagaccgagaagctggccgccgaggacggctggagaagcagcagcctgctggaggagaagatgcccagatgggccgccgagcacagactggaggagaagaagacctggctgaccaacggcttcgacgtgttcgagtgccccccccccaagaccgagaacgagctgctgcagatgttctacagacagcaggaggagatcagaagactgagagagctgctgacccagagagaggtgcaggccaagcagctggagctggagatcaagaacctgagaatgggcagcgagcagctgtag

SEQ ID NO: 310893 - DNA, 64 bp, Artificial Sequence
  derived and/or modified sequence
ggaatttaatagaatgtacccgaatggaacggaatggaatggaattgtatggcatggaatggaa

SEQ ID NO: 310894 - DNA, 564 bp, Artificial Sequence
  derived and/or modified sequence
ctaagaaatcaccagcccagagagccccactgcgatcttgagacgagtgggacggttaccgttggtcctatgcacacactgcccagcacctgtctgcagaaagttgaggaacagccggaggacgcagacaaccaaaggaacgtcacccgaatgggtagtcagcctcccgatccaaatactatagtccacatcccagtaatgctgaccggacctctgggagaggctactgttgtgcctagcccaacaattggcagactgcaggcggaagagcagggagagccggccagagttagtaagttgaatttagaatccgatgtccggggacaggaagcttcctcaacaggcgaacgatatagattgggcggcgggaacgtggacttggaatctcaggccgaaggaaagaaagaagtcgaagcagacgacgtgatgcggtccggccctcgcccaatcgttccatactctagcatgttttgtttaagccccaccaacctgctgcgccgtttctgccactacatcgtgacaatgcgttactttgaagttgtaatcctggttgtaatagcatag

SEQ ID NO: 310895 - DNA, 564 bp, Artificial Sequence
  derived and/or modified sequence
ctgaggaaccaccagccccgggagccccactgtgacctggagaccagcggcaccgtgacagtgggccccatgcacaccctgcccagcacctgcctgcagaaggtggaggagcagccagaagatgctgacaaccagagaaatgtgaccaggatgggcagccagcccccagaccccaacaccatcgtgcacatccctgtgatgctgaccggccccctgggggaggccaccgtggtgcccagccccaccatcggccgcctgcaggccgaggagcagggcgagcccgcccgggtgtccaagctgaacctggagagtgatgtgcggggccaggaggccagcagcactggagagcgctaccgcctgggcggcggcaatgtggacctggagagccaggccgagggcaagaaggaggtggaggctgatgatgtgatgaggagcggcccccggcccatcgtgccctacagctccatgttctgcctgagccccaccaacctgctgcggcgcttctgccactacatcgtgaccatgagatactttgaggtggtgatcctggtggtgattgcctag

SEQ ID NO: 310896 - DNA, 564 bp, Artificial Sequence
  derived and/or modified sequence
ctgcggaaccaccagccccgggagccccactgcgacctggagacctcagggaccgtgacggttggccctatgcatactctgcccagtacctgtttgcagaaagttgaggaacaaccagaggacgccgataaccagcgaaacgtgactcgaatgggatcccagcccccagatcctaatacgatcgtgcacataccagtgatgctgactgggcccttgggcgaggccaccgtcgtgccaagccctacaatcgggcggctgcaggcagaggaacaaggggagcccgctagggtgagtaaactgaacttggagtctgacgtccgaggtcaagaggcctcatccactggggaacggtataggttgggaggtggcaacgttgatctcgaaagtcaggccgagggcaagaaggaggttgaggcagatgacgtgatgcggagcgggccaaggccgatcgtgccttatagttccatgttctgcctgtcacccactaacctgttacggaggttttgccattacattgtgacgatgcgttactttgaggtcgtaatcctggtggtgattgcatag

SEQ ID NO: 310897 - DNA, 564 bp, Artificial Sequence
  derived and/or modified sequence
ctgaggaatcaccaacccagggagccccattgcgatctggaaacatccgggactgtgaccgttggccctatgcacacactgccctctacctgcctgcaaaaggtagaagaacaacctgaggacgcagacaaccagagaaacgttaccagaatgggatcacaacctcccgatcccaacacaatagtgcacatccctgtcatgctgactggccctctaggtgaagccaccgtggttccatcacccacgatcggcagactgcaggccgaggagcaaggtgagcctgccagggtttccaagcttaatttggagagcgacgtgcgtgggcaggaagcttcatccaccggcgagaggtaccggctggggggaggcaatgtcgaccttgaatcacaggccgagggaaagaaagaagtggaggctgatgacgtcatgaggagtgggccacgcccaatcgttccgtacagttcgatgttctgtctgagccctaccaaccttctcagacggttttgccactatatcgtgacaatgcggtacttcgaggtggtgatcttggtggtgattgcctag

SEQ ID NO: 310898 - DNA, 448 bp, Artificial Sequence
  derived and/or modified sequence
gcggcggcaccgggcccggcacaaggcgcagcctgctcacgaggctgtggagaaggagaccacggagaaggaggccacggagaaggaggctgagatagtggaagccgacaaggaaaaggagctccggaaccaccagccccgggagccacactgtgacctggagaccagtgggactgtgactgtgggtcccatgcacacactgcccagcacctgtctccagaaggtggaggaacagccagaggatgcagacaatcagcggaacgtcactcgcatgggcagtcagcccccagacccgaacactattgtacatatcccagtgatgctgacgggccctcttggggaagccacggtcgttcccacacttgaaaaaaacgtgtgcctcttccttctgacctccatggtttctgatgagaaatccactgtcattcgaattgttttcttcctatag

SEQ ID NO: 310899 - DNA, 564 bp, Artificial Sequence
  derived and/or modified sequence
ctgagaaaccaccagcccagagagccccactgcgacctggagaccagcggcaccgtgaccgtgggccccatgcacaccctgcccagcacctgcctgcagaaggtggaggagcagcccgaggacgccgacaaccagagaaacgtgaccagaatgggcagccagccccccgaccccaacaccatcgtgcacatccccgtgatgctgaccggccccctgggcgaggccaccgtggtgcccagccccaccatcggcagactgcaggccgaggagcagggcgagcccgccagagtgagcaagctgaacctggagagcgacgtgagaggccaggaggccagcagcaccggcgagagatacagactgggcggcggcaacgtggacctggagagccaggccgagggcaagaaggaggtggaggccgacgacgtgatgagaagcggccccagacccatcgtgccctacagcagcatgttctgcctgagccccaccaacctgctgagaagattctgccactacatcgtgaccatgagatacttcgaggtggtgatcctggtggtgatcgcctag

SEQ ID NO: 310900 - protein, 2340 aa, Artificial Sequence
  derived and/or modified sequence
MVRFGDELGGRYGGPGGGERARGGGAGGAGGPGPGGLQPGQRVLYKQSIAQRARTMALYNPIPVKQNCFTVNRSLFVFSEDNVVRKYAKRITEWPPFEYMILATIIANCIVLALEQHLPDGDKTPMSERLDDTEPYFIGIFCFEAGIKIIALGFVFHKGSYLRNGWNVMDFVVVLTGILATAGTDFDLRTLRAVRVLRPLKLVSGIPSLQVVLKSIMKAMVPLLQIGLLLFFAILMFAIIGLEFYMGKFHKACFPNSTDAEPVGDFPCGKEAPARLCEGDTECREYWPGPNFGITNFDNILFAILTVFQCITMEGWTDILYNTNDAAGNTWNWLYFIPLIIIGSFFMLNLVLGVLSGEFAKERERVENRRAFLKLRRQQQIERELNGYLEWIFKAEEVMLAEEDRNAEEKSPLDAVLKRAATKKSRNDLIHAEEGEDRFADLCAVGSPFARASLKSGKTESSSYFRRKEKMFRFFIRRMVKAQSFYWVVLCVVALNTLCVAMVHYNQPRRLTTTLYFAEFVFLGLFLTEMSLKMYGLGPRSYFRSSFNCFDFGVIVGSVFEVVWAAIKPGSSFGISVLRALRLLRIFKVTKYWSSLRNLVVSLLNSMKSIISLLFLLFLFIVVFALLGMQLFGGQFNFQDETPTTNFDTFPAAILTVFQILTGEDWNAVMYHGIESQGGVSKGMFSSFYFIVLTLFGNYTLLNVFLAIAVDNLANAQELTKDEEEMEEAANQKLALQKAKEVAEVSPMSAANISIAARQQNSAKARSVWEQRASQLRLQNLRASCEALYSEMDPEERLRFATTRHLRPDMKTHLDRPLVVELGRDGARGPVGGKARPEAAEAPEGVDPPRRHHRHRDKDKTPAAGDQDRAEAPKAESGEPGAREERPRPHRSHSKEAAGPPEARSERGRGPGPEGGRRHHRRGSPEEAAEREPRRHRAHRHQDPSKECAGAKGERRARHRGGPRAGPREAESGEEPARRHRARHKAQPAHEAVEKETTEKEATEKEAEIVEADKEKELRNHQPREPHCDLETSGTVTVGPMHTLPSTCLQKVEEQPEDADNQRNVTRMGSQPPDPNTIVHIPVMLTGPLGEATVVPSGNVDLESQAEGKKEVEADDVMRSGPRPIVPYSSMFCLSPTNLLRRFCHYIVTMRYFEVVILVVIALSSIALAAEDPVRTDSPRNNALKYLDYIFTGVFTFEMVIKMIDLGLLLHPGAYFRDLWNILDFIVVSGALVAFAFSGSKGKDINTIKSLRVLRVLRPLKTIKRLPKLKAVFDCVVNSLKNVLNILIVYMLFMFIFAVIAVQLFKGKFFYCTDESKELERDCRGQYLDYEKEEVEAQPRQWKKYDFHYDNVLWALLTLFTVSTGEGWPMVLKHSVDATYEEQGPSPGYRMELSIFYVVYFVVFPFFFVNIFVALIIITFQEQGDKVMSECSLEKNERACIDFAISAKPLTRYMPQNRQSFQYKTWTFVVSPPFEYFIMAMIALNTVVLMMKFYDAPYEYELMLKCLNIVFTSMFSMECVLKIIAFGVLNYFRDAWNVFDFVTVLGSITDILVTEIAETNNFINLSFLRLFRAARLIKLLRQGYTIRILLWTFVQSFKALPYVCLLIAMLFFIYAIIGMQVFGNIALDDDTSINRHNNFRTFLQALMLLFRSATGEAWHEIMLSCLSNQACDEQANATECGSDFAYFYFVSFIFLCSFLMLNLFVAVIMDNFEYLTRDSSILGPHHLDEFIRVWAEYDPAACGRISYNDMFEMLKHMSPPLGLGKKCPARVAYKRLVRMNMPISNEDMTVHFTSTLMALIRTALEIKLAPAGTKQHQCDAELRKEISVVWANLPQKTLDLLVPPHKPDEMTVGKVYAALMIFDFYKQNKTTRDQMQQAPGGLSQMGPVSLFHPLKATLEQTQPAVLRGARVFLRQKSSTSLSNGGAIQNQESGIKESVSWGTQRTQDAPHEARPPLERGHSTEIPVGRSGALAVDVQMQSITRRGPDGEPQPGLESQGRAASMPRLAAETQPVTDASPMKRSISTLAQRPRGTHLCSTTPDRPPPSQASSHHHHHRCHRRRDRKQRSLEKGPSLSADMDGAPSSAVGPGLPPGEGPTGCRRERERRQERGRSQERRQPSSSSSEKQRFYSCDRFGGREPPKPKPSLSSHPTSPTAGQEPGPHPQGSGSVNGSPLLSTSGASTPGRGGRRQLPQTPLTPRPSITYKTANSSPIHFAGAQTSLPAFSPGRLSRGLSEHNALLQRDPLSQPLAPGSRIGSDPYLGQRLDSEASVHALPEDTLTFEEAVATNSGRSSRTSYVSSLTSQSHPLRRVPNGYHCTLGLSSGGRARHSYHHPDQDHWC

SEQ ID NO: 310901 - DNA, 7023 bp, Artificial Sequence
  derived and/or modified sequence
atggtccgattcggtgacgagttgggtgggcgctatggaggacccggaggcggcgagcgggcccgcggtggcggcgctggcggggcagggggtccagggccaggcggattacaaccgggccagcgggtgctgtacaagcaatccattgcacagcgagccagaactatggccctctataatccaattccagtgaagcagaattgctttactgtcaatagatccttattcgtgtttagcgaagacaacgttgtgcgcaaatacgccaaaaggatcacggagtggccacccttcgagtacatgatccttgcgaccataattgccaattgcattgtccttgctcttgaacagcacctccctgacggagacaagactcccatgtccgagaggctcgacgacaccgaaccatattttataggaatcttctgtttcgaagccgggattaaaattattgcgttggggtttgtttttcacaaagggtcttacttacgaaacggatggaacgtgatggatttcgtggtcgtcctcacaggcatcctagccacagctgggaccgatttcgacctgcgaactctccgcgctgtaagggtgttgcgccccctcaagctggtgagcggcataccaagtttgcaggtcgtgttgaaaagcatcatgaaggctatggtcccacttctgcagatcgggctgcttcttttttttgcgattttgatgttcgccatcataggccttgagttttacatgggtaaatttcacaaggcatgtttccctaacagcacggacgcagaacctgtcggagatttcccatgcggcaaggaggcaccagcacgcctctgtgaaggggataccgagtgtcgagaatattggccaggccccaacttcggcatcacgaattttgataacattctgtttgctatcctgacagtattccagtgcattaccatggaggggtggactgacatcctgtataacaccaacgatgctgctggaaatacctggaactggctttatttcatcccattaataattatcggtagctttttcatgctcaatctggtcttaggggtccttagcggtgaattcgctaaggagagggaaagagtagagaatcgcagggcctttcttaagctaagacggcagcagcagatcgaaagggagctgaatgggtatttggagtggatcttcaaggccgaagaggtcatgctggccgaggaggacaggaacgcagaggagaaatcaccgcttgacgctgtgcttaagagagccgccacaaagaaatcgcgaaacgatctcatccacgctgaggaaggagaggaccgtttcgcggacctgtgcgcagtgggaagtcctttcgctcgcgccagcctgaaatccgggaagaccgaaagttcatcctactttagaaggaaagaaaaaatgttcaggtttttcatccgtcggatggtcaaagcccaatcattctactgggtggtgctatgtgtggtggcgctcaatactctctgcgtcgctatggtgcactataatcagccgcggcgacttaccacgaccctgtattttgctgagttcgtgttcttgggattgttcctgacagaaatgagtctgaagatgtatggcttaggaccaaggtcgtattttaggagcagcttcaactgctttgacttcggtgtgatcgtgggcagcgttttcgaagtagtttgggctgccatcaagcccggttcttcatttggcatttccgtgctccgggcacttagattgcttcggatctttaaggttaccaaatactggtcttcactcagaaatctggtcgtaagcttactcaacagcatgaagtccatcatatctctcttgttcctgctttttctgttcattgttgttttcgcattgttgggaatgcagctgtttggcggacagttcaatttccaagatgagacccctaccaccaactttgacacattccctgcagctattttgaccgtgttccagattctgacaggcgaagattggaacgccgttatgtaccacggaatcgagagccagggcggagtttccaagggaatgtttagctctttttatttcatcgtcctcactctgttcggcaattataccctgctgaacgtttttctggcgattgccgtggacaacctagcaaatgctcaggagcttacaaaggacgaggaggaaatggaggaggcggccaaccagaagctggcactgcaaaaggccaaggaagtggccgaggtatctcctatgagcgcagccaacatcagcatagctgctagacagcagaactcagccaaagcccgtagcgtgtgggagcagagggcaagtcaactgagactgcagaatttgcgtgcctcatgcgaagcattgtacagcgagatggatccagaggaaagattgcgtttcgccaccactaggcatctgaggcctgacatgaaaacacacctggaccggccattggtcgtcgagcttggccgcgacggagctagggggcctgtgggaggcaaggcaagaccggaggccgctgaggcaccagagggagtggacccacctcgaagacatcacaggcacagagataaagataagacgcctgctgccggagaccaggaccgggccgaggccccaaaggccgaaagtggcgaacctggggccagggaggagcggccccgccctcatcggtcacatagcaaagaggctgctggaccccccgaagccagaagcgagcgcggtcggggaccaggtcctgagggaggacggcgacaccataggcgcggtagtcccgaagaagccgccgagcgcgaaccgcggcgtcatcgcgctcacagacatcaagatcctagcaaggagtgcgctggagcaaaaggggagaggcgggcacggcaccggggtggacccagagcaggcccaagagaagcagagtcaggcgaagaacctgcccggaggcacagagcgcggcacaaggctcaacctgcccacgaagcggtggagaaggaaaccaccgaaaaggaggctaccgaaaaggaggccgaaattgtggaagctgacaaagaaaaggaactacggaaccaccagcccagggagccacattgtgatcttgaaaccagcggcactgttactgttggccccatgcacacattgccatctacatgcctgcagaaggtcgaggaacagcctgaggatgccgacaaccagaggaatgtgaccagaatgggctcccaacccccggaccccaacacaattgtgcatattcccgtgatgcttaccggacccctgggcgaagctactgtggtgccctctgggaatgtggatctagagagccaggctgagggtaagaaggaagtagaggccgatgacgtcatgcgctccgggccaagaccaattgttccctacagcagtatgttctgtctgtccccgacaaacctcctcagacgcttctgccattacattgtgactatgagatacttcgaggtggttattctggtggttattgctctttcttccattgctttggccgccgaggatcccgtgcggactgactcccctcgtaataatgctctcaagtatctagattacatattcacaggcgtcttcacattcgagatggttatcaaaatgatcgacctggggctgttgttgcaccccggcgcatatttccgggacctttggaacattctggattttatcgtggtatcaggggctctggtagcattcgcattctccgggtctaaggggaaagacatcaacaccattaagagcttgcgggtgttgcgcgtcttgagaccattaaagaccattaagaggctccctaaactcaaggcagtttttgactgcgtagtgaattccctcaagaacgttctgaacattttaattgtgtatatgctgtttatgttcatcttcgctgtcatagctgttcagctcttcaaaggcaagtttttttactgcactgatgagagtaaagaactggagcgggattgtcgtggacaatacctagattatgagaaagaagaggtcgaggcccagccaagacagtggaagaagtatgacttccactacgacaacgtgctgtgggcgcttcttaccctcttcactgtctctacaggggaggggtggcccatggtgctgaaacattccgtagacgccacctatgaggaacagggaccctccccaggttacagaatggaactttccattttctatgtggtgtactttgttgtattccccttcttcttcgtcaacatcttcgtggccctaataattattacttttcaagaacagggcgacaaggtaatgagtgaatgcagtctggagaagaacgaacgcgcctgtatcgatttcgccatcagtgcgaagcctctcacccgctatatgccccagaacagacagtctttccagtataagacatggacgttcgttgtcagccctccctttgagtatttcattatggcgatgatcgccttgaatacagtagtgctgatgatgaagttctatgatgcaccatatgaatacgaactcatgcttaaatgcctgaacattgtttttacatccatgtttagtatggagtgcgtcctgaaaatcattgcattcggcgtcctaaattactttcgcgatgcttggaatgtgttcgacttcgtgactgtactgggatccattaccgatattcttgttacggaaatagccgagaccaataatttcatcaacctatcattcttgagattgttcagggcggcccggctgatcaagctcctgagacagggctatactatccgtattttactatggacattcgtgcagtctttcaaagccttgccctacgtgtgtctcctgattgctatgttattcttcatatatgcgataatcggcatgcaggtgttcgggaatattgctttagacgatgacactagcattaataggcataacaacttccgtacctttctgcaggcgctcatgttgctgtttcgcagcgcaaccggtgaagcatggcacgagattatgctgagctgcctgagtaatcaagcatgcgacgagcaggctaacgccaccgaatgcggatctgactttgcttacttttacttcgtcagctttatcttcctctgctcatttttaatgctgaaccttttcgttgcagtaataatggacaacttcgaatatttgacccgggatagtagtatcttgggtcctcaccatttggatgaattcatccgtgtgtgggcggagtacgatccagctgcatgcggtcgcatttcttacaatgatatgttcgagatgttaaaacacatgagcccccctctggggcttggcaaaaagtgccccgcacgagtggcctataagaggttagtacggatgaatatgcctatcagtaacgaagacatgacagtgcatttcacatctactctgatggctttgatacggactgccctcgagattaagcttgcacccgctggcacaaaacagcaccagtgtgatgccgaattgcgtaaggagatctctgtggtgtgggccaacctcccccagaaaactctggaccttctggtgccaccgcataaacctgacgagatgacagtaggcaaggtttacgcggctctcatgatctttgatttctataaacaaaacaagacaacaagggaccagatgcagcaagctccagggggactgtcgcagatgggcccggtatccctgttccacccactgaaggccactttggaacagacccaaccggccgtgcttaggggggctcgggttttcctcagacagaaaagttcgacttctctatctaatggcggagcaatccagaaccaggagtcaggtattaaggagtccgttagctgggggacccaacgcacgcaagacgcccctcatgaggcccggccacccctggagagaggtcacagcacagagatcccagtaggcaggtcaggggcgctggcagttgatgtgcaaatgcagtccatcacccggagaggacccgacggcgaaccgcagcccgggctggaaagccaagggcgggcagcatcaatgccaaggctcgctgccgagactcaaccagtcacagatgcaagtcctatgaagaggagtatctcgaccctcgcccagaggcctcgcggcacacacctgtgtagtactactcccgaccgcccccccccaagtcaagcatcttcccaccaccatcaccaccgctgtcaccggcggcgagatcgcaaacagcggtctctagagaagggtccctccctgtcggcagacatggacggagctccaagtagtgccgtgggcccaggactgccccccggcgaagggcctactgggtgccggcgcgagcgtgaacggaggcaggaacgcggaagaagccaggaacgacgccagccgagctccagttcaagcgagaagcagagattctattcttgtgacagatttggtgggcgcgaacctcctaagcctaagccatcacttagttcccatccaaccagccctacagcaggtcaagagcccggaccccacccacagggaagcggctctgtgaacggctctccactattatccacatctggcgcctccactcccggtagaggtggccgacgacagcttcctcaaactcccctgacccctcggccatccatcacctataaaaccgcaaatagcagccccattcacttcgcaggagctcagacaagtctgcctgccttcagcccaggacgactctcacggggcctctcagagcacaatgccttgcttcagcgggatcctctatcccagccacttgcccctggaagccggatcgggtcagacccgtatctggggcagagactcgatagtgaggcctccgtacatgctctaccggaggacaccctgacatttgaagaggccgttgcgaccaattcaggacgatctagcaggacgagttatgtgtcctctctgaccagccaatcccatcccctgcggcgggtccccaatggataccattgtaccttgggactctcttccggcggcagggcaaggcacagttaccaccatcccgatcaagatcattggtgctag

SEQ ID NO: 310902 - DNA, 7023 bp, Artificial Sequence
  derived and/or modified sequence
atggtgcgctttggagatgagctgggcggccgctatggaggccctgggggcggggagcgggcccggggcggcggggccggcggggccggcggccctggccctgggggcctgcagcccggccagagggtgctgtacaagcagagcatcgcccagagggcccggaccatggccctgtacaaccccatccctgtgaagcagaactgcttcaccgtgaacagaagcctgtttgtgttttctgaggacaacgtggtgaggaaatatgccaagaggatcacagagtggcccccatttgagtacatgatcctggccaccatcatcgccaactgcatcgtgctggccctggagcagcacctgcctgatggagacaagacccccatgtctgagcggctggatgacacagagccctacttcatcggcatcttctgctttgaagctggcatcaagatcatcgccctgggctttgtgttccacaagggcagctacctgagaaatggctggaatgtgatggactttgtggtggtgctgaccggcatcctggccacagctggaacagactttgacctgcggaccctgcgggctgtgcgggtgctgcggcccctgaagctggtgtctggcatccccagcctgcaggtggtgctgaagagcatcatgaaggccatggtgcccctgctgcagatcggcctgctgctcttctttgccatcctgatgtttgccatcatcggcctggagttctacatgggcaagttccacaaggcctgcttccccaacagcacagatgctgagcctgtgggggacttcccctgtgggaaggaggccccagcccggctgtgtgagggggacacagagtgccgggagtactggccaggccccaactttggcatcaccaactttgacaacatcctgtttgccatcctgaccgtcttccagtgcatcaccatggagggctggacagacatcctgtacaacaccaatgatgctgctggcaacacctggaactggctgtacttcatccccctcatcatcatcggcagcttcttcatgctgaacctggtgctgggcgtgctgagcggggagtttgccaaggagcgggagcgggtggagaacagaagagccttcctgaagctgcggcggcagcagcagatcgagcgggagctgaatggctacctggagtggatcttcaaggccgaggaggtgatgctggccgaggaggacagaaatgctgaggagaagagccccctggatgctgtgctgaagagagctgccaccaagaagagcagaaatgacctgattcatgctgaggagggggaggacagatttgctgacctgtgtgctgtgggcagcccctttgcccgggccagcctgaagagcggcaagacagagagcagcagctacttccggaggaaggagaagatgttccgcttcttcatccggaggatggtgaaggcccagagcttctactgggtggtgctgtgtgtggtggccctgaacaccctgtgtgtggccatggtgcactacaaccagccccggcggctgaccaccaccctgtactttgctgagtttgtgttcctgggcctcttcctgacagagatgagcctgaagatgtatggcctgggccccaggagctacttccgcagcagcttcaactgctttgattttggagtgattgtgggctctgtgtttgaggtggtgtgggccgccatcaagccaggcagcagctttggcatctctgtgctgcgggccctgcggctgctgcgcatcttcaaggtgaccaagtactggagcagcctgaggaacctggtggtgtccctgctgaacagcatgaagagcatcatcagcctgctcttcctgctcttcctgttcatcgtggtgtttgccctgctgggcatgcagctgtttggaggccagttcaacttccaggatgagacccccaccaccaactttgacaccttccctgctgccatcctgaccgtcttccagatcctgaccggggaggactggaatgctgtgatgtaccacggcatcgagagccagggcggcgtgtccaagggcatgttcagcagcttctacttcatcgtgctgaccctgtttggaaactacaccctgctgaatgtgttcctggccatcgctgtggacaacctggccaatgcccaggagctgaccaaggatgaggaggagatggaggaggccgccaaccagaagctggccctgcagaaggccaaggaggtggccgaggtgagccccatgtctgctgccaacatcagcattgctgcccggcagcagaacagcgccaaggcccggtctgtgtgggagcagagggccagccagctgcggctgcagaacctgcgggccagctgtgaggccctgtacagcgagatggaccctgaggagcggctgcgctttgccaccaccaggcacctgcggccagacatgaagacccacctggaccggcccctggtggtggagctgggcagagatggagcccggggccctgtgggcggcaaggcccggcctgaggccgctgaggcccctgagggcgtggaccccccccggcggcaccaccgccaccgggacaaggacaagaccccagctgctggggaccaggacagagctgaggcccccaaggccgagagcggggagcccggggcccgggaggagcggccccggccccacaggagccacagcaaggaggccgccggccccccagaggcccggtctgagcggggccggggccctggccctgagggcggcagaagacaccacagaagaggcagccctgaggaggccgctgagcgggagccccggcggcaccgggcccaccgccaccaggaccccagcaaagaatgtgccggggccaagggggagcggcgggcccggcacagaggaggccccagggctggcccccgggaggccgagagcggggaggagcccgcccggcggcaccgggcccggcacaaggcccagcctgcccacgaggccgtggagaaggagaccacagagaaggaggccacagagaaggaggccgagatcgtggaggccgacaaggagaaggagctgaggaaccaccagccccgggagccccactgtgacctggagaccagcggcaccgtgacagtgggccccatgcacaccctgcccagcacctgcctgcagaaggtggaggagcagccagaagatgctgacaaccagagaaatgtgaccaggatgggcagccagcccccagaccccaacaccatcgtgcacatccctgtgatgctgaccggccccctgggggaggccaccgtggtgcccagcggaaatgtggacctggagagccaggccgagggcaagaaggaggtggaggctgatgatgtgatgaggagcggcccccggcccatcgtgccctacagctccatgttctgcctgagccccaccaacctgctgcggcgcttctgccactacatcgtgaccatgagatactttgaggtggtgatcctggtggtgattgccctgagcagcatcgccctggccgcagaagatcctgtgaggacagacagccccaggaacaatgccctgaagtacctggactacatcttcaccggggtcttcacctttgagatggtgatcaagatgattgacctgggcctgctgctgcaccctggggcctacttccgggacctgtggaacatcctggacttcatcgtggtgtctggggccctggtggcctttgccttcagcggcagcaagggcaaggacatcaacaccatcaagagcctgcgggtgctgcgggtgctgcggcccctgaagaccatcaagaggctgcccaagctgaaggctgtgtttgactgtgtggtgaacagcctgaagaatgtgctgaacatcctgattgtgtacatgctgttcatgttcatctttgctgtgattgctgtgcagctgttcaagggcaagttcttctactgcacagatgagagcaaggagctggagcgggactgccggggccagtacctggactatgagaaggaggaggtggaggcccagccccggcagtggaagaagtatgacttccactatgacaacgtgctgtgggccctgctgaccctcttcaccgtgtccactggagagggctggcccatggtgctgaagcacagcgtggatgccacctatgaggagcagggccccagccctggctacaggatggagctgagcatcttctacgtggtgtactttgtggtgttccccttcttctttgtgaacatctttgtggccctgatcatcatcaccttccaggagcagggcgacaaggtgatgtctgagtgcagcctggagaagaatgaaagagcctgcatcgactttgccatcagcgccaagcccctgacccgctacatgccccagaaccggcagagcttccagtacaagacctggacctttgtggtgagccccccatttgagtacttcatcatggccatgattgccctgaacacagtggtgctgatgatgaagttctatgatgccccctatgaatatgagctgatgctgaagtgcctgaacatcgtgttcacctccatgttctccatggagtgtgtgctgaagatcatcgccttcggcgtgctgaactacttcagagatgcctggaatgtgtttgattttgtgacagtgctgggcagcatcacagacatcctggtgacagaaattgctgagaccaacaacttcatcaacctgtccttcctgcggctcttccgggccgcccggctcatcaagctgctgcggcagggctacaccatccgcatcctgctgtggacctttgtgcagagcttcaaggccctgccctacgtgtgcctgctgattgccatgctgttcttcatctatgccatcatcggcatgcaggtgtttggaaatattgccctggatgatgacaccagcatcaacagacacaacaacttccgcaccttcctgcaggccctgatgctgctcttccgcagcgccaccggggaggcctggcatgagatcatgctgagctgcctgagcaaccaggcctgtgatgagcaggccaatgccacagaatgtggcagtgactttgcctacttctactttgtgtccttcatcttcctgtgcagcttcctgatgctgaacctgtttgtggccgtcatcatggacaactttgagtacctgacccgggacagcagcatcctgggcccccaccacctggatgagttcatccgggtgtgggccgagtatgaccctgctgcctgtggccgcatctcctacaatgacatgtttgagatgctgaagcacatgagcccccccctgggcctgggcaagaagtgcccagcccgggtggcctacaagaggctggtgaggatgaacatgcccatcagcaatgaagacatgacagtgcacttcaccagcaccctgatggccctgatcagaacagccctggagatcaagctggccccagctggcaccaagcagcaccagtgtgatgctgagctgaggaaggagatctctgtggtgtgggccaacctgccccagaagaccctggacctgctggtgcccccccacaagccagatgagatgacagtgggcaaggtgtatgctgccctgatgatctttgacttctacaagcagaacaagaccacccgggaccagatgcagcaggcccctgggggcctgagccagatgggccctgtgtccctcttccaccccctgaaggccaccctggagcagacccagcctgctgtgctgcggggggcccgggtcttcctgcggcagaagagcagcaccagcctgagcaatggaggagccatccagaaccaggagagcggcatcaaggagagcgtgtcctggggcacccagaggacccaggatgcccctcatgaggcccggccccccctggagcggggccacagcacagagatccctgtgggccgcagcggggccctggccgtggatgtgcagatgcagagcatcacccggcggggcccagatggagagccccagcccggcctggagagccagggccgggccgcctccatgccccggctggccgctgagacccagcctgtgacagatgccagccccatgaagaggagcatcagcaccctggcccagaggccccggggcacccacctgtgcagcaccaccccagaccggcccccacccagccaggccagcagccaccaccaccaccaccgctgccacagaagaagagacaggaagcagaggagcctggagaagggccccagcctgtctgctgacatggatggagcccccagcagcgctgtgggccctggcctgcccccaggagagggccccaccggctgccggcgggagcgggagcggcggcaggagcggggccgcagccaggagcggcggcagcccagcagcagcagcagcgagaagcagcgcttctacagctgtgacagatttggaggccgggagccccccaagcccaagcccagcctgagcagccaccccaccagccccacagctggccaggagcccggcccccacccccagggcagcggctctgtgaatggcagccccctgctgagcaccagcggggccagcaccccaggccggggcggccggcggcagctgccccagacccccctgaccccccggcccagcatcacctacaagacagccaacagcagccccatccactttgctggggcccagaccagcctgcctgccttcagccctggccgcctgagccggggcctgtctgagcacaatgccctgctgcagagggaccccctgagccagcccctggcccctggcagcagaattggaagtgacccctacctgggccagaggctggacagcgaggcctctgtgcacgccctgcctgaggacaccctgacctttgaggaggccgtggccaccaacagcggccgcagcagcaggaccagctatgtgagcagcctgaccagccagagccaccccctgcggcgggtgcccaacggctaccactgcaccctgggcctgagcagcggcggccgggcccggcacagctaccaccacccagaccaggaccactggtgctag

SEQ ID NO: 310903 - DNA, 7023 bp, Artificial Sequence
  derived and/or modified sequence
atggtgcggttcggcgacgagctgggcggccggtacggcggccccggtggcggcgagagggctcggggcggaggcgccggcggtgctggtggtcccggtcctggcggactacagccagggcagagagtcctgtacaaacagagtattgcgcaaagagctagaaccatggccttgtataacccaatccctgtgaagcagaactgcttcacagtcaaccgcagcctctttgtttttagtgaagacaatgtggtaaggaaatacgcaaagaggattaccgagtggccccccttcgagtacatgatcctagcaacaataatcgctaactgtattgttctggcccttgagcagcaccttcctgacggagataaaacccctatgtccgagcggttagacgatacggagccttactttatcggcattttctgtttcgaggccggcattaaaatcatcgcgctgggatttgtatttcacaagggtagctatctccgcaacggttggaatgtcatggactttgtcgtcgtgttgaccggaattttggctacagcgggaaccgacttcgatctgaggacactgcgtgcagtacgcgtgctgcggccactgaagttagttagcggtatcccaagtctccaagtggtgctcaaatctatcatgaaggcaatggtgcctctgttacagatcgggctgctcttgttctttgcaatcctgatgttcgctattataggcctcgaattctatatggggaaatttcataaggcctgtttcccaaactcgacagacgccgagcccgtcggcgatttcccctgcggaaaggaggctccagctcggctttgcgagggcgacacagaatgcagggagtattggccaggtccaaattttggcatcacaaatttcgataacatcctctttgcaatcctgacagtgttccagtgcattaccatggaaggctggacagacattctctacaataccaacgacgcagcaggcaacacctggaactggttatacttcattcccttaattataattggcagtttttttatgctgaacttggtgttgggggttttatcgggcgaatttgcgaaggagagagaaagggttgaaaaccggcgtgcctttctaaagttgaggcgccaacaacaaatcgagcgggagctgaacgggtacctcgagtggatcttcaaggcagaagaagtcatgctcgctgaggaggaccggaacgccgaagagaagtcccccctggacgcagttctcaagagggctgcgaccaagaagtccaggaacgacttgatacacgctgaggagggtgaagatcggtttgccgacctctgtgcagtgggctccccgtttgcaagagccagcttaaagtccgggaagaccgagtctagctcttacttcaggcggaaggagaaaatgtttagatttttcattcgccggatggttaaggcgcagagcttctattgggttgtattgtgcgtggttgctctaaatactctgtgtgtggcaatggtgcattataaccagccgcgaaggctgaccaccactttgtatttcgcagaattcgtcttcctgggactctttttaactgagatgtctctgaaaatgtacggtcttgggccccggagctacttccgcagcagcttcaattgtttcgacttcggcgtgatcgtggggtccgtcttcgaagtggtatgggctgctattaaacccggaagctcttttggaatttcagtcctgagggccttacggctgctgcgcatcttcaaggtgaccaaatactggtcctccctcaggaatctggtcgtctccctcctgaatagcatgaagagcatcatttctctgcttttcctgctgtttttgttcatcgttgtattcgctctgctggggatgcagctgtttggtggccagttcaacttccaagatgaaacgcccaccacaaactttgatactttccctgctgctatcctgacagttttccagattctgacgggagaagattggaacgctgtcatgtatcacggcatagaatcccaaggaggggtttcaaaggggatgttcagtagtttctattttattgtgttaaccctgtttggaaactacactcttctgaatgttttcctagccattgcagtagacaatctggccaacgcccaggaactgacaaaggacgaggaggaaatggaggaggctgcaaaccagaagctggccttacaaaaggcaaaagaggttgccgaggtgagtcctatgtccgccgccaacatctcgatcgcagccagacaacagaacagcgccaaggcccgctctgtatgggagcagcgcgcctctcagctccgcctgcagaaccttagagcgtcctgtgaggctctttactctgaaatggatcctgaagaacgcctgagatttgcaaccactcgacacctccggccagacatgaagacgcatctggatcggccactggttgttgaacttggacgcgacggagctcgagggcctgtgggagggaaagctcggccagaggcagccgaagccccagaaggagtggacccaccccggcggcatcatcgccacagagataaagacaaaaccccagccgcaggggatcaggaccgggccgaagcacctaaagccgagagcggcgaacccggcgctagagaagagcgtccacgtccacaccggtcccattcaaaagaagccgcaggacctcccgaagccaggtcagaacgaggccgcggacccggccccgaaggcggaaggcggcaccaccgaagaggatcccccgaggaagcagctgaacgcgaaccccggaggcatagagcacaccgccatcaagacccatccaaagaatgcgccggtgccaaaggagagaggagggcgagacatagaggcggacccagagcaggcccacgtgaggcggagtctggcgaagaacctgcacggcggcatcgggcacggcacaaagcacagccagcccatgaggctgtcgagaaggaaactacagagaaggaggcaaccgaaaaagaagcagagattgttgaggcggacaaagagaaggaacttcggaaccaccagccgagggagccacattgtgacttggaaacctctggcaccgtcactgtggggcccatgcacacactcccatctacatgcctccagaaggttgaggaacagcctgaggacgccgacaaccagcgaaacgtgacacggatgggaagtcagcccccagatcctaatacaatagtccacatcccagttatgttgacaggcccactgggtgaggctaccgtcgtcccctccgggaacgttgatctcgaatcccaggccgaaggcaagaaggaagttgaggcggatgacgttatgaggagcgggcctcggccaatcgtcccttactccagcatgttctgcctatctccgaccaatctcctcagaaggttttgccattacatcgtgacaatgcgatatttcgaggtcgtaatactggtagtgattgccctatcatctattgcactcgcggccgaggacccggtacgtaccgactctccccgcaacaacgcgctgaaatatctggactacatcttcacgggcgtgtttacgttcgagatggtaatcaagatgatcgatttagggctgctcctgcaccctggcgcctacttcagagatttgtggaacattctcgatttcatcgttgtaagtggagccttggttgctttcgctttcagtggctccaagggaaaagacatcaacacaattaagagtctcagagttttaagagtgttgcggcccctgaaaacaataaagagattgcccaagctgaaggctgtctttgattgcgtcgttaattccttaaagaacgtactgaacatcttaatcgtttacatgctatttatgtttatcttcgccgtcattgcggtgcaactgtttaagggcaagttcttttactgtacagacgaatcgaaagaactggagcgcgactgcagggggcagtatctggattacgaaaaagaggaagtggaagcccagcctagacaatggaagaagtacgatttccactacgataatgttctttgggcccttctgaccctctttactgtaagtaccggggagggatggcccatggtgctgaagcacagcgtggatgccacttacgaggagcagggcccctcccctggctaccgcatggaattgtccatcttctacgtagtgtacttcgtggtgtttcctttcttctttgttaacatttttgtagctctgattattatcactttccaggagcagggcgataaagtgatgtccgagtgttccttggaaaagaacgagcgcgcatgtattgacttcgccataagcgcaaaaccgctcacaagatatatgcctcagaatcgtcagagctttcagtataaaacatggacctttgtcgtttctcctccttttgagtactttattatggctatgatcgctctaaatactgtggtgctgatgatgaaattttacgacgccccatacgaatatgagctgatgctcaagtgccttaacatcgtgttcacttccatgttcagcatggagtgcgtcttgaaaattatagcgtttggagtgttgaattatttccgggatgcctggaacgtgttcgatttcgttaccgttctcgggtctattactgatatcctcgttacggagattgccgaaactaataacttcatcaacctttcttttctgcgtttgttccgggccgcacgtctcattaagttgctacggcagggatataccatccgcatactattgtggactttcgttcaatcgtttaaggccctgccttacgtgtgcctccttatagccatgctatttttcatttacgcgattatcgggatgcaggtgtttggcaatattgcccttgatgatgatacatccatcaatcggcataacaattttcgtacatttctccaagcgttgatgctactctttaggtccgccacaggcgaggcttggcatgagataatgctgtcctgcctgtctaaccaggcttgtgatgaacaagctaatgcgactgaatgtggaagcgacttcgcttacttttactttgtcagttttatcttcctctgttcatttcttatgttgaatttgttcgtggcagttattatggataatttcgagtatcttacccgggacagctccatccttggacctcatcacctagacgagttcattagagtgtgggcagaatacgatccagccgcatgtggtagaattagctacaatgacatgttcgaaatgctcaagcatatgtcgcctccattaggactgggcaaaaaatgccccgcaagggtggcctataaaagactggtccgaatgaatatgccaatttctaacgaagacatgactgtccattttacgtcaaccttgatggctctgatacgtaccgcacttgagatcaagctggcccccgccgggaccaagcagcaccagtgcgacgccgagcttagaaaagagatctccgtggtgtgggccaacctccctcaaaagaccctggacttactcgtccccccacacaagcccgatgagatgaccgtgggcaaggtctatgccgcgcttatgatttttgacttttataaacagaacaaaacaactagagatcagatgcaacaagctcctggtggcctttcccagatgggccctgtttctttgtttcatccactgaaggctacccttgaacagactcagccggccgtcctccggggcgcccgcgtgtttctgcgccagaagtctagtacctccctgtccaacggaggagccattcagaatcaggagagtgggattaaggaatccgtgagttgggggacccaaagaacccaggacgccccccacgaggctaggcctcctcttgagcgaggacactctacagaaatccccgtgggccggtcgggggccctcgcagtcgatgtccagatgcagtcgattacgagacgaggcccagacggggagccgcagccaggcttagagtcccagggccgcgccgcgagcatgcctcggttggccgccgagacacagccagtgacagacgcctcccccatgaagaggtccattagcacactcgctcagcgccccaggggcacccacctttgcagcaccactcccgatagacctccaccttctcaggcatcatcccaccaccatcaccacagatgccaccggagaagggatagaaaacagcgcagtctcgaaaaaggccctagtctctctgccgacatggacggggccccaagcagcgccgttggaccaggcttgccacccggggagggccctaccgggtgccggcgagagagggagcgtcgtcaggaacgtggtcggtctcaggagcgaaggcagccctctagtagcagcagcgagaaacagagattttattcctgcgataggttcggaggtcgcgaacctcctaaaccgaaaccttcgctctcctcccatccgaccagccccactgcagggcaggagcctggcccccacccccaggggtctggctcggtcaacggaagccctctgctctctaccagcggcgctagcaccccagggcggggaggcaggcgacaactgccacaaacccccctcacccccaggccttccattacttataagacagccaattcgtcaccaatccacttcgcaggagcccagaccagcctccctgcattctcacccggccgactgagcaggggcctctctgaacacaatgccctgcttcagagagacccgttgtcccagccacttgcccccggatccaggatcgggtcagacccctatttgggtcagcggctggactccgaggcgagcgttcacgccctccccgaagacaccctcacattcgaagaagcagtggctactaatagcggcaggtcctccagaacctcctacgtgtccagcttgactagtcagagccacccgttacgcagagtccccaatggttatcactgcacgttgggcctctcttcaggcgggcgggccaggcactcataccaccatccagaccaggaccattggtgttag

SEQ ID NO: 310904 - DNA, 7022 bp, Artificial Sequence
  derived and/or modified sequence
atggtccgattcggcgacgagctgggaggacgctatgggggaccagggggtggcgagagggccaggggagggggtgccggtggggcagggggacccggacctgggggtctgcaacccggacagagagtgctgtataaacagtccatcgcccagcgcgctagaacaatggctctctacaatcctattcccgtgaaacagaattgtttcactgtcaatcgatccctcttcgtgttttccgaggacaacgttgttcgaaagtatgccaagcgtataaccgaatggccaccatttgaatatatgatactggctaccatcattgccaattgtatagttttagctctggagcagcacctgcccgacggagataaaaccccaatgtccgagcgtttagacgacaccgaaccatactttatcggcatcttctgctttgaggcaggcatcaaaatcattgcactcggattcgtgttccacaagggttcttacctccggaacggctggaatgtgatggacttcgtggtagtcctgaccggaatccttgccaccgctggaacagatttcgatctgcgaacccttagagcagtccgggttctcaggccactcaaacttgtttccggaatcccctctctccaggtggtattgaagtctattatgaaagccatggtacctctattgcagatcggcctgctcctgttttttgctatcctgatgtttgccataattggccttgagttttatatggggaaattccacaaggcctgcttcccaaattccactgatgccgagcctgtgggggactttccatgcgggaaggaagcaccagcccgtctgtgtgagggcgatactgagtgccgcgagtactggcccggacctaattttggtatcacaaattttgataatatcctcttcgccatcctgactgtgttccaatgtatcaccatggaaggctggactgacattttgtacaatacaaatgatgccgcaggaaatacatggaactggctatattttatccctcttatcattattggctcctttttcatgctgaatctggtcttgggagtgttatccggtgagttcgctaaggaacgggagagagtcgaaaacagacgggcatttctgaagctgcggcgacagcagcagatagaacgcgaactgaatggataccttgaatggatatttaaggctgaggaagtcatgctcgcagaagaggatcgaaatgccgaagagaaatccccacttgacgctgtactgaagagggccgcaactaagaaaagtcgcaatgatttaatccatgccgaggagggagaggatcggtttgctgatctgtgtgccgtgggatcgcctttcgctcgagcatctctaaagtccggaaagacagaaagcagcagctacttccggaggaaagagaagatgttcagattcttcattcgcagaatggttaaggcgcagagcttttactgggtggttctgtgcgtggttgctctgaataccctctgtgtagccatggttcactataatcagccacggaggttgacaactacactctacttcgccgagttcgtgttcctcgggctctttctgactgaaatgtctctgaaaatgtacggcctgggacctcgatcgtatttccgcagcagctttaactgttttgactttggcgtgatcgtgggtagtgtgttcgaggtggtctgggcagccatcaaacccggaagctctttcggcatttccgtacttcgggctctcaggctgcttcggatctttaaagtgacgaagtactggtcgtctttgagaaaccttgtcgttagtttgctcaattccatgaagagcatcatcagtctgctgtttctcctgtttcttttcatcgtggtgtttgccctcctggggatgcagttgtttggaggtcaatttaactttcaggacgagacgcctacgaccaactttgatacattcccggcagccatcctgacggttttccagattctaaccggagaggattggaacgccgtcatgtaccacggaattgaatcccagggtggtgtgtccaaaggcatgttttctagcttctatttcatagtgctgacactcttcgggaattacaccctgctgaatgtattccttgccatcgcagttgataacctggccaacgctcaggagcttacgaaagacgaggaagaaatggaagaggcagctaaccaaaagctggcattgcagaaagctaaagaagtggcagaggtaagtccaatgagtgcggctaacatcagcattgctgccagacagcagaatagtgccaaggcacgctccgtttgggagcaacgcgctagccagcttcgtctacaaaatctgcgcgcaagctgtgaggctctttactccgagatggaccctgaagaaaggcttagatttgctaccacacgccatctgagacctgatatgaaaacacaccttgaccggcctttagtggtcgagctagggagggatggtgcacgcggtccagttggcggtaaggctcggcctgaggccgcagaggcccctgaaggtgtcgacccccctcgcagacaccaccgccaccgggataaggataagactcccgctgctggagaccaagaccgtgcagaagctccgaaggcagagtcgggcgaacctggggcaagagaagagcgaccccgaccgcaccggagtcactctaaggaagcagccggtccgccagaagcgcgttcggaacgcggacggggaccgggacccgagggtggtaggcggcatcaccgcagagggagccccgaggaagctgcagagcgagagcccagaaggcaccgtgcccacaggcaccaggacccctccaaggagtgtgctggagccaagggggaaaggcgggcacggcaccgaggtgggcctcgtgccggacctagggaagcggagtcgggcgaggagccagcccgaaggcaccgggcacgccacaaggcacaaccagcgcatgaagctgttgagaaggaaacgactgaaaaagaagccaccgaaaaagaggcagagatcgttgaggcagataaggaaaaagagctgagaaatcatcagcccagggaaccacactgcgatctcgaaacttccggtaccgtgacagttgggccaatgcacactcttccaagcacttgcctccaaaaggtagaggagcaacctgaagacgcagataaccagcgaaacgtaacgcgcatggggagccagccacccgacccaaacacaatcgtgcacatccctgtgatgctcacgggcccactcggtgaagctaccgtcgttccaagcggaaacgtcgacctagaatctcaggcagaaggaaagaaggaagtggaagccgatgatgtcatgagaagtgggccaagacctatagtcccctattcaagcatgttctgcttgtcccccaccaaccttctgcgacggttttgccattacatcgtcaccatgcgatactttgaggtggtcatccttgtcgtcatcgccctttcatccatagctctggccgctgaggatcccgtaagaacagattccccacggaataacgccttgaagtatctggactatatctttaccggagtgttcacatttgaaatggtaatcaagatgattgatcttggactcctcttacacccgggagcctacttcagggatctctggaatatcctggactttatcgttgttagcggcgcactggttgccttcgctttctcagggtccaagggaaaggacattaacacaattaagagtctacgggttctgcgggttctgcggccactgaaaaccataaaacggttgcccaagctgaaagccgtcttcgattgtgtcgtcaatagcctgaaaaacgtcttaaatattctgatcgtgtatatgctctttatgttcatcttcgcagtcatagccgtgcagctgtttaagggtaagtttttctattgcacagatgagtccaaggagctggaaagagactgccggggacagtatttagattacgaaaaggaagaggtggaggcccaacctcgccagtggaagaaatacgatttccactacgataacgtgctgtgggccttgctaactcttttcaccgtctcgacaggagagggttggccgatggtcctgaaacactccgttgatgcaacctacgaagaacaggggccatcccctgggtatcgtatggaactctcaatcttttatgtcgtctactttgttgtattcccttttttctttgtcaacattttcgtggcgctaatcattattacgttccaagagcagggcgacaaggtaatgagcgaatgctccctcgagaagaacgagagagcctgcatcgactttgcgatttccgcaaagcctttaactaggtacatgcctcagaatcgccagtcttttcagtacaagacttggaccttcgtggtgagtcctccatttgaatactttatcatggctatgattgctttaaacaccgttgtgctcatgatgaagttttacgacgctccatacgagtatgaactgatgctcaagtgtctgaacattgttttcacctcgatgttcagcatggagtgcgtcttgaagattatagcttttggggtgctgaactattttcgcgatgcatggaacgtcttcgactttgtgacggtcctgggctctattactgacatacttgtcacggaaatcgccgaaactaacaacttcatcaatttgtcttttctgcggctctttagggccgcaagactgattaagctccttaggcagggctataccatcagaatcctcctgtggaccttcgtgcaatcattcaaggctctgccttacgtctgcctgcttattgctatgttatttttcatctacgccattataggaatgcaggtcttcggtaacatcgcactagatgatgacacatctatcaatagacacaacaactttcggacattccttcaggcacttatgctgctgttcagaagcgccacaggtgaggcttggcacgagatcatgctgagctgcctgagtaatcaagcctgcgacgaacaggcaaatgctaccgagtgcggctcagactttgcctacttctacttcgtatcttttatattcctctgttccttcctaatgctcaatctgttcgtcgccgttattatggacaattttgagtaccttacacgagactcttccattcttggccctcaccatctcgatgagttcataagggtttgggctgaatacgatcccgctgcttgcggacgaattagttataatgacatgttcgaaatgttgaaacacatgtctcccccacttgggcttggaaaaaaatgtccagccagggtggcctacaagagactggtgaggatgaatatgccaattagcaatgaagatatgaccgttcatttcacttcaacactcatggcgcttattagaacggcccttgaaatcaaattggccccagccggtactaaacagcatcaatgtgatgcagagttaaggaaggagatctccgttgtctgggccaatctacctcagaaaacccttgacctgctcgttccccctcacaagcctgatgagatgacagtcggcaaagtatatgccgctctgatgatcttcgacttctataagcagaacaagacaacacgggaccagatgcagcaggctcctggtggattaagtcagatgggcccagtctccctcttccaccccctgaaagctaccctggaacagacccaaccagccgtgctaaggggcgcacgagtgtttctcaggcagaaatcatctaccagcctgtctaatggcggtgcaattcagaaccaagagtccggtatcaaagagtccgtgtcttggggtacgcagcgcacccaagacgctccccatgaggcgagaccacctctggagcggggtcattcgactgagatccccgttgggcgatccggggctcttgctgttgatgtccagatgcagtcaattacacggagaggtcctgacggagagccccagcccggactggagtcccagggacgcgctgccagcatgccacggctagccgcagaaacccagcccgtcaccgatgctagcccaatgaagaggtctatttctaccctggcccagcgtcccaggggcacccacctgtgctccactactcctgataggccccctccatctcaagcctcaagccaccatcatcaccacaggtgccatcggagacgggacagaaagcagcgttctctggagaaagggccatcactgtcagccgatatggacggtgccccaagctctgccgtgggtccagggctgcccccaggggaaggaccaaccggttgcagacgcgaaagggagcgtcggcaggagcgagggaggagccaggagcgacgccagccttcctcctcttcctctgagaagcagaggttctacagctgtgacaggttcggcggtagagagccccctaagccgaagccttcattgagctcccatcccacgagccccactgccggtcaagagcctggaccccatcctcagggaagtggtagtgttaatgggtcccccctcctgagtacttctggcgcttcaactccaggcagggggggaaggcgacagctgccccagactcctctaactcctagaccctcgatcacctacaagaccgccaattctagtccaattcactttgctggagcgcagacatctcttcccgctttcagccctggtcggttaagccgcggactgagcgagcacaatgccttgctgcagcgggacccccttagtcaacctctggcccctggaagtaggattggatctgacccgtatctcggacaacgcctggattccgaggcatccgtgcacgcactgcctgaagatactttaacctttgaagaagctgtggccacgaatagtggaaggagcagcaggacgtcctacgtgagctctctgacctcgcagtcacatcctctgagacgggtgcctaatgggtatcactgtacgttaggattgtcttcaggcggacgggcacgtcacagctaccaccaccccgaccaggatcactggtgtta

SEQ ID NO: 310905 - DNA, 9648 bp, Artificial Sequence
  derived and/or modified sequence
atggtccgcttcggggacgagctgggcggccgctatgggggccccggcggcggagagcgggcccggggcggcggggccggcggggcggggggcccgggtcccggggggctgcagcccggccagcgggtcctctacaagcaatcgatcgcgcagcgcgcgcggaccatggcgctgtacaaccccatcccggtcaagcagaactgcttcaccgtcaaccgctcgctcttcgtcttcagcgaggacaacgtcgtccgcaaatacgcgaagcgcatcaccgagtggccaccattcgagtatatgatcctggccaccatcatcgccaactgcatcgtgctggccctggagcagcacctccctgatggggacaaaacgcccatgtccgagcggctggacgacacggagccctatttcatcgggatcttttgcttcgaggcagggatcaaaatcatcgctctgggctttgtcttccacaagggctcttacctgcggaacggctggaacgtcatggacttcgtggtcgtcctcacagggatccttgccacggctggaactgacttcgacctgcgaacactgagggctgtgcgtgtgctgaggcccctgaagctggtgtctgggattccaagtttgcaggtggtgctcaagtccatcatgaaggccatggttccactcctgcagattgggctgcttctcttctttgccatcctcatgtttgccatcattggcctggagttctacatgggcaagttccacaaggcctgtttccccaacagcacagatgcggagcccgtgggtgacttcccctgtggcaaggaggccccagcccggctgtgcgagggcgacactgagtgccgggagtactggccaggacccaactttggcatcaccaactttgacaatatcctgtttgccatcttgacggtgttccagtgcatcaccatggagggctggactgacatcctctataatacaaacgatgcggccggcaacacctggaactggctctacttcatccctctcatcatcatcggctccttcttcatgctcaacctggtgctgggcgtgctctcgggggagtttgccaaggagcgagagagggtggagaaccgccgcgccttcctgaagctgcgccggcagcagcagatcgagcgagagctcaacgggtacctggagtggatcttcaaggcggaggaagtcatgctggccgaggaggacaggaatgcagaggagaagtcccctttggacgcagtgctgaagagagcggccaccaagaagagcagaaatgacctgatccacgcagaggagggagaggaccggtttgcagatctctgtgctgttggatcccccttcgcccgcgccagcctcaagagcgggaagacagagagctcgtcatacttccggaggaaggagaagatgttccggttttttatccggcgcatggtgaaggctcagagcttctactgggtggtgctgtgcgtggtggccctgaacacactgtgtgtggccatggtgcattacaaccagccgcggcggcttaccacgaccctgtattttgcagagtttgttttcctgggtctcttcctcacagagatgtccctgaagatgtatggcctggggcccagaagctacttccggtcctccttcaactgcttcgactttggggtcatcgtggggagcgtctttgaagtggtctgggcggccatcaagccgggaagctcctttgggatcagtgtgctgcgggccctccgcctgctgaggatcttcaaagtcacgaagtactggagctccctgcggaacctggtggtgtccctgctgaactccatgaagtccatcatcagcctgctcttcttgctcttcctgttcattgtggtcttcgccctgctggggatgcagctgtttgggggacagttcaacttccaggatgagactcccacaaccaacttcgacaccttccctgccgccatcctcactgtcttccagatcctgacgggagaggactggaatgcagtgatgtatcacgggatcgaatcgcaaggcggcgtcagcaaaggcatgttctcgtccttttacttcattgtcctgacactgttcggaaactacactctgctgaatgtctttctggccatcgctgtggacaacctggccaacgcccaagagctgaccaaggatgaagaggagatggaagaagcagccaatcagaagcttgctctgcaaaaggccaaagaagtggctgaagtcagccccatgtctgccgcgaacatctccatcgccgccaggcagcagaactcggccaaggcgcgctcggtgtgggagcagcgggccagccagctacggctgcagaacctgcgggccagctgcgaggcgctgtacagcgagatggaccccgaggagcggctgcgcttcgccactacgcgccacctgcggcccgacatgaagacgcacctggaccggccgctggtggtggagctgggccgcgacggcgcgcgggggcccgtgggaggcaaagcccgacctgaggctgcggaggcccccgagggcgtcgaccctccgcgcaggcaccaccggcaccgcgacaaggacaagacccccgcggcgggggaccaggaccgagcagaggccccgaaggcggagagcggggagcccggtgcccgggaggagcggccgcggccgcaccgcagccacagcaaggaggccgcggggcccccggaggcgcggagcgagcgcggccgaggcccaggccccgagggcggccggcggcaccaccggcgcggctccccggaggaggcggccgagcgggagccccgacgccaccgcgcgcaccggcaccaggatccgagcaaggagtgcgccggcgccaagggcgagcggcgcgcgcggcaccgcggcggcccccgagcggggccccgggaggcggagagcggggaggagccggcgcggcggcaccgggcccggcacaaggcgcagcctgctcacgaggctgtggagaaggagaccacggagaaggaggccacggagaaggaggctgagatagtggaagccgacaaggaaaaggagctccggaaccaccagccccgggagccacactgtgacctggagaccagtgggactgtgactgtgggtcccatgcacacactgcccagcacctgtctccagaaggtggaggaacagccagaggatgcagacaatcagcggaacgtcactcgcatgggcagtcagcccccagacccgaacactattgtacatatcccagtgatgctgacgggccctcttggggaagccacggtcgttcccagtggtaacgtggacctggaaagccaagcagaggggaagaaggaggtggaagcggatgacgtgatgaggagcggcccccggcctatcgtcccatacagctccatgttctgtttaagccccaccaacctgctccgccgcttctgccactacatcgtgaccatgaggtacttcgaggtggtcattctcgtggtcatcgccttgagcagcatcgccctggctgctgaggacccagtgcgcacagactcgcccaggaacaacgctctgaaatacctggattacattttcactggtgtctttacctttgagatggtgataaagatgatcgacttgggactgctgcttcaccctggagcctatttccgggacttgtggaacattctggacttcattgtggtcagtggcgccctggtggcgtttgctttctcaggatccaaagggaaagacatcaataccatcaagtctctgagagtccttcgtgtcctgcggcccctcaagaccatcaaacggctgcccaagctcaaggctgtgtttgactgtgtggtgaactccctgaagaatgtcctcaacatcttgattgtctacatgctcttcatgttcatatttgccgtcattgcggtgcagctcttcaaagggaagtttttctactgcacagatgaatccaaggagctggagagggactgcaggggtcagtatttggattatgagaaggaggaagtggaagctcagcccaggcagtggaagaaatacgactttcactacgacaatgtgctctgggctctgctgacgctgttcacagtgtccacgggagaaggctggcccatggtgctgaaacactccgtggatgccacctatgaggagcagggtccaagccctgggtaccgcatggagctgtccatcttctacgtggtctactttgtggtctttcccttcttcttcgtcaacatctttgtggctttgatcatcatcaccttccaggagcagggggacaaggtgatgtctgaatgcagcctggagaagaacgagagggcttgcattgacttcgccatcagcgccaaacccctgacacggtacatgccccaaaaccggcagtcgttccagtataagacgtggacatttgtggtctccccgccctttgaatacttcatcatggccatgatagccctcaacactgtggtgctgatgatgaagttctatgatgcaccctatgagtacgagctgatgctgaaatgcctgaacatcgtgttcacatccatgttctccatggaatgcgtgctgaagatcatcgcctttggggtgctgaactatttcagagatgcctggaatgtctttgactttgtcactgtgttgggaagtattactgatattttagtaacagagattgcggaaacaaacaatttcatcaacctcagcttcctccgcctctttcgagctgcgcggctgatcaagctgctccgccagggctacaccatccgcatcctgctgtggacctttgtccagtccttcaaggccctgccctacgtgtgtctgctcattgccatgctgttcttcatctacgccatcatcggcatgcaggtgtttgggaatattgccctggatgatgacaccagcatcaaccgccacaacaacttccggacgtttttgcaagccctgatgctgctgttcaggagcgccacgggggaggcctggcacgagatcatgctgtcctgcctgagcaaccaggcctgtgatgagcaggccaatgccaccgagtgtggaagtgactttgcctacttctacttcgtctccttcatcttcctgtgctcctttctgatgttgaacctctttgtggctgtgatcatggacaattttgagtacctcacgcgggactcttccatcctaggtcctcaccacttggatgagttcatccgggtctgggctgaatacgacccggctgcgtgtgggcgcatcagttacaatgacatgtttgagatgctgaaacacatgtccccgcctctggggctggggaagaaatgccctgctcgagttgcttacaagcgcctggttcgcatgaacatgcccatctccaacgaggacatgactgttcacttcacgtccacgctgatggccctcatccggacggcactggagatcaagctggccccagctgggacaaagcagcatcagtgtgacgcggagttgaggaaggagatttccgttgtgtgggccaatctgccccagaagactttggacttgctggtaccaccccataagcctgatgagatgacagtggggaaggtttatgcagctctgatgatattcgacttctacaagcagaacaaaaccaccagagaccagatgcagcaggctcctggaggcctctcccagatgggtcctgtgtccctgttccaccctctgaaggccaccctggagcagacacagccggctgtgctccgaggagcccgggttttccttcgacagaagagttccacctccctcagcaatggcggggccatacaaaaccaagagagtggcatcaaagagtctgtctcctggggcactcaaaggacccaggatgcaccccatgaggccaggccacccctggagcgtggccactccacagagatccctgtggggcggtcaggagcactggctgtggacgttcagatgcagagcataacccggaggggccctgatggggagccccagcctgggctggagagccagggtcgagcggcctccatgccccgccttgcggccgagactcagcccgtcacagatgccagccccatgaagcgctccatctccacgctggcccagcggccccgtgggactcatctttgcagcaccaccccggaccgcccaccccctagccaggcgtcgtcgcaccaccaccaccaccgctgccaccgccgcagggacaggaagcagaggtccctggagaaggggcccagcctgtctgccgatatggatggcgcaccaagcagtgctgtggggccggggctgcccccgggagaggggcctacaggctgccggcgggaacgagagcgccggcaggagcggggccggtcccaggagcggaggcagccctcatcctcctcctcggagaagcagcgcttctactcctgcgaccgctttgggggccgtgagcccccgaagcccaagccctccctcagcagccacccaacgtcgccaacagctggccaggagccgggaccccacccacagggcagtggttccgtgaatgggagccccttgctgtcaacatctggtgctagcacccccggccgcggtgggcggaggcagctcccccagacgcccctgactccccgccccagcatcacctacaagacggccaactcctcacccatccacttcgccggggctcagaccagcctccctgccttctccccaggccggctcagccgtgggctttccgaacacaacgccctgctgcagagagaccccctcagccagcccctggcccctggctctcgaattggctctgacccttacctggggcagcgtctggacagtgaggcctctgtccacgccctgcctgaggacactctcactttcgaggaggctgtggccaccaactcgggccgctcctccaggacttcctacgtgtcctccctgacctcccagtctcaccctctccgccgcgtgcccaacggttaccactgcaccctgggactcagctcgggtggccgagcacggcacagctaccaccaccctgaccaagaccactggtgctagctgcaccgtgaccgctcagacgcctgcatgcagcaggcgtgtgttccagtggatgagttttatcatccacacggggcagccggccctcgggggaggccttgcccaccttggtgaggctcctgtggcccctccctccccctcctcccctcttttactctagacgacgaataaagccctgttagaggatgcggctctctctgtccccttcctgtcctgccttcctgggtctcgtaccacacaccagaccctaaaccgcaggctgctgtgtgtggctgagaaggacccaggagtccaaatcccgtgtcctgggactcagcatccagcatgggtgcttggagccgttgtgaggagctctgcgtcctgtggggagcacccttcacgtggccgtgcggcacagagaagcagggcccacctgaaagtgcgccgagacctcgggacggaggggatggggagggggacacagtcgtggcttgtgcagcccgccagtgtcagcgaatgctcactcaggcaagctctgtcctccctggacaccgtcagccccacaggaaccgagctgggaagtgttcttgctgtggttgtgatttttaattgcaacacctctcattcttgtcacttctatatacgtgatgtagaaaaaatggaaaaccagaaaaatggggaaggaaatgttcacataactttaaaaaatcaaacctgtgaaagaaagatgtcagctttttgccacgtgtctttgtggcttatgcgaggagactccctgtgcagccctgtccggtccaggtggacgtagacggcccctggctctgctgctcttgaccaagtgcctgaccgccaggccctcacacccaggctcctgggcactgtggtgtgaggcgaggcctcgggatccatcaccgcaggatgctgtgaaaagtactcgcgatggcagccaggtagcaagcccttgccagtggagagcactggatgtcatggtggcaaacaaggcagccatttgctgtcctcctcccacgagtggaaggggtttccaaggaagccacagggcagctgaccacgtgcttgtgtgaggcattttcagtctgttctgcatatgattctcagggcacactctgtggtatgtgaaataggtttccttccacatacagcagaagagaggcaaaggctggtaggaaggaggaagacattggctgggggcttggatgtggggccgtcagggcaggagggaggaagccccagctggaatgaaactcagagcaagtgaccgagggaggacacggctcctgccactgaggccgggcacctgatgcccagcactgtcctggcgccagacacagggagcaggcagtcaagtgaggtctgacccccatggccacgctcaggagagaaagaccatgctcaggacactgtccaaggtgcacaagatgctgggaggtcccttgtttggtgaagaaagggagcatttagagcagttgatggtggtgtgtcctccgtgttctgaaattccagatgatctgtgttggattcttggcttctaccccatgattctcctcaaagaaattgtgtgtgatgtgtgtgtgtgtgtgtgtgtgtgtgtgtctgtgtcacaggagatgcagtgcctgtacaggtgtgttcagtgtgtggatgtcattaacccatagggctatgcaacaaaagacacatttaatagaagtaaaacacacaagaccgctgcctggtctcggggttcagcatgattgtgaccaaacctttttatagaatttccttacctgaaggcacaacactctgaaactttaaagataacagagtattttattccaatagaataaaccaggaatctcggactgtgcatgtgatcactgtgctcctgttgcaaagtagaaggatgtgtattttgacactgacgttttgtctcttgttccccagcccccagcccatgttatcttgggtgtcgaatgtgtccattccatgcagaaccacagccatttccccaggcagtgttgggtcgagaatccacttttctaaacccacacagcctagctggcttgtctagactcttctaggcattggaattgatgaaaactacagggagcggggaaaggagacattatgtcttgttttcctgactttgggttttgtttctcactgtgtcttctccggctatcatatatgtcccctgaatctcatagtgagctgccaaatttgaagtgcatcacccagttgtctgcatctggaaccagtcaagcagtggctgtagtttgaacaagttatgtgtgcatgtaacatatatacatatatacatatatacaagtatgtgcatgataatgtatatcttcgtactttttgatacaatgtattcatttgttaatttttaattatatttgatataaatcaaaggtttgttgcaaaactttatatttaagaagtgttaaaaaaaaaaaaaagtcccaaccatgcaacacaactgggacctacttaaaaagaaattctgtgattgactagtttgctgcctgagtcatatttatcagccaaactttggattctgctgttgtttctacaatgacattttgtatgaagcaaagtccttgaattaaaataaaaacttagcaaaaaatcaaaaacaaaacccca

SEQ ID NO: 310906 - DNA, 7023 bp, Artificial Sequence
  derived and/or modified sequence
atggtgagattcggcgacgagctgggcggcagatacggcggccccggcggcggcgagagagccagaggcggcggcgccggcggcgccggcggccccggccccggcggcctgcagcccggccagagagtgctgtacaagcagagcatcgcccagagagccagaaccatggccctgtacaaccccatccccgtgaagcagaactgcttcaccgtgaacagaagcctgttcgtgttcagcgaggacaacgtggtgagaaagtacgccaagagaatcaccgagtggccccccttcgagtacatgatcctggccaccatcatcgccaactgcatcgtgctggccctggagcagcacctgcccgacggcgacaagacccccatgagcgagagactggacgacaccgagccctacttcatcggcatcttctgcttcgaggccggcatcaagatcatcgccctgggcttcgtgttccacaagggcagctacctgagaaacggctggaacgtgatggacttcgtggtggtgctgaccggcatcctggccaccgccggcaccgacttcgacctgagaaccctgagagccgtgagagtgctgagacccctgaagctggtgagcggcatccccagcctgcaggtggtgctgaagagcatcatgaaggccatggtgcccctgctgcagatcggcctgctgctgttcttcgccatcctgatgttcgccatcatcggcctggagttctacatgggcaagttccacaaggcctgcttccccaacagcaccgacgccgagcccgtgggcgacttcccctgcggcaaggaggcccccgccagactgtgcgagggcgacaccgagtgcagagagtactggcccggccccaacttcggcatcaccaacttcgacaacatcctgttcgccatcctgaccgtgttccagtgcatcaccatggagggctggaccgacatcctgtacaacaccaacgacgccgccggcaacacctggaactggctgtacttcatccccctgatcatcatcggcagcttcttcatgctgaacctggtgctgggcgtgctgagcggcgagttcgccaaggagagagagagagtggagaacagaagagccttcctgaagctgagaagacagcagcagatcgagagagagctgaacggctacctggagtggatcttcaaggccgaggaggtgatgctggccgaggaggacagaaacgccgaggagaagagccccctggacgccgtgctgaagagagccgccaccaagaagagcagaaacgacctgatccacgccgaggagggcgaggacagattcgccgacctgtgcgccgtgggcagccccttcgccagagccagcctgaagagcggcaagaccgagagcagcagctacttcagaagaaaggagaagatgttcagattcttcatcagaagaatggtgaaggcccagagcttctactgggtggtgctgtgcgtggtggccctgaacaccctgtgcgtggccatggtgcactacaaccagcccagaagactgaccaccaccctgtacttcgccgagttcgtgttcctgggcctgttcctgaccgagatgagcctgaagatgtacggcctgggccccagaagctacttcagaagcagcttcaactgcttcgacttcggcgtgatcgtgggcagcgtgttcgaggtggtgtgggccgccatcaagcccggcagcagcttcggcatcagcgtgctgagagccctgagactgctgagaatcttcaaggtgaccaagtactggagcagcctgagaaacctggtggtgagcctgctgaacagcatgaagagcatcatcagcctgctgttcctgctgttcctgttcatcgtggtgttcgccctgctgggcatgcagctgttcggcggccagttcaacttccaggacgagacccccaccaccaacttcgacaccttccccgccgccatcctgaccgtgttccagatcctgaccggcgaggactggaacgccgtgatgtaccacggcatcgagagccagggcggcgtgagcaagggcatgttcagcagcttctacttcatcgtgctgaccctgttcggcaactacaccctgctgaacgtgttcctggccatcgccgtggacaacctggccaacgcccaggagctgaccaaggacgaggaggagatggaggaggccgccaaccagaagctggccctgcagaaggccaaggaggtggccgaggtgagccccatgagcgccgccaacatcagcatcgccgccagacagcagaacagcgccaaggccagaagcgtgtgggagcagagagccagccagctgagactgcagaacctgagagccagctgcgaggccctgtacagcgagatggaccccgaggagagactgagattcgccaccaccagacacctgagacccgacatgaagacccacctggacagacccctggtggtggagctgggcagagacggcgccagaggccccgtgggcggcaaggccagacccgaggccgccgaggcccccgagggcgtggacccccccagaagacaccacagacacagagacaaggacaagacccccgccgccggcgaccaggacagagccgaggcccccaaggccgagagcggcgagcccggcgccagagaggagagacccagaccccacagaagccacagcaaggaggccgccggcccccccgaggccagaagcgagagaggcagaggccccggccccgagggcggcagaagacaccacagaagaggcagccccgaggaggccgccgagagagagcccagaagacacagagcccacagacaccaggaccccagcaaggagtgcgccggcgccaagggcgagagaagagccagacacagaggcggccccagagccggccccagagaggccgagagcggcgaggagcccgccagaagacacagagccagacacaaggcccagcccgcccacgaggccgtggagaaggagaccaccgagaaggaggccaccgagaaggaggccgagatcgtggaggccgacaaggagaaggagctgagaaaccaccagcccagagagccccactgcgacctggagaccagcggcaccgtgaccgtgggccccatgcacaccctgcccagcacctgcctgcagaaggtggaggagcagcccgaggacgccgacaaccagagaaacgtgaccagaatgggcagccagccccccgaccccaacaccatcgtgcacatccccgtgatgctgaccggccccctgggcgaggccaccgtggtgcccagcggcaacgtggacctggagagccaggccgagggcaagaaggaggtggaggccgacgacgtgatgagaagcggccccagacccatcgtgccctacagcagcatgttctgcctgagccccaccaacctgctgagaagattctgccactacatcgtgaccatgagatacttcgaggtggtgatcctggtggtgatcgccctgagcagcatcgccctggccgccgaggaccccgtgagaaccgacagccccagaaacaacgccctgaagtacctggactacatcttcaccggcgtgttcaccttcgagatggtgatcaagatgatcgacctgggcctgctgctgcaccccggcgcctacttcagagacctgtggaacatcctggacttcatcgtggtgagcggcgccctggtggccttcgccttcagcggcagcaagggcaaggacatcaacaccatcaagagcctgagagtgctgagagtgctgagacccctgaagaccatcaagagactgcccaagctgaaggccgtgttcgactgcgtggtgaacagcctgaagaacgtgctgaacatcctgatcgtgtacatgctgttcatgttcatcttcgccgtgatcgccgtgcagctgttcaagggcaagttcttctactgcaccgacgagagcaaggagctggagagagactgcagaggccagtacctggactacgagaaggaggaggtggaggcccagcccagacagtggaagaagtacgacttccactacgacaacgtgctgtgggccctgctgaccctgttcaccgtgagcaccggcgagggctggcccatggtgctgaagcacagcgtggacgccacctacgaggagcagggccccagccccggctacagaatggagctgagcatcttctacgtggtgtacttcgtggtgttccccttcttcttcgtgaacatcttcgtggccctgatcatcatcaccttccaggagcagggcgacaaggtgatgagcgagtgcagcctggagaagaacgagagagcctgcatcgacttcgccatcagcgccaagcccctgaccagatacatgccccagaacagacagagcttccagtacaagacctggaccttcgtggtgagcccccccttcgagtacttcatcatggccatgatcgccctgaacaccgtggtgctgatgatgaagttctacgacgccccctacgagtacgagctgatgctgaagtgcctgaacatcgtgttcaccagcatgttcagcatggagtgcgtgctgaagatcatcgccttcggcgtgctgaactacttcagagacgcctggaacgtgttcgacttcgtgaccgtgctgggcagcatcaccgacatcctggtgaccgagatcgccgagaccaacaacttcatcaacctgagcttcctgagactgttcagagccgccagactgatcaagctgctgagacagggctacaccatcagaatcctgctgtggaccttcgtgcagagcttcaaggccctgccctacgtgtgcctgctgatcgccatgctgttcttcatctacgccatcatcggcatgcaggtgttcggcaacatcgccctggacgacgacaccagcatcaacagacacaacaacttcagaaccttcctgcaggccctgatgctgctgttcagaagcgccaccggcgaggcctggcacgagatcatgctgagctgcctgagcaaccaggcctgcgacgagcaggccaacgccaccgagtgcggcagcgacttcgcctacttctacttcgtgagcttcatcttcctgtgcagcttcctgatgctgaacctgttcgtggccgtgatcatggacaacttcgagtacctgaccagagacagcagcatcctgggcccccaccacctggacgagttcatcagagtgtgggccgagtacgaccccgccgcctgcggcagaatcagctacaacgacatgttcgagatgctgaagcacatgagcccccccctgggcctgggcaagaagtgccccgccagagtggcctacaagagactggtgagaatgaacatgcccatcagcaacgaggacatgaccgtgcacttcaccagcaccctgatggccctgatcagaaccgccctggagatcaagctggcccccgccggcaccaagcagcaccagtgcgacgccgagctgagaaaggagatcagcgtggtgtgggccaacctgccccagaagaccctggacctgctggtgcccccccacaagcccgacgagatgaccgtgggcaaggtgtacgccgccctgatgatcttcgacttctacaagcagaacaagaccaccagagaccagatgcagcaggcccccggcggcctgagccagatgggccccgtgagcctgttccaccccctgaaggccaccctggagcagacccagcccgccgtgctgagaggcgccagagtgttcctgagacagaagagcagcaccagcctgagcaacggcggcgccatccagaaccaggagagcggcatcaaggagagcgtgagctggggcacccagagaacccaggacgccccccacgaggccagaccccccctggagagaggccacagcaccgagatccccgtgggcagaagcggcgccctggccgtggacgtgcagatgcagagcatcaccagaagaggccccgacggcgagccccagcccggcctggagagccagggcagagccgccagcatgcccagactggccgccgagacccagcccgtgaccgacgccagccccatgaagagaagcatcagcaccctggcccagagacccagaggcacccacctgtgcagcaccacccccgacagacccccccccagccaggccagcagccaccaccaccaccacagatgccacagaagaagagacagaaagcagagaagcctggagaagggccccagcctgagcgccgacatggacggcgcccccagcagcgccgtgggccccggcctgccccccggcgagggccccaccggctgcagaagagagagagagagaagacaggagagaggcagaagccaggagagaagacagcccagcagcagcagcagcgagaagcagagattctacagctgcgacagattcggcggcagagagccccccaagcccaagcccagcctgagcagccaccccaccagccccaccgccggccaggagcccggcccccacccccagggcagcggcagcgtgaacggcagccccctgctgagcaccagcggcgccagcacccccggcagaggcggcagaagacagctgccccagacccccctgacccccagacccagcatcacctacaagaccgccaacagcagccccatccacttcgccggcgcccagaccagcctgcccgccttcagccccggcagactgagcagaggcctgagcgagcacaacgccctgctgcagagagaccccctgagccagcccctggcccccggcagcagaatcggcagcgacccctacctgggccagagactggacagcgaggccagcgtgcacgccctgcccgaggacaccctgaccttcgaggaggccgtggccaccaacagcggcagaagcagcagaaccagctacgtgagcagcctgaccagccagagccaccccctgagaagagtgcccaacggctaccactgcaccctgggcctgagcagcggcggcagagccagacacagctaccaccaccccgaccaggaccactggtgctag

SEQ ID NO: 310907 - protein, 1533 aa, Artificial Sequence
  derived and/or modified sequence
MKTHLDRPLVVELGRDGARGPVGGKARPEAAEAPEGVDPPRRHHRHRDKDKTPAAGDQDRAEAPKAESGEPGAREERPRPHRSHSKEAAGPPEARSERGRGPGPEGGRRHHRRGSPEEAAEREPRRHRAHRHQDPSKECAGAKGERRARHRGGPRAGPREAESGEEPARRHRARHKAQPAHEAVEKETTEKEATEKEAEIVEADKEKELRNHQPREPHCDLETSGTVTVGPMHTLPSTCLQKVEEQPEDADNQRNVTRMGSQPPDPNTIVHIPVMLTGPLGEATVVPSGNVDLESQAEGKKEVEADDVMRSGPRPIVPYSSMFCLSPTNLLRRFCHYIVTMRYFEVVILVVIALSSIALAAEDPVRTDSPRNNALKYLDYIFTGVFTFEMVIKMIDLGLLLHPGAYFRDLWNILDFIVVSGALVAFAFSSFVGGSKGKDINTIKSLRVLRVLRPLKTIKRLPKLKAVFDCVVNSLKNVLNILIVYMLFMFIFAVIAVQLFKGKFFYCTDESKELERDCRGQYLDYEKEEVEAQPRQWKKYDFHYDNVLWALLTLFTVSTGEGWPMVLKHSVDATYEEQGPSPGYRMELSIFYVVYFVVFPFFFVNIFVALIIITFQEQGDKVMSECSLEKNERACIDFAISAKPLTRYMPQNRQSFQYKTWTFVVSPPFEYFIMAMIALNTVVLMMKFYDAPYEYELMLKCLNIVFTSMFSMECVLKIIAFGVLNYFRDAWNVFDFVTVLGSITDILVTEIANNFINLSFLRLFRAARLIKLLRQGYTIRILLWTFVQSFKALPYVCLLIAMLFFIYAIIGMQVFGNIALDDDTSINRHNNFRTFLQALMLLFRSATGEAWHEIMLSCLSNQACDEQANATECGSDFAYFYFVSFIFLCSFLMLNLFVAVIMDNFEYLTRDSSILGPHHLDEFIRVWAEYDPAACGRISYNDMFEMLKHMSPPLGLGKKCPARVAYKRLVRMNMPISNEDMTVHFTSTLMALIRTALEIKLAPAGTKQHQCDAELRKEISVVWANLPQKTLDLLVPPHKPDEMTVGKVYAALMIFDFYKQNKTTRDQMQQAPGGLSQMGPVSLFHPLKATLEQTQPAVLRGARVFLRQKSSTSLSNGGAIQNQESGIKESVSWGTQRTQDAPHEARPPLERGHSTEIPVGRSGALAVDVQMQSITRRGPDGEPQPGLESQGRAASMPRLAAETQPVTDASPMKRSISTLAQRPRGTHLCSTTPDRPPPSQASSHHHHHRCHRRRDRKQRSLEKGPSLSADMDGAPSSAVGPGLPPGEGPTGCRRERERRQERGRSQERRQPSSSSSEKQRFYSCDRFGGREPPKPKPSLSSHPTSPTAGQEPGPHPQGSGSVNGSPLLSTSGASTPGRGGRRQLPQTPLTPRPSITYKTANSSPIHFAGAQTSLPAFSPGRLSRGLSEHNALLQRDPLSQPLAPGSRIGSDPYLGQRLDSEASVHALPEDTLTFEEAVATNSGRSSRTSYVSSLTSQSHPLRRVPNGYHCTLGLSSGGRARHSYHHPDQDHWC

SEQ ID NO: 310908 - protein, 2337 aa, Artificial Sequence
  derived and/or modified sequence
MVRFGDELGGRYGGPGGGERARGGGAGGAGGPGPGGLQPGQRVLYKQSIAQRARTMALYNPIPVKQNCFTVNRSLFVFSEDNVVRKYAKRITEWPPFEYMILATIIANCIVLALEQHLPDGDKTPMSERLDDTEPYFIGIFCFEAGIKIIALGFVFHKGSYLRNGWNVMDFVVVLTGILATAGTDFDLRTLRAVRVLRPLKLVSGIPSLQVVLKSIMKAMVPLLQIGLLLFFAILMFAIIGLEFYMGKFHKACFPNSTDAEPVGDFPCGKEAPARLCEGDTECREYWPGPNFGITNFDNILFAILTVFQCITMEGWTDILYNTNDAAGNTWNWLYFIPLIIIGSFFMLNLVLGVLSGEFAKERERVENRRAFLKLRRQQQIERELNGYLEWIFKAEEVMLAEEDRNAEEKSPLDVLKRAATKKSRNDLIHAEEGEDRFADLCAVGSPFARASLKSGKTESSSYFRRKEKMFRFFIRRMVKAQSFYWVVLCVVALNTLCVAMVHYNQPRRLTTTLYFAEFVFLGLFLTEMSLKMYGLGPRSYFRSSFNCFDFGVIVGSVFEVVWAAIKPGSSFGISVLRALRLLRIFKVTKYWSSLRNLVVSLLNSMKSIISLLFLLFLFIVVFALLGMQLFGGQFNFQDETPTTNFDTFPAAILTVFQILTGEDWNAVMYHGIESQGGVSKGMFSSFYFIVLTLFGNYTLLNVFLAIAVDNLANAQELTKDEEEMEEAANQKLALQKAKEVAEVSPMSAANISIAARQQNSAKARSVWEQRASQLRLQNLRASCEALYSEMDPEERLRFATTRHLRPDMKTHLDRPLVVELGRDGARGPVGGKARPEAAEAPEGVDPPRRHHRHRDKDKTPAAGDQDRAEAPKAESGEPGAREERPRPHRSHSKEAAGPPEARSERGRGPGPEGGRRHHRRGSPEEAAEREPRRHRAHRHQDPSKECAGAKGERRARHRGGPRAGPREAESGEEPARRHRARHKAQPAHEAVEKETTEKEATEKEAEIVEADKEKELRNHQPREPHCDLETSGTVTVGPMHTLPSTCLQKVEEQPEDADNQRNVTRMGSQPPDPNTIVHIPVMLTGPLGEATVVPSGNVDLESQAEGKKEVEADDVMRSGPRPIVPYSSMFCLSPTNLLRRFCHYIVTMRYFEVVILVVIALSSIALAAEDPVRTDSPRNNALKYLDYIFTGVFTFEMVIKMIDLGLLLHPGAYFRDLWNILDFIVVSGALVAFAFSGSKGKDINTIKSLRVLRVLRPLKTIKRLPKLKAVFDCVVNSLKNVLNILIVYMLFMFIFAVIAVQLFKGKFFYCTDESKELERDCRGQYLDYEKEEVEAQPRQWKKYDFHYDNVLWALLTLFTVSTGEGWPMVLKHSVDATYEEQGPSPGYRMELSIFYVVYFVVFPFFFVNIFVALIIITFQEQGDKVMSECSLEKNERACIDFAISAKPLTRYMPQNRQSFQYKTWTFVVSPPFEYFIMAMIALNTVVLMMKFYDAPYEYELMLKCLNIVFTSMFSMECVLKIIAFGVLNYFRDAWNVFDFVTVLGSITDILVTEIANNFINLSFLRLFRAARLIKLLRQGYTIRILLWTFVQSFKALPYVCLLIAMLFFIYAIIGMQVFGNIALDDDTSINRHNNFRTFLQALMLLFRSATGEAWHEIMLSCLSNQACDEQANATECGSDFAYFYFVSFIFLCSFLMLNLFVAVIMDNFEYLTRDSSILGPHHLDEFIRVWAEYDPAACGRISYNDMFEMLKHMSPPLGLGKKCPARVAYKRLVRMNMPISNEDMTVHFTSTLMALIRTALEIKLAPAGTKQHQCDAELRKEISVVWANLPQKTLDLLVPPHKPDEMTVGKVYAALMIFDFYKQNKTTRDQMQQAPGGLSQMGPVSLFHPLKATLEQTQPAVLRGARVFLRQKSSTSLSNGGAIQNQESGIKESVSWGTQRTQDAPHEARPPLERGHSTEIPVGRSGALAVDVQMQSITRRGPDGEPQPGLESQGRAASMPRLAAETQPVTDASPMKRSISTLAQRPRGTHLCSTTPDRPPPSQASSHHHHHRCHRRRDRKQRSLEKGPSLSADMDGAPSSAVGPGLPPGEGPTGCRRERERRQERGRSQERRQPSSSSSEKQRFYSCDRFGGREPPKPKPSLSSHPTSPTAGQEPGPHPQGSGSVNGSPLLSTSGASTPGRGGRRQLPQTPLTPRPSITYKTANSSPIHFAGAQTSLPAFSPGRLSRGLSEHNALLQRDPLSQPLAPGSRIGSDPYLGQRLDSEASVHALPEDTLTFEEAVATNSGRSSRTSYVSSLTSQSHPLRRVPNGYHCTLGLSSGGRARHSYHHPDQDHWC

SEQ ID NO: 310909 - DNA, 4602 bp, Artificial Sequence
  derived and/or modified sequence
atgaaaacacacctggataggccacttgtggtggagttagggcgagatggggcccgaggtcccgtagggggcaaggcccggcctgaggccgcggaggccccggaaggagttgatccacccagacgacatcaccgtcacagggataaagataagacccccgcggctggggaccaggatcgcgccgaagctcccaaagctgaatccggcgagcccggagcaagggaagagaggccacggcctcacaggtcccatagtaaagaggccgctggacccccagaggcacgctccgaaagaggtcgcggacctggacccgaaggtgggagaaggcatcatcgccgaggatcccctgaggaggctgccgaacgcgaaccccgccgtcatagagcacacaggcaccaggatccctcaaaggagtgcgcgggggcaaagggagaaaggcgggcgcggcaccgcggggggccacgggctggaccaagagaagcggagtccggggaagaaccagctcggaggcaccgggcccgacacaaggctcagcctgcacatgaggctgtcgagaaggagaccactgaaaaggaggcaactgaaaaagaggctgaaatagtcgaggccgacaaggagaaggagttgcgtaatcaccagccacgtgaaccgcattgtgatcttgaaacttctggaaccgtgacagttgggcctatgcacacactgccatctacatgcctccagaaggtcgaagaacaaccagaagatgccgataaccagcgcaatgttacccggatgggctcccagcccccagatccgaacacaatcgtccacatacccgtcatgttaactgggcctctcggggaggccacggtggtcccaagcgggaacgtcgacctcgagtcccaagcagaaggtaaaaaagaggtggaggccgacgatgtcatgaggtctggaccccgccccatcgtcccgtactcctctatgttctgtctgagcccaacaaatctgctgagacgcttttgtcactatatcgtgaccatgcgatacttcgaggttgtgatacttgtggtcatcgccctgtccagcattgccctcgctgcagaagacccagttcgcacagactctccaagaaataacgctttgaaatacctggattatatattcactggcgttttcacttttgagatggtcataaagatgattgacctgggactcttactgcaccccggtgcttatttccgcgatctgtggaacatcttggacttcatcgtggtgtccggcgcactcgtcgcttttgcgttctcctcattcgtaggaggttccaaaggtaaggatatcaacacgataaaatctcttagggtgctccgcgtgcttcgccctctgaagactattaaacgcctgccaaaattgaaggcagtctttgactgcgtggtgaacagcctgaagaatgtgctcaacattctgattgtctacatgctattcatgttcatctttgctgtaattgccgttcagttgtttaaaggcaagtttttctactgcactgatgagtccaaggagcttgaacgtgattgccgcgggcagtatcttgactacgaaaaggaggaggttgaagcgcagcctcggcagtggaagaagtatgacttccactacgacaatgttctatgggcccttttaacactgtttacggtgtctaccggtgagggctggcctatggttctgaagcactccgtggatgctacatatgaggagcagggcccctcacctggataccgcatggagttaagtattttctacgtggtttacttcgttgtatttccgtttttctttgtaaacatcttcgtggctctcataattattacattccaggagcagggtgataaagtgatgagcgaatgttccctcgaaaaaaatgagagggcctgtatcgactttgccatctctgccaaacccctcacaagatatatgccccagaaccggcagagtttccagtacaagacatggacatttgtcgtatctccccccttcgagtatttcatcatggcaatgatagcattgaataccgtcgtccttatgatgaaattctacgatgccccctatgaatacgagctcatgctgaaatgtctgaacatagtgttcacctctatgttttcaatggagtgcgtcctcaaaatcatagcattcggggtgctgaattattttcgggacgcctggaacgtctttgatttcgtgacagtcttaggcagtatcaccgatattctggttacagaaatcgccaataattttataaacctgtcctttctccgcctgtttagagcagcccggctgattaaactgctaaggcaaggatacactatcagaattctgctatggacctttgtccagtctttcaaagctctaccctatgtgtgtcttttaatcgcaatgctgttttttatttacgcaataatcggtatgcaggtcttcgggaatatagccctcgatgatgacaccagcatcaatcgacataataacttcaggactttcctgcaggcactgatgcttctgtttcgaagtgcaacaggtgaggcctggcatgaaattatgctgagctgcctcagtaatcaggcctgcgacgagcaagcaaatgccacagaatgcggctcggatttcgcctatttctatttcgtctcctttattttcctctgtagtttcttaatgttgaatctttttgttgcagtcataatggataacttcgaatatctgacccgggacagttctatcctggggccccaccatctagacgaattcatccgcgtctgggctgagtatgaccctgcagcttgcggacggatttcctataatgacatgttcgaaatgttaaaacacatgagcccccctttggggttgggcaaaaaatgtcctgcccgggtggcttacaaaagactggtgaggatgaacatgcctatatccaacgaagacatgacagtacactttacaagcacattgatggcactcatcaggaccgcgctggagattaagctggctcctgctgggacaaaacagcaccagtgtgacgcggaactgcgcaaggagatctctgtcgtgtgggccaatctgcctcagaagacgctagaccttctcgtcccccctcataaaccggatgagatgacagtgggcaaggtctatgccgccctgatgatctttgatttctataagcagaataagactacaagggaccagatgcagcaggcccccggaggcctgtcccagatgggccctgtgtccctgtttcatccgcttaaggctaccttggaacagacccagcctgcagtacttagaggagctagggtgttcctgcgtcagaagagttccacctcactgagtaatggcggggctatacagaaccaagagagcggcatcaaggaaagcgtgtcatgggggacacagagaacgcaagacgccccccatgaggccaggccccctttagaacgaggacactcaactgagattccagttgggaggagcggtgcgctggccgtggacgtgcagatgcagtccatcacaaggcgaggcccggacggcgagccacagcctggtctggagtcccaaggaagggcagcctccatgccccggctggcggcagagacgcagccagtaaccgacgcttctccgatgaagcggtccatctctactctggcccagaggcctcgaggcactcatctctgtagcacaactcctgatagaccaccaccaagtcaagcaagcagccatcatcaccaccatcgttgccatcgtcgacgtgatcggaaacagcggtctttggaaaagggtccctctctgtccgctgacatggacggcgcaccatcttcagcagtagggcccggattgcctccgggggagggtcctactggatgccgcagagaacgtgagagacggcaggagcgcggtaggtctcaggaaaggcgccagccatcatcaagctcctcagagaagcagcgattctactcatgcgaccggttcggaggccgtgagcctcccaagcccaagccatctcttagctcgcacccaacctctcctacggcgggccaggagccagggcctcacccacagggaagtgggtctgtaaatggctctcccctgctatccacgagcggggcatccaccccgggcagaggcggacgacggcaactcccccaaaccccactcacacccaggccctctattacttacaagactgctaattcatcacccattcatttcgcgggagcacagacatcccttcctgccttcagtcctggtcggctttcacgtgggctctcagagcacaatgccctgctccaaagagatcccctcagtcaacctctggccccagggtcaaggatcggcagcgatccttacctgggtcagagactcgactcagaggctagtgtgcacgctttgccagaggacacattgacctttgaagaggctgtagccaccaactctggacggtcctctcggacttcatatgtgagttcgctgacaagccagtctcaccccctgaggagggtgccaaacggctatcactgcactctggggttaagttccgggggcagagctaggcacagttatcatcatccagaccaggatcactggtgttag

SEQ ID NO: 310910 - DNA, 4602 bp, Artificial Sequence
  derived and/or modified sequence
atgaagacccacctggaccggcccctggtggtggagctgggcagagatggagcccggggccctgtgggcggcaaggcccggcctgaggccgctgaggcccctgagggcgtggaccccccaagaagacaccaccgccaccgggacaaggacaagaccccagctgctggggaccaggacagagctgaggcccccaaggccgagagcggggagcccggggcccgggaggagcggccccggccccacaggagccacagcaaggaggccgccggccccccagaggcccggtctgagcggggccggggccctggccctgagggcggccgccgccaccaccggcggggcagccctgaggaggccgctgagcgggagcccaggaggcaccgggcccaccgccaccaggaccccagcaaagaatgtgccggggccaagggggagcggcgggcccggcaccggggcggcccccgggccggcccccgggaggccgagagcggggaggagcccgcccggcggcaccgggcccggcacaaggcccagcctgcccatgaagctgtggagaaggagaccacagagaaggaggccacagagaaggaggccgagatcgtggaggccgacaaggagaaggagctgaggaaccaccagccccgggagccccactgtgacctggagaccagcggcaccgtgacagtgggccccatgcacaccctgcccagcacctgcctgcagaaggtggaggagcagccagaagatgctgacaaccagagaaatgtgaccaggatgggcagccagcccccagaccccaacaccatcgtgcacatccctgtgatgctgaccggccccctgggggaggccaccgtggtgcccagcggaaatgtggacctggagagccaggccgagggcaagaaggaggtggaggctgatgatgtgatgaggagcggcccccggcccatcgtgccctacagctccatgttctgcctgagccccaccaacctgctgcggcgcttctgccactacatcgtgaccatgagatactttgaggtggtgatcctggtggtgattgccctgagcagcatcgccctggccgctgaggaccctgtgaggacagacagccccagaaataatgccctgaagtacctggactacatcttcaccggggtcttcacctttgagatggtgatcaagatgattgacctgggcctgctgctgcaccctggggcctacttccgggacctgtggaacatcctggacttcatcgtggtgtctggggccctggtggcctttgccttcagcagctttgtgggcggcagcaagggcaaggacatcaacaccatcaagagcctgcgggtgctgcgggtgctgcggcccctgaagaccatcaagaggctgcccaagctgaaggctgtgtttgactgtgtggtgaacagcctgaagaatgtgctgaacatcctgattgtgtacatgctgttcatgttcatctttgctgtgattgctgtgcagctgttcaagggcaagttcttctactgcacagatgagagcaaggagctggagcgggactgccggggccagtacctggactatgagaaggaggaggtggaggcccagccccggcagtggaagaagtatgacttccactatgacaacgtgctgtgggccctgctgaccctcttcaccgtgtccactggagagggctggcccatggtgctgaagcacagcgtggatgccacctatgaggagcagggccccagccctggctacaggatggagctgagcatcttctacgtggtgtactttgtggtgttccccttcttctttgtgaacatctttgtggccctgatcatcatcaccttccaggagcagggcgacaaggtgatgtctgaatgttccctggagaagaatgaaagagcctgcatcgactttgccatcagcgccaagcccctgacccgctacatgccccagaaccggcagagcttccagtacaagacctggacctttgtggtgtccccaccatttgagtacttcatcatggccatgattgccctgaacacagtggtgctgatgatgaagttctatgatgccccctatgaatatgagctgatgctgaagtgcctgaacatcgtgttcacctccatgttctccatggagtgtgtgctgaagatcatcgcctttggagtgctgaactacttcagagatgcctggaatgtgtttgattttgtgacagtgctgggcagcatcacagacatcctggtgacagaaattgccaacaacttcatcaacctgtccttcctgcggctcttccgggccgcccggctcatcaagctgctgcggcagggctacaccatccgcatcctgctgtggacctttgtgcagagcttcaaggccctgccctacgtgtgcctgctgattgccatgctgttcttcatctatgccatcatcggcatgcaggtgtttggaaacatcgccctggatgatgacaccagcatcaacagacacaacaacttccgcaccttcctgcaggccctgatgctgctcttccgcagcgccactggagaggcctggcatgagatcatgctgagctgcctgagcaaccaggcctgtgatgagcaggccaatgccacagaatgtggcagtgactttgcctacttctactttgtgtccttcatcttcctgtgcagcttcctgatgctgaacctgtttgtggccgtcatcatggacaactttgagtacctgacccgggacagcagcatcctgggcccccaccacctggatgagttcatccgggtgtgggccgagtatgaccctgctgcctgtggccgcatctcctacaatgacatgtttgagatgctgaagcacatgagcccccccctgggcctgggcaagaagtgcccagcccgggtggcctacaagaggctggtgaggatgaacatgcccatcagcaatgaagacatgacagtgcacttcaccagcaccctgatggccctgatcagaacagccctggagatcaagctggccccagctggcaccaagcagcaccagtgtgatgctgagctgaggaaggagatctctgtggtgtgggccaacctgccccagaagaccctggacctgctggtgcccccccacaagccagatgagatgacagtgggcaaggtgtatgctgccctgatgatctttgacttctacaagcagaacaagaccacccgggaccagatgcagcaggcccctgggggcctgagccagatgggccctgtgtccctcttccaccccctgaaggccaccctggagcagacccagcctgctgtgctgcggggggcccgggtcttcctgcggcagaagagcagcaccagcctgagcaatggaggagccatccagaaccaggagagcggcatcaaggagagcgtgtcctggggcacccagaggacccaggatgcccctcatgaggcccggccccccctggagcggggccacagcacagagatccctgtgggccgcagcggggccctggccgtggatgtgcagatgcagagcatcacccggcggggcccagatggagagccccagcccggcctggagagccagggccgggccgcctccatgccccggctggccgctgagacccagcctgtgacagatgccagccccatgaagaggagcatcagcaccctggcccagaggccccggggcacccacctgtgcagcaccaccccagaccggcccccacccagccaggccagcagccaccaccaccaccaccgctgccacagaagaagagacaggaagcagaggagcctggagaagggccccagcctgtctgctgacatggatggagcccccagcagcgctgtgggccctggcctgcccccaggagagggccccaccggctgcagaagagagcgggagcggcggcaggagcggggccgcagccaggagcggcggcagcccagcagcagcagcagcgagaagcagcgcttctacagctgtgacagatttggaggccgggagccccccaagcccaagcccagcctgagcagccaccccaccagccccacagctggccaggagcccggcccccacccccagggcagcggctctgtgaatggcagccccctgctgagcaccagcggggccagcaccccaggccggggcggccggcggcagctgccccagacccccctgaccccccggcccagcatcacctacaagacagccaacagcagccccatccactttgctggggcccagaccagcctgcctgccttcagccctggccgcctgagccggggcctgtctgagcacaatgccctgctgcagagggaccccctgagccagcccctggcccctggcagccgcatcggcagtgacccctacctgggccagaggctggacagcgaggcctctgtgcacgccctgcctgaggacaccctgacctttgaggaggccgtggccaccaacagcggccgcagcagcaggaccagctatgtgagcagcctgaccagccagagccaccccctgcggcgggtgcccaacggctaccactgcaccctgggcctgagcagcggcggccgggcccggcacagctaccaccacccagaccaggaccactggtgctag

SEQ ID NO: 310911 - DNA, 4602 bp, Artificial Sequence
  derived and/or modified sequence
atgaagacccacctggaccggcccctggtggtggagctgggccgggacggagctaggggaccagtgggaggtaaagcgcggcctgaagctgccgaagctcctgagggtgtcgatcctccccgacggcaccatcgacaccgtgataaagataaaactcccgccgccggcgaccaggaccgtgcagaagctcctaaagccgagagcggggagccaggcgccagggaagaacgccctaggccacacagaagtcacagcaaggaggcagctggccccccggaggcacgcagcgaacgcggcagaggccccgggccagagggtggccgccggcaccatagaaggggctctcccgaggaggccgccgagcgggaaccgaggagacaccgcgcccaccgtcatcaggatccttctaaggaatgcgcaggtgccaagggtgaaagacgagctcggcatcggggcggccctagggccggccctcgcgaggccgagagtggggaggagcctgcccggcgccacagggcgcgacacaaagcccaacccgcacatgaggccgttgagaaagaaaccaccgaaaaagaagctactgaaaaggaggccgagatagtagaggcagacaaagagaaggagttgcggaaccaccagccccgggaacctcactgtgacctcgaaacaagtggtacagttaccgttgggcctatgcacacactgccctccacgtgcctgcagaaggtggaagagcagccagaggatgcggacaaccagcgcaatgttactcggatgggcagccagccaccggatccgaataccatagtgcatattccggtgatgctgactgggcccctgggcgaagccacggtcgtcccttctggaaatgtggatcttgaaagccaggcagaagggaaaaaggaggtggaagctgacgacgtgatgaggtcaggacccagaccaattgttccttactcttccatgttttgcctttcacccactaacctgctgcggcgcttttgccactacattgttactatgcggtactttgaggtcgtcattctcgtagtaatcgcattgtcaagcatcgcgttggctgccgaagatcccgtgaggacggacagcccccggaataacgccctaaagtatttagactatatcttcacaggtgtcttcacgttcgagatggttatcaagatgatcgacttgggactcttgttacatcccggagcttatttccgggacctgtggaacattctggattttatcgtggtgagtggtgcgcttgtggcgtttgcatttagctcctttgtgggcggctctaaagggaaagacatcaataccattaaatcactgcgggttctgcgcgtccttcggcctctcaaaactatcaagcgactgccaaaactgaaggccgtattcgattgcgtggttaacagtcttaaaaacgtgctaaacatcctcattgtctatatgctctttatgtttatttttgcagtcatcgccgtgcagctgttcaaaggaaagtttttctattgcacagacgagtccaaagagctcgaaagggactgtagagggcaatacctagattacgaaaaagaagaagtggaagctcaacctcgacagtggaaaaagtatgacttccactatgataacgtgctatgggctttgctgaccctctttacagtgtcaaccggtgaggggtggcctatggtactcaaacactcagtcgatgctacatacgaggagcaaggacctagcccagggtacaggatggaactctcaatattttacgtcgtctactttgtggtgttccctttttttttcgtcaacattttcgtggccttgatcatcattacatttcaggagcaaggcgacaaagtaatgagcgagtgttctttggagaagaacgaacgagcatgtatcgatttcgccatttcagctaagcccctcacgcggtacatgcctcaaaatcgacagagtttccaatacaagacctggactttcgtggtgtccccccccttcgaatattttattatggccatgatcgctctcaacaccgtggtgttgatgatgaagttctatgatgccccatacgagtacgagctgatgctgaagtgcctcaacatcgtgtttactagcatgttctctatggagtgtgtcctcaaaatcattgcattcggcgttttgaattatttccgtgacgcttggaacgtattcgatttcgtcactgtgctgggcagtattaccgacatcttggtgaccgaaattgctaacaatttcatcaacttgtcattcctgaggctgtttcgcgccgcgagacttattaagctgcttcgacagggatatacaattcgcatcctgctctggaccttcgtgcaaagctttaaagctctcccttacgtttgtctcctgattgcgatgctgttcttcatctatgcaattatcggcatgcaagtttttgggaacatagctctggacgacgatacatccatcaatcggcacaacaactttaggacatttttgcaggcattgatgcttctgtttcgttcagcgacaggggaggcatggcacgaaatcatgctaagttgtctgtctaatcaggcctgtgacgagcaggctaacgcaacggaatgtgggtcagacttcgcgtatttttacttcgtgtcattcattttcctgtgcagcttcctcatgttgaatctgttcgtagccgtgattatggataattttgagtacctgacccgagacagttcaatcctcggaccccaccatctggacgaattcatcagagtctgggccgaatacgatcctgcagcatgcggacggatctcttacaatgatatgttcgagatgctcaaacacatgagccccccgctgggcctggggaagaaatgccccgcccgtgtggcctacaaacgattggtaagaatgaatatgccaatctcgaacgaggacatgacagttcactttaccagcacccttatggccctgatcaggacagcccttgagatcaaactggcacccgccgggacgaaacagcaccagtgtgatgccgagctccgaaaggagattagtgtggtctgggctaaccttccacagaaaaccctggatttgctggtgcctccacacaagcctgatgagatgaccgtagggaaagtctacgctgcgcttatgattttcgacttctacaaacaaaacaagaccacgagagaccagatgcagcaggccccaggcggtctgagccagatgggtcctgtgtccctctttcatccgctgaaagctacccttgaacaaacacagcctgctgtgttacggggtgccagggtgtttctgcgacagaaaagctctacttccctaagcaacggtggtgcaatccagaaccaggaatctggcattaaagagagcgtgagttgggggactcagcgcacccaggacgctcctcacgaggcccggcctccattggagcggggacatagtacagaaattcctgttggccggtccggagctctcgccgttgacgtgcagatgcagtcgatcacaagacgggggccagacggagaaccgcagcctgggctggagagtcaagggcgcgcggctagcatgcccaggttggctgcagagactcagccagtgacagatgcctcaccaatgaagcgaagcatttccacattggcccagcgacctcgagggactcacctgtgttccaccacccctgaccgcccacccccgtcacaggcgtcatcacaccaccaccaccatagatgccacaggcggcgcgacagaaagcagagatccctggagaagggcccgtctctgtccgctgatatggacggggctccttccagtgctgtgggaccagggctacctccgggtgaaggccccacaggatgtcgacgagagagggagcgccggcaagagaggggccgatcacaggagaggcgccaaccttccagttccagcagtgagaaacagcgattttatagttgtgatcggttcggtggaagggaacctcccaagccaaagcctagcctgtcgtcacaccctacatccccaactgctggacaggaaccagggccacatccgcagggctccggtagcgtcaatggctcaccgcttctctctactagcggagccagcactcccgggcggggcggccggcgccagttgccacagactccgctgactccccgaccatccatcacatataaaacagccaatagtagccctatccactttgcaggagctcaaacatccctgccagccttttctcccggccgactgtccaggggcctgtctgaacacaacgctcttctccaacgggatccactgtcacagcctctggcccccggtagtaggatcggatcagacccatatcttggccagcggttagatagtgaggcctccgtacatgctctcccagaagacaccttgactttcgaggaagccgttgcgactaactccggtcgctcctcaaggacatcatacgtcagtagcctgacaagtcagtcccacccccttcggagagtacctaatggataccattgcaccctgggcttgtcgagtggaggtcgggccaggcactcgtatcaccatcccgatcaggaccactggtgttag

SEQ ID NO: 310912 - DNA, 4602 bp, Artificial Sequence
  derived and/or modified sequence
atgaaaactcacctggaccgaccactggtggtcgagctaggcagggatggcgcacggggtcctgtgggcggaaaagcacgtcctgaggctgccgaagctccagagggagtcgatcctcccaggcgccaccatcgacatagagacaaagacaaaaccccggctgctggggaccaagatcgggctgaggccccaaaggcagaatcaggtgagcccggagccagagaggaaaggccaaggccccaccgctcacactccaaagaagcagccggaccgcctgaagcgcgttcagaaagggggagaggcccaggaccagagggcggtcgaagacaccatcgacgaggctcccccgaggaagcggctgagagagaacctaggcggcaccgggcacacagacaccaagatccttctaaggagtgtgcaggagccaaaggcgagcgaagggctagacatagaggcggacccagagctggaccacgggaggccgagtctggcgaggaacccgctaggagacatagggccaggcacaaggctcagccggctcacgaggctgtggaaaaggagacaacagagaaggaggccacagaaaaggaagccgaaatcgtcgaagcagataaagagaaggagcttcggaatcatcagccgcgtgagccccactgcgatttggagaccagtggaaccgtcacagtggggcctatgcataccttacccagcacatgcctccagaaagttgaggaacagcctgaggatgctgataatcagagaaatgtcacccgtatgggaagtcagcctccggatcctaacactattgtccacattcccgtgatgctgacaggaccactaggagaagctaccgtcgtgccatctggcaatgtggatctggagtcacaggccgaggggaaaaaggaggtagaggcagacgacgtgatgcgcagtggccctaggccaatcgtgccctactcctctatgttctgtctgtctcctacaaatctcctgcgtcgcttctgccactatattgtaactatgcggtattttgaggttgtgatcttggtagtaatcgctttaagctccattgctctcgcagctgaagatcccgtgcgaacagatagccctcggaataatgcactgaaatacctcgactatatctttacgggtgtgttcaccttcgagatggtgattaaaatgattgacctcggtctgcttctgcatcccggtgcttactttcgcgatttgtggaatattcttgatttcatagtggttagcggtgcgcttgtggccttcgcatttagcagcttcgtaggcggatctaagggtaaagatatcaatacaattaagtcacttagggtgctgcgcgtactgcgaccgctcaaaactatcaagcgtttacctaaacttaaggccgtgtttgattgtgtggtgaatagcctcaagaatgtgctcaatatcctgattgtatacatgctctttatgtttatatttgccgtcatcgccgtgcagctgttcaagggaaaatttttctactgcaccgacgagtcgaaagagctcgagcgcgactgtcgcggtcagtatctggactacgaaaaggaggaggtggaagcccagcccaggcagtggaagaagtatgactttcattacgacaatgtgctgtgggcactgctgacactgttcacagtgtctacaggagagggttggcctatggtgctcaaacattcagtcgatgccacttatgaagagcagggacccagtcccggatatcgcatggagcttagcattttctatgtggtatactttgtggttttccccttcttctttgtaaatatttttgtggcgctgataatcatcacattccaggagcagggagacaaggtcatgtctgaatgctcactagaaaaaaatgaacgcgcttgcatagatttcgcaattagtgcaaagcccttgactagatacatgccacagaaccggcagagcttccaatacaagacatggacgttcgttgtttccccgcctttcgagtatttcattatggcaatgatagcactgaacactgtcgtgcttatgatgaaattttacgacgccccatacgaatatgaactcatgctgaagtgtctgaatatcgtattcaccagtatgttttctatggagtgtgttctcaagattatcgcctttggcgtcctgaactatttccgggacgcctggaatgttttcgattttgtaactgtgctgggaagcatcacagacatactggtgactgagatagccaataatttcattaacctctcttttttacggttgtttagagcggcaaggcttatcaagcttctgcggcaaggatatactatccgaatcctcttgtggacattcgtccagagttttaaagccctgccctatgtttgcctgctcatcgctatgttgttcttcatctacgcaataattggcatgcaggtgttcggtaatatcgctctggacgatgatacgagcatcaacaggcacaataactttcgaacatttcttcaagccttaatgctcttgttcagatctgctacgggggaggcctggcatgaaatcatgctctcctgtctaagcaaccaggcatgtgatgaacaggccaacgccacagagtgcggatccgacttcgcgtacttctacttcgtgtcgttcatcttcctctgcagcttcctcatgctaaatctcttcgtggctgtgatcatggacaacttcgaatacctcaccagggattcatctatactcggcccacatcatttggatgagttcatacgagtgtgggccgaatatgaccctgcggcttgtggcaggatcagctataatgacatgtttgaaatgttaaagcatatgtctcctcccttaggactcggaaagaaatgtcccgcacgtgtcgcgtataaacgtctggtgcggatgaacatgccgattagcaatgaggatatgacggtccactttacctcaaccctcatggcactgattagaaccgctttggagatcaagctcgctcccgctggaactaagcagcaccagtgcgatgcagagctgaggaaagagatttcagtggtgtgggccaacttgcctcagaagactctggacctgctcgtaccgcctcataagccagacgaaatgacggtgggcaaggtctacgccgcacttatgatcttcgatttttacaagcagaataaaaccaccagggaccagatgcagcaggctccgggaggactttcacagatggggcctgtgagcctcttccaccccctgaaagccacactggagcaaactcagcctgcggtcttacgcggtgctagggtgttcttgcgtcagaagtcctcgacctcactaagcaacgggggagctatacagaaccaagaaagtggtattaaggaatccgtgtcatgggggacacagagaacacaggacgcccctcacgaggcgagacctcccctagaaagaggtcacagtacggagattcctgtcggacgctccggagccttagcggtagatgtgcaaatgcaatcgatcacgcgaagaggcccagatggggagccacagccaggcctcgagtcccagggcagagctgcctctatgccccgactcgctgctgagacacagcccgtgacggatgccagtccaatgaagcgatcaatatcaaccctggcacaacggcctagagggacacacctgtgtagcaccaccccggaccgacccccaccaagtcaggcctctagtcaccatcaccaccaccggtgtcaccgaaggcgtgataggaagcagagaagcctggagaaaggcccatctcttagtgcagacatggacggtgctccaagcagtgcagttggcccaggactgccccctggagaagggccaactggttgtcggagagaaagagaacgtcgacaggagcgcggacgatctcaggagcgcaggcaacctagctcttcttcttctgagaagcagaggttctattcctgcgatcggtttggaggcagagagccgccaaaacctaagccaagcttgtcctctcaccccacatcccccacggccggtcaggagcccggtccgcacccacaaggaagcggatccgtgaacgggtctccactgctctcgactagcggagcctccacgcccggacgcggtggaagacgccagttaccacagacaccactcactcctaggccaagtattacgtacaaaacagctaacagctcacctatccacttcgcaggtgcccagacctcattaccagcgttcagtcccggacggttgtccagggggctgagcgaacataatgcccttttgcaaagagaccctctgtctcagccactggcccctggatcgcgtatcggaagcgacccatatctaggacagcgcctggacagcgaggcatcagtgcacgcattaccagaggataccttaacgttcgaagaggccgtggcaactaacagtggcagaagcagccgaacatcttacgtgtcctcgttaactagccagagtcacccattgcggagggtgcctaacgggtatcactgtaccctgggcctgtcctccgggggtcgtgcccgtcactcataccaccatccagatcaagaccattggtgttat

SEQ ID NO: 310913 - DNA, 9796 bp, Artificial Sequence
  derived and/or modified sequence
gcggcggcggctgcggcggtggggccgggcgaggtccgctgcggtcccggcggctccgtggctgctccgctctgagcgcctggcgcgccccgcgccctccctgccggggccgctgggccggggatgcacgcggggcccgggagccatggtccgcttcggggacgagctgggcggccgctatgggggccccggcggcggagagcgggcccggggcggcggggccggcggggcggggggcccgggtcccggggggctgcagcccggccagcgggtcctctacaagcaatcgatcgcgcagcgcgcgcggaccatggcgctgtacaaccccatcccggtcaagcagaactgcttcaccgtcaaccgctcgctcttcgtcttcagcgaggacaacgtcgtccgcaaatacgcgaagcgcatcaccgagtggcctccattcgagtatatgatcctggccaccatcatcgccaactgcatcgtgctggccctggagcagcacctccctgatggggacaaaacgcccatgtccgagcggctggacgacacggagccctatttcatcgggatcttttgcttcgaggcagggatcaaaatcatcgctctgggctttgtcttccacaagggctcttacctgcggaacggctggaacgtcatggacttcgtggtcgtcctcacagggatccttgccacggctggaactgacttcgacctgcgaacactgagggctgtgcgtgtgctgaggcccctgaagctggtgtctgggattccaagtttgcaggtggtgctcaagtccatcatgaaggccatggttccactcctgcagattgggctgcttctcttctttgccatcctcatgtttgccatcattggcctggagttctacatgggcaagttccacaaggcctgtttccccaacagcacagatgcggagcccgtgggtgacttcccctgtggcaaggaggccccagcccggctgtgcgagggcgacactgagtgccgggagtactggccaggacccaactttggcatcaccaactttgacaatatcctgtttgccatcttgacggtgttccagtgcatcaccatggagggctggactgacatcctctataatacaaacgatgcggccggcaacacctggaactggctctacttcatccctctcatcatcatcggctccttcttcatgctcaacctggtgctgggcgtgctctcgggggagtttgccaaggagcgagagagggtggagaaccgccgcgccttcctgaagctgcgccggcagcagcagatcgagcgagagctcaacgggtacctggagtggatcttcaaggcggaggaagtcatgctggccgaggaggacaggaatgcagaggagaagtcccctttggacgtgctgaagagagcggccaccaagaagagcagaaatgacctgatccacgcagaggagggagaggaccggtttgcagatctctgtgctgttggatcccccttcgcccgcgccagcctcaagagcgggaagacagagagctcgtcatacttccggaggaaggagaagatgttccggttttttatccggcgcatggtgaaggctcagagcttctactgggtggtgctgtgcgtggtggccctgaacacactgtgtgtggccatggtgcattacaaccagccgcggcggcttaccacgaccctgtattttgcagagtttgttttcctgggtctcttcctcacagagatgtccctgaagatgtatggcctggggcccagaagctacttccggtcctccttcaactgcttcgactttggggtcatcgtggggagcgtctttgaagtggtctgggcggccatcaagccgggaagctcctttgggatcagtgtgctgcgggccctccgcctgctgaggatcttcaaagtcacgaagtactggagctccctgcggaacctggtggtgtccctgctgaactccatgaagtccatcatcagcctgctcttcttgctcttcctgttcattgtggtcttcgccctgctggggatgcagctgtttgggggacagttcaacttccaggatgagactcccacaaccaacttcgacaccttccctgccgccatcctcactgtcttccagatcctgacgggagaggactggaatgcagtgatgtatcacgggatcgaatcgcaaggcggcgtcagcaaaggcatgttctcgtccttttacttcattgtcctgacactgttcggaaactacactctgctgaatgtctttctggccatcgctgtggacaacctggccaacgcccaagagctgaccaaggatgaagaggagatggaagaagcagccaatcagaagcttgctctgcaaaaggccaaagaagtggctgaagtcagccccatgtctgccgcgaacatctccatcgccgccaggcagcagaactcggccaaggcgcgctcggtgtgggagcagcgggccagccagctacggctgcagaacctgcgggccagctgcgaggcgctgtacagcgagatggaccccgaggagcggctgcgcttcgccactacgcgccacctgcggcccgacatgaagacgcacctggaccggccgctggtggtggagctgggccgcgacggcgcgcgggggcccgtgggaggcaaagcccgacctgaggctgcggaggcccccgagggcgtcgaccctccgcgcaggcaccaccggcaccgcgacaaggacaagacccccgcggcgggggaccaggaccgagcagaggccccgaaggcggagagcggggagcccggtgcccgggaggagcggccgcggccgcaccgcagccacagcaaggaggccgcggggcccccggaggcgcggagcgagcgcggccgaggcccaggccccgagggcggccggcggcaccaccggcgcggctccccggaggaggcggccgagcgggagccccgacgccaccgcgcgcaccggcaccaggatccgagcaaggagtgcgccggcgccaagggcgagcggcgcgcgcggcaccgcggcggcccccgagcggggccccgggaggcggagagcggggaggagccggcgcggcggcaccgggcccggcacaaggcgcagcctgctcacgaggctgtggagaaggagaccacggagaaggaggccacggagaaggaggctgagatagtggaagccgacaaggaaaaggagctccggaaccaccagccccgggagccacactgtgacctggagaccagtgggactgtgactgtgggtcccatgcacacactgcccagcacctgtctccagaaggtggaggaacagccagaggatgcagacaatcagcggaacgtcactcgcatgggcagtcagcccccagacccgaacactattgtacatatcccagtgatgctgacgggccctcttggggaagccacggtcgttcccagtggtaacgtggacctggaaagccaagcagaggggaagaaggaggtggaagcggatgacgtgatgaggagcggcccccggcctatcgtcccatacagctccatgttctgtttaagccccaccaacctgctccgccgcttctgccactacatcgtgaccatgaggtacttcgaggtggtcattctcgtggtcatcgccttgagcagcatcgccctggctgctgaggacccagtgcgcacagactcgcccaggaacaacgctctgaaatacctggattacattttcactggtgtctttacctttgagatggtgataaagatgatcgacttgggactgctgcttcaccctggagcctatttccgggacttgtggaacattctggacttcattgtggtcagtggcgccctggtggcgtttgctttctcgagcttcgtgggaggatccaaagggaaagacatcaataccatcaagtctctgagagtccttcgtgtcctgcggcccctcaagaccatcaaacggctgcccaagctcaaggctgtgtttgactgtgtggtgaactccctgaagaatgtcctcaacatcttgattgtctacatgctcttcatgttcatatttgccgtcattgcggtgcagctcttcaaagggaagtttttctactgcacagatgaatccaaggagctggagagggactgcaggggtcagtatttggattatgagaaggaggaagtggaagctcagcccaggcagtggaagaaatacgactttcactacgacaatgtgctctgggctctgctgacgctgttcacagtgtccacgggagaaggctggcccatggtgctgaaacactccgtggatgccacctatgaggagcagggtccaagccctgggtaccgcatggagctgtccatcttctacgtggtctactttgtggtctttcccttcttcttcgtcaacatctttgtggctttgatcatcatcaccttccaggagcagggggacaaggtgatgtctgaatgcagcctggagaagaacgagagggcttgcattgacttcgccatcagcgccaaacccctgacacggtacatgccccaaaaccggcagtcgttccagtataagacgtggacatttgtggtctccccgccctttgaatacttcatcatggccatgatagccctcaacactgtggtgctgatgatgaagttctatgatgcaccctatgagtacgagctgatgctgaaatgcctgaacatcgtgttcacatccatgttctccatggaatgcgtgctgaagatcatcgcctttggggtgctgaactatttcagagatgcctggaatgtctttgactttgtcactgtgttgggaagtattactgatattttagtaacagagattgcgaacaatttcatcaacctcagcttcctccgcctctttcgagctgcgcggctgatcaagctgctccgccagggctacaccatccgcatcctgctgtggacctttgtccagtccttcaaggccctgccctacgtgtgtctgctcattgccatgctgttcttcatctacgccatcatcggcatgcaggtgtttgggaatattgccctggatgatgacaccagcatcaaccgccacaacaacttccggacgtttttgcaagccctgatgctgctgttcaggagcgccacgggggaggcctggcacgagatcatgctgtcctgcctgagcaaccaggcctgtgatgagcaggccaatgccaccgagtgtggaagtgactttgcctacttctacttcgtctccttcatcttcctgtgctcctttctgatgttgaacctctttgtggctgtgatcatggacaattttgagtacctcacgcgggactcttccatcctaggtcctcaccacttggatgagttcatccgggtctgggctgaatacgacccggctgcgtgtgggcgcatcagttacaatgacatgtttgagatgctgaaacacatgtccccgcctctggggctggggaagaaatgccctgctcgagttgcttacaagcgcctggttcgcatgaacatgcccatctccaacgaggacatgactgttcacttcacgtccacgctgatggccctcatccggacggcactggagatcaagctggccccagctgggacaaagcagcatcagtgtgacgcggagttgaggaaggagatttccgttgtgtgggccaatctgccccagaagactttggacttgctggtaccaccccataagcctgatgagatgacagtggggaaggtttatgcagctctgatgatattcgacttctacaagcagaacaaaaccaccagagaccagatgcagcaggctcctggaggcctctcccagatgggtcctgtgtccctgttccaccctctgaaggccaccctggagcagacacagccggctgtgctccgaggagcccgggttttccttcgacagaagagttccacctccctcagcaatggcggggccatacaaaaccaagagagtggcatcaaagagtctgtctcctggggcactcaaaggacccaggatgcaccccatgaggccaggccacccctggagcgtggccactccacagagatccctgtggggcggtcaggagcactggctgtggacgttcagatgcagagcataacccggaggggccctgatggggagccccagcctgggctggagagccagggtcgagcggcctccatgccccgccttgcggccgagactcagcccgtcacagatgccagccccatgaagcgctccatctccacgctggcccagcggccccgtgggactcatctttgcagcaccaccccggaccgcccaccccctagccaggcgtcgtcgcaccaccaccaccaccgctgccaccgccgcagggacaggaagcagaggtccctggagaaggggcccagcctgtctgccgatatggatggcgcaccaagcagtgctgtggggccggggctgcccccgggagaggggcctacaggctgccggcgggaacgagagcgccggcaggagcggggccggtcccaggagcggaggcagccctcatcctcctcctcggagaagcagcgcttctactcctgcgaccgctttgggggccgtgagcccccgaagcccaagccctccctcagcagccacccaacgtcgccaacagctggccaggagccgggaccccacccacagggcagtggttccgtgaatgggagccccttgctgtcaacatctggtgctagcacccccggccgcggtgggcggaggcagctcccccagacgcccctgactccccgccccagcatcacctacaagacggccaactcctcacccatccacttcgccggggctcagaccagcctccctgccttctccccaggccggctcagccgtgggctttccgaacacaacgccctgctgcagagagaccccctcagccagcccctggcccctggctctcgaattggctctgacccttacctggggcagcgtctggacagtgaggcctctgtccacgccctgcctgaggacactctcactttcgaggaggctgtggccaccaactcgggccgctcctccaggacttcctacgtgtcctccctgacctcccagtctcaccctctccgccgcgtgcccaacggttaccactgcaccctgggactcagctcgggtggccgagcacggcacagctaccaccaccctgaccaagaccactggtgctagctgcaccgtgaccgctcagacgcctgcatgcagcaggcgtgtgttccagtggatgagttttatcatccacacggggcagccggccctcgggggaggccttgcccaccttggtgaggctcctgtggcccctccctccccctcctcccctcttttactctagacgacgaataaagccctgttagaggatgcggctctctctgtccccttcctgtcctgccttcctgggtctcgtaccacacaccagaccctaaaccgcaggctgctgtgtgtggctgagaaggacccaggagtccaaatcccgtgtcctgggactcagcatccagcatgggtgcttggagccgttgtgaggagctctgcgtcctgtggggagcacccttcacgtggccgtgcggcacagagaagcagggcccacctgaaagtgcgccgagacctcgggacggaggggatggggagggggacacagtcgtggcttgtgcagcccgccagtgtcagcgaatgctcactcaggcaagctctgtcctccctggacaccgtcagccccacaggaaccgagctgggaagtgttcttgctgtggttgtgatttttaattgcaacacctctcattcttgtcacttctatatacgtgatgtagaaaaaatggaaaaccagaaaaatggggaaggaaatgttcacataactttaaaaaatcaaacctgtgaaagaaagatgtcagctttttgccacgtgtctttgtggcttatgcgaggagactccctgtgcagccctgtccggtccaggtggacgtagacggcccctggctctgctgctcttgaccaagtgcctgaccgccaggccctcacacccaggctcctgggcactgtggtgtgaggcgaggcctcgggatccatcaccgcaggatgctgtgaaaagtactcgcgatggcagccaggtagcaagcccttgccagtggagagcactggatgtcatggtggcaaacaaggcagccatttgctgtcctcctcccacgagtggaaggggtttccaaggaagccacagggcagctgaccacgtgcttgtgtgaggcattttcagtctgttctgcatatgattctcagggcacactctgtggtatgtgaaataggtttccttccacatacagcagaagagaggcaaaggctggtaggaaggaggaagacattggctgggggcttggatgtggggccgtcagggcaggagggaggaagccccagctggaatgaaactcagagcaagtgaccgagggaggacacggctcctgccactgaggccgggcacctgatgcccagcactgtcctggcgccagacacagggagcaggcagtcaagtgaggtctgacccccatggccacgctcaggagagaaagaccatgctcaggacactgtccaaggtgcacaagatgctgggaggtcccttgtttggtgaagaaagggagcatttagagcagttgatggtggtgtgtcctccgtgttctgaaattccagatgatctgtgttggattcttggcttctaccccatgattctcctcaaagaaattgtgtgtgatgtgtgtgtgtgtgtgtgtgtgtgtgtgtctgtgtcacaggagatgcagtgcctgtacaggtgtgttcagtgtgtggatgtcattaacccatagggctatgcaacaaaagacacatttaatagaagtaaaacacacaagaccgctgcctggtctcggggttcagcatgattgtgaccaaacctttttatagaatttccttacctgaaggcacaacactctgaaactttaaagataacagagtattttattccaatagaataaaccaggaatctcggactgtgcatgtgatcactgtgctcctgttgcaaagtagaaggatgtgtattttgacactgacgttttgtctcttgttccccagcccccagcccatgttatcttgggtgtcgaatgtgtccattccatgcagaaccacagccatttccccaggcagtgttgggtcgagaatccacttttctaaacccacacagcctagctggcttgtctagactcttctaggcattggaattgatgaaaactacagggagcggggaaaggagacattatgtcttgttttcctgactttgggttttgtttctcactgtgtcttctccggctatcatatatgtcccctgaatctcatagtgagctgccaaatttgaagtgcatcacccagttgtctgcatctggaaccagtcaagcagtggctgtagtttgaacaagttatgtgtgcatgtaacatatatacatatatacatatatacaagtatgtgcatgataatgtatatcttcgtactttttgatacaatgtattcatttgttaatttttaattatatttgatataaatcaaaggtttgttgcaaaactttatatttaagaagtgttaaaaaaaaaaaaaagtcccaaccatgcaacacaactgggacctacttaaaaagaaattctgtgattgactagtttgctgcctgagtcatatttatcagccaaactttggattctgctgttgtttctacaatgacattttgtatgaagcaaagtccttgaattaaaataaaaacttagcaaaaaatcaaaaacaaaacccca

SEQ ID NO: 310914 - DNA, 4602 bp, Artificial Sequence
  derived and/or modified sequence
atgaagacccacctggacagacccctggtggtggagctgggcagagacggcgccagaggccccgtgggcggcaaggccagacccgaggccgccgaggcccccgagggcgtggacccccccagaagacaccacagacacagagacaaggacaagacccccgccgccggcgaccaggacagagccgaggcccccaaggccgagagcggcgagcccggcgccagagaggagagacccagaccccacagaagccacagcaaggaggccgccggcccccccgaggccagaagcgagagaggcagaggccccggccccgagggcggcagaagacaccacagaagaggcagccccgaggaggccgccgagagagagcccagaagacacagagcccacagacaccaggaccccagcaaggagtgcgccggcgccaagggcgagagaagagccagacacagaggcggccccagagccggccccagagaggccgagagcggcgaggagcccgccagaagacacagagccagacacaaggcccagcccgcccacgaggccgtggagaaggagaccaccgagaaggaggccaccgagaaggaggccgagatcgtggaggccgacaaggagaaggagctgagaaaccaccagcccagagagccccactgcgacctggagaccagcggcaccgtgaccgtgggccccatgcacaccctgcccagcacctgcctgcagaaggtggaggagcagcccgaggacgccgacaaccagagaaacgtgaccagaatgggcagccagccccccgaccccaacaccatcgtgcacatccccgtgatgctgaccggccccctgggcgaggccaccgtggtgcccagcggcaacgtggacctggagagccaggccgagggcaagaaggaggtggaggccgacgacgtgatgagaagcggccccagacccatcgtgccctacagcagcatgttctgcctgagccccaccaacctgctgagaagattctgccactacatcgtgaccatgagatacttcgaggtggtgatcctggtggtgatcgccctgagcagcatcgccctggccgccgaggaccccgtgagaaccgacagccccagaaacaacgccctgaagtacctggactacatcttcaccggcgtgttcaccttcgagatggtgatcaagatgatcgacctgggcctgctgctgcaccccggcgcctacttcagagacctgtggaacatcctggacttcatcgtggtgagcggcgccctggtggccttcgccttcagcagcttcgtgggcggcagcaagggcaaggacatcaacaccatcaagagcctgagagtgctgagagtgctgagacccctgaagaccatcaagagactgcccaagctgaaggccgtgttcgactgcgtggtgaacagcctgaagaacgtgctgaacatcctgatcgtgtacatgctgttcatgttcatcttcgccgtgatcgccgtgcagctgttcaagggcaagttcttctactgcaccgacgagagcaaggagctggagagagactgcagaggccagtacctggactacgagaaggaggaggtggaggcccagcccagacagtggaagaagtacgacttccactacgacaacgtgctgtgggccctgctgaccctgttcaccgtgagcaccggcgagggctggcccatggtgctgaagcacagcgtggacgccacctacgaggagcagggccccagccccggctacagaatggagctgagcatcttctacgtggtgtacttcgtggtgttccccttcttcttcgtgaacatcttcgtggccctgatcatcatcaccttccaggagcagggcgacaaggtgatgagcgagtgcagcctggagaagaacgagagagcctgcatcgacttcgccatcagcgccaagcccctgaccagatacatgccccagaacagacagagcttccagtacaagacctggaccttcgtggtgagcccccccttcgagtacttcatcatggccatgatcgccctgaacaccgtggtgctgatgatgaagttctacgacgccccctacgagtacgagctgatgctgaagtgcctgaacatcgtgttcaccagcatgttcagcatggagtgcgtgctgaagatcatcgccttcggcgtgctgaactacttcagagacgcctggaacgtgttcgacttcgtgaccgtgctgggcagcatcaccgacatcctggtgaccgagatcgccaacaacttcatcaacctgagcttcctgagactgttcagagccgccagactgatcaagctgctgagacagggctacaccatcagaatcctgctgtggaccttcgtgcagagcttcaaggccctgccctacgtgtgcctgctgatcgccatgctgttcttcatctacgccatcatcggcatgcaggtgttcggcaacatcgccctggacgacgacaccagcatcaacagacacaacaacttcagaaccttcctgcaggccctgatgctgctgttcagaagcgccaccggcgaggcctggcacgagatcatgctgagctgcctgagcaaccaggcctgcgacgagcaggccaacgccaccgagtgcggcagcgacttcgcctacttctacttcgtgagcttcatcttcctgtgcagcttcctgatgctgaacctgttcgtggccgtgatcatggacaacttcgagtacctgaccagagacagcagcatcctgggcccccaccacctggacgagttcatcagagtgtgggccgagtacgaccccgccgcctgcggcagaatcagctacaacgacatgttcgagatgctgaagcacatgagcccccccctgggcctgggcaagaagtgccccgccagagtggcctacaagagactggtgagaatgaacatgcccatcagcaacgaggacatgaccgtgcacttcaccagcaccctgatggccctgatcagaaccgccctggagatcaagctggcccccgccggcaccaagcagcaccagtgcgacgccgagctgagaaaggagatcagcgtggtgtgggccaacctgccccagaagaccctggacctgctggtgcccccccacaagcccgacgagatgaccgtgggcaaggtgtacgccgccctgatgatcttcgacttctacaagcagaacaagaccaccagagaccagatgcagcaggcccccggcggcctgagccagatgggccccgtgagcctgttccaccccctgaaggccaccctggagcagacccagcccgccgtgctgagaggcgccagagtgttcctgagacagaagagcagcaccagcctgagcaacggcggcgccatccagaaccaggagagcggcatcaaggagagcgtgagctggggcacccagagaacccaggacgccccccacgaggccagaccccccctggagagaggccacagcaccgagatccccgtgggcagaagcggcgccctggccgtggacgtgcagatgcagagcatcaccagaagaggccccgacggcgagccccagcccggcctggagagccagggcagagccgccagcatgcccagactggccgccgagacccagcccgtgaccgacgccagccccatgaagagaagcatcagcaccctggcccagagacccagaggcacccacctgtgcagcaccacccccgacagacccccccccagccaggccagcagccaccaccaccaccacagatgccacagaagaagagacagaaagcagagaagcctggagaagggccccagcctgagcgccgacatggacggcgcccccagcagcgccgtgggccccggcctgccccccggcgagggccccaccggctgcagaagagagagagagagaagacaggagagaggcagaagccaggagagaagacagcccagcagcagcagcagcgagaagcagagattctacagctgcgacagattcggcggcagagagccccccaagcccaagcccagcctgagcagccaccccaccagccccaccgccggccaggagcccggcccccacccccagggcagcggcagcgtgaacggcagccccctgctgagcaccagcggcgccagcacccccggcagaggcggcagaagacagctgccccagacccccctgacccccagacccagcatcacctacaagaccgccaacagcagccccatccacttcgccggcgcccagaccagcctgcccgccttcagccccggcagactgagcagaggcctgagcgagcacaacgccctgctgcagagagaccccctgagccagcccctggcccccggcagcagaatcggcagcgacccctacctgggccagagactggacagcgaggccagcgtgcacgccctgcccgaggacaccctgaccttcgaggaggccgtggccaccaacagcggcagaagcagcagaaccagctacgtgagcagcctgaccagccagagccaccccctgagaagagtgcccaacggctaccactgcaccctgggcctgagcagcggcggcagagccagacacagctaccaccaccccgaccaggaccactggtgctag

SEQ ID NO: 310915 - protein, 2338 aa, Artificial Sequence
  derived and/or modified sequence
MVRFGDELGGRYGGPGGGERARGGGAGGAGGPGPGGLQPGQRVLYKQSIAQRARTMALYNPIPVKQNCFTVNRSLFVFSEDNVVRKYAKRITEWPPFEYMILATIIANCIVLALEQHLPDGDKTPMSERLDDTEPYFIGIFCFEAGIKIIALGFVFHKGSYLRNGWNVMDFVVVLTGILATAGTDFDLRTLRAVRVLRPLKLVSGIPSLQVVLKSIMKAMVPLLQIGLLLFFAILMFAIIGLEFYMGKFHKACFPNSTDAEPVGDFPCGKEAPARLCEGDTECREYWPGPNFGITNFDNILFAILTVFQCITMEGWTDILYNTNDAAGNTWNWLYFIPLIIIGSFFMLNLVLGVLSGEFAKERERVENRRAFLKLRRQQQIERELNGYLEWIFKAEEVMLAEEDRNAEEKSPLDAVLKRAATKKSRNDLIHAEEGEDRFADLCAVGSPFARASLKSGKTESSSYFRRKEKMFRFFIRRMVKAQSFYWVVLCVVALNTLCVAMVHYNQPRRLTTTLYFAEFVFLGLFLTEMSLKMYGLGPRSYFRSSFNCFDFGVIVGSVFEVVWAAIKPGSSFGISVLRALRLLRIFKVTKYWSSLRNLVVSLLNSMKSIISLLFLLFLFIVVFALLGMQLFGGQFNFQDETPTTNFDTFPAAILTVFQILTGEDWNAVMYHGIESQGGVSKGMFSSFYFIVLTLFGNYTLLNVFLAIAVDNLANAQELTKDEEEMEEAANQKLALQKAKEVAEVSPMSAANISIAARQQNSAKARSVWEQRASQLRLQNLRASCEALYSEMDPEERLRFATTRHLRPDMKTHLDRPLVVELGRDGARGPVGGKARPEAAEAPEGVDPPRRHHRHRDKDKTPAAGDQDRAEAPKAESGEPGAREERPRPHRSHSKEAAGPPEARSERGRGPGPEGGRRHHRRGSPEEAAEREPRRHRAHRHQDPSKECAGAKGERRARHRGGPRAGPREAESGEEPARRHRARHKAQPAHEAVEKETTEKEATEKEAEIVEADKEKELRNHQPREPHCDLETSGTVTVGPMHTLPSTCLQKVEEQPEDADNQRNVTRMGSQPPDPNTIVHIPVMLTGPLGEATVVPSGNVDLESQAEGKKEVEADDVMRSGPRPIVPYSSMFCLSPTNLLRRFCHYIVTMRYFEVVILVVIALSSIALAAEDPVRTDSPRNNALKYLDYIFTGVFTFEMVIKMIDLGLLLHPGAYFRDLWNILDFIVVSGALVAFAFSGSKGKDINTIKSLRVLRVLRPLKTIKRLPKLKAVFDCVVNSLKNVLNILIVYMLFMFIFAVIAVQLFKGKFFYCTDESKELERDCRGQYLDYEKEEVEAQPRQWKKYDFHYDNVLWALLTLFTVSTGEGWPMVLKHSVDATYEEQGPSPGYRMELSIFYVVYFVVFPFFFVNIFVALIIITFQEQGDKVMSECSLEKNERACIDFAISAKPLTRYMPQNRQSFQYKTWTFVVSPPFEYFIMAMIALNTVVLMMKFYDAPYEYELMLKCLNIVFTSMFSMECVLKIIAFGVLNYFRDAWNVFDFVTVLGSITDILVTEIANNFINLSFLRLFRAARLIKLLRQGYTIRILLWTFVQSFKALPYVCLLIAMLFFIYAIIGMQVFGNIALDDDTSINRHNNFRTFLQALMLLFRSATGEAWHEIMLSCLSNQACDEQANATECGSDFAYFYFVSFIFLCSFLMLNLFVAVIMDNFEYLTRDSSILGPHHLDEFIRVWAEYDPAACGRISYNDMFEMLKHMSPPLGLGKKCPARVAYKRLVRMNMPISNEDMTVHFTSTLMALIRTALEIKLAPAGTKQHQCDAELRKEISVVWANLPQKTLDLLVPPHKPDEMTVGKVYAALMIFDFYKQNKTTRDQMQQAPGGLSQMGPVSLFHPLKATLEQTQPAVLRGARVFLRQKSSTSLSNGGAIQNQESGIKESVSWGTQRTQDAPHEARPPLERGHSTEIPVGRSGALAVDVQMQSITRRGPDGEPQPGLESQGRAASMPRLAAETQPVTDASPMKRSISTLAQRPRGTHLCSTTPDRPPPSQASSHHHHHRCHRRRDRKQRSLEKGPSLSADMDGAPSSAVGPGLPPGEGPTGCRRERERRQERGRSQERRQPSSSSSEKQRFYSCDRFGGREPPKPKPSLSSHPTSPTAGQEPGPHPQGSGSVNGSPLLSTSGASTPGRGGRRQLPQTPLTPRPSITYKTANSSPIHFAGAQTSLPAFSPGRLSRGLSEHNALLQRDPLSQPLAPGSRIGSDPYLGQRLDSEASVHALPEDTLTFEEAVATNSGRSSRTSYVSSLTSQSHPLRRVPNGYHCTLGLSSGGRARHSYHHPDQDHWC

SEQ ID NO: 310916 - DNA, 7017 bp, Artificial Sequence
  derived and/or modified sequence
atggtccggttcggagatgaactaggcgggcggtatggtggtcccggaggaggagagagagcacgcggagggggagctgggggggcaggggggccagggcccggaggtctgcagccgggtcagcgggtgctctacaaacagtccattgcgcaaagagcacgtactatggccctctacaacccaatccccgtgaaacagaattgcttcaccgtcaacagatcactgtttgtattctcagaggacaatgttgtcaggaaatacgcaaagcggattacggagtggccaccttttgaatacatgatccttgcaactattattgccaattgtatcgttttagcacttgagcaacacttgcctgacggagataagacaccaatgtctgaaagactggatgacactgagccctattttatcggcatcttctgtttcgaggccggaatcaaaattatagccctaggatttgtgttccataaaggctcgtacctgcgaaatggatggaacgtgatggacttcgtagtggtgctgaccgggatcttagccacagcgggtacagactttgatttacgaacactcagagcggtgcgtgtgctgagaccactgaaactggtttccgggatcccatccctccaagtggtgctgaagtccatcatgaaagccatggtacctctcctgcagattggcctgctccttttctttgcaatactaatgtttgctatcataggcctggagttctatatgggcaagttccataaggcgtgcttccctaacagtaccgatgcagaaccagtcggtgactttccatgcggtaaagaagctcccgctcgactgtgtgaaggcgacactgagtgtcgcgagtattggcccggccctaattttgggattacaaacttcgacaacatcctttttgccatcctcacagtgttccagtgcatcacaatggagggatggactgatatcctgtataatactaatgatgccgctgggaacacgtggaactggctgtacttcatacccttgattattatcgggtcattcttcatgttaaatctggtattgggggtcttatctggcgaatttgcaaaagagcgcgagcgtgtcgagaaccggagggcctttctgaaactcaggcgccagcagcagatcgagcgagaacttaacggatatctggaatggatctttaaggctgaagaagtaatgctcgcagaggaggaccgcaatgccgaagagaagtctccactcgacgctgtattgaagcgagcggctaccaagaaatcacggaatgacctgattcacgccgaggagggagaggacaggtttgccgacctctgtgccgtgggatcaccatttgctcgagcctcactgaagtcaggaaaaacggagtctagcagctacttccgtcgaaaagaaaagatgtttcggttttttattcggagaatggtgaaggctcagagcttctactgggtggtactttgtgttgtcgcgctgaacactctttgcgttgctatggtccactacaaccagccacggcgcctgacaaccacactgtattttgctgagtttgtttttctgggactgtttctaacagagatgagcctcaagatgtatgggctggggcccaggtcgtacttcaggtccagttttaactgcttcgacttcggggtgatcgtgggaagcgtgtttgaagtggtgtgggcagccatcaaacccggaagtagtttcggaatctccgtcctgcgagcgctgcggctgctgcgtattttcaaagtgactaagtactggagttcattgcgcaacctcgtggtgtccctcctaaactctatgaaatcaatcatatccctgctttttttgctatttctgtttatcgtcgtgttcgctctcctgggaatgcagctatttggcgggcagtttaattttcaagatgaaacacctactactaattttgacacatttccggctgccatcttaaccgtgttccagatactgactggagaggattggaatgctgttatgtatcatggcattgaaagtcaaggcggagtgagcaaaggcatgttcagcagcttttatttcatagtcttgactctgtttggaaactacacgttattgaatgtgtttctcgccatagctgtggacaatctggccaacgcccaagagctcacaaaggacgaggaagagatggaggaagcagccaaccagaagctggcccttcaaaaggcaaaggaggtggcagaagtaagccccatgagcgctgctaatattagcatcgccgcgaggcagcagaacagcgcgaaggctcggagcgtttgggagcagagagcctctcagttacggcttcagaatctccgcgccagttgcgaggctctgtactctgaaatggatcccgaggagagactgaggttcgctacaacacggcatctgcgccctgacatgaaaacccacctcgaccggcctctcgtggttgagctcggcagagatggggcgcgaggaccagtcggaggcaaggcacgcccagaagctgccgaagctcccgagggtgtggacccaccccggcgccaccatagacatcgggataaagataagacccctgctgcgggggaccaagatagggctgaggcacctaaggctgagtctggtgaacctggcgcccgggaggaaagaccccggcctcaccgtagtcactccaaagaagccgctggcccacctgaggctaggagtgaacgcggcagaggtccagggccagagggcggtcgaaggcaccaccgaaggggatctcccgaagaggccgctgaacgcgaaccacggcgacacagggcccaccgccatcaggatccttctaaagagtgtgcaggggccaaaggcgaacgccgtgcccgccacaggggcggccctagagccggcccccgtgaagctgaatctggagaagaacccgcacgtagacaccgtgcccgacacaaggcgcagccggcccatgaagctgtagagaaggaaacaaccgagaaggaggccaccgaaaaagaagccgaaattgtggaggcagacaaagaaaaagaacttaggaatcaccaacctagagagccacattgtgatctcgagacgtctggtacagttacagtggggccaatgcacacacttccaagtacctgccttcagaaagttgaggaacagcccgaggacgcagataatcagagaaacgttaccagaatgggctctcagccacccgatcccaatacgattgttcacatccctgtgatgttaaccggaccactcggcgaggctactgtggtgccttcaggtaatgtggaccttgagtcacaagccgaaggtaagaaggaagtggaggcagacgacgtgatgaggtcaggcccccgacctatcgtcccatactcatcaatgttctgcctgtcccctactaacctgctcagacgcttctgtcactacatcgtgacaatgcgatactttgaggtagtgatactggtggtcatcgcattgtcctcaatcgccttagccgctgaagatcctgttcgtacggattcacccagaaacaacgccctcaagtacctggactacatctttacaggggtgttcacatttgaaatggtgataaaaatgatcgatctgggcttgctgctccatcctggggcctactttagggacttgtggaacatcctagatttcattgtggttagcggtgcactggtggcttttgcgttttcaggaagtaagggcaaggatataaacacaatcaagagcctccgagtgctaagagttcttcggccactgaagaccattaagcgcctgcccaagcttaaggcagtttttgactgcgtggtgaatagcctcaaaaatgtgctcaatattctaatagtctatatgctgttcatgtttatcttcgctgtcatcgcggttcaactcttcaagggtaaatttttttactgcacagatgagagtaaggagttggagagagattgtagggggcaataccttgattatgagaaagaggaggtcgaggctcaaccacgccagtggaagaagtacgactttcactacgataacgtcctttgggctctgctaactctattcactgtcagtaccggggaggggtggccaatggtgttgaaacattctgttgatgctacatatgaggaacagggaccaagcccagggtaccgcatggaactatctattttctatgtggtttactttgttgtcttccctttcttttttgtgaacatttttgtggcgctgatcatcattaccttccaggagcagggagataaagtgatgagtgagtgctcgcttgagaagaacgagagagcttgcatcgacttcgccattagtgcgaagcccctgacgcgctacatgcctcaaaacaggcagagctttcagtacaagacctggacctttgtggtttcccccccctttgaatactttattatggccatgatcgccctgaataccgtggtgttgatgatgaaattctatgacgcaccttacgaatacgaactgatgctaaagtgccttaacattgtcttcacttctatgtttagcatggagtgcgtgttgaaaataatcgcatttggtgtgctgaactactttcgcgatgcatggaacgtctttgacttcgtgaccgtcctcgggtcaattaccgacatcctagtcaccgaaatagctaacaacttcattaacctgagctttctaagactgtttcgagccgcaaggctgattaaactcctgagacagggctatactatcagaatcttgttgtggacatttgtccagtcattcaaagccctgccctatgtttgcttactgatcgcaatgctcttcttcatttacgccattatcgggatgcaggtgtttggcaacattgcactggacgatgacactagtatcaatagacataacaattttcgcacattcctccaagcactgatgctgcttttccgctccgccacaggggaggcttggcatgagatcatgttgagctgcctttctaaccaggcctgcgatgagcaagctaacgccactgaatgcggcagtgatttcgcgtacttctacttcgtgagttttatctttctttgtagcttcttaatgctgaatttgttcgtggcggtgatcatggataactttgagtacctgaccagggactcaagtattctcggacctcaccacctcgacgagttcatccgcgtatgggcagaatatgatccagccgcctgtggtcgcatatcttacaatgatatgtttgagatgctcaaacacatgtcacccccactgggcttaggaaagaaatgcccagcccgtgtcgcctataaacgactggtgcggatgaacatgcccatatcaaatgaggacatgactgtacatttcacttcaacgcttatggcactcatccgtaccgccctggagatcaaactcgcccctgccggcaccaagcagcatcaatgcgacgccgagctgagaaaagagatttccgtggtgtgggcaaatcttcctcaaaagacccttgatctgctggtgcctccacacaagccagacgagatgactgtcggcaaggtgtacgcagctctcatgatcttcgacttttataaacagaacaaaactactcgggaccaaatgcagcaggcacccggtggtctgtctcagatgggtcccgtatccctgttccatccccttaaagctacacttgagcagacacagccagccgtgctgagaggtgctcgcgtttttctgcggcagaaatcaagtacctctctgtcgaacgggggggcaattcaaaatcaggaatcaggcatcaaagagtctgtatcgtggggaacccagcgcacccaggatgccccacatgaggctcgccctcccctggagcgaggacactcaactgagatacccgtcgggcggtcaggagccctcgctgtcgacgtgcagatgcaaagcataaccagacgcggacccgatggggaaccccagccaggactggagtcacagggcagagctgcaagtatgccacggttggccgctgagacacagccagtcacagatgcaagccccatgaaacgatctatttccacgctcgcacagcgtcctcgggggactcatctgtgtagcacaacgccggaccggccacccccttctcaggcttcatctcaccaccatcaccacagatgtcataggagacgtgatcgaaagcagagatcactagaaaaaggaccctcactgtccgctgatatggacggtgctccttcgagcgcagtgggccctgggctcccaccaggagaaggccctacgggatgccgtcgcgagagggagcgcagacaggagaggggaaggagccaggagaggcggcagcctagctcgtcaagttcagagaagcagcgcttctacagctgtgacaggttcggggggagggagccccccaaacctaaaccatcactgtcaagtcaccccacgtcacccactgccggccaggaacctgggccgcatccccagggtagcggatctgtgaatggatccccgctgttaagtacctccggcgcttcaacaccgggccgcggcggtagacggcagctgccccaaacccccctcaccccccgtccatctatcacgtataaaaccgccaactcttcaccaatccattttgctggcgcccaaacatctctgcctgcattttccccgggacggctgagtaggggactctctgagcacaacgctctgttgcagcgagatccattatcgcagcccctggcacctgggagccgcattggatctgatccttatctcgggcagaggctagactccgaggcgagtgtgcatgccctcccggaggatacacttacttttgaagaggcagtggccactaattccggaaggagcagccggaccagttatgtgtctagccttacaagtcagtcacatccattgagacgcgttcctaacggataccactgcacacttggattgtcctcagggggtagggctcggcatagttaccatcatccagatcaggatcactggtgctag

SEQ ID NO: 310917 - DNA, 7014 bp, Artificial Sequence
  derived and/or modified sequence
atggtccggttcggggatgagttgggcgggagatatggtggtccaggaggcggcgagagagccaggggcggcggggctgggggagccggcggaccaggcccaggcgggctgcagcctggacaacgggttctctacaaacagtcaatcgcgcagcgcgctagaaccatggcactctacaatcccatccctgttaagcagaattgttttactgttaatcggtctttgttcgtcttctcggaggataacgtggtgcgtaaatacgccaaaaggattactgagtggccccccttcgagtacatgattttggctaccatcatagcgaattgcattgtgctggctctggaacaacacctgccggacggagataagacgccaatgagtgagcgcctggacgacactgagccatacttcataggtatcttctgcttcgaggcaggcatcaaaattattgcccttgggttcgtgtttcacaagggttcataccttcgaaacgggtggaacgtgatggatttcgtggtggtcttgacgggtatcctggccaccgctggtacggacttcgacctccggaccctgagagctgttagagttcttcgccccctgaagctggtgtcaggtatccccagtctgcaggtggtgctgaaaagtattatgaaagctatggtgcccctgctgcaaatcggcctgcttctgttttttgctattttaatgtttgctattatagggttagaattttacatgggaaaatttcataaggcctgtttcccaaacagcactgacgcagaaccagtaggcgattttccatgtggtaaagaggcacctgcaaggttgtgcgaaggagatactgagtgcagagaatactggcccggtccgaattttgggattacgaattttgacaatattctattcgctatcctcactgtgtttcagtgtatcacaatggagggctggacagacatcctttataatacaaatgatgcagcaggcaatacgtggaactggctgtacttcatcccactcattattataggctctttcttcatgttaaatcttgtactgggcgtcctttccggcgaattcgcgaaggaaagggagagggtggagaatcgacgcgcgttcctgaagctccgtcgccagcagcagattgaacgggagctgaatgggtacctcgagtggattttcaaggcagaggaggtaatgctggcagaagaggaccgcaacgcagaggagaagtctcctctcgatgttctcaaaagagcagccacgaagaaatcccgcaatgatctgatccacgccgaggaaggggaggataggttcgccgacctctgtgctgttggatcacctttcgcccgagcatcgctaaagagtggtaagacagaatcatcatcttactttaggcggaaagagaagatgttccggtttttcatacgaaggatggtcaaggcccaaagcttttactgggttgtcctgtgtgtcgtagcacttaatacactttgtgtggcaatggttcactataatcaaccccgtaggttaaccacaacactgtactttgccgagttcgtgtttctgggcctgttcctcacagagatgtctttgaagatgtacgggctggggccaaggagctacttcagatcgagcttcaattgctttgattttggcgtgatcgttggaagtgtgttcgaagtggtctgggccgccattaagccaggctccagctttggcatctctgttctgagagcactacgcctgctccgcatcttcaaggtgacaaaatattggtcctcactgcggaatcttgtggttagtctcctgaacagcatgaagagcattatttcgctgctgtttctgctctttttattcattgttgtatttgcacttctgggtatgcagctgttcggcggacagttcaactttcaggatgaaacccctaccactaacttcgacaccttccctgctgctattctgacagtgttccagatcctaacaggagaagactggaacgccgtgatgtaccacggaatagagagtcagggcggtgtttctaaaggaatgttttcgagtttttatttcatcgtgcttactctcttcggcaattataccttgctcaacgtgtttctggccattgccgtggacaatttagccaatgcacaggagctgacgaaagacgaagaggaaatggaggaagccgcaaatcagaaactggcactgcaaaaagcaaaggaagtggcagaggtctcgccgatgtcagccgctaatatttctatagctgctcggcagcagaatagcgcaaaagccagatcagtgtgggaacagcgagcatcccagctgcgcctgcagaacctccgcgcctcttgtgaggcgctctatagcgaaatggatcctgaggagcggctgaggttcgcaactactcggcatttaaggccggatatgaaaactcatctcgatagacctctggtggttgagctgggcagagacggggcacgcggacccgtgggcggtaaggcccggcccgaggcagcggaggcgccagagggcgtggatccccccagacgccaccataggcacagggacaaagacaagacacctgcagcaggcgaccaggaccgggctgaagcccctaaagcagagagcggcgagcccggagcccgggaagagcggcccaggccgcacagatcccactccaaagaggctgcgggcccacccgaggcaagaagtgaacggggacggggtcctggacccgagggcgggcgaaggcaccacagacgtggttccccagaagaagccgcagagagagagcccagaaggcacagagcccaccggcaccaggaccctagcaaagagtgtgcaggagcgaaaggtgaacggagggctagacaccggggcggtccacgtgccggccctagggaagcagaatctggagaggagcccgctaggaggcatcgggcccgacacaaggctcaacccgctcacgaggccgtggagaaggagaccactgaaaaggaggctaccgaaaaggaggccgagattgttgaagctgacaaagagaaagaactgcgcaatcaccagcctcgggaaccacactgcgacctggaaacttctgggacagttactgttggccctatgcacaccttgccctccacttgcctccaaaaggtcgaggaacaacctgaggacgcagacaaccaacggaacgtgacccgcatgggcagccagccgcctgatcccaacacaattgtgcacatcccagtgatgctcacaggaccattgggcgaggccactgtggtcccctcgggcaatgtggatctcgaatcccaggccgaaggcaagaaggaagtggaagccgatgatgtgatgcgaagcgggccaaggcctatcgtgccctactccagcatgttttgtctgtcgccaactaaccttctgaggcgcttttgtcactacatcgtaaccatgaggtactttgaggtggtgatcttggtagtgattgctttatcatccattgctctggctgctgaggaccctgtgagaacagattcacccagaaataacgcgttaaaatatctggattacatcttcacgggagtctttactttcgaaatggtcatcaagatgattgatctggggttactgcttcatccaggcgcctactttagggacctatggaacattctggatttcatagttgtgtccggcgctctcgtggcatttgctttcagcgggagcaagggcaaggacattaacacaattaagtcccttcgcgtgttacgcgtactgcggcctctgaaaacgattaagcgcttgcctaagctgaaagccgtttttgactgcgtcgtgaatagtttgaaaaatgtgttaaacatattaatcgtatatatgttatttatgttcatttttgcagtaatcgccgtgcaactgttcaagggcaagtttttttactgtaccgatgaatcgaaagagctcgaacgggattgcaggggacagtacctcgattacgagaaggaggaagtagaagctcagccgcgacagtggaagaaatacgattttcactatgataacgtactctgggcactcctgacacttttcacggtgtccactggagaaggatggcctatggttctgaagcatagcgtcgatgccacctatgaggaacaggggccatcccctgggtataggatggaattgagtatcttctacgtggtatatttcgtggtgttcccttttttctttgtcaacatcttcgttgctctcatcattataacgttccaggagcaaggtgataaggtaatgtccgagtgctcactcgagaagaacgagagagcatgtatagacttcgccatctctgcaaaacctctgacccgctacatgcctcagaatcgacagtcattccagtataagacctggacctttgtggtttctccaccttttgagtattttattatggccatgatagccctgaacaccgtagtcctgatgatgaagttctatgacgctccttatgaatacgagttgatgctgaaatgtctaaacattgtgttcacatccatgttcagcatggaatgcgttctaaaaatcatcgctttcggagtgcttaattacttccgtgacgcgtggaacgtgtttgattttgtaacggttctcggctctataaccgacattttggttaccgaaatcgctaacaatttcatcaacctgtcatttctgcgcttgtttagagcggccaggctgatcaagctactacgccaggggtataccattcggatcctgctgtggacattcgtgcagagcttcaaggccctcccttatgtgtgcctgcttattgcaatgctcttcttcatctacgcgataatcggaatgcaagtgtttggtaatatagcgttagacgacgacaccagcatcaatagacacaacaacttccgcactttcctgcaagcccttatgctcctcttccgatctgcaaccggcgaggcctggcatgaaatcatgttgagctgtctgtcaaaccaggcctgtgacgaacaggcaaacgcaacagagtgcggtagcgactttgcttacttctatttcgtctcttttatcttcttgtgttctttccttatgctgaatctgttcgttgccgtcattatggataactttgagtatcttactagagactcctctattctggggccgcaccatctggacgagtttattcgggtgtgggccgagtacgaccccgcagcatgcggcaggatttcatataatgacatgtttgaaatgctgaagcacatgtccccccccctcggtttgggcaagaagtgtcccgcaagggtggcctacaagagactcgtgcgtatgaacatgcctatttcgaatgaggatatgaccgtgcattttaccagcaccctcatggcccttattcggacagccctcgaaatcaagctagcccccgcaggtaccaagcagcaccagtgcgacgcggagctgcggaaggagattagcgtcgtatgggccaatttgccccagaaaactcttgatttacttgtgcctccgcacaaacctgacgagatgaccgtggggaaggtgtatgccgccttaatgatcttcgacttctacaaacaaaataaaacaacaagggatcagatgcagcaggcgcccggaggcctatctcagatgggacccgtctctctgtttcaccctctaaaggcgactcttgagcagacgcagccagccgtgctccgcggggccagagtctttctgagacaaaaatcttctacctccctgtccaatggaggggcaatacagaatcaggagagcggaatcaaggagtcggtcagttgggggacacagagaacgcaggacgcccctcatgaagccagacccccactggaacggggacactcaacagaaattcccgttggaaggtctggcgctctcgcggtcgacgtgcagatgcaaagcattacaaggaggggccctgacggggaaccgcagcccggcctggagtctcaagggcgggctgccagtatgcccagattggccgctgagacccaacccgtcactgacgcaagccctatgaagcggagcatatctaccctggctcaaaggccgcgtgggacccacctgtgttcaacaacgccagaccggcctccaccaagccaggctagcagtcatcatcaccaccatagatgccataggcgacgagatagaaagcaacgaagcttggaaaaaggcccttctttaagcgcagacatggacggtgccccgtctagcgctgttgggcctggtctccctccgggtgaaggcccaaccgggtgcaggagagaaagagagcgtaggcaggaaagaggtcgcagccaggaacgacggcaaccttcaagtagctcctcagagaaacaacgtttttacagttgcgacaggttcggaggaagggagccccccaagcccaaaccgtcactgtcaagtcatcccacaagccctacagcaggccaggagccagggccacacccccaaggcagcggctcggtgaacggaagccccctgctatccacctccggggcttccaccccaggtaggggcggccgccgccaactaccacagaccccactgacgccccgtccatctatcacctataagacagctaactcttcccccattcattttgcaggggcccagacttcgctgccagctttttctcctgggagactgtctcgaggattatccgagcacaatgccttgcttcagcgcgatccactgagccagcctttggccccaggatccagaatcgggtctgatccatacctgggccagagactagattcagaagccagtgttcacgcactacccgaagatacattgacattcgaggaagcggtggcgactaacagcggtcgctcgagcagaacttcttacgtgtctagcctaactagccagtcccatccactaagacgcgtgcctaacggatatcattgcacgctgggattaagcagtggcggaagggctcgccactcctaccatcatcctgaccaagatcactggtgttag

SEQ ID NO: 310918 - DNA, 7017 bp, Artificial Sequence
  derived and/or modified sequence
atggtgcgctttggagatgagctgggcggccgctatggaggccctgggggcggggagcgggcccggggcggcggggccggcggggccggcggccctggccctgggggcctgcagcccggccagagggtgctgtacaagcagagcatcgcccagagggcccggaccatggccctgtacaaccccatccctgtgaagcagaactgcttcaccgtgaacagaagcctgtttgtgttttctgaggacaacgtggtgaggaaatatgccaagaggatcacagagtggcccccatttgagtacatgatcctggccaccatcatcgccaactgcatcgtgctggccctggagcagcacctgcctgatggagacaagacccccatgtctgagcggctggatgacacagagccctacttcatcggcatcttctgctttgaagctggcatcaagatcatcgccctgggctttgtgttccacaagggcagctacctgagaaatggctggaatgtgatggactttgtggtggtgctgaccggcatcctggccacagctggaacagactttgacctgcggaccctgcgggctgtgcgggtgctgcggcccctgaagctggtgtctggcatccccagcctgcaggtggtgctgaagagcatcatgaaggccatggtgcccctgctgcagatcggcctgctgctcttctttgccatcctgatgtttgccatcatcggcctggagttctacatgggcaagttccacaaggcctgcttccccaacagcacagatgctgagcctgtgggggacttcccctgtgggaaggaggccccagcccggctgtgtgagggggacacagagtgccgggagtactggccaggccccaactttggcatcaccaactttgacaacatcctgtttgccatcctgaccgtcttccagtgcatcaccatggagggctggacagacatcctgtacaacaccaatgatgctgctggcaacacctggaactggctgtacttcatccccctcatcatcatcggcagcttcttcatgctgaacctggtgctgggcgtgctgagcggggagtttgccaaggagcgggagcgggtggagaacagaagagccttcctgaagctgcggcggcagcagcagatcgagcgggagctgaatggctacctggagtggatcttcaaggccgaggaggtgatgctggccgaggaggacagaaatgctgaggagaagagccccctggatgctgtgctgaagagagctgccaccaagaagagcagaaatgacctgattcatgctgaggagggggaggacagatttgctgacctgtgtgctgtgggcagcccctttgcccgggccagcctgaagagcggcaagacagagagcagcagctacttccggaggaaggagaagatgttccgcttcttcatccggaggatggtgaaggcccagagcttctactgggtggtgctgtgtgtggtggccctgaacaccctgtgtgtggccatggtgcactacaaccagccccggcggctgaccaccaccctgtactttgctgagtttgtgttcctgggcctcttcctgacagagatgagcctgaagatgtatggcctgggccccaggagctacttccgcagcagcttcaactgctttgattttggagtgattgtgggctctgtgtttgaggtggtgtgggccgccatcaagccaggcagcagctttggcatctctgtgctgcgggccctgcggctgctgcgcatcttcaaggtgaccaagtactggagcagcctgaggaacctggtggtgtccctgctgaacagcatgaagagcatcatcagcctgctcttcctgctcttcctgttcatcgtggtgtttgccctgctgggcatgcagctgtttggaggccagttcaacttccaggatgagacccccaccaccaactttgacaccttccctgctgccatcctgaccgtcttccagatcctgaccggggaggactggaatgctgtgatgtaccacggcatcgagagccagggcggcgtgtccaagggcatgttcagcagcttctacttcatcgtgctgaccctgtttggaaactacaccctgctgaatgtgttcctggccatcgctgtggacaacctggccaatgcccaggagctgaccaaggatgaggaggagatggaggaggccgccaaccagaagctggccctgcagaaggccaaggaggtggccgaggtgagccccatgtctgctgccaacatcagcattgctgcccggcagcagaacagcgccaaggcccggtctgtgtgggagcagagggccagccagctgcggctgcagaacctgcgggccagctgtgaggccctgtacagcgagatggaccctgaggagcggctgcgctttgccaccaccaggcacctgcggccagacatgaagacccacctggaccggcccctggtggtggagctgggcagagatggagcccggggccctgtgggcggcaaggcccggcctgaggccgctgaggcccctgagggcgtggaccccccccggcggcaccaccgccaccgggacaaggacaagaccccagctgctggggaccaggacagagctgaggcccccaaggccgagagcggggagcccggggcccgggaggagcggccccggccccacaggagccacagcaaggaggccgccggccccccagaggcccggtctgagcggggccggggccctggccctgagggcggcagaagacaccacagaagaggcagccctgaggaggccgctgagcgggagccccggcggcaccgggcccaccgccaccaggaccccagcaaagaatgtgccggggccaagggggagcggcgggcccggcacagaggaggccccagggctggcccccgggaggccgagagcggggaggagcccgcccggcggcaccgggcccggcacaaggcccagcctgcccacgaggccgtggagaaggagaccacagagaaggaggccacagagaaggaggccgagatcgtggaggccgacaaggagaaggagctgaggaaccaccagccccgggagccccactgtgacctggagaccagcggcaccgtgacagtgggccccatgcacaccctgcccagcacctgcctgcagaaggtggaggagcagccagaagatgctgacaaccagagaaatgtgaccaggatgggcagccagcccccagaccccaacaccatcgtgcacatccctgtgatgctgaccggccccctgggggaggccaccgtggtgcccagcggaaatgtggacctggagagccaggccgagggcaagaaggaggtggaggctgatgatgtgatgaggagcggcccccggcccatcgtgccctacagctccatgttctgcctgagccccaccaacctgctgcggcgcttctgccactacatcgtgaccatgagatactttgaggtggtgatcctggtggtgattgccctgagcagcatcgccctggccgcagaagatcctgtgaggacagacagccccaggaacaatgccctgaagtacctggactacatcttcaccggggtcttcacctttgagatggtgatcaagatgattgacctgggcctgctgctgcaccctggggcctacttccgggacctgtggaacatcctggacttcatcgtggtgtctggggccctggtggcctttgccttcagcggcagcaagggcaaggacatcaacaccatcaagagcctgcgggtgctgcgggtgctgcggcccctgaagaccatcaagaggctgcccaagctgaaggctgtgtttgactgtgtggtgaacagcctgaagaatgtgctgaacatcctgattgtgtacatgctgttcatgttcatctttgctgtgattgctgtgcagctgttcaagggcaagttcttctactgcacagatgagagcaaggagctggagcgggactgccggggccagtacctggactatgagaaggaggaggtggaggcccagccccggcagtggaagaagtatgacttccactatgacaacgtgctgtgggccctgctgaccctcttcaccgtgtccactggagagggctggcccatggtgctgaagcacagcgtggatgccacctatgaggagcagggccccagccctggctacaggatggagctgagcatcttctacgtggtgtactttgtggtgttccccttcttctttgtgaacatctttgtggccctgatcatcatcaccttccaggagcagggcgacaaggtgatgtctgagtgcagcctggagaagaatgaaagagcctgcatcgactttgccatcagcgccaagcccctgacccgctacatgccccagaaccggcagagcttccagtacaagacctggacctttgtggtgagccccccatttgagtacttcatcatggccatgattgccctgaacacagtggtgctgatgatgaagttctatgatgccccctatgaatatgagctgatgctgaagtgcctgaacatcgtgttcacctccatgttctccatggagtgtgtgctgaagatcatcgccttcggcgtgctgaactacttcagagatgcctggaatgtgtttgattttgtgacagtgctgggcagcatcacagacatcctggtgacagagatcgccaacaacttcatcaacctgtccttcctgcggctcttccgggccgcccggctcatcaagctgctgcggcagggctacaccatccgcatcctgctgtggacctttgtgcagagcttcaaggccctgccctacgtgtgcctgctgattgccatgctgttcttcatctatgccatcatcggcatgcaggtgtttggaaatattgccctggatgatgacaccagcatcaacagacacaacaacttccgcaccttcctgcaggccctgatgctgctcttccgcagcgccaccggggaggcctggcatgagatcatgctgagctgcctgagcaaccaggcctgtgatgagcaggccaatgccacagaatgtggcagtgactttgcctacttctactttgtgtccttcatcttcctgtgcagcttcctgatgctgaacctgtttgtggccgtcatcatggacaactttgagtacctgacccgggacagcagcatcctgggcccccaccacctggatgagttcatccgggtgtgggccgagtatgaccctgctgcctgtggccgcatctcctacaatgacatgtttgagatgctgaagcacatgagcccccccctgggcctgggcaagaagtgcccagcccgggtggcctacaagaggctggtgaggatgaacatgcccatcagcaatgaagacatgacagtgcacttcaccagcaccctgatggccctgatcagaacagccctggagatcaagctggccccagctggcaccaagcagcaccagtgtgatgctgagctgaggaaggagatctctgtggtgtgggccaacctgccccagaagaccctggacctgctggtgcccccccacaagccagatgagatgacagtgggcaaggtgtatgctgccctgatgatctttgacttctacaagcagaacaagaccacccgggaccagatgcagcaggcccctgggggcctgagccagatgggccctgtgtccctcttccaccccctgaaggccaccctggagcagacccagcctgctgtgctgcggggggcccgggtcttcctgcggcagaagagcagcaccagcctgagcaatggaggagccatccagaaccaggagagcggcatcaaggagagcgtgtcctggggcacccagaggacccaggatgcccctcatgaggcccggccccccctggagcggggccacagcacagagatccctgtgggccgcagcggggccctggccgtggatgtgcagatgcagagcatcacccggcggggcccagatggagagccccagcccggcctggagagccagggccgggccgcctccatgccccggctggccgctgagacccagcctgtgacagatgccagccccatgaagaggagcatcagcaccctggcccagaggccccggggcacccacctgtgcagcaccaccccagaccggcccccacccagccaggccagcagccaccaccaccaccaccgctgccacagaagaagagacaggaagcagaggagcctggagaagggccccagcctgtctgctgacatggatggagcccccagcagcgctgtgggccctggcctgcccccaggagagggccccaccggctgccggcgggagcgggagcggcggcaggagcggggccgcagccaggagcggcggcagcccagcagcagcagcagcgagaagcagcgcttctacagctgtgacagatttggaggccgggagccccccaagcccaagcccagcctgagcagccaccccaccagccccacagctggccaggagcccggcccccacccccagggcagcggctctgtgaatggcagccccctgctgagcaccagcggggccagcaccccaggccggggcggccggcggcagctgccccagacccccctgaccccccggcccagcatcacctacaagacagccaacagcagccccatccactttgctggggcccagaccagcctgcctgccttcagccctggccgcctgagccggggcctgtctgagcacaatgccctgctgcagagggaccccctgagccagcccctggcccctggcagcagaattggaagtgacccctacctgggccagaggctggacagcgaggcctctgtgcacgccctgcctgaggacaccctgacctttgaggaggccgtggccaccaacagcggccgcagcagcaggaccagctatgtgagcagcctgaccagccagagccaccccctgcggcgggtgcccaacggctaccactgcaccctgggcctgagcagcggcggccgggcccggcacagctaccaccacccagaccaggaccactggtgctag

SEQ ID NO: 310919 - DNA, 7014 bp, Artificial Sequence
  derived and/or modified sequence
atggtgcgctttggagatgagctgggcggccgctatggaggccctgggggcggggagcgggcccggggcggcggggccggcggggccggcggccctggccctgggggcctgcagcccggccagagggtgctgtacaagcagagcatcgcccagagggcccggaccatggccctgtacaaccccatccctgtgaagcagaactgcttcaccgtgaacagaagcctgtttgtgttttctgaggacaacgtggtgaggaaatatgccaagaggatcacagagtggcccccatttgagtacatgatcctggccaccatcatcgccaactgcatcgtgctggccctggagcagcacctgcctgatggagacaagacccccatgtctgagcggctggatgacacagagccctacttcatcggcatcttctgctttgaagctggcatcaagatcatcgccctgggctttgtgttccacaagggcagctacctgagaaatggctggaatgtgatggactttgtggtggtgctgaccggcatcctggccacagctggaacagactttgacctgcggaccctgcgggctgtgcgggtgctgcggcccctgaagctggtgtctggcatccccagcctgcaggtggtgctgaagagcatcatgaaggccatggtgcccctgctgcagatcggcctgctgctcttctttgccatcctgatgtttgccatcatcggcctggagttctacatgggcaagttccacaaggcctgcttccccaacagcacagatgctgagcctgtgggggacttcccctgtgggaaggaggccccagcccggctgtgtgagggggacacagagtgccgggagtactggccaggccccaactttggcatcaccaactttgacaacatcctgtttgccatcctgaccgtcttccagtgcatcaccatggagggctggacagacatcctgtacaacaccaatgatgctgctggcaacacctggaactggctgtacttcatccccctcatcatcatcggcagcttcttcatgctgaacctggtgctgggcgtgctgagcggggagtttgccaaggagcgggagcgggtggagaacagaagagccttcctgaagctgcggcggcagcagcagatcgagcgggagctgaatggctacctggagtggatcttcaaggccgaggaggtgatgctggccgaggaggacagaaatgctgaggagaagagccccctggatgtgctgaagagagctgccaccaagaagagcagaaatgacctgattcatgctgaggagggagaagatagatttgctgacctgtgtgctgtgggcagcccctttgcccgggccagcctgaagagcggcaagacagagagcagcagctacttccggaggaaggagaagatgttccgcttcttcatccggaggatggtgaaggcccagagcttctactgggtggtgctgtgtgtggtggccctgaacaccctgtgtgtggccatggtgcactacaaccagccccggcggctgaccaccaccctgtactttgctgagtttgtgttcctgggcctcttcctgacagagatgagcctgaagatgtatggcctgggccccaggagctacttccgcagcagcttcaactgctttgattttggagtcatcgtgggctctgtgtttgaggtggtgtgggccgccatcaagccaggcagcagctttggcatctctgtgctgcgggccctgcggctgctgcgcatcttcaaggtgaccaagtactggagcagcctgaggaacctggtggtgtccctgctgaacagcatgaagagcatcatcagcctgctcttcctgctcttcctgttcatcgtggtgtttgccctgctgggcatgcagctgtttggaggccagttcaacttccaggatgagacccccaccaccaactttgacaccttccctgctgccatcctgactgtgttccagatcctgactggagaggactggaatgctgtgatgtaccatggaattgagagccagggcggcgtgtccaagggcatgttcagcagcttctacttcatcgtgctgaccctgtttggaaactacaccctgctgaatgtgttcctggccatcgctgtggacaacctggccaatgcccaggagctgaccaaggatgaggaggagatggaggaggccgccaaccagaagctggccctgcagaaggccaaggaggtggccgaggtgagccccatgtctgctgccaacatcagcattgctgcccggcagcagaacagcgccaaggcccggtctgtgtgggagcagagggccagccagctgcggctgcagaacctgcgggccagctgtgaggccctgtacagcgagatggaccctgaggagcggctgcgctttgccaccaccaggcacctgcggccagacatgaagacccacctggaccggcccctggtggtggagctgggcagagatggagcccggggccctgtgggcggcaaggcccggcctgaggccgctgaggcccctgagggcgtggaccccccaagaagacaccaccgccaccgggacaaggacaagaccccagctgctggggaccaggacagagctgaggcccccaaggccgagagcggggagcccggggcccgggaggagcggccccggccccacaggagccacagcaaggaggccgccggccccccagaggcccggtctgagcggggccggggccctggccctgagggcggccgccgccaccaccggcggggcagccctgaggaggccgctgagcgggagcccaggaggcaccgggcccaccgccaccaggaccccagcaaagaatgtgccggggccaagggggagcggcgggcccggcaccggggcggcccccgggccggcccccgggaggccgagagcggggaggagcccgcccggcggcaccgggcccggcacaaggcccagcctgcccatgaagctgtggagaaggagaccacagagaaggaggccacagagaaggaggccgagatcgtggaggccgacaaggagaaggagctgaggaaccaccagccccgggagccccactgtgacctggagaccagcggcaccgtgacagtgggccccatgcacaccctgcccagcacctgcctgcagaaggtggaggagcagccagaagatgctgacaaccagagaaatgtgaccaggatgggcagccagcccccagaccccaacaccatcgtgcacatccctgtgatgctgaccggccccctgggggaggccaccgtggtgcccagcggaaatgtggacctggagagccaggccgagggcaagaaggaggtggaggctgatgatgtgatgaggagcggcccccggcccatcgtgccctacagctccatgttctgcctgagccccaccaacctgctgcggcgcttctgccactacatcgtgaccatgagatactttgaggtggtgatcctggtggtgattgccctgagcagcatcgccctggccgctgaggaccctgtgaggacagacagccccagaaataatgccctgaagtacctggactacatcttcaccggggtcttcacctttgagatggtgatcaagatgattgacctgggcctgctgctgcaccctggggcctacttccgggacctgtggaacatcctggacttcatcgtggtgtctggggccctggtggcctttgccttcagcggcagcaagggcaaggacatcaacaccatcaagagcctgcgggtgctgcgggtgctgcggcccctgaagaccatcaagaggctgcccaagctgaaggctgtgtttgactgtgtggtgaacagcctgaagaatgtgctgaacatcctgattgtgtacatgctgttcatgttcatctttgctgtgattgctgtgcagctgttcaagggcaagttcttctactgcacagatgagagcaaggagctggagcgggactgccggggccagtacctggactatgagaaggaggaggtggaggcccagccccggcagtggaagaagtatgacttccactatgacaacgtgctgtgggccctgctgaccctcttcaccgtgtccactggagagggctggcccatggtgctgaagcacagcgtggatgccacctatgaggagcagggccccagccctggctacaggatggagctgagcatcttctacgtggtgtactttgtggtgttccccttcttctttgtgaacatctttgtggccctgatcatcatcaccttccaggagcagggcgacaaggtgatgtctgaatgttccctggagaagaatgaaagagcctgcatcgactttgccatcagcgccaagcccctgacccgctacatgccccagaaccggcagagcttccagtacaagacctggacctttgtggtgtccccaccatttgagtacttcatcatggccatgattgccctgaacacagtggtgctgatgatgaagttctatgatgccccctatgaatatgagctgatgctgaagtgcctgaacatcgtgttcacctccatgttctccatggagtgtgtgctgaagatcatcgcctttggagtgctgaactacttcagagatgcctggaatgtgtttgattttgtgacagtgctgggcagcatcacagacatcctggtgacagaaattgccaacaacttcatcaacctgtccttcctgcggctcttccgggccgcccggctcatcaagctgctgcggcagggctacaccatccgcatcctgctgtggacctttgtgcagagcttcaaggccctgccctacgtgtgcctgctgattgccatgctgttcttcatctatgccatcatcggcatgcaggtgtttggaaacatcgccctggatgatgacaccagcatcaacagacacaacaacttccgcaccttcctgcaggccctgatgctgctcttccgcagcgccactggagaggcctggcatgagatcatgctgagctgcctgagcaaccaggcctgtgatgagcaggccaatgccacagaatgtggcagtgactttgcctacttctactttgtgtccttcatcttcctgtgcagcttcctgatgctgaacctgtttgtggccgtcatcatggacaactttgagtacctgacccgggacagcagcatcctgggcccccaccacctggatgagttcatccgggtgtgggccgagtatgaccctgctgcctgtggccgcatctcctacaatgacatgtttgagatgctgaagcacatgagcccccccctgggcctgggcaagaagtgcccagcccgggtggcctacaagaggctggtgaggatgaacatgcccatcagcaatgaagacatgacagtgcacttcaccagcaccctgatggccctgatcagaacagccctggagatcaagctggccccagctggcaccaagcagcaccagtgtgatgctgagctgaggaaggagatctctgtggtgtgggccaacctgccccagaagaccctggacctgctggtgcccccccacaagccagatgagatgacagtgggcaaggtgtatgctgccctgatgatctttgacttctacaagcagaacaagaccacccgggaccagatgcagcaggcccctgggggcctgagccagatgggccctgtgtccctcttccaccccctgaaggccaccctggagcagacccagcctgctgtgctgcggggggcccgggtcttcctgcggcagaagagcagcaccagcctgagcaatggaggagccatccagaaccaggagagcggcatcaaggagagcgtgtcctggggcacccagaggacccaggatgcccctcatgaggcccggccccccctggagcggggccacagcacagagatccctgtgggccgcagcggggccctggccgtggatgtgcagatgcagagcatcacccggcggggcccagatggagagccccagcccggcctggagagccagggccgggccgcctccatgccccggctggccgctgagacccagcctgtgacagatgccagccccatgaagaggagcatcagcaccctggcccagaggccccggggcacccacctgtgcagcaccaccccagaccggcccccacccagccaggccagcagccaccaccaccaccaccgctgccacagaagaagagacaggaagcagaggagcctggagaagggccccagcctgtctgctgacatggatggagcccccagcagcgctgtgggccctggcctgcccccaggagagggccccaccggctgcagaagagagcgggagcggcggcaggagcggggccgcagccaggagcggcggcagcccagcagcagcagcagcgagaagcagcgcttctacagctgtgacagatttggaggccgggagccccccaagcccaagcccagcctgagcagccaccccaccagccccacagctggccaggagcccggcccccacccccagggcagcggctctgtgaatggcagccccctgctgagcaccagcggggccagcaccccaggccggggcggccggcggcagctgccccagacccccctgaccccccggcccagcatcacctacaagacagccaacagcagccccatccactttgctggggcccagaccagcctgcctgccttcagccctggccgcctgagccggggcctgtctgagcacaatgccctgctgcagagggaccccctgagccagcccctggcccctggcagccgcatcggcagtgacccctacctgggccagaggctggacagcgaggcctctgtgcacgccctgcctgaggacaccctgacctttgaggaggccgtggccaccaacagcggccgcagcagcaggaccagctatgtgagcagcctgaccagccagagccaccccctgcggcgggtgcccaacggctaccactgcaccctgggcctgagcagcggcggccgggcccggcacagctaccaccacccagaccaggaccactggtgctag

SEQ ID NO: 310920 - DNA, 7017 bp, Artificial Sequence
  derived and/or modified sequence
atggtgcggttcggcgacgagctgggcggccggtacggcggccccggcggaggcgagcgcgctagagggggaggggcagggggtgctggtggtccaggtccaggcggtctccaacctggacagagagttctctataagcaatccatagctcagcgggccagaaccatggccctgtataatcctatcccagtgaagcagaactgtttcacagtgaaccgatccttgttcgtcttctccgaggataacgtagtcagaaagtacgctaagcggattactgagtggccccccttcgaatatatgattctcgccactattatcgcaaactgtattgtactggcactggagcagcacctccctgacggagacaaaacacctatgtctgaaagattggacgacaccgagccatacttcatcgggattttctgctttgaagccgggatcaagatcatagccctgggcttcgtgttccataaggggtcgtacctgcgtaatggttggaatgtgatggactttgttgttgtcctgactggaatactggcaacagctggcacagactttgatcttcggacactgagggctgtccgtgtcctgagaccactcaagctggtctcgggcattccatccctgcaggttgtcctgaaaagtatcatgaaggccatggtgcctctccttcaaataggtctcctactgttttttgccattcttatgtttgccatcattggcttggagttctatatgggtaagttccataaagcgtgctttcctaattccaccgatgctgaaccggtgggagattttccttgtggcaaagaggcaccagcccgactttgcgagggcgacacggagtgtagagagtattggccggggccaaatttcggaatcaccaatttcgacaatatcctgtttgctatactcaccgtttttcagtgtatcaccatggaaggttggaccgatattctctacaacacaaacgatgctgccggtaatacttggaactggctttacttcattccacttattattattggcagcttctttatgcttaatttggtcctaggggtgctttctggagaatttgctaaggaacgggagagggtagagaatagaagagcgtttcttaaactgcgccgacagcaacagatcgaaagggagctgaatggctacctcgagtggatcttcaaagccgaggaggtgatgttggccgaggaagataggaacgcggaggagaagagccccttagacgccgtgctaaagcgtgccgctacaaagaagagtcgcaatgatcttatccacgccgaagaaggggaagatcggttcgctgatttatgtgctgtcggatcgccatttgcccgtgcgtctttgaagagcgggaagactgagagcagctcatacttccgacgcaaggagaaaatgttccggttctttattaggcgcatggtgaaagcacagagcttttattgggtagtactttgcgtggtcgccctcaacactttgtgcgtggcaatggtgcactataaccagcccagacggctgaccacaaccctgtatttcgctgaattcgtgtttctggggctgttcctgacagagatgtcccttaaaatgtacggtctgggccctcggtcttatttcaggagctccttcaattgtttcgactttggcgtgatcgtggggagtgtctttgaggtggtgtgggcagctatcaaacccgggtcctcttttgggattagtgtcctgagagccctccgcctgttgcgcatttttaaggtgactaagtactggagcagcctcagaaacctggtggtgagccttctcaattcgatgaagagcattatttcccttctgttcttactttttctctttatagttgtgtttgcccttttaggaatgcagctctttggcggccagttcaattttcaagacgagacacctactaccaactttgatacttttcccgcagccatcctcaccgtgtttcagatcctcaccggggaggactggaatgcggtgatgtaccacgggattgagagccagggcggcgtaagcaaagggatgttcagcagtttctacttcatagtgctcacgctctttggtaattacactctccttaacgtgtttcttgcaatcgcagtggacaacctggcgaacgctcaagaactgactaaggacgaagaagaaatggaggaagccgcaaatcagaagctggccttgcagaaggcgaaagaggtggctgaggtatcacctatgtccgctgcaaacatttccattgctgcgcgccaacagaattcagctaaagcccgctctgtgtgggagcaacgcgcgagccagctccgactgcagaacctgagggcctcgtgcgaggcactgtactctgagatggatccagaggagaggctaaggtttgcaactaccaggcacctccgacctgacatgaaaacccacctggacagaccgctagttgtggaacttggaagagatggggctaggggcccggtggggggcaaggcccgcccagaggcagccgaagctccagagggagttgaccccccccggcggcatcatcgtcatagggacaaggacaagactcccgccgctggggaccaggaccgcgccgaggcccccaaggcggagagtggggagcctggagctcgggaagagcggccaaggccccatcgtagccactctaaggaggccgctggtcctcctgaggccaggtcggaacgcggccgcggacccggccctgaagggggtcgccgccatcaccgtcggggctccccggaagaggccgcagaacgagaaccaaggcgccaccgggcccatcgtcaccaggatccgagtaaagagtgtgccggcgcgaaaggggaacgccgtgctcgtcacagaggtgggccgcgcgccggaccccgtgaggccgaaagcggggaggagcctgccaggaggcacagggcacggcacaaagctcagcctgcacatgaagctgtggagaaggagactactgaaaaggaggccacggagaaagaggcagaaattgtggaagctgataaagaaaaagagctgcgcaaccaccagccccgcgagccgcactgtgatctggagacatccggcaccgtgacagtggggccaatgcacactctcccttccacatgtctgcagaaggtggaggagcagcccgaagatgctgataaccagcgcaacgtgactagaatgggcagtcagcctccagaccctaatacgattgttcatatccccgtgatgctgactggacccctgggtgaggcgaccgtggtgccctccggaaacgttgatctggagtcccaggctgagggaaaaaaagaggtggaagcagacgacgtgatgagaagtggcccaagacccatcgtcccttactctagcatgttttgtctgagtccaactaacctgctcagacgtttctgccattatattgtaactatgcggtatttcgaggtcgtcatattagtggttatagctctgtcctcaattgctctggccgcggaggatcctgtccggacagatagtccgaggaataacgccctcaagtacttagactatattttcaccggcgtcttcacttttgaaatggtgatcaagatgatagatttgggtctgcttctgcacccaggcgcttacttcagagatctctggaatattcttgatttcatagtggtttccggcgcactggtggccttcgccttctcaggcagcaagggcaaagacatcaacactatcaaatccctgcgagtgctgcgtgtccttcggcccttgaaaacaatcaagaggctacccaagttaaaggccgtatttgattgtgtggttaatagtctcaagaatgtcctaaatatcctgatagtttacatgctcttcatgtttatctttgcagtaatagccgtacagttgttcaaaggaaagttcttttactgcacagacgagagcaaagagctagagcgggattgtcgcggccaatacctggactacgagaaagaagaggttgaagctcagcctaggcagtggaagaagtacgatttccactacgataatgttctttgggctctattaaccctcttcacagttagtaccggcgagggctggcccatggtgcttaagcatagcgttgacgctacctatgaggagcagggtccctcaccggggtataggatggaattgagtattttctacgtcgtgtattttgtggtgtttccctttttttttgtcaacatattcgtcgcgctgataatcattacattccaggaacagggggacaaggtcatgtcggagtgtagccttgaaaagaatgaaagggcttgcatcgacttcgctatctcagcgaagcctctgacaaggtacatgccacaaaaccgtcagtctttccaatataaaacttggaccttcgtcgttagtccgccctttgaatacttcatcatggccatgatcgcactgaatactgtcgtactaatgatgaagttctacgatgctccttacgagtatgaactgatgctcaagtgcctgaacatcgtctttacctcaatgttttccatggagtgtgtgcttaagatcattgcgtttggggtcctcaactactttagagacgcctggaatgtgttcgacttcgtgacagtgcttgggtccattacggacatcctggttactgagatcgctaataacttcattaatttgagcttccttaggctttttagagccgctaggctgatcaaattgctgcggcaaggatatactattcggatcctactttggactttcgttcagtcatttaaggcattaccgtacgtgtgcctccttatagcaatgttgtttttcatttacgctatcattgggatgcaggtttttgggaatatcgcccttgacgatgacacatccataaacaggcataacaactttagaacgtttctccaggccctgatgctcctcttccggtccgctacaggggaggcgtggcatgaaattatgctgagctgcctgagtaatcaagcttgtgacgagcaagccaatgccaccgagtgtgggtccgactttgcttacttctactttgtatctttcatcttcctctgcagctttctcatgctcaacttgttcgtcgctgtgatcatggataacttcgagtacctcaccagggactcctcgatactagggccccaccatctagatgaattcatccgggtttgggctgaatatgatcctgctgcatgtggaagaatctcttacaatgatatgttcgaaatgctgaagcacatgtctccaccgcttggcctgggcaaaaaatgtcccgcaagagtcgcctataaacgactggtccgcatgaacatgcctatatccaatgaagatatgacagtacattttaccagtaccctcatggctctcattcgtactgctttggagatcaaattggcacccgctggtacgaagcagcaccaatgcgacgccgagctgcggaaggagatatccgttgtatgggcaaatctgccacagaaaaccttagacctcttggtgcccccgcataagccagacgaaatgacagtcggaaaggtgtatgctgccctcatgattttcgacttctacaagcagaacaaaacaacaagagatcagatgcagcaggctccgggaggtctttcgcagatgggtccagtgagcctgttccacccattgaaagcaacccttgagcagactcagccagccgttcttcgaggggcccgggtttttctgagacaaaagtcttctactagcttgtcaaatgggggcgctatccagaatcaggagtccggaatcaaagaaagcgtcagctggggcacacaaaggacccaagatgcccctcacgaggctagacctcccctggaacgaggtcactctacggaaatccccgttggcagatctggggcccttgcagtggacgtgcaaatgcaatcaattaccagaagaggtcccgacggcgagccccagcccgggctggaatcccaggggcgggcggcctctatgccaagactggcggctgaaacccagcccgtcacagacgcatcacctatgaaaaggagcatttccaccctcgcacagcggcctagggggacccacctgtgctctaccactcctgaccgtccacctccttctcaggctagtagtcaccatcaccatcaccgatgtcatcgacgacgcgataggaagcagaggtctttagagaagggaccctccctctccgcagacatggatggcgcccccagtagcgccgtcggaccgggcttgccgcccggggaaggaccaaccgggtgccggagagaacgggagaggaggcaagagagaggccggtcacaggagcgccgacagccctcttcttctagctccgagaagcagcgcttttacagttgcgatcgctttggcggcagggagccacctaaacctaaacccagtctctctagccacccaactagccccaccgccgggcaggaacctggcccacatccacagggcagcggctcggtgaatggctctcctcttctcagcacctccggtgctagcaccccggggagaggcggacgccgccagcttccacagacccctctgacgcctagacctagcataacgtacaaaaccgccaattcatcccccattcactttgctggggctcagaccagcctccccgcctttagtcccggacggttatcacggggtctgtcagagcacaatgctttgctgcagagagatcccctttctcagcctctggcccctggatctcggattggtagtgatccatatctgggccagcgcttagactccgaagcctctgtgcacgccttacccgaggatactctgacctttgaagaggccgtagccactaattccgggcgatccagccggacatcatacgtgtcctccctaacaagtcagagccacccccttcggagggttcctaacggataccactgtaccctcgggctgagtagtggcggcagagcgcgccactcctatcaccatcctgatcaggatcactggtgttag

SEQ ID NO: 310921 - DNA, 7014 bp, Artificial Sequence
  derived and/or modified sequence
atggtgcggttcggcgacgagctgggcggccggtacggcggccccggcggaggagagagagccagaggcggtggtgccgggggagccggagggccgggcccaggggggttgcaacctgggcagagagttttgtataagcagtccattgcccagagagcacgaacaatggccctttacaaccccattcccgtgaaacagaactgctttaccgttaatcggtcactctttgtcttctcagaggataacgtggttcgcaagtatgcaaagcgaatcaccgaatggccacctttcgaatatatgatcctggctactatcatagcaaattgtatagtcctggcccttgagcagcatctccctgatggggataagacgcctatgtccgaaaggctggatgataccgaaccctattttatcgggatcttttgcttcgaggcagggatcaaaatcatagcattgggtttcgtcttccacaaaggctcctatctgcgcaatgggtggaacgtgatggatttcgtggtcgttctcacaggtattctcgccactgctggcacagatttcgacctgcggacacttcgtgccgtcagagtcttgcgtccgttaaaattagtgtctgggatcccttcgctgcaggtggtcttaaagagtatcatgaaagcaatggtgcctctcctgcagataggtctgctactgttctttgcaatcctgatgttcgctataatcggcctggaattttacatgggaaagttccacaaagcctgcttcccaaactcaaccgacgcagagcccgtcggagactttccctgtggaaaggaggcgcctgctcggctctgtgagggagacacggagtgccgggagtattggccagggcccaatttcgggatcactaacttcgataacattctgtttgcaatactgaccgtatttcagtgcattaccatggagggatggacagatatcctgtacaacacgaacgacgccgctggtaacacatggaactggttgtatttcataccacttattattataggatcttttttcatgttgaatcttgtgctgggagtactgtctggggaatttgccaaggagagagagagagtggagaatcgccgcgccttcctcaagctccgcagacagcaacagatcgagagagagctgaacggctatcttgaatggatcttcaaagctgaggaagtcatgctcgccgaggaagacagaaatgcagaagagaagagccccctcgacgtcttgaaacgtgcagccacgaaaaaaagcagaaatgatcttattcacgccgaagagggcgaagatcgtttcgccgatctgtgtgctgtcggctcccccttcgcacgcgctagccttaagagcggtaagaccgaatctagctcatacttccgacgcaaggaaaagatgtttcgcttcttcatccggcggatggtgaaagcacagagcttctattgggtggtcctgtgcgtggtagccttgaacacactgtgcgtcgccatggtgcattataaccagccccgccgtctgaccaccacactttactttgcggaattcgtgttcttggggctgtttttaaccgagatgagcctgaagatgtacggcctgggcccaaggagctacttcaggagttccttcaactgcttcgactttggtgttatagtcggctccgtgtttgaagtggtatgggcagcaataaagccaggaagctcgttcggcatttccgtcctgcgtgccttgcggctcctgcgcattttcaaggtgaccaagtactggtcctccctacgaaatttagtggtgtctctcctgaatagtatgaagtctatcatctccctcctgtttctgttgttcctcttcattgtagtttttgcactcctgggtatgcagctgtttggcggacagttcaacttccaagacgagacacctaccactaactttgacacttttcctgcggccatcctgactgtgttccagatcttaacaggcgaagactggaacgccgtgatgtatcatggcatcgaaagccagggaggcgtatcgaagggcatgttctcgtcattttactttatcgtgctgactcttttcggcaactatactttgcttaacgtgtttcttgccatagcagtggacaacttggctaatgctcaagagttgactaaggacgaggaagaaatggaggaagcggctaaccagaaactggctctgcagaaagccaaggaggtggccgaagtatctcccatgagcgccgctaatatatcgatcgccgcccggcagcagaacagtgcaaaggccagaagcgtttgggaacagagagcctctcagctgcggctgcagaatctgcgggccagttgtgaagccctgtactctgaaatggaccctgaggagcggttgcggttcgcaacaacacgtcacctcaggcctgatatgaagactcatttagatcgtccactcgtggtggagcttggaagagatggcgcgcgtggtcctgtggggggaaaggccaggcctgaagcagcagaagcacctgaaggggtcgatccgccccggaggcatcatagacacagggacaaggataagaccccggccgcaggtgaccaagatcgggcagaggcacccaaggcagaatctggtgaacccggcgcgagagaggaacgcccccggccgcatcgcagtcactcaaaagaggctgcagggcctccggaggccaggtccgagagaggtagaggaccagggcctgaaggaggtcgacggcatcaccggaggggctccccggaggaggctgccgagcgggagccacgcagacaccgagcccacagacaccaggacccctcgaaagagtgcgcaggagccaagggggaaaggcgagctagacaccgcggcggtcccagagccggacctcgcgaggccgaatctggagaggaacctgctcgtagacacagagccagacataaggcacaaccagcccatgaggctgtggaaaaggaaacgacagagaaagaagctacagagaaagaggccgagatcgtcgaggctgacaaggagaaagagctcagaaaccaccagccccgagagccacattgcgatctcgaaacctccggtactgtgactgtgggccccatgcacaccttaccatccacctgcttacaaaaggttgaggaacaacccgaggatgctgataaccagcgcaatgtgacaagaatgggctcccagccccccgatcctaacaccatcgtgcacataccagtcatgctcactggcccgctgggcgaagcaacagtagtgccctcggggaatgtcgatttggagtctcaggccgagggaaagaaagaagttgaagccgacgatgtgatgagatctggcccaaggccgattgtcccttactcaagcatgttttgcctgtcgcccactaacctactaaggagattctgtcactacatagtgactatgagatactttgaagtggtaatcttagtagtcatcgccctgtcttctatcgcccttgccgccgaggatccggtccgcaccgactccccgagaaataatgccctcaagtacttggactatatcttcaccggggtcttcacatttgagatggttattaaaatgatagacctaggactgcttctgcatcctggggcatatttccgggacctgtggaacatcctggattttatagtggtgtccggggcactagtagccttcgcatttagtggctctaagggcaaggatatcaacaccataaagtctctgagagttctacgagtcttgagaccactgaagaccattaagcgtctgcccaaactcaaagcagtgtttgattgtgtggtgaacagcctaaaaaatgttctcaacatacttattgtctatatgctgttcatgtttatatttgccgtgatagccgttcagctatttaagggaaagttcttctattgtaccgatgaaagtaaagaactggagagagactgtagaggtcagtacctagattatgaaaaagaagaggtggaagcccagccgcgacagtggaagaaatacgactttcactacgacaacgtgctgtgggcgctgctgactttgtttaccgtttctactggggaaggctggcctatggtgttgaaacatagcgtggatgcgacgtatgaggaacagggccccagccccggctatcgaatggaactctcaatcttctacgttgtatactttgtggtgttcccatttttcttcgtgaatatttttgtggccctgatcatcatcactttccaagaacagggcgacaaggtgatgtctgagtgcagtcttgagaaaaatgaacgggcttgcattgatttcgcaatctctgctaagccactcactcgctacatgccacagaaccgccagtctttccagtacaaaacctggacctttgtggtgagccctcccttcgaatacttcatcatggccatgatcgcgttaaatacagttgtgctgatgatgaagttctacgatgcgccatatgaatatgaactaatgctgaagtgcttgaacatagtcttcacatccatgttttccatggagtgtgttttaaagatcatcgcctttggagtcctgaactatttccgagacgcctggaatgtgttcgactttgtgactgtgctgggctccataacagacatcctcgttaccgagattgccaataattttatcaatttgagctttttacggctctttagggctgctaggttaattaagttgttacgccaaggatatacaatccggatcctgttgtggaccttcgtccagtctttcaaggccctgccctacgtgtgcctcctgatcgctatgctcttttttatatatgccattatcgggatgcaggtgttcggaaacatagctctggatgacgacacgtccatcaataggcacaacaactttaggacatttttgcaggcactgatgctcctcttcaggagcgcaacgggcgaagcctggcatgaaataatgttatcatgcctgtccaatcaggcatgcgacgaacaagcaaacgctacagaatgcggttccgactttgcttacttctattttgttagctttatttttctgtgctccttcttaatgttaaacttgtttgtggccgtgattatggacaactttgagtatttaaccagagacagctcgattctggggccacatcatttagatgaattcatccgcgtctgggcagagtatgatccagccgcttgtggacggatcagttacaacgacatgttcgaaatgcttaaacacatgagccctcccttgggccttggaaagaagtgccctgccagagtggcctataagcgcctggtgagaatgaacatgccgatctccaatgaggacatgacagtgcacttcacctccacactgatggcgttgattaggactgctctggagataaaactagctccggccggcactaaacagcatcagtgtgacgccgaactgcgtaaagagatctctgtggtgtgggctaacctgccacagaagacacttgatctgctcgtcccaccacacaagcccgacgagatgaccgtgggtaaggtgtacgctgctttaatgattttcgacttctataaacagaataaaacaaccagagaccaaatgcaacaggcacccgggggcttgagccagatgggtcccgtgagcctcttccaccccctcaaggcgacacttgagcagacccagcccgccgttttgaggggcgctcgggtgttcttaaggcagaaaagtagcacctctctttcgaatggcggagccatccagaatcaggagtctggcatcaaagaaagcgtgagctgggggacccagaggacacaggacgcaccacatgaggcacggccaccactcgagcgaggccactccaccgagattcccgttggccggagcggtgccctcgctgtggatgtccaaatgcagtcgattaccagacgcggaccggatggggaaccccagcccgggcttgagagtcaggggcgggcagccagcatgcctcgcctcgcggctgaaactcaacccgtgacagatgcttcacctatgaagagaagcatatctactctcgctcagcgtccacgaggaactcatttgtgctcaacaacgcctgaccggcctccgccttcccaggcctcttcccaccatcaccatcatcggtgccacaggagaagagacaggaagcaaaggagcctggagaagggccccagtctctccgccgatatggacggtgcaccatcgagcgccgtcggcccaggactgccacccggtgagggaccgacaggctgcaggagggagcgggagaggcgacaagaacgtggacgctcccaggagcgtcgccaacccagctcatcaagctccgagaaacagcggttttatagctgtgatcgtttcggtgggcgggagcctccgaagcccaagccatcactgtcttcccaccccactagtccaaccgcgggtcaggagccagggccacacccacagggttctggtagtgtgaatgggtcccctttgctctctacaagtggcgcatcaactcccggtaggggagggagacgacaactgccgcagactccccttacacctcggccaagcatcacttacaagactgctaatagctcacccatccactttgccggagctcagaccagtttgccagccttctcccctgggcgcctctccagaggcctctcggagcataacgcgttgttacagagggatcccctgagccagccgctcgcacctggtagcagaatcggaagcgacccctatttaggccaaagactagactccgaagctagcgtacatgccctgcctgaggacacattgaccttcgaagaggccgtggccaccaatagtgggcggtcatcgagaaccagctacgtgtccagcctgaccagtcagtcacacccactgaggagagtccctaatggatatcattgtaccctaggcctttcctctgggggacgtgccagacactcataccatcatccagaccaggatcattggtgctag

SEQ ID NO: 310922 - DNA, 7016 bp, Artificial Sequence
  derived and/or modified sequence
atggtcaggttcggagatgagctgggcggaaggtacggcggacctggaggcggtgagcgggcacgcggaggtggtgcaggtggggcaggaggccctggcccaggcggtctgcagccaggccaaagagtgctctataagcaatccatcgcccaacgggcaagaaccatggcgctgtacaatccaattcccgtcaaacagaactgctttactgtcaatcgctccctgttcgtgtttagcgaagataacgtggttcggaaatacgcaaagcggatcaccgagtggccaccctttgaatacatgattctcgctacgatcatcgcaaattgtatagtgctggcgctggaacaacacctgcctgatggtgacaaaacgccaatgagcgaacggctggacgacaccgagccttacttcataggcattttctgcttcgaagctggtataaaaatcatagccctgggtttcgtttttcacaagggttcatatctgcgtaacggatggaatgtaatggactttgtggtggtgctaacgggcatccttgctaccgccggaactgactttgatttgcgcactcttcgtgccgtcagggtattgagaccactcaagctggtgtcaggaatcccgtctttgcaggtggtgctgaagtctatcatgaaagcaatggtgcctcttctgcaaatcgggctgctcctctttttcgctattctcatgttcgctattatcggcctggaattctacatgggcaagttccacaaggcatgttttccaaactcaacagatgctgagccagtgggagattttccttgcggtaaagaagcaccagcccgtctttgcgagggcgacactgagtgccgcgaatactggccaggcccaaattttggcatcactaactttgacaacatactgtttgccatcctgacagttttccagtgcatcactatggagggatggacagacattctgtataatacaaatgatgcggctggcaatacttggaactggctgtatttcattccgcttattattataggttcattcttcatgttgaatctcgtcttgggagtgctctcaggcgagttcgccaaggaaagggagcgggtggagaacaggcgcgctttcctaaaactccgtaggcaacaacaaattgagcgcgaactgaacgggtacctggagtggatcttcaaggccgaagaggtgatgctcgcagaagaggacaggaacgccgaggagaagtcaccccttgatgccgtccttaagagagcggctacaaaaaagagcaggaacgatctgatacacgcggaagaaggagaggaccggttcgcggacctgtgtgctgtgggatccccgttcgcaagagcaagcttgaagtctggcaagaccgagtcctccagttacttccgtaggaaagaaaaaatgttcaggttctttattcggagaatggtcaaggctcagtccttctactgggtagtgctgtgcgtggtggcactcaacaccctttgtgtggcgatggttcactataatcagcctcggaggctcacgacaacgctgtacttcgcagagttcgtatttctgggcctgtttttgaccgagatgtcactgaaaatgtatggcttgggacctaggtcctattttcggtcaagcttcaactgttttgacttcggagttatcgtgggatccgtcttcgaagtagtgtgggctgccattaagcccggttcgtcattcggcatttctgttctccgcgctctcaggctactccggatcttcaaagtgacaaagtactggtcatcgttacggaatctcgtggtcagcctcctgaacagtatgaagtctattataagcctcctgttcctcctattcctcttcatcgtggtgtttgctctcctgggaatgcagttatttggtggacagtttaatttccaggacgaaaccccaacaaccaacttcgacacgtttcccgctgcaatcctgactgtgtttcaaatccttaccggggaggattggaacgcagtaatgtatcatggtattgagagtcagggaggcgtgtctaaaggtatgttttcctctttttatttcatcgtgctgacactgttcggaaattacacgttgcttaacgtatttctcgcaatcgccgttgataatctggccaacgctcaggagctgactaaagacgaggaagagatggaggaagctgctaaccagaagttagctctccagaaggcaaaggaggtggctgaggtgagcccaatgtccgcagctaacatctccatagcagcgcgacagcagaactccgcaaaagccagatccgtctgggaacagcgcgcatctcagttacggctgcagaacttgcgagcttcatgcgaggccttgtatagtgagatggaccctgaggaaaggttgcgcttcgccaccacgaggcatctgagacccgacatgaaaacccatctggatcgaccactggtggttgagctgggcagggacggcgctcgcggacccgtggggggaaaggcgagaccagaggctgctgaggccccagaaggggtggacccgccacggagacatcacaggcacagggataaggacaagactcccgctgctggcgatcaggatagagcagaggctccgaaggccgaatcaggcgagcccggagcacgcgaggaaagacccagacctcacagatcacatagtaaagaagcagcgggtcctcctgaggcgagaagcgagcggggacggggaccaggcccagagggaggacgcaggcaccacagacgtggcagcccagaggaggccgcagaacgtgaacctcgcaggcacagggcacaccgtcaccaggaccccagtaaagagtgtgccggagcaaaaggcgaacgccgtgctaggcaccggggagggcctcgagctggccctcgggaagccgagtccggagaggagcccgcacggcgacaccgggcaaggcataaggcgcagccggctcacgaggccgtggagaaggagacgaccgaaaaggaagccactgagaaggaggccgagatcgtcgaggcagataaagagaaggaactccggaaccaccagcctagagagcctcactgtgacctagagactagtggcactgttacagtgggcccaatgcatacactccccagtacttgtcttcaaaaagtagaggaacagccagaggacgccgataatcagcgcaacgtaactcgcatgggcagccagcctcccgatcccaatacaattgtgcatattcccgtgatgttaactgggcctctgggggaggctactgtcgtcccatctgggaacgtggacctggagtctcaggccgagggcaaaaaagaagtggaggccgatgacgtcatgagaagtgggcctcggcctatagtgccatacagctccatgttctgcttatccccaaccaatttgctgaggcgcttctgtcactatatagtgaccatgcgttacttcgaggtggtgatcctggtcgttatagcgttatccagcattgccttggctgccgaagacccagtgaggaccgactctccaagaaataatgccctgaaatatcttgactacatctttactggggtcttcacctttgaaatggtcattaaaatgatcgatttaggtctgctattgcatccaggggcatacttccgggacctgtggaacattctggactttattgttgtgtcaggggcactggtggcattcgcattctccggaagtaaaggtaaggatatcaacacgatcaaaagtctgcgagttctccgagtactgagaccactgaagacaatcaagcgcctaccaaaactgaaggctgtgttcgactgtgttgtgaactctttgaaaaacgttctcaacatcctaattgtttacatgcttttcatgttcatcttcgctgttatcgctgttcagctttttaaaggaaagttcttttattgcaccgatgaaagcaaagagttggagcgagactgtagaggacaatatctcgactatgagaaggaggaggtggaggcacaacctcgacagtggaaaaagtatgattttcactatgataatgtcctgtgggcactccttacccttttcaccgtcagtacaggtgaaggctggccaatggtcctgaagcattccgtggatgccacgtacgaagagcaggggcctagcccgggatatcggatggaactgagtatcttctacgtagtctacttcgtggtattcccctttttcttcgtaaatatctttgtggctctgattataataacatttcaggaacagggggacaaggtcatgtcagaatgcagtctagagaaaaacgagagggcatgcattgatttcgccatctccgccaagcccctgacccgctacatgccacagaatcggcagagtttccagtacaagacctggaccttcgttgtatcccctccctttgagtacttcattatggccatgatcgccctgaatactgttgtcttaatgatgaaattctacgacgcaccctacgaatatgaattgatgctgaaatgcctaaatatagtttttacaagtatgttcagtatggaatgtgtcctgaaaattattgccttcggggtactgaactactttcgggatgcttggaatgtgtttgattttgtcactgtgctgggatctattacagacatcctggtaaccgagattgcaaacaattttataaatctgagctttctcaggttattccgagcagccaggctgatcaaactcctgagacaggggtacacaattcgcatcctattgtggacttttgttcagagcttcaaagcattaccctatgtatgcctcctgatagccatgctgttttttatctacgctattattggcatgcaggtgttcggcaatatcgccctcgatgatgacactagcatcaataggcacaataatttccggactttcctgcaagctctcatgcttctatttcgaagtgcaaccggcgaagcctggcacgagattatgttgtcgtgcctttctaaccaggcttgtgacgagcaggctaatgctactgagtgtggatctgactttgcctacttttactttgtgagcttcatttttttgtgttctttcctcatgcttaatcttttcgtggcagtaataatggataattttgaatatctgactcgcgatagttcaatcctagggccacaccatctggacgaatttatcagagtctgggctgagtatgatcctgctgcctgcgggcgaatatcttataacgatatgttcgaaatgctgaaacacatgagtccaccacttgggctgggcaaaaagtgtccggcacgggtggcctacaagcggttggtacggatgaatatgccaatcagcaatgaggacatgacggtccattttaccagtaccctgatggctcttattcggaccgcccttgagatcaagctcgcccctgcaggaaccaagcagcaccagtgtgacgccgagttgcgcaaggaaattagcgtcgtctgggccaacctcccacagaagaccctggacctgctggtgccccctcacaagcctgatgagatgacggttggaaaggtctacgcggctcttatgatctttgacttttacaaacagaacaaaacaactagagaccagatgcagcaagcacccggtgggttgagccagatgggtcccgtctccctatttcaccccctgaaagcaacgctggagcagactcagccagcagttctgaggggtgcgcgagtgttcctacggcagaagagttccacatcgctgtccaacgggggtgcaatccagaaccaggagagcggaataaaggagtccgtctcatgggggacccagcggacccaggatgcaccgcatgaggcacggccacctttggagcggggtcattcaaccgaaatccctgtggggaggtcgggagcactggccgtagatgtacagatgcaaagtattacacgcaggggcccagacggcgagccacagccaggcctggagagccaggggagagccgcatccatgccgagactcgctgccgaaacacaaccagtgaccgatgcctcacccatgaaaagaagcatcagtacactcgcccagaggccaagaggtacacacctgtgtagcaccaccccagaccgcccacccccaagccaagccagttcccatcaccatcaccacagatgccatcggcgtagggaccggaagcagcggtcacttgaaaagggtcctagcctctccgccgacatggatggtgcgccatccagcgcagtggggcctggcctgccacccggagagggccctaccgggtgccggagggagcgggaacgcaggcaagaacggggtcgttcacaggagcgtcgacagccttccagcagctcctccgagaaacaaaggttttactcttgcgaccggttcggcggacgagagccaccaaaaccaaaacctagcctgagcagccatccgacgtcacccacggctgggcaagaacctggaccccacccccagggatccggctctgttaacgggtcacccttgctcagtactagtggggcttcgaccccaggacggggaggacggcgtcaactgccacagactcctctgacacctcgcccatccattacttataagaccgccaatagctcacccatccatttcgcaggcgctcaaacctctttgccggctttttctcccggaaggctctctagaggactttcagagcacaacgccctactgcagcgagacccactgagccaaccactcgccccaggctcacgcatcgggtctgatccttatctgggccagcgcctggactctgaggccagcgtgcacgccttaccggaggataccctgacattcgaagaggctgtggctactaacagcggacggtcaagtagaacctcgtacgtgtctagcttgacaagccagtctcacccccttcggagagtgccgaacgggtaccattgtacattggggctctccagcgggggacgtgctcgtcacagctaccaccatcccgaccaagatcactggtgcta

SEQ ID NO: 310923 - DNA, 7013 bp, Artificial Sequence
  derived and/or modified sequence
atggtgcgattcggagatgagctgggaggccgttacgggggaccagggggaggggagagagctagggggggaggcgctggcggagccggtggacccggtccaggaggcctccaacccggacagagagttctttataaacaatccatcgctcagagggcccgtaccatggctctgtacaatcctatacccgtcaaacagaactgttttaccgtgaatcgtagccttttcgtattctcagaggataatgtggtgaggaagtacgcaaaacgcatcaccgagtggcccccatttgagtacatgattctggctactatcatcgctaactgcatcgtgctggcgctcgaacagcacctgcccgacggcgacaagacacccatgtcagaaagactagatgacacggagccctactttattggaatcttttgctttgaagccggaatcaagattatcgccctcgggtttgtttttcacaagggatcttatctaagaaacggatggaatgttatggatttcgtggtggtgctgacaggcatactcgcgactgccggtacagacttcgacctgcgaaccctgcgcgctgtcagagtcctcaggccacttaaactagttagcggaatcccatctttgcaggtggtcctaaagagtattatgaaggccatggtacctctgttacaaatcggactcttgctcttctttgccatcctaatgtttgctataatcggactggaattctacatgggtaagttccataaagcttgcttcccaaactccaccgacgccgagccagtcggggattttccctgcggcaaagaagcaccggcaaggttgtgcgaaggcgatactgaatgcagggaatactggccagggccaaacttcggaatcactaatttcgataacattctgtttgcaatcctgaccgtgttccaatgcattacgatggagggttggaccgacatcctgtataacactaatgatgccgctggtaatacgtggaactggctatactttatccccttaataatcatcggaagcttcttcatgctgaacttggtgctgggggttctatccggtgagtttgctaaagagagagagagagtggagaataggcgtgcattcctcaaattgcgcagacagcagcaaattgagagggaactcaacggctacttggagtggatttttaaggccgaggaagtcatgctggctgaggaagaccgcaacgctgaagagaagtccccactggacgtgctgaaaagagctgcaactaaaaagtctcgtaatgacctgattcacgccgaggagggggaagatcgattcgccgacctgtgcgcggtgggctcgccattcgcgagagcctcgttgaaatccggcaagaccgagagctcttcatacttcagacgcaaggaaaaaatgttccggttcttcattcgtcgtatggtgaaagctcagtctttttattgggtagtgctctgtgtggtcgcactgaacaccttatgtgtagctatggtacactataatcagcccagacggttgacgactacattatacttcgcagagttcgttttcttaggattattccttacggagatgagtcttaagatgtatggcctggggccacgcagctacttccgctccagctttaactgcttcgattttggagtcatagtgggcagcgtattcgaggtggtttgggctgccataaaaccaggcagctcattcggcatcagtgtgctgcgcgctttgcgcctcctccggatttttaaagtcacaaagtactggagcagcctgcggaacctggtggtctccctgctaaactccatgaaatccattatttctctcttatttctcctttttttgttcattgtggtgttcgccctcctcggcatgcaactcttcggaggccagtttaacttccaggacgaaacgcccaccaccaacttcgatacctttcctgccgctattctgactgtcttccaaatcctgaccggtgaggactggaacgcagttatgtatcatgggatcgagtcgcaggggggagtctccaaaggcatgttttctagtttttattttatcgtgctcaccttgtttggtaattacaccctcctgaacgtcttcctggcaattgccgtcgataatctggccaatgcacaagaattaaccaaagatgaggaagagatggaagaggcggcaaaccagaagttggcattgcagaaagccaaagaagtggctgaagtatcccctatgtctgctgcaaacatttctatcgcagcaagacagcaaaactcagccaaggccagatcggtgtgggaacagcgtgcctcgcagctcaggctccaaaacctgcgcgcatcttgcgaggccttgtacagcgagatggatcccgaggagaggttaaggtttgccacgacccgccacctgaggccagacatgaaaacccaccttgatcggcctcttgtagtggagctgggacgagacggtgcacggggacctgtcggcggtaaggcacgtccagaggcggctgaagcccctgaaggcgtcgatccgccacgtaggcatcatcgccatcgcgacaaagataaaacccccgcagctggtgatcaggatagggccgaggctccgaaggctgaatctggtgaacccggtgccagagaggagcgacccagaccacaccgctctcacagcaaggaggcagctggaccgccagaggcacggagcgagcgtgggagaggccctggtccagaaggagggagacgacaccaccgcagagggagccctgaagaggccgctgaacgagagccacgacgtcaccgcgctcaccgacatcaggacccctctaaggagtgcgctggcgctaaaggggagagaagggccagacacagggggggacccagagccggtccaagggaggccgaaagcggtgaagagcctgcaagaagacaccgcgcacgccataaagcccaacccgcacatgaagccgtggaaaaggagaccacagaaaaagaagccactgagaaagaggcagaaatagtggaggctgacaaagagaaagaacttagaaatcatcaaccccgagaaccacattgcgaccttgagacaagtggtacagtcactgtagggccaatgcacaccctgccatccacctgcctgcaaaaggtggaggaacagccagaagatgctgacaatcaaagaaacgtaactcgcatggggtcacagccccctgacccaaacaccatagtgcatattccagtgatgttaacgggacctcttggcgaggcgacagtcgtacccagtgggaacgtcgatttggaatcccaggctgaggggaagaaagaggtcgaggcagatgacgtgatgcgttccggaccgaggccaattgtgccttactcatccatgttctgtctaagcccaaccaatctgctgagacgtttttgccattacatcgtgaccatgcgatacttcgaggttgttatactcgtcgtgattgctctctcctccatcgccctagcggcagaagatcccgtaagaacggactctcccaggaataatgccttgaaatacctcgattacatattcacaggcgtgttcacgttcgagatggtgatcaagatgatcgatctcggactcttgctgcatccaggtgcttatttcagggacctgtggaatattctcgatttcatcgtcgtcagtggtgctcttgtcgccttcgccttttcaggatccaaaggtaaggacattaacacgataaaaagcttgagggtcctccgggtgcttcggcctcttaaaacaataaaacggctaccgaaactgaaggccgtatttgactgtgtcgtcaatagtcttaagaacgtgctgaatatattaattgtttacatgcttttcatgttcatttttgcagtgattgccgtccagctgttcaaaggtaagtttttttattgcaccgacgagtcaaaggaactcgagcgagactgcaggggccagtatctggattacgaaaaagaagaggtcgaggctcaaccacgccagtggaaaaagtacgattttcactacgacaatgttctctgggcactcctaactctgttcactgtctcgacaggcgaagggtggccaatggttctcaagcacagtgtggacgccacttatgaggaacagggtccgagtcctggttaccgtatggagctgtcaatcttttacgtggtctacttcgtggtgttcccattttttttcgtgaacattttcgtagctctcattataattactttccaggagcaaggcgataaagtcatgagcgagtgctccctggagaagaatgaaagggcttgtattgactttgcaatcagcgctaaacctctgacaaggtatatgccgcagaatcgccagagctttcaatataagacttggacctttgtggtatcccccccattcgagtattttatcatggctatgattgccctgaacacagttgtcctgatgatgaagttttatgatgccccatatgaatacgaactcatgctgaaatgcctcaacattgtttttacttctatgttctctatggagtgcgtgctgaaaattatcgctttcggagtcctaaactatttccgtgacgcctggaatgtgttcgactttgtgacagtcctcggttcaatcacggacatacttgttacagaaattgccaacaatttcataaatttatcttttctgcgcttgttccgggctgcaaggctcatcaagttgctgcggcaaggctatactatccgaatactactgtggaccttcgtccagtcttttaaggctctcccttatgtgtgcctgcttatcgctatgctcttcttcatctacgcgatcatcggtatgcaggtgtttggcaatatagcattggatgatgacaccagtattaacagacacaataacttcaggactttcttacaagccctgatgctactgtttcgctcagcaacaggtgaagcgtggcatgagattatgctgtcatgtctgtccaaccaggcctgcgatgaacaggctaacgccacagaatgtggatccgacttcgcctatttttattttgtgtcattcatcttcctatgcagttttcttatgctgaatctgtttgtggcggtcattatggacaactttgagtacctgacacgggattcttctattctggggccacatcacttagatgaatttatcagggtgtgggcagaatatgacccagccgcttgcgggcgaatctcatacaatgacatgttcgaaatgctgaaacatatgagccccccactgggactggggaagaagtgtcctgccagagtcgcttataaaaggttggtgcgcatgaatatgcctataagcaacgaagacatgactgtgcatttcaccagtactctaatggcgttgattaggactgccctcgagatcaagttggctcccgctgggaccaagcagcatcaatgcgatgcagagcttcggaaagagatttctgtcgtctgggccaatctaccccagaagactctggatcttttggttcctccacataagccggacgaaatgacagtgggaaaagtctacgcagccctgatgatttttgatttttacaagcagaataagaccactcgcgatcagatgcagcaggctccagggggtctgagccagatgggaccggtgtccctgttccatccattgaaagccacactggaacagacccaacccgcagtccttagaggagctcgcgtgttccttcgccagaagagtagcacaagcctcagtaatggtggagcaatccagaatcaagaatcagggattaaggagagcgtgtcttgggggacacagagaactcaggatgcgccacacgaggcaaggccaccgctcgagcgaggccactctacagagatcccagtcggacgttcgggagctctcgccgttgatgtgcagatgcagagtattacccgtagaggccctgacggagaaccgcagcccggacttgagtcccaggggcgtgccgctagcatgcctaggttagcagcagaaacacagcctgtgacggacgcatcacctatgaaacgttcaattagtactctggctcagaggcccagagggacccatctctgttccactacacctgataggcctccaccctcgcaggccagttcccaccaccaccaccatcgctgccatcggaggcgggatagaaagcagcgaagcctcgaaaaggggcctagcctctccgccgatatggacggtgcgccatccagtgctgttgggcctggtctcccccctggcgaggggcctacggggtgtagacgagaacgagaacggaggcaggaacgaggacgcagtcaagaaaggcgtcaacccagctcatcctcttcagagaagcaacgcttctattcatgcgatcgcttcgggggtagagagcctcctaagcctaagccctctctaagttcacatcctacttctccaaccgcaggccaggaaccgggacctcatccccagggaagtggttcagtcaatggatcacctctacttagcacctccggagcctcaactcctggtcggggaggcagacggcaacttccgcagacgccgttaacacctcgaccaagcatcacgtataagactgcgaacagttccccaattcacttcgctggcgctcagacctcgttacctgccttttccccagggaggctgagccgcggtctgtccgaacacaacgcgctgcttcagagggaccccttgagccagccattggccccaggttctcgcatcgggagcgatccttacctcggccagcgtctggatagtgaggcgagcgtgcatgccctccccgaagacacgctgactttcgaagaagctgtggcaactaatagcggcagaagtagtcgcaccagctacgtcagtagcctcacttctcagagccatccgctgcggagggtgccaaacggataccattgcaccctcggactttcatcaggaggacgagcccgtcattcctatcaccaccctgatcaggatcattggtgcta

SEQ ID NO: 310924 - DNA, 9642 bp, Artificial Sequence
  derived and/or modified sequence
atggtccgcttcggggacgagctgggcggccgctatgggggccccggcggcggagagcgggcccggggcggcggggccggcggggcggggggcccgggtcccggggggctgcagcccggccagcgggtcctctacaagcaatcgatcgcgcagcgcgcgcggaccatggcgctgtacaaccccatcccggtcaagcagaactgcttcaccgtcaaccgctcgctcttcgtcttcagcgaggacaacgtcgtccgcaaatacgcgaagcgcatcaccgagtggcctccattcgagtatatgatcctggccaccatcatcgccaactgcatcgtgctggccctggagcagcacctccctgatggggacaaaacgcccatgtccgagcggctggacgacacggagccctatttcatcgggatcttttgcttcgaggcagggatcaaaatcatcgctctgggctttgtcttccacaagggctcttacctgcggaacggctggaacgtcatggacttcgtggtcgtcctcacagggatccttgccacggctggaactgacttcgacctgcgaacactgagggctgtgcgtgtgctgaggcccctgaagctggtgtctgggattccaagtttgcaggtggtgctcaagtccatcatgaaggccatggttccactcctgcagattgggctgcttctcttctttgccatcctcatgtttgccatcattggcctggagttctacatgggcaagttccacaaggcctgtttccccaacagcacagatgcggagcccgtgggtgacttcccctgtggcaaggaggccccagcccggctgtgcgagggcgacactgagtgccgggagtactggccaggacccaactttggcatcaccaactttgacaatatcctgtttgccatcttgacggtgttccagtgcatcaccatggagggctggactgacatcctctataatacaaacgatgcggccggcaacacctggaactggctctacttcatccctctcatcatcatcggctccttcttcatgctcaacctggtgctgggcgtgctctcgggggagtttgccaaggagcgagagagggtggagaaccgccgcgccttcctgaagctgcgccggcagcagcagatcgagcgagagctcaacgggtacctggagtggatcttcaaggcggaggaagtcatgctggccgaggaggacaggaatgcagaggagaagtcccctttggacgcagtgctgaagagagcggccaccaagaagagcagaaatgacctgatccacgcagaggagggagaggaccggtttgcagatctctgtgctgttggatcccccttcgcccgcgccagcctcaagagcgggaagacagagagctcgtcatacttccggaggaaggagaagatgttccggttttttatccggcgcatggtgaaggctcagagcttctactgggtggtgctgtgcgtggtggccctgaacacactgtgtgtggccatggtgcattacaaccagccgcggcggcttaccacgaccctgtattttgcagagtttgttttcctgggtctcttcctcacagagatgtccctgaagatgtatggcctggggcccagaagctacttccggtcctccttcaactgcttcgactttggggtcatcgtggggagcgtctttgaagtggtctgggcggccatcaagccgggaagctcctttgggatcagtgtgctgcgggccctccgcctgctgaggatcttcaaagtcacgaagtactggagctccctgcggaacctggtggtgtccctgctgaactccatgaagtccatcatcagcctgctcttcttgctcttcctgttcattgtggtcttcgccctgctggggatgcagctgtttgggggacagttcaacttccaggatgagactcccacaaccaacttcgacaccttccctgccgccatcctcactgtcttccagatcctgacgggagaggactggaatgcagtgatgtatcacgggatcgaatcgcaaggcggcgtcagcaaaggcatgttctcgtccttttacttcattgtcctgacactgttcggaaactacactctgctgaatgtctttctggccatcgctgtggacaacctggccaacgcccaagagctgaccaaggatgaagaggagatggaagaagcagccaatcagaagcttgctctgcaaaaggccaaagaagtggctgaagtcagccccatgtctgccgcgaacatctccatcgccgccaggcagcagaactcggccaaggcgcgctcggtgtgggagcagcgggccagccagctacggctgcagaacctgcgggccagctgcgaggcgctgtacagcgagatggaccccgaggagcggctgcgcttcgccactacgcgccacctgcggcccgacatgaagacgcacctggaccggccgctggtggtggagctgggccgcgacggcgcgcgggggcccgtgggaggcaaagcccgacctgaggctgcggaggcccccgagggcgtcgaccctccgcgcaggcaccaccggcaccgcgacaaggacaagacccccgcggcgggggaccaggaccgagcagaggccccgaaggcggagagcggggagcccggtgcccgggaggagcggccgcggccgcaccgcagccacagcaaggaggccgcggggcccccggaggcgcggagcgagcgcggccgaggcccaggccccgagggcggccggcggcaccaccggcgcggctccccggaggaggcggccgagcgggagccccgacgccaccgcgcgcaccggcaccaggatccgagcaaggagtgcgccggcgccaagggcgagcggcgcgcgcggcaccgcggcggcccccgagcggggccccgggaggcggagagcggggaggagccggcgcggcggcaccgggcccggcacaaggcgcagcctgctcacgaggctgtggagaaggagaccacggagaaggaggccacggagaaggaggctgagatagtggaagccgacaaggaaaaggagctccggaaccaccagccccgggagccacactgtgacctggagaccagtgggactgtgactgtgggtcccatgcacacactgcccagcacctgtctccagaaggtggaggaacagccagaggatgcagacaatcagcggaacgtcactcgcatgggcagtcagcccccagacccgaacactattgtacatatcccagtgatgctgacgggccctcttggggaagccacggtcgttcccagtggtaacgtggacctggaaagccaagcagaggggaagaaggaggtggaagcggatgacgtgatgaggagcggcccccggcctatcgtcccatacagctccatgttctgtttaagccccaccaacctgctccgccgcttctgccactacatcgtgaccatgaggtacttcgaggtggtcattctcgtggtcatcgccttgagcagcatcgccctggctgctgaggacccagtgcgcacagactcgcccaggaacaacgctctgaaatacctggattacattttcactggtgtctttacctttgagatggtgataaagatgatcgacttgggactgctgcttcaccctggagcctatttccgggacttgtggaacattctggacttcattgtggtcagtggcgccctggtggcgtttgctttctcaggatccaaagggaaagacatcaataccatcaagtctctgagagtccttcgtgtcctgcggcccctcaagaccatcaaacggctgcccaagctcaaggctgtgtttgactgtgtggtgaactccctgaagaatgtcctcaacatcttgattgtctacatgctcttcatgttcatatttgccgtcattgcggtgcagctcttcaaagggaagtttttctactgcacagatgaatccaaggagctggagagggactgcaggggtcagtatttggattatgagaaggaggaagtggaagctcagcccaggcagtggaagaaatacgactttcactacgacaatgtgctctgggctctgctgacgctgttcacagtgtccacgggagaaggctggcccatggtgctgaaacactccgtggatgccacctatgaggagcagggtccaagccctgggtaccgcatggagctgtccatcttctacgtggtctactttgtggtctttcccttcttcttcgtcaacatctttgtggctttgatcatcatcaccttccaggagcagggggacaaggtgatgtctgaatgcagcctggagaagaacgagagggcttgcattgacttcgccatcagcgccaaacccctgacacggtacatgccccaaaaccggcagtcgttccagtataagacgtggacatttgtggtctccccgccctttgaatacttcatcatggccatgatagccctcaacactgtggtgctgatgatgaagttctatgatgcaccctatgagtacgagctgatgctgaaatgcctgaacatcgtgttcacatccatgttctccatggaatgcgtgctgaagatcatcgcctttggggtgctgaactatttcagagatgcctggaatgtctttgactttgtcactgtgttgggaagtattactgatattttagtaacagagattgcgaacaatttcatcaacctcagcttcctccgcctctttcgagctgcgcggctgatcaagctgctccgccagggctacaccatccgcatcctgctgtggacctttgtccagtccttcaaggccctgccctacgtgtgtctgctcattgccatgctgttcttcatctacgccatcatcggcatgcaggtgtttgggaatattgccctggatgatgacaccagcatcaaccgccacaacaacttccggacgtttttgcaagccctgatgctgctgttcaggagcgccacgggggaggcctggcacgagatcatgctgtcctgcctgagcaaccaggcctgtgatgagcaggccaatgccaccgagtgtggaagtgactttgcctacttctacttcgtctccttcatcttcctgtgctcctttctgatgttgaacctctttgtggctgtgatcatggacaattttgagtacctcacgcgggactcttccatcctaggtcctcaccacttggatgagttcatccgggtctgggctgaatacgacccggctgcgtgtgggcgcatcagttacaatgacatgtttgagatgctgaaacacatgtccccgcctctggggctggggaagaaatgccctgctcgagttgcttacaagcgcctggttcgcatgaacatgcccatctccaacgaggacatgactgttcacttcacgtccacgctgatggccctcatccggacggcactggagatcaagctggccccagctgggacaaagcagcatcagtgtgacgcggagttgaggaaggagatttccgttgtgtgggccaatctgccccagaagactttggacttgctggtaccaccccataagcctgatgagatgacagtggggaaggtttatgcagctctgatgatattcgacttctacaagcagaacaaaaccaccagagaccagatgcagcaggctcctggaggcctctcccagatgggtcctgtgtccctgttccaccctctgaaggccaccctggagcagacacagccggctgtgctccgaggagcccgggttttccttcgacagaagagttccacctccctcagcaatggcggggccatacaaaaccaagagagtggcatcaaagagtctgtctcctggggcactcaaaggacccaggatgcaccccatgaggccaggccacccctggagcgtggccactccacagagatccctgtggggcggtcaggagcactggctgtggacgttcagatgcagagcataacccggaggggccctgatggggagccccagcctgggctggagagccagggtcgagcggcctccatgccccgccttgcggccgagactcagcccgtcacagatgccagccccatgaagcgctccatctccacgctggcccagcggccccgtgggactcatctttgcagcaccaccccggaccgcccaccccctagccaggcgtcgtcgcaccaccaccaccaccgctgccaccgccgcagggacaggaagcagaggtccctggagaaggggcccagcctgtctgccgatatggatggcgcaccaagcagtgctgtggggccggggctgcccccgggagaggggcctacaggctgccggcgggaacgagagcgccggcaggagcggggccggtcccaggagcggaggcagccctcatcctcctcctcggagaagcagcgcttctactcctgcgaccgctttgggggccgtgagcccccgaagcccaagccctccctcagcagccacccaacgtcgccaacagctggccaggagccgggaccccacccacagggcagtggttccgtgaatgggagccccttgctgtcaacatctggtgctagcacccccggccgcggtgggcggaggcagctcccccagacgcccctgactccccgccccagcatcacctacaagacggccaactcctcacccatccacttcgccggggctcagaccagcctccctgccttctccccaggccggctcagccgtgggctttccgaacacaacgccctgctgcagagagaccccctcagccagcccctggcccctggctctcgaattggctctgacccttacctggggcagcgtctggacagtgaggcctctgtccacgccctgcctgaggacactctcactttcgaggaggctgtggccaccaactcgggccgctcctccaggacttcctacgtgtcctccctgacctcccagtctcaccctctccgccgcgtgcccaacggttaccactgcaccctgggactcagctcgggtggccgagcacggcacagctaccaccaccctgaccaagaccactggtgctagctgcaccgtgaccgctcagacgcctgcatgcagcaggcgtgtgttccagtggatgagttttatcatccacacggggcagccggccctcgggggaggccttgcccaccttggtgaggctcctgtggcccctccctccccctcctcccctcttttactctagacgacgaataaagccctgttagaggatgcggctctctctgtccccttcctgtcctgccttcctgggtctcgtaccacacaccagaccctaaaccgcaggctgctgtgtgtggctgagaaggacccaggagtccaaatcccgtgtcctgggactcagcatccagcatgggtgcttggagccgttgtgaggagctctgcgtcctgtggggagcacccttcacgtggccgtgcggcacagagaagcagggcccacctgaaagtgcgccgagacctcgggacggaggggatggggagggggacacagtcgtggcttgtgcagcccgccagtgtcagcgaatgctcactcaggcaagctctgtcctccctggacaccgtcagccccacaggaaccgagctgggaagtgttcttgctgtggttgtgatttttaattgcaacacctctcattcttgtcacttctatatacgtgatgtagaaaaaatggaaaaccagaaaaatggggaaggaaatgttcacataactttaaaaaatcaaacctgtgaaagaaagatgtcagctttttgccacgtgtctttgtggcttatgcgaggagactccctgtgcagccctgtccggtccaggtggacgtagacggcccctggctctgctgctcttgaccaagtgcctgaccgccaggccctcacacccaggctcctgggcactgtggtgtgaggcgaggcctcgggatccatcaccgcaggatgctgtgaaaagtactcgcgatggcagccaggtagcaagcccttgccagtggagagcactggatgtcatggtggcaaacaaggcagccatttgctgtcctcctcccacgagtggaaggggtttccaaggaagccacagggcagctgaccacgtgcttgtgtgaggcattttcagtctgttctgcatatgattctcagggcacactctgtggtatgtgaaataggtttccttccacatacagcagaagagaggcaaaggctggtaggaaggaggaagacattggctgggggcttggatgtggggccgtcagggcaggagggaggaagccccagctggaatgaaactcagagcaagtgaccgagggaggacacggctcctgccactgaggccgggcacctgatgcccagcactgtcctggcgccagacacagggagcaggcagtcaagtgaggtctgacccccatggccacgctcaggagagaaagaccatgctcaggacactgtccaaggtgcacaagatgctgggaggtcccttgtttggtgaagaaagggagcatttagagcagttgatggtggtgtgtcctccgtgttctgaaattccagatgatctgtgttggattcttggcttctaccccatgattctcctcaaagaaattgtgtgtgatgtgtgtgtgtgtgtgtgtgtgtgtgtgtctgtgtcacaggagatgcagtgcctgtacaggtgtgttcagtgtgtggatgtcattaacccatagggctatgcaacaaaagacacatttaatagaagtaaaacacacaagaccgctgcctggtctcggggttcagcatgattgtgaccaaacctttttatagaatttccttacctgaaggcacaacactctgaaactttaaagataacagagtattttattccaatagaataaaccaggaatctcggactgtgcatgtgatcactgtgctcctgttgcaaagtagaaggatgtgtattttgacactgacgttttgtctcttgttccccagcccccagcccatgttatcttgggtgtcgaatgtgtccattccatgcagaaccacagccatttccccaggcagtgttgggtcgagaatccacttttctaaacccacacagcctagctggcttgtctagactcttctaggcattggaattgatgaaaactacagggagcggggaaaggagacattatgtcttgttttcctgactttgggttttgtttctcactgtgtcttctccggctatcatatatgtcccctgaatctcatagtgagctgccaaatttgaagtgcatcacccagttgtctgcatctggaaccagtcaagcagtggctgtagtttgaacaagttatgtgtgcatgtaacatatatacatatatacatatatacaagtatgtgcatgataatgtatatcttcgtactttttgatacaatgtattcatttgttaatttttaattatatttgatataaatcaaaggtttgttgcaaaactttatatttaagaagtgttaaaaaaaaaaaaaagtcccaaccatgcaacacaactgggacctacttaaaaagaaattctgtgattgactagtttgctgcctgagtcatatttatcagccaaactttggattctgctgttgtttctacaatgacattttgtatgaagcaaagtccttgaattaaaataaaaacttagcaaaaaatcaaaaacaaaacccca

SEQ ID NO: 310925 - DNA, 9758 bp, Artificial Sequence
  derived and/or modified sequence
gggcgaggtccgctgcggtcccggcggctccgtggctgctccgctctgagcgcctggcgcgccccgcgccctccctgccggggccgctgggccggggatgcacgcggggcccgggagccatggtccgcttcggggacgagctgggcggccgctatgggggccccggcggcggagagcgggcccggggcggcggggccggcggggcggggggcccgggtcccggggggctgcagcccggccagcgggtcctctacaagcaatcgatcgcgcagcgcgcgcggaccatggcgctgtacaaccccatcccggtcaagcagaactgcttcaccgtcaaccgctcgctcttcgtcttcagcgaggacaacgtcgtccgcaaatacgcgaagcgcatcaccgagtggcctccattcgagtatatgatcctggccaccatcatcgccaactgcatcgtgctggccctggagcagcacctccctgatggggacaaaacgcccatgtccgagcggctggacgacacggagccctatttcatcgggatcttttgcttcgaggcagggatcaaaatcatcgctctgggctttgtcttccacaagggctcttacctgcggaacggctggaacgtcatggacttcgtggtcgtcctcacagggatccttgccacggctggaactgacttcgacctgcgaacactgagggctgtgcgtgtgctgaggcccctgaagctggtgtctgggattccaagtttgcaggtggtgctcaagtccatcatgaaggccatggttccactcctgcagattgggctgcttctcttctttgccatcctcatgtttgccatcattggcctggagttctacatgggcaagttccacaaggcctgtttccccaacagcacagatgcggagcccgtgggtgacttcccctgtggcaaggaggccccagcccggctgtgcgagggcgacactgagtgccgggagtactggccaggacccaactttggcatcaccaactttgacaatatcctgtttgccatcttgacggtgttccagtgcatcaccatggagggctggactgacatcctctataatacaaacgatgcggccggcaacacctggaactggctctacttcatccctctcatcatcatcggctccttcttcatgctcaacctggtgctgggcgtgctctcgggggagtttgccaaggagcgagagagggtggagaaccgccgcgccttcctgaagctgcgccggcagcagcagatcgagcgagagctcaacgggtacctggagtggatcttcaaggcggaggaagtcatgctggccgaggaggacaggaatgcagaggagaagtcccctttggacgtgctgaagagagcggccaccaagaagagcagaaatgacctgatccacgcagaggagggagaggaccggtttgcagatctctgtgctgttggatcccccttcgcccgcgccagcctcaagagcgggaagacagagagctcgtcatacttccggaggaaggagaagatgttccggttttttatccggcgcatggtgaaggctcagagcttctactgggtggtgctgtgcgtggtggccctgaacacactgtgtgtggccatggtgcattacaaccagccgcggcggcttaccacgaccctgtattttgcagagtttgttttcctgggtctcttcctcacagagatgtccctgaagatgtatggcctggggcccagaagctacttccggtcctccttcaactgcttcgactttggggtcatcgtggggagcgtctttgaagtggtctgggcggccatcaagccgggaagctcctttgggatcagtgtgctgcgggccctccgcctgctgaggatcttcaaagtcacgaagtactggagctccctgcggaacctggtggtgtccctgctgaactccatgaagtccatcatcagcctgctcttcttgctcttcctgttcattgtggtcttcgccctgctggggatgcagctgtttgggggacagttcaacttccaggatgagactcccacaaccaacttcgacaccttccctgccgccatcctcactgtcttccagatcctgacgggagaggactggaatgcagtgatgtatcacgggatcgaatcgcaaggcggcgtcagcaaaggcatgttctcgtccttttacttcattgtcctgacactgttcggaaactacactctgctgaatgtctttctggccatcgctgtggacaacctggccaacgcccaagagctgaccaaggatgaagaggagatggaagaagcagccaatcagaagcttgctctgcaaaaggccaaagaagtggctgaagtcagccccatgtctgccgcgaacatctccatcgccgccaggcagcagaactcggccaaggcgcgctcggtgtgggagcagcgggccagccagctacggctgcagaacctgcgggccagctgcgaggcgctgtacagcgagatggaccccgaggagcggctgcgcttcgccactacgcgccacctgcggcccgacatgaagacgcacctggaccggccgctggtggtggagctgggccgcgacggcgcgcgggggcccgtgggaggcaaagcccgacctgaggctgcggaggcccccgagggcgtcgaccctccgcgcaggcaccaccggcaccgcgacaaggacaagacccccgcggcgggggaccaggaccgagcagaggccccgaaggcggagagcggggagcccggtgcccgggaggagcggccgcggccgcaccgcagccacagcaaggaggccgcggggcccccggaggcgcggagcgagcgcggccgaggcccaggccccgagggcggccggcggcaccaccggcgcggctccccggaggaggcggccgagcgggagccccgacgccaccgcgcgcaccggcaccaggatccgagcaaggagtgcgccggcgccaagggcgagcggcgcgcgcggcaccgcggcggcccccgagcggggccccgggaggcggagagcggggaggagccggcgcggcggcaccgggcccggcacaaggcgcagcctgctcacgaggctgtggagaaggagaccacggagaaggaggccacggagaaggaggctgagatagtggaagccgacaaggaaaaggagctccggaaccaccagccccgggagccacactgtgacctggagaccagtgggactgtgactgtgggtcccatgcacacactgcccagcacctgtctccagaaggtggaggaacagccagaggatgcagacaatcagcggaacgtcactcgcatgggcagtcagcccccagacccgaacactattgtacatatcccagtgatgctgacgggccctcttggggaagccacggtcgttcccagtggtaacgtggacctggaaagccaagcagaggggaagaaggaggtggaagcggatgacgtgatgaggagcggcccccggcctatcgtcccatacagctccatgttctgtttaagccccaccaacctgctccgccgcttctgccactacatcgtgaccatgaggtacttcgaggtggtcattctcgtggtcatcgccttgagcagcatcgccctggctgctgaggacccagtgcgcacagactcgcccaggaacaacgctctgaaatacctggattacattttcactggtgtctttacctttgagatggtgataaagatgatcgacttgggactgctgcttcaccctggagcctatttccgggacttgtggaacattctggacttcattgtggtcagtggcgccctggtggcgtttgctttctcaggatccaaagggaaagacatcaataccatcaagtctctgagagtccttcgtgtcctgcggcccctcaagaccatcaaacggctgcccaagctcaaggctgtgtttgactgtgtggtgaactccctgaagaatgtcctcaacatcttgattgtctacatgctcttcatgttcatatttgccgtcattgcggtgcagctcttcaaagggaagtttttctactgcacagatgaatccaaggagctggagagggactgcaggggtcagtatttggattatgagaaggaggaagtggaagctcagcccaggcagtggaagaaatacgactttcactacgacaatgtgctctgggctctgctgacgctgttcacagtgtccacgggagaaggctggcccatggtgctgaaacactccgtggatgccacctatgaggagcagggtccaagccctgggtaccgcatggagctgtccatcttctacgtggtctactttgtggtctttcccttcttcttcgtcaacatctttgtggctttgatcatcatcaccttccaggagcagggggacaaggtgatgtctgaatgcagcctggagaagaacgagagggcttgcattgacttcgccatcagcgccaaacccctgacacggtacatgccccaaaaccggcagtcgttccagtataagacgtggacatttgtggtctccccgccctttgaatacttcatcatggccatgatagccctcaacactgtggtgctgatgatgaagttctatgatgcaccctatgagtacgagctgatgctgaaatgcctgaacatcgtgttcacatccatgttctccatggaatgcgtgctgaagatcatcgcctttggggtgctgaactatttcagagatgcctggaatgtctttgactttgtcactgtgttgggaagtattactgatattttagtaacagagattgcgaacaatttcatcaacctcagcttcctccgcctctttcgagctgcgcggctgatcaagctgctccgccagggctacaccatccgcatcctgctgtggacctttgtccagtccttcaaggccctgccctacgtgtgtctgctcattgccatgctgttcttcatctacgccatcatcggcatgcaggtgtttgggaatattgccctggatgatgacaccagcatcaaccgccacaacaacttccggacgtttttgcaagccctgatgctgctgttcaggagcgccacgggggaggcctggcacgagatcatgctgtcctgcctgagcaaccaggcctgtgatgagcaggccaatgccaccgagtgtggaagtgactttgcctacttctacttcgtctccttcatcttcctgtgctcctttctgatgttgaacctctttgtggctgtgatcatggacaattttgagtacctcacgcgggactcttccatcctaggtcctcaccacttggatgagttcatccgggtctgggctgaatacgacccggctgcgtgtgggcgcatcagttacaatgacatgtttgagatgctgaaacacatgtccccgcctctggggctggggaagaaatgccctgctcgagttgcttacaagcgcctggttcgcatgaacatgcccatctccaacgaggacatgactgttcacttcacgtccacgctgatggccctcatccggacggcactggagatcaagctggccccagctgggacaaagcagcatcagtgtgacgcggagttgaggaaggagatttccgttgtgtgggccaatctgccccagaagactttggacttgctggtaccaccccataagcctgatgagatgacagtggggaaggtttatgcagctctgatgatattcgacttctacaagcagaacaaaaccaccagagaccagatgcagcaggctcctggaggcctctcccagatgggtcctgtgtccctgttccaccctctgaaggccaccctggagcagacacagccggctgtgctccgaggagcccgggttttccttcgacagaagagttccacctccctcagcaatggcggggccatacaaaaccaagagagtggcatcaaagagtctgtctcctggggcactcaaaggacccaggatgcaccccatgaggccaggccacccctggagcgtggccactccacagagatccctgtggggcggtcaggagcactggctgtggacgttcagatgcagagcataacccggaggggccctgatggggagccccagcctgggctggagagccagggtcgagcggcctccatgccccgccttgcggccgagactcagcccgtcacagatgccagccccatgaagcgctccatctccacgctggcccagcggccccgtgggactcatctttgcagcaccaccccggaccgcccaccccctagccaggcgtcgtcgcaccaccaccaccaccgctgccaccgccgcagggacaggaagcagaggtccctggagaaggggcccagcctgtctgccgatatggatggcgcaccaagcagtgctgtggggccggggctgcccccgggagaggggcctacaggctgccggcgggaacgagagcgccggcaggagcggggccggtcccaggagcggaggcagccctcatcctcctcctcggagaagcagcgcttctactcctgcgaccgctttgggggccgtgagcccccgaagcccaagccctccctcagcagccacccaacgtcgccaacagctggccaggagccgggaccccacccacagggcagtggttccgtgaatgggagccccttgctgtcaacatctggtgctagcacccccggccgcggtgggcggaggcagctcccccagacgcccctgactccccgccccagcatcacctacaagacggccaactcctcacccatccacttcgccggggctcagaccagcctccctgccttctccccaggccggctcagccgtgggctttccgaacacaacgccctgctgcagagagaccccctcagccagcccctggcccctggctctcgaattggctctgacccttacctggggcagcgtctggacagtgaggcctctgtccacgccctgcctgaggacactctcactttcgaggaggctgtggccaccaactcgggccgctcctccaggacttcctacgtgtcctccctgacctcccagtctcaccctctccgccgcgtgcccaacggttaccactgcaccctgggactcagctcgggtggccgagcacggcacagctaccaccaccctgaccaagaccactggtgctagctgcaccgtgaccgctcagacgcctgcatgcagcaggcgtgtgttccagtggatgagttttatcatccacacggggcagccggccctcgggggaggccttgcccaccttggtgaggctcctgtggcccctccctccccctcctcccctcttttactctagacgacgaataaagccctgttagaggatgcggctctctctgtccccttcctgtcctgccttcctgggtctcgtaccacacaccagaccctaaaccgcaggctgctgtgtgtggctgagaaggacccaggagtccaaatcccgtgtcctgggactcagcatccagcatgggtgcttggagccgttgtgaggagctctgcgtcctgtggggagcacccttcacgtggccgtgcggcacagagaagcagggcccacctgaaagtgcgccgagacctcgggacggaggggatggggagggggacacagtcgtggcttgtgcagcccgccagtgtcagcgaatgctcactcaggcaagctctgtcctccctggacaccgtcagccccacaggaaccgagctgggaagtgttcttgctgtggttgtgatttttaattgcaacacctctcattcttgtcacttctatatacgtgatgtagaaaaaatggaaaaccagaaaaatggggaaggaaatgttcacataactttaaaaaatcaaacctgtgaaagaaagatgtcagctttttgccacgtgtctttgtggcttatgcgaggagactccctgtgcagccctgtccggtccaggtggacgtagacggcccctggctctgctgctcttgaccaagtgcctgaccgccaggccctcacacccaggctcctgggcactgtggtgtgaggcgaggcctcgggatccatcaccgcaggatgctgtgaaaagtactcgcgatggcagccaggtagcaagcccttgccagtggagagcactggatgtcatggtggcaaacaaggcagccatttgctgtcctcctcccacgagtggaaggggtttccaaggaagccacagggcagctgaccacgtgcttgtgtgaggcattttcagtctgttctgcatatgattctcagggcacactctgtggtatgtgaaataggtttccttccacatacagcagaagagaggcaaaggctggtaggaaggaggaagacattggctgggggcttggatgtggggccgtcagggcaggagggaggaagccccagctggaatgaaactcagagcaagtgaccgagggaggacacggctcctgccactgaggccgggcacctgatgcccagcactgtcctggcgccagacacagggagcaggcagtcaagtgaggtctgacccccatggccacgctcaggagagaaagaccatgctcaggacactgtccaaggtgcacaagatgctgggaggtcccttgtttggtgaagaaagggagcatttagagcagttgatggtggtgtgtcctccgtgttctgaaattccagatgatctgtgttggattcttggcttctaccccatgattctcctcaaagaaattgtgtgtgatgtgtgtgtgtgtgtgtgtgtgtgtgtgtctgtgtcacaggagatgcagtgcctgtacaggtgtgttcagtgtgtggatgtcattaacccatagggctatgcaacaaaagacacatttaatagaagtaaaacacacaagaccgctgcctggtctcggggttcagcatgattgtgaccaaacctttttatagaatttccttacctgaaggcacaacactctgaaactttaaagataacagagtattttattccaatagaataaaccaggaatctcggactgtgcatgtgatcactgtgctcctgttgcaaagtagaaggatgtgtattttgacactgacgttttgtctcttgttccccagcccccagcccatgttatcttgggtgtcgaatgtgtccattccatgcagaaccacagccatttccccaggcagtgttgggtcgagaatccacttttctaaacccacacagcctagctggcttgtctagactcttctaggcattggaattgatgaaaactacagggagcggggaaaggagacattatgtcttgttttcctgactttgggttttgtttctcactgtgtcttctccggctatcatatatgtcccctgaatctcatagtgagctgccaaatttgaagtgcatcacccagttgtctgcatctggaaccagtcaagcagtggctgtagtttgaacaagttatgtgtgcatgtaacatatatacatatatacatatatacaagtatgtgcatgataatgtatatcttcgtactttttgatacaatgtattcatttgttaatttttaattatatttgatataaatcaaaggtttgttgcaaaactttatatttaagaagtgttaaaaaaaaaaaaaagtcccaaccatgcaacacaactgggacctacttaaaaagaaattctgtgattgactagtttgctgcctgagtcatatttatcagccaaactttggattctgctgttgtttctacaatgacattttgtatgaagcaaagtccttgaattaaaataaaaacttagcaaaaaatcaaaaacaaaacccca

SEQ ID NO: 310926 - DNA, 7017 bp, Artificial Sequence
  derived and/or modified sequence
atggtgagattcggcgacgagctgggcggcagatacggcggccccggcggcggcgagagagccagaggcggcggcgccggcggcgccggcggccccggccccggcggcctgcagcccggccagagagtgctgtacaagcagagcatcgcccagagagccagaaccatggccctgtacaaccccatccccgtgaagcagaactgcttcaccgtgaacagaagcctgttcgtgttcagcgaggacaacgtggtgagaaagtacgccaagagaatcaccgagtggccccccttcgagtacatgatcctggccaccatcatcgccaactgcatcgtgctggccctggagcagcacctgcccgacggcgacaagacccccatgagcgagagactggacgacaccgagccctacttcatcggcatcttctgcttcgaggccggcatcaagatcatcgccctgggcttcgtgttccacaagggcagctacctgagaaacggctggaacgtgatggacttcgtggtggtgctgaccggcatcctggccaccgccggcaccgacttcgacctgagaaccctgagagccgtgagagtgctgagacccctgaagctggtgagcggcatccccagcctgcaggtggtgctgaagagcatcatgaaggccatggtgcccctgctgcagatcggcctgctgctgttcttcgccatcctgatgttcgccatcatcggcctggagttctacatgggcaagttccacaaggcctgcttccccaacagcaccgacgccgagcccgtgggcgacttcccctgcggcaaggaggcccccgccagactgtgcgagggcgacaccgagtgcagagagtactggcccggccccaacttcggcatcaccaacttcgacaacatcctgttcgccatcctgaccgtgttccagtgcatcaccatggagggctggaccgacatcctgtacaacaccaacgacgccgccggcaacacctggaactggctgtacttcatccccctgatcatcatcggcagcttcttcatgctgaacctggtgctgggcgtgctgagcggcgagttcgccaaggagagagagagagtggagaacagaagagccttcctgaagctgagaagacagcagcagatcgagagagagctgaacggctacctggagtggatcttcaaggccgaggaggtgatgctggccgaggaggacagaaacgccgaggagaagagccccctggacgccgtgctgaagagagccgccaccaagaagagcagaaacgacctgatccacgccgaggagggcgaggacagattcgccgacctgtgcgccgtgggcagccccttcgccagagccagcctgaagagcggcaagaccgagagcagcagctacttcagaagaaaggagaagatgttcagattcttcatcagaagaatggtgaaggcccagagcttctactgggtggtgctgtgcgtggtggccctgaacaccctgtgcgtggccatggtgcactacaaccagcccagaagactgaccaccaccctgtacttcgccgagttcgtgttcctgggcctgttcctgaccgagatgagcctgaagatgtacggcctgggccccagaagctacttcagaagcagcttcaactgcttcgacttcggcgtgatcgtgggcagcgtgttcgaggtggtgtgggccgccatcaagcccggcagcagcttcggcatcagcgtgctgagagccctgagactgctgagaatcttcaaggtgaccaagtactggagcagcctgagaaacctggtggtgagcctgctgaacagcatgaagagcatcatcagcctgctgttcctgctgttcctgttcatcgtggtgttcgccctgctgggcatgcagctgttcggcggccagttcaacttccaggacgagacccccaccaccaacttcgacaccttccccgccgccatcctgaccgtgttccagatcctgaccggcgaggactggaacgccgtgatgtaccacggcatcgagagccagggcggcgtgagcaagggcatgttcagcagcttctacttcatcgtgctgaccctgttcggcaactacaccctgctgaacgtgttcctggccatcgccgtggacaacctggccaacgcccaggagctgaccaaggacgaggaggagatggaggaggccgccaaccagaagctggccctgcagaaggccaaggaggtggccgaggtgagccccatgagcgccgccaacatcagcatcgccgccagacagcagaacagcgccaaggccagaagcgtgtgggagcagagagccagccagctgagactgcagaacctgagagccagctgcgaggccctgtacagcgagatggaccccgaggagagactgagattcgccaccaccagacacctgagacccgacatgaagacccacctggacagacccctggtggtggagctgggcagagacggcgccagaggccccgtgggcggcaaggccagacccgaggccgccgaggcccccgagggcgtggacccccccagaagacaccacagacacagagacaaggacaagacccccgccgccggcgaccaggacagagccgaggcccccaaggccgagagcggcgagcccggcgccagagaggagagacccagaccccacagaagccacagcaaggaggccgccggcccccccgaggccagaagcgagagaggcagaggccccggccccgagggcggcagaagacaccacagaagaggcagccccgaggaggccgccgagagagagcccagaagacacagagcccacagacaccaggaccccagcaaggagtgcgccggcgccaagggcgagagaagagccagacacagaggcggccccagagccggccccagagaggccgagagcggcgaggagcccgccagaagacacagagccagacacaaggcccagcccgcccacgaggccgtggagaaggagaccaccgagaaggaggccaccgagaaggaggccgagatcgtggaggccgacaaggagaaggagctgagaaaccaccagcccagagagccccactgcgacctggagaccagcggcaccgtgaccgtgggccccatgcacaccctgcccagcacctgcctgcagaaggtggaggagcagcccgaggacgccgacaaccagagaaacgtgaccagaatgggcagccagccccccgaccccaacaccatcgtgcacatccccgtgatgctgaccggccccctgggcgaggccaccgtggtgcccagcggcaacgtggacctggagagccaggccgagggcaagaaggaggtggaggccgacgacgtgatgagaagcggccccagacccatcgtgccctacagcagcatgttctgcctgagccccaccaacctgctgagaagattctgccactacatcgtgaccatgagatacttcgaggtggtgatcctggtggtgatcgccctgagcagcatcgccctggccgccgaggaccccgtgagaaccgacagccccagaaacaacgccctgaagtacctggactacatcttcaccggcgtgttcaccttcgagatggtgatcaagatgatcgacctgggcctgctgctgcaccccggcgcctacttcagagacctgtggaacatcctggacttcatcgtggtgagcggcgccctggtggccttcgccttcagcggcagcaagggcaaggacatcaacaccatcaagagcctgagagtgctgagagtgctgagacccctgaagaccatcaagagactgcccaagctgaaggccgtgttcgactgcgtggtgaacagcctgaagaacgtgctgaacatcctgatcgtgtacatgctgttcatgttcatcttcgccgtgatcgccgtgcagctgttcaagggcaagttcttctactgcaccgacgagagcaaggagctggagagagactgcagaggccagtacctggactacgagaaggaggaggtggaggcccagcccagacagtggaagaagtacgacttccactacgacaacgtgctgtgggccctgctgaccctgttcaccgtgagcaccggcgagggctggcccatggtgctgaagcacagcgtggacgccacctacgaggagcagggccccagccccggctacagaatggagctgagcatcttctacgtggtgtacttcgtggtgttccccttcttcttcgtgaacatcttcgtggccctgatcatcatcaccttccaggagcagggcgacaaggtgatgagcgagtgcagcctggagaagaacgagagagcctgcatcgacttcgccatcagcgccaagcccctgaccagatacatgccccagaacagacagagcttccagtacaagacctggaccttcgtggtgagcccccccttcgagtacttcatcatggccatgatcgccctgaacaccgtggtgctgatgatgaagttctacgacgccccctacgagtacgagctgatgctgaagtgcctgaacatcgtgttcaccagcatgttcagcatggagtgcgtgctgaagatcatcgccttcggcgtgctgaactacttcagagacgcctggaacgtgttcgacttcgtgaccgtgctgggcagcatcaccgacatcctggtgaccgagatcgccaacaacttcatcaacctgagcttcctgagactgttcagagccgccagactgatcaagctgctgagacagggctacaccatcagaatcctgctgtggaccttcgtgcagagcttcaaggccctgccctacgtgtgcctgctgatcgccatgctgttcttcatctacgccatcatcggcatgcaggtgttcggcaacatcgccctggacgacgacaccagcatcaacagacacaacaacttcagaaccttcctgcaggccctgatgctgctgttcagaagcgccaccggcgaggcctggcacgagatcatgctgagctgcctgagcaaccaggcctgcgacgagcaggccaacgccaccgagtgcggcagcgacttcgcctacttctacttcgtgagcttcatcttcctgtgcagcttcctgatgctgaacctgttcgtggccgtgatcatggacaacttcgagtacctgaccagagacagcagcatcctgggcccccaccacctggacgagttcatcagagtgtgggccgagtacgaccccgccgcctgcggcagaatcagctacaacgacatgttcgagatgctgaagcacatgagcccccccctgggcctgggcaagaagtgccccgccagagtggcctacaagagactggtgagaatgaacatgcccatcagcaacgaggacatgaccgtgcacttcaccagcaccctgatggccctgatcagaaccgccctggagatcaagctggcccccgccggcaccaagcagcaccagtgcgacgccgagctgagaaaggagatcagcgtggtgtgggccaacctgccccagaagaccctggacctgctggtgcccccccacaagcccgacgagatgaccgtgggcaaggtgtacgccgccctgatgatcttcgacttctacaagcagaacaagaccaccagagaccagatgcagcaggcccccggcggcctgagccagatgggccccgtgagcctgttccaccccctgaaggccaccctggagcagacccagcccgccgtgctgagaggcgccagagtgttcctgagacagaagagcagcaccagcctgagcaacggcggcgccatccagaaccaggagagcggcatcaaggagagcgtgagctggggcacccagagaacccaggacgccccccacgaggccagaccccccctggagagaggccacagcaccgagatccccgtgggcagaagcggcgccctggccgtggacgtgcagatgcagagcatcaccagaagaggccccgacggcgagccccagcccggcctggagagccagggcagagccgccagcatgcccagactggccgccgagacccagcccgtgaccgacgccagccccatgaagagaagcatcagcaccctggcccagagacccagaggcacccacctgtgcagcaccacccccgacagacccccccccagccaggccagcagccaccaccaccaccacagatgccacagaagaagagacagaaagcagagaagcctggagaagggccccagcctgagcgccgacatggacggcgcccccagcagcgccgtgggccccggcctgccccccggcgagggccccaccggctgcagaagagagagagagagaagacaggagagaggcagaagccaggagagaagacagcccagcagcagcagcagcgagaagcagagattctacagctgcgacagattcggcggcagagagccccccaagcccaagcccagcctgagcagccaccccaccagccccaccgccggccaggagcccggcccccacccccagggcagcggcagcgtgaacggcagccccctgctgagcaccagcggcgccagcacccccggcagaggcggcagaagacagctgccccagacccccctgacccccagacccagcatcacctacaagaccgccaacagcagccccatccacttcgccggcgcccagaccagcctgcccgccttcagccccggcagactgagcagaggcctgagcgagcacaacgccctgctgcagagagaccccctgagccagcccctggcccccggcagcagaatcggcagcgacccctacctgggccagagactggacagcgaggccagcgtgcacgccctgcccgaggacaccctgaccttcgaggaggccgtggccaccaacagcggcagaagcagcagaaccagctacgtgagcagcctgaccagccagagccaccccctgagaagagtgcccaacggctaccactgcaccctgggcctgagcagcggcggcagagccagacacagctaccaccaccccgaccaggaccactggtgctag

SEQ ID NO: 310927 - DNA, 7014 bp, Artificial Sequence
  derived and/or modified sequence
atggtgagattcggcgacgagctgggcggcagatacggcggccccggcggcggcgagagagccagaggcggcggcgccggcggcgccggcggccccggccccggcggcctgcagcccggccagagagtgctgtacaagcagagcatcgcccagagagccagaaccatggccctgtacaaccccatccccgtgaagcagaactgcttcaccgtgaacagaagcctgttcgtgttcagcgaggacaacgtggtgagaaagtacgccaagagaatcaccgagtggccccccttcgagtacatgatcctggccaccatcatcgccaactgcatcgtgctggccctggagcagcacctgcccgacggcgacaagacccccatgagcgagagactggacgacaccgagccctacttcatcggcatcttctgcttcgaggccggcatcaagatcatcgccctgggcttcgtgttccacaagggcagctacctgagaaacggctggaacgtgatggacttcgtggtggtgctgaccggcatcctggccaccgccggcaccgacttcgacctgagaaccctgagagccgtgagagtgctgagacccctgaagctggtgagcggcatccccagcctgcaggtggtgctgaagagcatcatgaaggccatggtgcccctgctgcagatcggcctgctgctgttcttcgccatcctgatgttcgccatcatcggcctggagttctacatgggcaagttccacaaggcctgcttccccaacagcaccgacgccgagcccgtgggcgacttcccctgcggcaaggaggcccccgccagactgtgcgagggcgacaccgagtgcagagagtactggcccggccccaacttcggcatcaccaacttcgacaacatcctgttcgccatcctgaccgtgttccagtgcatcaccatggagggctggaccgacatcctgtacaacaccaacgacgccgccggcaacacctggaactggctgtacttcatccccctgatcatcatcggcagcttcttcatgctgaacctggtgctgggcgtgctgagcggcgagttcgccaaggagagagagagagtggagaacagaagagccttcctgaagctgagaagacagcagcagatcgagagagagctgaacggctacctggagtggatcttcaaggccgaggaggtgatgctggccgaggaggacagaaacgccgaggagaagagccccctggacgtgctgaagagagccgccaccaagaagagcagaaacgacctgatccacgccgaggagggcgaggacagattcgccgacctgtgcgccgtgggcagccccttcgccagagccagcctgaagagcggcaagaccgagagcagcagctacttcagaagaaaggagaagatgttcagattcttcatcagaagaatggtgaaggcccagagcttctactgggtggtgctgtgcgtggtggccctgaacaccctgtgcgtggccatggtgcactacaaccagcccagaagactgaccaccaccctgtacttcgccgagttcgtgttcctgggcctgttcctgaccgagatgagcctgaagatgtacggcctgggccccagaagctacttcagaagcagcttcaactgcttcgacttcggcgtgatcgtgggcagcgtgttcgaggtggtgtgggccgccatcaagcccggcagcagcttcggcatcagcgtgctgagagccctgagactgctgagaatcttcaaggtgaccaagtactggagcagcctgagaaacctggtggtgagcctgctgaacagcatgaagagcatcatcagcctgctgttcctgctgttcctgttcatcgtggtgttcgccctgctgggcatgcagctgttcggcggccagttcaacttccaggacgagacccccaccaccaacttcgacaccttccccgccgccatcctgaccgtgttccagatcctgaccggcgaggactggaacgccgtgatgtaccacggcatcgagagccagggcggcgtgagcaagggcatgttcagcagcttctacttcatcgtgctgaccctgttcggcaactacaccctgctgaacgtgttcctggccatcgccgtggacaacctggccaacgcccaggagctgaccaaggacgaggaggagatggaggaggccgccaaccagaagctggccctgcagaaggccaaggaggtggccgaggtgagccccatgagcgccgccaacatcagcatcgccgccagacagcagaacagcgccaaggccagaagcgtgtgggagcagagagccagccagctgagactgcagaacctgagagccagctgcgaggccctgtacagcgagatggaccccgaggagagactgagattcgccaccaccagacacctgagacccgacatgaagacccacctggacagacccctggtggtggagctgggcagagacggcgccagaggccccgtgggcggcaaggccagacccgaggccgccgaggcccccgagggcgtggacccccccagaagacaccacagacacagagacaaggacaagacccccgccgccggcgaccaggacagagccgaggcccccaaggccgagagcggcgagcccggcgccagagaggagagacccagaccccacagaagccacagcaaggaggccgccggcccccccgaggccagaagcgagagaggcagaggccccggccccgagggcggcagaagacaccacagaagaggcagccccgaggaggccgccgagagagagcccagaagacacagagcccacagacaccaggaccccagcaaggagtgcgccggcgccaagggcgagagaagagccagacacagaggcggccccagagccggccccagagaggccgagagcggcgaggagcccgccagaagacacagagccagacacaaggcccagcccgcccacgaggccgtggagaaggagaccaccgagaaggaggccaccgagaaggaggccgagatcgtggaggccgacaaggagaaggagctgagaaaccaccagcccagagagccccactgcgacctggagaccagcggcaccgtgaccgtgggccccatgcacaccctgcccagcacctgcctgcagaaggtggaggagcagcccgaggacgccgacaaccagagaaacgtgaccagaatgggcagccagccccccgaccccaacaccatcgtgcacatccccgtgatgctgaccggccccctgggcgaggccaccgtggtgcccagcggcaacgtggacctggagagccaggccgagggcaagaaggaggtggaggccgacgacgtgatgagaagcggccccagacccatcgtgccctacagcagcatgttctgcctgagccccaccaacctgctgagaagattctgccactacatcgtgaccatgagatacttcgaggtggtgatcctggtggtgatcgccctgagcagcatcgccctggccgccgaggaccccgtgagaaccgacagccccagaaacaacgccctgaagtacctggactacatcttcaccggcgtgttcaccttcgagatggtgatcaagatgatcgacctgggcctgctgctgcaccccggcgcctacttcagagacctgtggaacatcctggacttcatcgtggtgagcggcgccctggtggccttcgccttcagcggcagcaagggcaaggacatcaacaccatcaagagcctgagagtgctgagagtgctgagacccctgaagaccatcaagagactgcccaagctgaaggccgtgttcgactgcgtggtgaacagcctgaagaacgtgctgaacatcctgatcgtgtacatgctgttcatgttcatcttcgccgtgatcgccgtgcagctgttcaagggcaagttcttctactgcaccgacgagagcaaggagctggagagagactgcagaggccagtacctggactacgagaaggaggaggtggaggcccagcccagacagtggaagaagtacgacttccactacgacaacgtgctgtgggccctgctgaccctgttcaccgtgagcaccggcgagggctggcccatggtgctgaagcacagcgtggacgccacctacgaggagcagggccccagccccggctacagaatggagctgagcatcttctacgtggtgtacttcgtggtgttccccttcttcttcgtgaacatcttcgtggccctgatcatcatcaccttccaggagcagggcgacaaggtgatgagcgagtgcagcctggagaagaacgagagagcctgcatcgacttcgccatcagcgccaagcccctgaccagatacatgccccagaacagacagagcttccagtacaagacctggaccttcgtggtgagcccccccttcgagtacttcatcatggccatgatcgccctgaacaccgtggtgctgatgatgaagttctacgacgccccctacgagtacgagctgatgctgaagtgcctgaacatcgtgttcaccagcatgttcagcatggagtgcgtgctgaagatcatcgccttcggcgtgctgaactacttcagagacgcctggaacgtgttcgacttcgtgaccgtgctgggcagcatcaccgacatcctggtgaccgagatcgccaacaacttcatcaacctgagcttcctgagactgttcagagccgccagactgatcaagctgctgagacagggctacaccatcagaatcctgctgtggaccttcgtgcagagcttcaaggccctgccctacgtgtgcctgctgatcgccatgctgttcttcatctacgccatcatcggcatgcaggtgttcggcaacatcgccctggacgacgacaccagcatcaacagacacaacaacttcagaaccttcctgcaggccctgatgctgctgttcagaagcgccaccggcgaggcctggcacgagatcatgctgagctgcctgagcaaccaggcctgcgacgagcaggccaacgccaccgagtgcggcagcgacttcgcctacttctacttcgtgagcttcatcttcctgtgcagcttcctgatgctgaacctgttcgtggccgtgatcatggacaacttcgagtacctgaccagagacagcagcatcctgggcccccaccacctggacgagttcatcagagtgtgggccgagtacgaccccgccgcctgcggcagaatcagctacaacgacatgttcgagatgctgaagcacatgagcccccccctgggcctgggcaagaagtgccccgccagagtggcctacaagagactggtgagaatgaacatgcccatcagcaacgaggacatgaccgtgcacttcaccagcaccctgatggccctgatcagaaccgccctggagatcaagctggcccccgccggcaccaagcagcaccagtgcgacgccgagctgagaaaggagatcagcgtggtgtgggccaacctgccccagaagaccctggacctgctggtgcccccccacaagcccgacgagatgaccgtgggcaaggtgtacgccgccctgatgatcttcgacttctacaagcagaacaagaccaccagagaccagatgcagcaggcccccggcggcctgagccagatgggccccgtgagcctgttccaccccctgaaggccaccctggagcagacccagcccgccgtgctgagaggcgccagagtgttcctgagacagaagagcagcaccagcctgagcaacggcggcgccatccagaaccaggagagcggcatcaaggagagcgtgagctggggcacccagagaacccaggacgccccccacgaggccagaccccccctggagagaggccacagcaccgagatccccgtgggcagaagcggcgccctggccgtggacgtgcagatgcagagcatcaccagaagaggccccgacggcgagccccagcccggcctggagagccagggcagagccgccagcatgcccagactggccgccgagacccagcccgtgaccgacgccagccccatgaagagaagcatcagcaccctggcccagagacccagaggcacccacctgtgcagcaccacccccgacagacccccccccagccaggccagcagccaccaccaccaccacagatgccacagaagaagagacagaaagcagagaagcctggagaagggccccagcctgagcgccgacatggacggcgcccccagcagcgccgtgggccccggcctgccccccggcgagggccccaccggctgcagaagagagagagagagaagacaggagagaggcagaagccaggagagaagacagcccagcagcagcagcagcgagaagcagagattctacagctgcgacagattcggcggcagagagccccccaagcccaagcccagcctgagcagccaccccaccagccccaccgccggccaggagcccggcccccacccccagggcagcggcagcgtgaacggcagccccctgctgagcaccagcggcgccagcacccccggcagaggcggcagaagacagctgccccagacccccctgacccccagacccagcatcacctacaagaccgccaacagcagccccatccacttcgccggcgcccagaccagcctgcccgccttcagccccggcagactgagcagaggcctgagcgagcacaacgccctgctgcagagagaccccctgagccagcccctggcccccggcagcagaatcggcagcgacccctacctgggccagagactggacagcgaggccagcgtgcacgccctgcccgaggacaccctgaccttcgaggaggccgtggccaccaacagcggcagaagcagcagaaccagctacgtgagcagcctgaccagccagagccaccccctgagaagagtgcccaacggctaccactgcaccctgggcctgagcagcggcggcagagccagacacagctaccaccaccccgaccaggaccactggtgctag

SEQ ID NO: 310928 - protein, 108 aa, Artificial Sequence
  derived and/or modified sequence
LRNHQPREPHCDLETSGTVTVGPMHTLPSTCLQKVEEQPEDADNQRNVTRMGSQPPDPNTIVHIPVMLTGPLGEATVVPTLEKNVCLFLLTSMVSDEKSTVIRIVFFL

SEQ ID NO: 310929 - protein, 187 aa, Artificial Sequence
  derived and/or modified sequence
LRNHQPREPHCDLETSGTVTVGPMHTLPSTCLQKVEEQPEDADNQRNVTRMGSQPPDPNTIVHIPVMLTGPLGEATVVPSPTIGRLQAEEQGEPARVSKLNLESDVRGQEASSTGERYRLGGGNVDLESQAEGKKEVEADDVMRSGPRPIVPYSSMFCLSPTNLLRRFCHYIVTMRYFEVVILVVIA

SEQ ID NO: 310930 - DNA, 306 bp, Artificial Sequence
  derived and/or modified sequence
gataacctggccaacgcgcaggagctgacaaaagacgaggaagaaatggaggaagctgcaaaccagaaactcgctctccagaaggccaaagaagtggccgaggtgtccccaatgagcgctgctaacatttctatcgcggcttttgtgaaacaggcccgaggtacagtgtctaggagcagctcagttagcagtgtgaactccccacggcagcagaactcagccaaagcccgatccgtttgggagcagcgggcttcccagttaagattacagaatcttagggcatcatgcgaagctctctattcttag

SEQ ID NO: 310931 - DNA, 327 bp, Artificial Sequence
  derived and/or modified sequence
ctgagaaatcatcagccccgtgaaccccattgtgatctggagacgtccggaacggtcacggtagggccaatgcacaccttacctagtacatgcctgcagaaagtggaggagcagcctgaggatgcagataatcaacgcaacgtgacgcgcatgggctcgcagccacctgatccaaataccatcgtgcacatcccggtcatgttaacaggtcccttaggagaagcaacagtggtcccaaccttggaaaagaatgtgtgcctattccttttaacaagtatggtgtcggacgagaaaagtacggtgattagaatagttttcttcttatag

SEQ ID NO: 310932 - DNA, 306 bp, Artificial Sequence
  derived and/or modified sequence
gacaacctggccaatgcccaggagctgaccaaggatgaggaggagatggaggaggccgccaaccagaagctggccctgcagaaggccaaggaggtggccgaggtgagccccatgtctgctgccaacatcagcattgctgcctttgtgaagcaggcccggggcaccgtgagccgcagcagctctgtgtcctctgtgaacagcccccggcagcagaacagcgccaaggcccggtctgtgtgggagcagagggccagccagctgcggctgcagaacctgcgggccagctgtgaggccctgtacagctag

SEQ ID NO: 310933 - DNA, 327 bp, Artificial Sequence
  derived and/or modified sequence
ctgaggaaccaccagccccgggagccccactgtgacctggagaccagcggcaccgtgacagtgggccccatgcacaccctgcccagcacctgcctgcagaaggtggaggagcagccagaagatgctgacaaccagagaaatgtgaccaggatgggcagccagcccccagaccccaacaccatcgtgcacatccctgtgatgctgaccggccccctgggggaggccaccgtggtgcccaccctggagaagaatgtgtgcctcttcctgctgacctccatggtgtctgatgagaagagcaccgtcatccgcatcgtgttcttcctgtag

SEQ ID NO: 310934 - DNA, 306 bp, Artificial Sequence
  derived and/or modified sequence
gacaacctggccaacgcccaggagctgaccaaggacgaggaggagatggaagaggccgcgaatcagaaactggccctgcaaaaggcgaaggaggttgcggaagtaagcccaatgagtgccgctaatatcagcatcgctgccttcgtgaagcaggcacggggaacagtgagccggtcaagttctgtgtcctctgtcaacagtccgcgccaacaaaatagtgcaaaggcgagatccgtgtgggaacagcgcgctagtcaactcagactgcagaacctgagggcctcctgtgaggcactgtactcgtag

SEQ ID NO: 310935 - DNA, 327 bp, Artificial Sequence
  derived and/or modified sequence
ctgcggaaccaccagccccgggagccccactgcgacctggagaccagcggcaccgtgactgtgggcccaatgcacactctgccttcaacctgtttgcagaaagtggaggagcaacctgaggatgctgataatcagcggaacgtgacaaggatggggtctcaacctcctgatcccaacactatcgtgcatatccctgtgatgctaacggggcctctcggtgaggcgacggtggtcccaaccctggaaaagaacgtatgtttgttcctgctgacatctatggtgagtgacgagaagagcactgttattcgaatcgtgttctttctgtag

SEQ ID NO: 310936 - DNA, 306 bp, Artificial Sequence
  derived and/or modified sequence
gacaatttagctaacgcccaggaattaactaaagatgaggaagaaatggaagaggccgcaaatcagaaactggctctgcagaaagccaaagaggtggctgaggtgtcaccaatgagcgcggcaaatataagcatagccgcttttgtgaagcaggctcgtggcacagtcagccggagtagttccgtttcctcggtgaacagccctcgacagcagaattccgcgaaagcaagatccgtttgggagcaacgcgcttcacagttaaggctgcagaacttgagggctagctgtgaagcattgtactcctag

SEQ ID NO: 310937 - DNA, 327 bp, Artificial Sequence
  derived and/or modified sequence
ttaaggaatcaccagcccagggagccccactgtgacctggagaccagcggtacagtgacagtcggtccaatgcacacactgcctagcacatgtcttcagaaggtggaagaacagcccgaagacgctgacaaccagcgtaacgtaacgcgtatgggctctcaaccacccgaccccaataccatcgtgcatatcccagtaatgctcactgggcctttaggcgaagctaccgtagtccctacgctcgagaaaaacgtttgcctgtttcttctaacaagcatggtctctgacgaaaaatccactgtgatcagaattgtattctttttgtag

SEQ ID NO: 310938 - DNA, 303 bp, Artificial Sequence
  derived and/or modified sequence
gacaacctggccaacgcccaagagctgaccaaggatgaagaggagatggaagaagcagccaatcagaagcttgctctgcaaaaggccaaagaagtggctgaagtcagccccatgtctgccgcgaacatctccatcgccgcttttgtaaagcaagctcgaggtactgtatctcgcagctcatctgtctccagcgtgaactcacccaggcagcagaactcggccaaggcgcgctcggtgtgggagcagcgggccagccagctacggctgcagaacctgcgggccagctgcgaggcgctgtacagc

SEQ ID NO: 310939 - DNA, 770 bp, Artificial Sequence
  derived and/or modified sequence
ctccggaaccaccagccccgggagccacactgtgacctggagaccagtgggactgtgactgtgggtcccatgcacacactgcccagcacctgtctccagaaggtggaggaacagccagaggatgcagacaatcagcggaacgtcactcgcatgggcagtcagcccccagacccgaacactattgtacatatcccagtgatgctgacgggccctcttggggaagccacggtcgttcccagtcccacaataggccgtctgcaagctgaggagcaaggagagccagcccgagtctcaaagctgaacttggagtccgatgttcgagggcaggaagcgtccagcacgggagaaagatataggctgggaggtggtaacgtggacctggaaagccaagcagaggggaagaaggaggtggaagcggatgacgtgatgaggagcggcccccggcctatcgtcccatacagctccatgttctgtttaagccccaccaacctgctccgccgcttctgccactacatcgtgaccatgaggtacttcgaggtggtcattctcgtggtcatcgccttgagcagcatcgccctggctgctgaggacccagtgcgcacagactcgcccaggaacaacgctctgaaatacctggattacattttcactggtgtctttacctttgagatggtgataaagatgatcgacttgggactgctgcttcaccctggagcctatttccgggacttgtggaacattctggacttcattgtggtcagtggcgccct

SEQ ID NO: 310940 - DNA, 306 bp, Artificial Sequence
  derived and/or modified sequence
gacaacctggccaacgcccaggagctgaccaaggacgaggaggagatggaggaggccgccaaccagaagctggccctgcagaaggccaaggaggtggccgaggtgagccccatgagcgccgccaacatcagcatcgccgccttcgtgaagcaggccagaggcaccgtgagcagaagcagcagcgtgagcagcgtgaacagccccagacagcagaacagcgccaaggccagaagcgtgtgggagcagagagccagccagctgagactgcagaacctgagagccagctgcgaggccctgtacagctag

SEQ ID NO: 310941 - DNA, 327 bp, Artificial Sequence
  derived and/or modified sequence
ctgagaaaccaccagcccagagagccccactgcgacctggagaccagcggcaccgtgaccgtgggccccatgcacaccctgcccagcacctgcctgcagaaggtggaggagcagcccgaggacgccgacaaccagagaaacgtgaccagaatgggcagccagccccccgaccccaacaccatcgtgcacatccccgtgatgctgaccggccccctgggcgaggccaccgtggtgcccaccctggagaagaacgtgtgcctgttcctgctgaccagcatggtgagcgacgagaagagcaccgtgatcagaatcgtgttcttcctgtag

SEQ ID NO: 310942 - DNA, 459 bp, Artificial Sequence
  derived and/or modified sequence
atgcccggcctggttttcttcaagtttgccaacctgggaggaggatggggttctcgtaaaatgctggagcccggtatgtgccccgccgagatgagcttaacacccttcgtgacccgttctctgaacctgctctgcttcagtgtgactcaccgagggcgaggcaaggataatccattacacttctttctccagctgttggctccatcggcttctgcctctctcggtctcggcagggagaccgggcccctcccttcaccgggactaagcccagggctgctgtccgaaaccttcgtcagcgagggccctctcctgacattacagatctcctggtgcggaacagagtgtctcatggacggtcaggggccgttaattcatctgcactcacagaacattcgcattagtttcggagcaacgcaacccccacttctgttggtgtacgagatccgctggaacagatag

SEQ ID NO: 310943 - DNA, 495 bp, Artificial Sequence
  derived and/or modified sequence
aatttcagaacattcttgcaggcactgatgctgcttttcaggtcagctactggggaagcctggcacgaaatcatgcttagttgcctgtccaatcaggcttgtgatgagcaggccaatgcaactgaatgcggcagcgattttgcttatttttattttgtgtcttttatatttctgtgttcctttcttatgttgaatctgttcgttgctgtgattatggataactttgagtacctaactcgagatagcagtatccttggtccccaccatcttgatgagtttattagggtttgggccgaatacgaccccgctgcatgctgccggatccactacaaggatatgtactctctgctccggtgtatagctcctcccgtgggcctcggaaagaattgccctcgcagactagcctacaagaggttagttcggatgaatatgccgattagcaatgaagacatgaccgtgcattttacaagcacgctcatggctctgatcaggtag

SEQ ID NO: 310944 - DNA, 498 bp, Artificial Sequence
  derived and/or modified sequence
tgaaactttcgtacctttctgcaggcgctcatgctgctcttccgcagcgccacgggcgaggcgtggcacgagatcatgctctcctgcctcagcaatcaggcgtgcgatgagcaggcaaatgcaacagagtgcggttctgacttcgcctatttctacttcgtgtcgtttattttcctatgtagcttcttaatgctgaatctcttcgtcgctgtaatcatggacaacttcgaatatctcaccagggatagtagtatcctgggcccccaccacctggatgagtttatccgggtgtgggctgagtacgatcctgctgcttgttgccggatccactataaggacatgtactcactgctgagatgtatagcccccccggtgggactcgggaaaaattgcccgcgtagacttgcttacaagcggttagtgcggatgaatatgcctatctcaaatgaagacatgacggtgcatttcacttcaaccctgatggcactgatccgttag

SEQ ID NO: 310945 - DNA, 495 bp, Artificial Sequence
  derived and/or modified sequence
aacttccgcaccttcctgcaggccctgatgctgctcttccgcagcgccactggagaggcctggcatgagatcatgctgagctgcctgagcaaccaggcctgtgatgagcaggccaatgccacagaatgtggcagtgactttgcctacttctactttgtgtccttcatcttcctgtgcagcttcctgatgctgaacctgtttgtggccgtcatcatggacaactttgagtacctgacccgggacagcagcatcctgggcccccaccacctggatgagttcatccgggtgtgggccgagtatgaccctgctgcctgctgccgcatccactacaaggacatgtacagcctgctgcgctgcatcgcccctcctgtgggcctgggcaagaactgcccccggcggctggcctacaagaggctggtgaggatgaacatgcccatcagcaatgaagacatgacagtgcacttcaccagcaccctgatggccctgatcagatag

SEQ ID NO: 310946 - DNA, 498 bp, Artificial Sequence
  derived and/or modified sequence
tgaaacttccgcaccttcctgcaggccctgatgctgctcttccgcagcgccaccggggaggcctggcatgagatcatgctgagctgcctgagcaaccaggcctgtgatgagcaggccaatgccacagaatgtggcagtgactttgcctacttctactttgtgtccttcatcttcctgtgcagcttcctgatgctgaacctgtttgtggccgtcatcatggacaactttgagtacctgacccgggacagcagcatcctgggcccccaccacctggatgagttcatccgggtgtgggccgagtatgaccctgctgcctgctgccgcatccactacaaggacatgtacagcctgctgcgctgcatcgcccctcctgtgggcctgggcaagaactgcccccggcggctggcctacaagaggctggtgaggatgaacatgcccatcagcaatgaagacatgacagtgcacttcaccagcaccctgatggccctgatcagatag

SEQ ID NO: 310947 - DNA, 495 bp, Artificial Sequence
  derived and/or modified sequence
aacttccggaccttcctgcaggccctgatgctgctgttccggagcgccacaggcgaagcttggcacgaaatcatgctgtcctgcttaagtaatcaggcctgcgatgagcaggccaacgccacagagtgcggctcggactttgcttacttttatttcgtctcttttatctttctctgttctttcctgatgctgaacctgtttgtggccgtgataatggacaactttgaatatttgacccgcgactcaagcatcttggggccacatcatctggatgagtttatcagagtatgggccgaatatgacccagcggcatgttgccgcatccactacaaggatatgtacagtctattacgctgtatagcacctccagtcgggttgggcaaaaattgccccagacgattggcctacaagcggctggtccgtatgaacatgccaatctccaacgaagacatgacagtgcacttcacttctactctgatggctcttatcagatag

SEQ ID NO: 310948 - DNA, 498 bp, Artificial Sequence
  derived and/or modified sequence
tgaaacttccggaccttcctgcaggccctgatgctgctgttccggagcgccactggagaggcttggcatgaaatcatgttgtcatgtctcagtaatcaagcatgtgacgagcaggcaaatgctaccgagtgcggcagcgacttcgcctatttctactttgtgtctttcatcttcctttgttccttcctgatgttgaatcttttcgtggccgtgattatggataacttcgagtatctgactcgcgatagtagcatccttgggccgcaccatctggacgagttcatacgggtatgggccgaatacgacccagctgcttgttgccgtatccattataaagatatgtactctctgctgaggtgtatcgccccacccgttggcctaggaaaaaactgcccccggagactggcctacaagcgccttgtgagaatgaatatgccaatctctaatgaagacatgacagtgcattttacaagcacattgatggcccttatcagatag

SEQ ID NO: 310949 - DNA, 495 bp, Artificial Sequence
  derived and/or modified sequence
aacttccggacctttctgcaggcactaatgttgcttttcaggtcggctaccggagaggcttggcatgagatcatgctctcctgcctgagcaatcaagcgtgtgatgagcaagccaacgcaacagagtgtggatcagattttgcgtacttttacttcgtgtcgtttattttcctgtgtagttttttaatgctgaacctgtttgtcgccgtaatcatggacaattttgagtatctgacacgtgatagcagcattctagggccacatcaccttgatgagtttatccgggtgtgggccgagtacgatccagccgcatgttgccggatccactacaaggatatgtattccctgttaaggtgcatcgccccacccgtggggctcgggaagaactgtccgcgacgtttggcttacaaaaggcttgtgaggatgaacatgccaatctcgaacgaggacatgaccgtccactttacctccacgcttatggctcttatccgttag

SEQ ID NO: 310950 - DNA, 498 bp, Artificial Sequence
  derived and/or modified sequence
taaaattttagaactttccttcaggctctgatgctgctgtttaggtccgcaaccggcgaggcatggcatgaaattatgttgtcttgcctgtctaatcaagcatgcgacgagcaggccaacgctacagaatgcggtagtgactttgcatacttctactttgttagttttattttcctgtgttcttttctgatgttgaatcttttcgttgctgttattatggacaattttgaatatctcacgagggactcctcgatactcggcccacaccaccttgatgagtttatcagagtctgggcagagtacgatcccgcagcttgttgtagaatccattataaagatatgtatagtttgctgcgatgtattgcaccccctgtgggcttaggcaaaaactgcccaaggcggctcgcctataaaagactggtcagaatgaacatgcctatatcaaacgaggacatgactgtgcacttcacatctaccctaatggcccttataaggtag

SEQ ID NO: 310951 - DNA, 683 bp, Artificial Sequence
  derived and/or modified sequence
gggaatattgccctggatgatgacaccagcatcaaccgccacaacaacttccggacgtttttgcaagccctgatgctgctgttcaggagcgccacgggggaggcctggcacgagatcatgctgtcctgcctgagcaaccaggcctgtgatgagcaggccaatgccaccgagtgtggaagtgactttgcctacttctacttcgtctccttcatcttcctgtgctcctttctgatgttgaacctctttgtggctgtgatcatggacaattttgagtacctcacgcgggactcttccatcctaggtcctcaccacttggatgagttcatccgggtctgggctgaatacgacccggctgcgtgttgccggattcattataaggatatgtacagtttgttgcgttgtattgcgccacccgttggcttagggaagaactgccctcgtaggttggcctacaagcgcctggttcgcatgaacatgcccatctccaacgaggacatgactgttcacttcacgtccacgctgatggccctcatccggacggcactggagatcaagctggccccagctgggacaaagcagcatcagtgtgacgcggagttgaggaaggagatttccgttgtgtgggccaatctgccccagaagactttggacttgctggtaccaccccataagcgtaagtgtga

SEQ ID NO: 310952 - DNA, 492 bp, Artificial Sequence
  derived and/or modified sequence
caacttccggacgtttttgcaagccctgatgctgctgttcaggagcgccacgggggaggcctggcacgagatcatgctgtcctgcctgagcaaccaggcctgtgatgagcaggccaatgccaccgagtgtggaagtgactttgcctacttctacttcgtctccttcatcttcctgtgctcctttctgatgttgaacctctttgtggctgtgatcatggacaattttgagtacctcacgcgggactcttccatcctaggtcctcaccacttggatgagttcatccgggtctgggctgaatacgacccggctgcgtgttgccggattcattataaggatatgtacagtttgttgcgttgtattgcgccacccgttggcttagggaagaactgccctcgtaggttggcctacaagcgcctggttcgcatgaacatgcccatctccaacgaggacatgactgttcacttcacgtccacgctgatggccctcatccg

SEQ ID NO: 310953 - DNA, 495 bp, Artificial Sequence
  derived and/or modified sequence
aacttcagaaccttcctgcaggccctgatgctgctgttcagaagcgccaccggcgaggcctggcacgagatcatgctgagctgcctgagcaaccaggcctgcgacgagcaggccaacgccaccgagtgcggcagcgacttcgcctacttctacttcgtgagcttcatcttcctgtgcagcttcctgatgctgaacctgttcgtggccgtgatcatggacaacttcgagtacctgaccagagacagcagcatcctgggcccccaccacctggacgagttcatcagagtgtgggccgagtacgaccccgccgcctgctgcagaatccactacaaggacatgtacagcctgctgagatgcatcgccccccccgtgggcctgggcaagaactgccccagaagactggcctacaagagactggtgagaatgaacatgcccatcagcaacgaggacatgaccgtgcacttcaccagcaccctgatggccctgatcagatag

SEQ ID NO: 310954 - DNA, 498 bp, Artificial Sequence
  derived and/or modified sequence
tgaaacttcagaaccttcctgcaggccctgatgctgctgttcagaagcgccaccggcgaggcctggcacgagatcatgctgagctgcctgagcaaccaggcctgcgacgagcaggccaacgccaccgagtgcggcagcgacttcgcctacttctacttcgtgagcttcatcttcctgtgcagcttcctgatgctgaacctgttcgtggccgtgatcatggacaacttcgagtacctgaccagagacagcagcatcctgggcccccaccacctggacgagttcatcagagtgtgggccgagtacgaccccgccgcctgctgcagaatccactacaaggacatgtacagcctgctgagatgcatcgccccccccgtgggcctgggcaagaactgccccagaagactggcctacaagagactggtgagaatgaacatgcccatcagcaacgaggacatgaccgtgcacttcaccagcaccctgatggccctgatcagatag

SEQ ID NO: 310955 - protein, 101 aa, Artificial Sequence
  derived and/or modified sequence
DNLANAQELTKDEEEMEEAANQKLALQKAKEVAEVSPMSAANISIAAFVKQARGTVSRSSSVSSVNSPRQQNSAKARSVWEQRASQLRLQNLRASCEALYS

SEQ ID NO: 310956 - protein, 164 aa, Artificial Sequence
  derived and/or modified sequence
NFRTFLQALMLLFRSATGEAWHEIMLSCLSNQACDEQANATECGSDFAYFYFVSFIFLCSFLMLNLFVAVIMDNFEYLTRDSSILGPHHLDEFIRVWAEYDPAACCRIHYKDMYSLLRCIAPPVGLGKNCPRRLAYKRLVRMNMPISNEDMTVHFTSTLMALIR

SEQ ID NO: 310957 - protein, 165 aa, Artificial Sequence
  derived and/or modified sequence
  misc_feature (1)..(1): Xaa can be any naturally occurring amino acid
XNFRTFLQALMLLFRSATGEAWHEIMLSCLSNQACDEQANATECGSDFAYFYFVSFIFLCSFLMLNLFVAVIMDNFEYLTRDSSILGPHHLDEFIRVWAEYDPAACCRIHYKDMYSLLRCIAPPVGLGKNCPRRLAYKRLVRMNMPISNEDMTVHFTSTLMALIR

SEQ ID NO: 310958 - protein, 786 aa, Artificial Sequence
  derived and/or modified sequence
MAFGASTFPPQYLSSEITLHPYAYSPYTLDSTQNVYSVPGSQYLYNQPSCYRGFQTVKHRNENTCPLPQEMKALFKKKTYDEKKTYDQQKFDSERADGTISSEIKSARGSHHLSIYAENSLKSDGYHKRTDRKSRIIAKNVSTSKPEFEFTTLDFPELQGAENNMSEIQKQPKWGPVHSVSTDISLLREVVKPAAVLSKGEIVVKNNPNESVTANAATNSPSCTRELSWTPMGYVVRQTLSTELSAAPKNVTSMINLKTIASSADPKNVSIPSSEALSSDPSYNKEKHIIHPTQKSKASQGSDLEQNEASRKNKKKKEKSTSKYEVLTVQEPPRIEDAEEFPNLAVASERRDRIETPKFQSKQQPQDNFKNNVKKSQLPVQLDLGGMLTALEKKQHSQHAKQSSKPVVVSVGAVPVLSKECASGERGRRMSQMKTPHNPLDSSAPLMKKGKQREIPKAKKPTSLKKIILKERQERKQRLQENAVSPAFTSDDTQDGESGGDDQFPEQAELSGPEGMDELISTPSVEDKSEEPPGTELQRDTEASHLAPNHTTFPKIHSRRFRDYCSQMLSKEVDACVTDLLKELVRFQDRMYQKDPVKAKTKRRLVLGLREVLKHLKLKKLKCVIISPNCEKIQSKGGLDDTLHTIIDYACEQNIPFVFALNRKALGRSLNKAVPVSVVGIFSYDGAQDQFHKMVELTVAARQAYKTMLENVQQELVGEPRPQAPPSLPTQGPSCPAEDGPPALKEKEEPHYIEIWKKHLEAYSGCTLELEESLEASTSQMMNLNL

SEQ ID NO: 310959 - DNA, 2361 bp, Artificial Sequence
  derived and/or modified sequence
atggcctttggcgcctccacctttcctccacagtatttgtcatccgagatcactctccatccatacgcatattccccttataccctggactctacccaaaacgtgtactcggtgccaggctctcagtacctgtacaaccagccatcgtgctatcgcggatttcagacagtcaagcacaggaacgaaaatacctgcccgctgccgcaagaaatgaaggctttattcaaaaaaaaaacctatgatgaaaaaaaaacctacgaccagcaaaaattcgattccgagagagcagatggcactatttcttccgagattaagtcggctcgtggctctcaccacctgtcgatttatgctgaaaactccctcaagtccgatggataccacaagaggactgacaggaagtctcgcataatagcaaagaatgtgtctacgagcaagccagaatttgaatttactaccctcgatttccccgaactacagggagcagagaacaacatgtccgaaattcaaaagcagcctaaatggggccccgtacactccgtctccacagatatcagcctactgagagaggttgtgaagcccgcagccgtgttaagtaaaggggaaatcgtcgtcaagaataatcccaacgagtcggtgacggcaaatgctgcaaccaactccccctcgtgcactcgggagctgtcatggacaccgatgggctacgttgttaggcagacgttgagcacagagttgagcgcagcgcctaaaaacgtcactagcatgatcaatctcaaaacaatcgcttcctcagcagatcccaagaatgttagtatcccatcctctgaagcactgagctccgatccttcctataacaaggagaagcacatcatccacccaactcagaagtccaaggcgtcgcagggctccgaccttgagcagaatgaggcctctagaaagaacaagaaaaaaaaagagaaaagcacatccaagtatgaagttctgaccgtccaagagcctccacgaatcgaagatgccgaggagttccccaacctcgcggtggctagcgagcgccgtgatagaatagaaaccccaaaattccagagcaagcaacagccacaggataactttaaaaacaacgtgaagaaatcacaactgcccgtccaactcgacctcggtggaatgcttacggcgctcgaaaagaagcagcactcacagcatgccaagcagtcttcaaagccagtcgttgttagcgtaggggccgtgcccgtcctctcgaaggagtgcgcctctggcgaacgcggcaggcgtatgtcacagatgaagaccccccataaccctttggactcaagcgctccactcatgaagaaaggaaagcagcgcgagatccccaaagctaagaagccaacttccttaaagaagattattctaaaagaaaggcaagagagaaagcagaggctgcaggagaatgccgtgagcccagcgtttacttctgatgacacacaggatggggagtccggcggagatgatcagtttcccgaacaggctgagctgtctggccctgagggcatggacgaacttatctccaccccatcagtagaagacaaatctgaagagccccctggcactgagctgcagagggatacagaggcttcccacctggcgcctaatcataccaccttccccaaaatccattctcgccgcttccgggactactgtagccagatgctgtcaaaggaggttgatgcctgtgttaccgacctcctgaaagaacttgtgaggtttcaggatcggatgtaccaaaaggatccagtgaaagccaagacaaagaggcgtctggtcctgggattacgcgaagtcttaaagcacctcaaattaaagaagttgaagtgcgttatcatcagtccaaactgcgagaagatacagtccaaaggaggactggatgatacgctccacacaatcatagattatgcctgtgagcaaaacatcccatttgtgtttgctctgaaccggaaggcgcttggcaggtcgctgaataaagccgtgcctgttagcgtggttggtatttttagttacgatggagcccaggatcagtttcataagatggtcgaactgaccgtcgctgcccgccaagcctataagactatgttggagaacgttcagcaggaactagtgggcgaacctcgtccacaagccccgccgtccctacctacacaaggtcccagttgtcctgctgaggatggcccacctgccctcaaggagaaggaggaaccccattacattgagatttggaagaagcacttggaggcctactctgggtgtacacttgagctggaggagtctctcgaggccagcaccagccaaatgatgaacctgaatctgtag

SEQ ID NO: 310960 - DNA, 2361 bp, Artificial Sequence
  derived and/or modified sequence
atggcctttggagccagcaccttccccccccagtacctgagcagcgagatcaccctgcacccctatgcctacagcccctacaccctggacagcacccagaatgtgtacagcgtgcccggcagccagtacctgtacaaccagcccagctgctaccggggcttccagacagtgaagcacagaaatgaaaacacctgccccctgccccaggagatgaaggccctcttcaagaagaagacctatgatgagaagaagacctatgaccagcagaagtttgattctgagcgggcagatggcaccatcagcagcgagatcaagagcgcccggggcagccaccacctgagcatctatgcagagaacagcctgaagagtgatggctaccacaagaggacagacaggaagagccgcatcatcgccaagaatgtgtccaccagcaagccagagtttgagttcaccaccctggacttccctgagctgcagggcgctgagaacaacatgtctgagatccagaagcagcccaagtggggccctgtgcacagcgtgtccacagacatcagcctgctgcgggaggtggtgaagccagctgctgtgctgagcaaaggagagatcgtggtgaagaacaaccccaatgaatctgtgacagccaatgctgccaccaacagccccagctgcacccgggagctgtcctggacccccatgggctacgtggtgcggcagaccctgagcacagagctgtctgctgcccccaagaatgtgacctccatgatcaacctgaagaccatcgccagcagcgctgaccccaagaatgtgtccatccccagcagcgaggccctgagcagtgaccccagctacaacaaggagaagcacatcatccaccccacccagaagagcaaggccagccagggcagtgacctggagcagaatgaggccagcaggaagaacaagaagaagaaggagaagagcaccagcaaatatgaggtgctgactgtgcaggagcccccaagaattgaagatgctgaggagttccccaacctggccgtggccagcgagcggcgggaccgcatcgagacccccaagttccagagcaagcagcagccccaggacaacttcaagaacaacgtgaagaagagccagctgcctgtgcagctggacctgggcggcatgctgacagccctggagaagaagcagcacagccagcacgccaagcagagcagcaagcctgtggtggtgtctgtgggcgctgtgcctgtgctgagcaaagaatgtgccagcggggagcggggccgcaggatgagccagatgaagaccccccacaaccccctggacagcagcgcccccctgatgaagaagggcaagcagcgggagatccccaaggccaagaagcccaccagcctgaagaagatcatcctgaaggagcggcaggagaggaagcagaggctgcaggagaatgctgtgtccccagccttcaccagtgatgacacccaggatggagagagcggaggagatgaccagtttcctgagcaggccgagctgagcggccctgagggcatggatgagctgatcagcacccccagcgtggaggacaagtctgaggagcccccaggcacagagctgcagagggacacagaggccagccacctggcccccaaccacaccaccttccccaagatccacagccgccgcttccgggactactgcagccagatgctgagcaaggaggtggatgcctgtgtgacagacctgctgaaggagctggtgcgcttccaggacaggatgtaccagaaggaccctgtgaaggccaagaccaagaggcggctggtgctgggcctgcgggaggtgctgaagcacctgaagctgaagaagctgaagtgtgtgatcatcagccccaactgtgagaagatccagagcaagggcggcctggatgacaccctgcacaccatcattgattatgcctgtgagcagaacatcccctttgtgtttgccctgaacaggaaggccctgggccgcagcctgaacaaggctgtgcctgtgtctgtggtgggcatcttctcctatgatggagcccaggaccagttccacaagatggtggagctgactgtggccgcccggcaggcctacaagaccatgctggagaatgtgcagcaggagctggtgggggagccccggccccaggccccacccagcctgcccacccagggccccagctgcccagcagaagatggccccccagccctgaaggagaaggaggagccccactacatcgagatctggaagaagcacctggaggcctacagcggctgcaccctggagctggaggagagcctggaggccagcaccagccagatgatgaacctgaacctgtag

SEQ ID NO: 310961 - DNA, 2361 bp, Artificial Sequence
  derived and/or modified sequence
atggccttcggcgccagcaccttccccccccagtacctgagcagcgaaatcaccctgcacccatacgcatattcaccttataccctggatagcacacagaacgtgtacagcgtgcccggcagtcagtacctgtacaaccagccaagttgctaccggggtttccagaccgtgaagcatcggaacgagaatacctgcccactgcctcaggagatgaaagcattatttaaaaagaaaacctacgatgagaaaaagacatacgaccaacagaagttcgacagtgaaagggcagacggtactataagttccgaaatcaaaagtgctcgggggtcacaccatctgagcatttatgcagagaattccctgaaaagtgatggctatcacaagagaactgaccggaaaagtcgcattattgcaaagaatgtgagtacatcaaagcccgaattcgaattcacaacgcttgactttcccgaacttcagggcgcagaaaacaacatgtcagagatccagaagcaaccgaaatgggggccagtgcacagcgtttctacagatattagtttgctgcgagaggttgtgaagccagcagccgtgctgtctaagggcgagatcgtggttaaaaataatcccaacgagagcgtgaccgctaacgcagcgactaattccccaagctgcacgagggagctgagttggactcccatgggctatgtggtgaggcagactttaagcacagagctctcggctgcccccaagaacgttacaagcatgataaacttaaaaactatcgcaagctccgccgatccgaagaatgtcagcatcccctcctccgaagccctcagtagtgaccccagttacaataaggaaaagcacattatccatcccacgcagaaatcaaaggctagccagggatctgacttggagcagaatgaggccagtcgtaagaacaaaaagaaaaaggagaaatctacgtctaagtatgaggtcctgaccgtacaggagcccccaaggatagaagatgcggaggaatttcctaatttggcagtcgcgtctgagagaagggatcggattgaaacacccaagttccaaagcaagcagcagccccaggacaatttcaagaacaacgtcaaaaagtcccagctgccggtgcagctggacttaggcggaatgctcaccgccctggagaagaaacagcattcgcagcatgcaaagcaaagctctaagcccgttgtggtttctgtcggtgccgtgcccgtcctgtccaaagaatgtgctagcggggagagagggagaaggatgtcacagatgaagacgcctcacaaccctctagactcttcagctcccctaatgaagaaggggaaacagagggaaattcctaaagctaagaaaccgacttcactgaaaaagattatactcaaggaacggcaggagcggaaacagagactgcaggaaaacgccgtgagcccggctttcaccagcgacgatactcaagatggggaatctggtggggatgatcagtttccggagcaggcagagcttagcggcccggaaggcatggacgaacttatctcaacgccttccgtcgaggataagagcgaggaaccacccggaaccgaacttcagcgcgatactgaggcgagtcatctcgcgcctaatcacaccactttccccaaaattcattcaaggcgctttagagattattgctcacagatgctgtcaaaagaagtggacgcatgtgtcactgaccttcttaaggagttagtccgcttccaagacaggatgtaccaaaaggaccctgtgaaggccaaaaccaagcgtaggctcgtcctcgggcttagggaggtcctgaagcacctcaagctgaaaaagctgaaatgcgttatcatcagcccaaactgcgaaaagatccaaagcaagggcgggctcgatgacaccttgcatacaataatcgattacgcttgtgaacaaaacatacccttcgtctttgccctcaaccgaaaggctttaggtcgtagtctaaacaaagccgtgcctgtcagtgtggtgggcatcttctcttacgacggggcccaggaccagttccataagatggtcgaactgacagtcgctgcaaggcaggcttacaaaactatgctggagaacgtgcaacaagaattagtgggggagcctcggccacaggcccctccctctctccctactcagggcccctcatgtcctgccgaagatggccctcccgctttgaaggagaaggaggagccccactacatcgaaatctggaaaaaacatctggaggcctacagcgggtgcacactggaattagaggagtccctggaggctagcacatcccagatgatgaatctcaacctgtag

SEQ ID NO: 310962 - DNA, 2361 bp, Artificial Sequence
  derived and/or modified sequence
atggcgttcggcgcttctacatttcccccacagtacttaagctccgagataaccctgcatccctatgcttacagcccatatacacttgactctacccaaaacgtatactccgtgccaggctcccaatacctttataatcagcctagctgctatagaggcttccaaaccgtgaaacatcgcaatgagaacacttgcccgctgccccaggaaatgaaggcgctgtttaaaaagaagacctacgatgaaaagaagacatacgaccaacagaagtttgatagcgaacgcgctgacggcaccatcagctccgagatcaagagcgctcggggttctcaccacctaagcatatatgcggagaattcattaaagagcgacggataccacaaaagaaccgaccgtaagagcaggataattgccaagaacgtgtccaccagtaaaccagagttcgaattcaccaccttagatttcccggagcttcaaggggctgagaacaacatgtcggagattcagaagcagcctaaatggggtccagtacattcggtgtcaactgatattagtttgctccgagaggtagttaagccggctgccgtgctgagcaaaggcgaaatagttgtgaagaataacccgaatgagtccgtgactgccaacgcggctactaattcacccagttgcacgcgggagctctcctggacccccatgggatacgttgtccggcagactctgagcacagagctgtcagccgctcctaagaatgtgacatctatgatcaatctgaaaactatcgcttccagcgcggacccaaagaacgtgtctatccccagctccgaggccctcagcagtgacccaagctacaacaaagagaagcacatcatccatcccacccagaagagcaaggcatctcaagggtctgaccttgaacaaaacgaagctagccggaaaaataaaaaaaaaaaggagaaatctacttcaaagtatgaggttctcaccgtgcaggagcctccacgcatcgaggatgccgaggaattcccaaacctggctgtggctagtgagaggagggaccgtatagaaacacccaaattccaatctaaacagcaaccccaagacaacttcaaaaataatgtgaaaaagagccaactacctgtccagctggacctgggtggaatgctgacagccctggagaaaaagcaacactcacagcacgcaaagcagtccagcaaaccagtcgttgtttccgtcggagcagtgcccgtgcttagcaaggagtgtgcaagtggagaacgcggtcgtcggatgtctcagatgaagacaccccacaaccccctcgacagctctgcacctctgatgaaaaaaggaaagcaaagggagatccccaaagctaaaaaaccaacaagtctgaagaagatcatcttgaaggagcgccaagagagaaaacaaaggctccaagaaaacgctgtgagccctgccttcacctccgatgatacccaggatggggagagtggtggggacgatcagttccccgagcaagccgagctttctggtccagaaggtatggatgaattaattagtactccatccgtagaagataagtcagaggagccacctgggacagaacttcaacgagatacagaagcaagtcatctcgcacccaaccacaccacctttccgaaaattcactcaaggcgctttagggactactgctcgcagatgctttcgaaggaggtggacgcctgtgttactgatctcctgaaagagctcgttcgcttccaggacaggatgtaccaaaaggatccagtgaaagccaaaacaaaaaggcggctggtgctaggactgagggaagtcctaaagcacctgaagttaaagaaattgaaatgcgtgattatttctcccaattgcgaaaagatccagagcaaaggtggtctggacgacaccctccacacaattatcgactacgcctgtgagcagaatatcccttttgtgttcgccctgaacaggaaggccctgggtaggtcgcttaataaggcagtacccgttagtgtggtggggatcttttcatatgacggcgctcaggaccagttccataagatggtggagctcaccgtggcagctcgccaggcgtataaaacgatgctggaaaatgtgcagcaggagctcgtgggggagcctcgccctcaagcacccccttccctgcctacacaaggcccatcctgccctgcagaagacggccctcctgccctcaaggagaaagaagagccacactacattgagatttggaaaaaacacttggaagcctactctggctgtaccttggagctggaggaaagtctggaggccagcaccagccagatgatgaacctgaacttatag

SEQ ID NO: 310963 - DNA, 2361 bp, Artificial Sequence
  derived and/or modified sequence
atggccttcggcgccagcaccttccccccccagtacctgagcagcgagatcaccctgcacccctacgcctacagcccctacaccctggacagcacccagaacgtgtacagcgtgcccggcagccagtacctgtacaaccagcccagctgctacagaggcttccagaccgtgaagcacagaaacgagaacacctgccccctgccccaggagatgaaggccctgttcaagaagaagacctacgacgagaagaagacctacgaccagcagaagttcgacagcgagagagccgacggcaccatcagcagcgagatcaagagcgccagaggcagccaccacctgagcatctacgccgagaacagcctgaagagcgacggctaccacaagagaaccgacagaaagagcagaatcatcgccaagaacgtgagcaccagcaagcccgagttcgagttcaccaccctggacttccccgagctgcagggcgccgagaacaacatgagcgagatccagaagcagcccaagtggggccccgtgcacagcgtgagcaccgacatcagcctgctgagagaggtggtgaagcccgccgccgtgctgagcaagggcgagatcgtggtgaagaacaaccccaacgagagcgtgaccgccaacgccgccaccaacagccccagctgcaccagagagctgagctggacccccatgggctacgtggtgagacagaccctgagcaccgagctgagcgccgcccccaagaacgtgaccagcatgatcaacctgaagaccatcgccagcagcgccgaccccaagaacgtgagcatccccagcagcgaggccctgagcagcgaccccagctacaacaaggagaagcacatcatccaccccacccagaagagcaaggccagccagggcagcgacctggagcagaacgaggccagcagaaagaacaagaagaagaaggagaagagcaccagcaagtacgaggtgctgaccgtgcaggagccccccagaatcgaggacgccgaggagttccccaacctggccgtggccagcgagagaagagacagaatcgagacccccaagttccagagcaagcagcagccccaggacaacttcaagaacaacgtgaagaagagccagctgcccgtgcagctggacctgggcggcatgctgaccgccctggagaagaagcagcacagccagcacgccaagcagagcagcaagcccgtggtggtgagcgtgggcgccgtgcccgtgctgagcaaggagtgcgccagcggcgagagaggcagaagaatgagccagatgaagaccccccacaaccccctggacagcagcgcccccctgatgaagaagggcaagcagagagagatccccaaggccaagaagcccaccagcctgaagaagatcatcctgaaggagagacaggagagaaagcagagactgcaggagaacgccgtgagccccgccttcaccagcgacgacacccaggacggcgagagcggcggcgacgaccagttccccgagcaggccgagctgagcggccccgagggcatggacgagctgatcagcacccccagcgtggaggacaagagcgaggagccccccggcaccgagctgcagagagacaccgaggccagccacctggcccccaaccacaccaccttccccaagatccacagcagaagattcagagactactgcagccagatgctgagcaaggaggtggacgcctgcgtgaccgacctgctgaaggagctggtgagattccaggacagaatgtaccagaaggaccccgtgaaggccaagaccaagagaagactggtgctgggcctgagagaggtgctgaagcacctgaagctgaagaagctgaagtgcgtgatcatcagccccaactgcgagaagatccagagcaagggcggcctggacgacaccctgcacaccatcatcgactacgcctgcgagcagaacatccccttcgtgttcgccctgaacagaaaggccctgggcagaagcctgaacaaggccgtgcccgtgagcgtggtgggcatcttcagctacgacggcgcccaggaccagttccacaagatggtggagctgaccgtggccgccagacaggcctacaagaccatgctggagaacgtgcagcaggagctggtgggcgagcccagaccccaggccccccccagcctgcccacccagggccccagctgccccgccgaggacggcccccccgccctgaaggagaaggaggagccccactacatcgagatctggaagaagcacctggaggcctacagcggctgcaccctggagctggaggagagcctggaggccagcaccagccagatgatgaacctgaacctgtag

SEQ ID NO: 310964 - protein, 275 aa, Artificial Sequence
  derived and/or modified sequence
GTISSEIKSARGSHHLSIYAENSLKSDGYHKRTDRKSRIIAKNVSTSKPEFEFTTLDFPELQGAENNMSEIQKQPKWGPVHSVSTDISLLREVVKPAAVLSKGEIVVKNNPNESVTANAATNSPSCTRADPKNVSIPSSEALSSDPSYNKEKHIIHPTQKSKASQGSDLEQNEASRKNKKKKEKSTSKYEVLTVQEPPRIEDAEEFPNLAVASERRDRIETPKFQSKQQPQDNFKNNVKKSQLPVQLDLGGMLTALEKKQHSQHAKQSSKPVVVS

SEQ ID NO: 310965 - DNA, 828 bp, Artificial Sequence
  derived and/or modified sequence
ggcacaatatcatccgagatcaaatctgctcgcggctcgcaccatcttagcatctatgccgaaaactcactgaagtctgacggttatcacaagcgtaccgatcgcaaatcccgaattattgcaaagaacgtctctacatcgaaacccgaattcgagttcaccactctggattttcccgagctgcaaggtgccgagaacaatatgtccgagattcagaaacagcccaagtgggggcccgtccactccgtctccacagacatctccctgctgagggaggtggtgaaacctgccgccgtgctgtctaaaggtgaaatagtcgtcaaaaataacccgaacgagtcagtgacagccaacgctgccacaaacagcccgagctgcacaagagccgatccgaagaatgtcagcataccctcctctgaggccctgagctctgatcctagctacaataaggagaagcacataatccaccccactcagaaaagtaaagcttcgcaaggttccgatctggaacagaatgaagccagtcgaaagaataaaaaaaaaaaggagaagtccacaagtaaatacgaggtgcttaccgtacaggaacccccacgtattgaggatgccgaggagttccccaaccttgccgtcgccagtgagagacgcgaccggatagagacccctaagttccagagtaagcagcaaccacaggataacttcaagaataacgtcaagaaaagccaactgcccgtgcagctggacctaggcggcatgctgactgcactggagaagaaacagcactctcagcatgctaagcagagcagtaaacccgtggtagtgtcatag

SEQ ID NO: 310966 - DNA, 183 bp, Artificial Sequence
  derived and/or modified sequence
atgccactcccaattcttttacacgttcaggaacagattctaaaaatgttggtttatcacttactgaagctgtaccttaggatcttacccacaacaaagaaaaacaccctcttcatcctgcccaagagtcttaaacaccataaggtcgtcaccctaaacaaaatgaagcctcaggaacgatag

SEQ ID NO: 310967 - DNA, 828 bp, Artificial Sequence
  derived and/or modified sequence
ggcaccatcagcagcgagatcaagagcgcccggggcagccaccacctgagcatctatgcagagaacagcctgaagagtgatggctaccacaagaggacagacaggaagagccgcatcatcgccaagaatgtgtccaccagcaagccagagtttgagttcaccaccctggacttccctgagctgcagggcgctgagaacaacatgtctgagatccagaagcagcccaagtggggccctgtgcacagcgtgtccacagacatcagcctgctgcgggaggtggtgaagccagctgctgtgctgagcaagggggagatcgtggtgaagaacaaccccaatgaatctgtgacagccaatgctgccaccaacagccccagctgcaccagggctgaccccaagaatgtgtccatccccagcagcgaggccctgagcagtgaccccagctacaacaaggagaagcacatcatccaccccacccagaagagcaaggccagccagggcagtgacctggagcagaatgaggccagcaggaagaacaagaagaagaaggagaagagcaccagcaaatatgaggtgctgactgtgcaggagcccccaagaattgaagatgctgaggagttccccaacctggccgtggccagcgagcggcgggacagaattgagacccccaagttccagagcaagcagcagccccaggacaacttcaagaacaacgtgaagaagagccagctgcctgtgcagctggacctgggcggcatgctgacagccctggagaagaagcagcacagccagcacgccaagcagagcagcaagcctgtggtggtgtcctag

SEQ ID NO: 310968 - DNA, 828 bp, Artificial Sequence
  derived and/or modified sequence
ggcaccatcagcagcgagatcaagagcgcccggggcagccaccacttatccatctacgctgagaatagtctcaaaagcgatgggtatcacaaacgcaccgaccggaagtccagaatcatcgctaagaacgtgtccacatccaaacctgagttcgaatttacaacacttgattttccagaactgcagggtgccgaaaataatatgagcgagatccagaagcagccaaagtgggggccagtacacagtgtgtccacagacatttccttactgcgcgaggtagtgaaacccgctgcggtcctttcaaagggagagatcgtggttaagaataaccccaacgaatccgtcaccgcaaacgcggcgaccaactctccttcttgcaccagagcagatcctaagaacgtgagcatcccaagctccgaggcactctcttctgatccgtcttacaacaaagaaaaacacatcatccaccctacacagaaatcaaaggcctcccagggcagcgatctggaacagaacgaagcctcccggaagaacaaaaagaagaaagaaaagtccacatccaagtacgaagttctcactgtccaggaacccccacgaatcgaggacgcagaggagtttccgaacttggcggttgcatcagaaaggcgggacaggatagagacccccaaattccagagtaagcagcagccccaggacaactttaagaacaacgtaaaaaagtctcagctccctgtgcagctggacctggggggcatgctgaccgcgctcgagaaaaaacagcactctcagcacgcgaagcaatcaagtaaaccggtcgttgtcagttag

SEQ ID NO: 310969 - DNA, 828 bp, Artificial Sequence
  derived and/or modified sequence
gggaccatatcatcagagattaagagtgctcgtgggagtcatcacctatccatctacgccgagaatagtctcaagtcagacggttaccacaaacgcactgatcgaaagagccgaatcatcgcaaagaacgtctcgacatcaaagcccgagttcgaattcacaacacttgatttccccgaactccagggagctgaaaacaatatgagcgaaattcagaagcagcctaaatggggccctgtccatagcgtttcaactgatatttccctcctccgcgaggtggttaaacctgctgcagtcctttctaagggagaaatcgtggtcaagaacaaccctaacgaaagcgttacagccaatgctgccacaaactctccctcatgtaccagagcggaccctaaaaatgtgagcattccctcaagtgaagcacttagttccgacccatcatacaacaaggagaaacatattatccacccaacacagaagagcaaggcatctcagggctccgatctggaacagaacgaggcctctcgcaagaataaaaagaaaaaagaaaagagtacgagtaaatacgaggtcctgacagtgcaagaacctccaaggattgaggatgccgaggagtttccaaatctggctgtcgcctccgagagacgtgaccgaatcgagaccccaaagtttcagtcaaagcaacagccccaagacaactttaaaaacaatgtgaagaaaagccagctacccgtgcagcttgatttaggaggcatgctaacagcccttgaaaagaagcagcacagtcagcatgcgaagcaatcatctaagcctgtcgtggtttcgtag

SEQ ID NO: 310970 - DNA, 826 bp, Artificial Sequence
  derived and/or modified sequence
ggaactatatcatctgagataaaatcagctagaggttcacatcatttgtccatttacgctgagaatagtttgaaatcagatggttaccataagcgaacagacaggaaatccagaatcattgcaaaaaatgtatctacctccaaacctgagtttgaatttaccacactggactttcctgaactgcaaggtgcagagaacaatatgtcagagatacagaagcaacccaagtggggacctgtccactctgtctctaccgacatttctcttctaagagaagtagtaaaaccagctgcagtgttatcaaagggtgaaatagtggtgaaaaataacccaaatgaatctgtaactgctaatgccgctaccaattctccttcatgtacaagagcagatcctaaaaatgttagtataccatcttctgaagctttatcttcggatccttcctacaacaaagaaaaacacattattcatcctacccaaaagtctaaagcatcacaaggtagtgaccttgaacaaaatgaagcctcaagaaagaataagaaaaagaaagaaaaatctacatcaaaatatgaagtcctgacagttcaagagcctccaaggattgaagatgccgaggaatttcccaacctggcagttgcatctgaaagaagagacagaatagagacaccgaaatttcaatctaagcagcagccacaggataattttaaaaataatgtaaagaagagccagcttccagtgcagttggacttggggggcatgctgacagccctggagaagaagcagcactctcagcatgcaaagcagtcctccaaaccagtggtagtctcag

SEQ ID NO: 310971 - DNA, 547 bp, Artificial Sequence
  derived and/or modified sequence
gctgcttccaagttgtggcagttatgagtaaagctgctataaacatccatgtgcaggtttttgtgtggacataagttttcacctcctttggataattaccaaggagtgcagtggctaaatcatatggtaagagtatggttagttttgtaaggaattgctaaactattaaatatctcccaaagtggctgtaacgtttttcattcttaccagcaatggataaggatttctgttgtcaaagtgttctggattttgatatgtagtgttatctccttgttttaatttgcatttctctgatgacatctaatgtgtttgctttttagggtgaaatagtggtgaaaaataacccaaatgaatctgtaactgctaatgccgctaccaattctccttcatgtacaagagcagatcctaaaaatgttagtataccatcttctgaagctttatcttcggatccttcctacaacaaagaaaaacacattattcatcctacccaaaagtctaaagcatcacaaggtagtgaccttgaacaaaatgaagcctcaagaaagaa

SEQ ID NO: 310972 - DNA, 828 bp, Artificial Sequence
  derived and/or modified sequence
ggcaccatcagcagcgagatcaagagcgccagaggcagccaccacctgagcatctacgccgagaacagcctgaagagcgacggctaccacaagagaaccgacagaaagagcagaatcatcgccaagaacgtgagcaccagcaagcccgagttcgagttcaccaccctggacttccccgagctgcagggcgccgagaacaacatgagcgagatccagaagcagcccaagtggggccccgtgcacagcgtgagcaccgacatcagcctgctgagagaggtggtgaagcccgccgccgtgctgagcaagggcgagatcgtggtgaagaacaaccccaacgagagcgtgaccgccaacgccgccaccaacagccccagctgcaccagagccgaccccaagaacgtgagcatccccagcagcgaggccctgagcagcgaccccagctacaacaaggagaagcacatcatccaccccacccagaagagcaaggccagccagggcagcgacctggagcagaacgaggccagcagaaagaacaagaagaagaaggagaagagcaccagcaagtacgaggtgctgaccgtgcaggagccccccagaatcgaggacgccgaggagttccccaacctggccgtggccagcgagagaagagacagaatcgagacccccaagttccagagcaagcagcagccccaggacaacttcaagaacaacgtgaagaagagccagctgcccgtgcagctggacctgggcggcatgctgaccgccctggagaagaagcagcacagccagcacgccaagcagagcagcaagcccgtggtggtgagctag

SEQ ID NO: 310973 - protein, 94 aa, Artificial Sequence
  derived and/or modified sequence
  misc_feature (1)..(1): Xaa can be any naturally occurring amino acid
XKSFKVSMIHRLRFTTDVQLGHAIFKLTYLSNHDYKHLYFESDAATVNEIVLKVNYILESRASTARADYFAQKQRKLNRRTSFSFQKEKKSGQQ

SEQ ID NO: 310974 - DNA, 3536 bp, Artificial Sequence
  derived and/or modified sequence
tccggaacgccggggtgtggttccgggtcgtgtgcggctcggggtaatagggctgctgctcggccggccggcggcggcgagcagcaggggcatgagggctaacccgggaagcggcagctgagcgggccgggaggagcgccggtccccgtggatcccgagagtgcagagctcggggcaggggccgggaggcgtgggggagccgggccctcccctcaggaacgtgtcccggggccgacccggcccgtagtgtggaagcagcttcaggtaggtgagctcgtgaaacaatatgaagaggagaaaatagccttttaaggaaattggcccacagaaaggatggccttcttggacaatccaactatcattctagctcatattcgacagtcacatgtgaccagtgatgacacgggaatgtgtgagatggttctcattgatcatgatgttgacctagagaagattcatcctccttcaatgcctggagacagtgggtcagaaattcagggaagcaatggtgagactcagggctatgtatatgcccagtcagtcgatattacctcaagttgggactttggtattagaagacgctcaaacacagctcaaagattagaacgactccgaaaagagagacaaaaccagatcaaatgcaaaaatattcagtggaaagaaagaaattctaagcaatcagcccaggagttaaagtcactgtttgaaaaaaaatctctcaaagagaagcctccaatttctgggaagcagtcgatattatctgtacgcctagaacagtgccctctgcagctgaataacccttttaacgagtattccaaatttgatggcaagcattgttccagtctatgtcggataattatgaacaaatgttttctacaatcattggcattaaatagctctcttcaaagaaagtcacttaaaactttgcagaaaagcatgaagccaccgagaaatgttgcaaactcagaaaagggtcatgtaggtacaacagcaaccaagaagatcgatgtctacctccctctgcactcgagccaggacagactgctgccaatgaccgtggtgacaatggccagcgccagggtgcaggacctgatcgggctcatctgctggcagtatacaagcgaaggacgggagccgaagctcaatgacaatgtcagtgcctactgcctgcatattgctgaggatgatggggaggtggacaccgatttccccccgctggattccaatgagcccattcataagtttggcttcagtactttggccctggttgaaaagtactcatctcctggtctgacatccaaagagtcactctttgttcgaataaatgctgctcatggattctcccttattcaggtggacaacacaaaggttaccatgaaggaaatcttactgaaggcagtgaagcgaagaaaaggatcccagaaagtttcaggccctcagtaccgcctggagaagcagagcgagcccaatgtcgccgttgacctggacagcactttggagagccagagcgcatgggagttctgcctggtccgcgagaacagttcaagggcagacggggtttttgaggaggattcgcaaattgacatagccacagtacaggatatgcttagcagccaccattacaagtcattcaaagtcagcatgatccacagactgcgattcacaaccgacgtacagctaggtatctctggagacaaagtagagatagaccctgttacgaatcagaaagccagcactaagttttggattaagcagaaacccatctcaatcgattccgacctgctctgtgcctgtgaccttgctgaagagaaaagccccagtcacgcaatatttaaactcacgtatctaagcaatcacgactataaacacctctactttgaatcggacgctgctaccgtcaatgaaattgtgctcaaggttaactacatcctggaatcgcgagctagcactgcccgggctgactactttgctcaaaaacaaagaaaactgaacagacgtacgagcttcagcttccagaaggagaagaaatccgggcagcagtgacactggcctccagcctcaatctgttccgtagctcagagcctgcctgccagggccaagtgccctagagtccacccggtgtcctgaagtcctcggggggaggccagcccctggctcactggcacagggcaggtgggctctcggggaaggtgtcgggggccccctaggagggagcgctggggacattgccatgggacggaagtctgcttggcagtggctttgataagcgatgcttgggggtcagaccaccccctagaggagccacgtgccgcccagccaccttcaatgcctgccaccctgcccgaggatgtacagagccgtgcccacacatttccttgcaacttgatcaaatttcttaaagcaaacaacaaaaatgtacatttctgtttttccttttaataaacaggtgtactctttatcatggttggtatgatggaccattctttggggcggaggattgattatgttactctctttaaaatctgttcccatattgaacaggcagattggaaaagctatggttcgatttctcagaagaaatgtttaggtcttagtcaatagttttaactatgccatttgtttaaatgagtgcatttgcttcgagggtagtgtcttactaaaagttaggaacagagacctagtggtgtgtccaaggccgtgtcactttccccttcagcacaccccagcttctgacctcagagcccaggagctgcgtggacagtgtggggtgccaggaggaggggcggtggctggtcctcaggcacgctgcactcccagccagacatggtctttccgtttcttaagtagcaagtgtaggtttcagctggcagttccacctgcatgttctctgcttcgctgccttggaaggggccacattccccattcctcttctccttacagcgcctgcctcctttttcaagcaggcggaaagctgctgtttctcacgtttcagggagaggggtgagcggagggagacctgtgtccgtgccgtccggctccctgggtgggaacaggcaagggatcagatgcccctgacaccacgcctctggccacaccagatgcctctgcagtcctcgacagcctcttcagtgtccctcctgcggtgatgtccttactgtccccagccagggccggggaccggtgtttcactgaggacctgcattagaaacattttttaaattgttgtacaggaagagatgtgtctaaaacagcatcttaaagctgagtgtatttctttgcacaaggggtcatgctgatgaattcttctttcattctgatctttgttcagccaacaggagcgtccttttctaatgtcttccattcctaccccccacccaaaaacaaaagaaatatttgtagcttgctatctgtatttgaatttttagcaattttatatttagatactttgaaaaatgtaaatgactaatttggtcattaaatcttgtgacatattcgatattaaaatgatattaaaataaaagtcatataaatacaca

SEQ ID NO: 310975 - protein, 235 aa, Artificial Sequence
  derived and/or modified sequence
MTVVTMASARVQDLIGLICWQYTSEGREPKLKNAAHGFSLIQVDNTKVTMKEILLKAVKRRKGSQKVSGSRADGVFEEDSQIDIATVQDMLSSHHYKSFKVSMIHRLRFTTDVQLGISGDKVEIDPVTNQKASTKFWIKQKPISIDSDLLCACDLAEEKSPSHAIFKLTYLSNHDYKHLYFESDAATVNEIVLKVNYILESRASTARADYFAQKQRKLNRRTSFSFQKEKKSGQQ

SEQ ID NO: 310976 - protein, 225 aa, Artificial Sequence
  derived and/or modified sequence
MPGDSGSEIQGSNGETQGYVYAQSVDITSSWDFGIRRRSNTAQRLERLRKERQNQIKCKNIQWKERNSKQSAQELKSLFEKKSLKEKPPISGKQSILSVRLEQCPLQLNNPFNEYSKFDGKHCSSLCRIIMNKCFLQSLALNSSLQRKSLKTLQKSMKPPRNVANSEKGHVGTTATKKIDVYLPLHSSQDRLLPMTVVTMASARVQDLIGLICWQYTSEGREPKL

SEQ ID NO: 310977 - DNA, 678 bp, Artificial Sequence
  derived and/or modified sequence
atgcccggcgacagcggcagcgagatccagggcagcaacggcgagacccagggctacgtgtacgcccagagcgtggacatcaccagcagctgggacttcggcatcagaagaagaagcaacaccgcccagagactggagagactgagaaaggagagacagaaccagatcaagtgcaagaacatccagtggaaggagagaaacagcaagcagagcgcccaggagctgaagagcctgttcgagaagaagagcctgaaggagaagccccccatcagcggcaagcagagcatcctgagcgtgagactggagcagtgccccctgcagctgaacaaccccttcaacgagtacagcaagttcgacggcaagcactgcagcagcctgtgcagaatcatcatgaacaagtgcttcctgcagagcctggccctgaacagcagcctgcagagaaagagcctgaagaccctgcagaagagcatgaagccccccagaaacgtggccaacagcgagaagggccacgtgggcaccaccgccaccaagaagatcgacgtgtacctgcccctgcacagcagccaggacagactgctgcccatgaccgtggtgaccatggccagcgccagagtgcaggacctgatcggcctgatctgctggcagtacaccagcgagggcagagagcccaagctgtag

SEQ ID NO: 310978 - DNA, 678 bp, Artificial Sequence
  derived and/or modified sequence
atgcctggtgactctggtagcgaaattcaggggagcaacggtgagacacagggatatgtgtacgcccagtccgtggatatcacaagctcctgggatttcggtatcagaagacgaagcaataccgcccagcggttagaacgcttgcgaaaagagagacagaatcagataaaatgcaagaacatccagtggaaggagaggaacagtaaacaaagcgcgcaggagctgaagagcctgtttgagaaaaagagtctgaaagaaaagccccctattagcggaaagcagagtattctaagtgtccggctggagcagtgtcccctgcagctgaataatcccttcaacgagtattccaagttcgacggcaagcactgttcgtctctgtgtaggatcatcatgaataaatgtttcctgcagtctcttgctctgaatagtagcctacagaggaagtcccttaagaccttgcaaaaatccatgaagccccctcgtaacgtggcgaatagcgagaaaggacacgtgggaaccacggcgacaaagaaaatcgacgtgtatttgccactgcactccagtcaagaccgactgctcccaatgacggttgtgacgatggcatccgcccgggtccaggacctgattggtctgatatgctggcagtacacatcagagggcagagagcccaaattgtag

SEQ ID NO: 310979 - DNA, 678 bp, Artificial Sequence
  derived and/or modified sequence
atgcctggggacagcggcagcgagatccagggcagcaatggagagacccagggctacgtgtatgcccagagcgtggacatcaccagctcctgggactttggcatcagaagaagaagcaacacagcccagaggctggagcggctgaggaaggagcggcagaaccagatcaagtgcaagaacatccagtggaaggagaggaacagcaagcagagcgcccaggagctgaagagcctgtttgagaagaagagcctgaaggagaagccacccatcagcggcaagcagagcatcctgtctgtgcggctggagcagtgccccctgcagctgaacaaccccttcaatgagtacagcaagtttgatggcaagcactgcagcagcctgtgccgcatcatcatgaacaagtgcttcctgcagagcctggccctgaacagcagcctgcagaggaagagcctgaagaccctgcagaagtccatgaagcccccaagaaatgtggccaacagcgagaagggccacgtgggcaccacagccaccaagaagattgatgtgtacctgcccctgcacagcagccaggaccggctgctgcccatgacagtggtgaccatggccagcgcccgggtgcaggacctgattggcctcatctgctggcagtacaccagcgagggccgggagcccaagctgtag

SEQ ID NO: 310980 - DNA, 678 bp, Artificial Sequence
  derived and/or modified sequence
atgcccggcgacagcggcagcgagatccagggcagcaacggcgagacacaggggtatgtctacgcacagtcagtggacatcaccagtagttgggattttgggatccgtcgtaggagcaacacagcccaaaggctggagcggttacgtaaggagcgccaaaatcagattaaatgtaaaaacattcagtggaaggagagaaactccaaacagtcagcacaggagcttaagtcgcttttcgagaagaaaagcttgaaggagaagccaccgataagcgggaaacagtccattttatcggtgcgtttggagcagtgccctcttcaactgaataatccttttaacgaatactctaagttcgatggaaaacactgttcttctctgtgccggatcattatgaacaagtgcttccttcagagcttggcccttaacagttcccttcaacgcaagtccctgaaaactctgcagaagtccatgaaaccaccaaggaatgtcgcaaattcagagaaaggccatgtggggacaacagccaccaaaaagattgacgtttacctgccactgcactccagccaagaccgactcctgcccatgaccgtggtgactatggctagtgcccgggtccaggatctgatagggctcatctgctggcagtatacatccgagggtcgggagcctaagttgtag

SEQ ID NO: 310981 - DNA, 678 bp, Artificial Sequence
  derived and/or modified sequence
atgccaggggattctggaagcgaaatccagggaagtaatggcgagactcagggatatgtgtatgctcaatccgttgacattactagcagctgggactttggtatacgacgaagatccaacaccgcgcaaaggttagaaagactaagaaaggagagacagaaccagatcaagtgcaagaacattcagtggaaggagcgcaactcaaagcagtccgctcaagagctgaagagccttttcgaaaaaaaaagcttaaaggagaaacctcccatctccgggaagcagagtatactcagtgttaggctggagcagtgccctcttcagctcaataatccatttaacgagtattcaaaatttgatggcaagcactgttcctctctatgtagaatcatcatgaacaagtgtttcttgcaatccctcgcactcaactctagtctgcagcgtaaatccctcaagaccctgcagaaatcaatgaaaccacctagaaacgttgctaatagtgaaaaaggacacgtgggcacaaccgcgactaagaagattgacgtttatctgccacttcattctagccaggaccggctcttacccatgactgtggtcaccatggcgagcgccagggttcaggacctcataggcttgatctgctggcagtatacatctgagggtagggaaccaaagctgtag

SEQ ID NO: 310982 - protein, 330 aa, Artificial Sequence
  derived and/or modified sequence
MTVVTMASARVQDLIGLICWQYTSEGREPKLNDNVSAYCLHIAEDDGEVDTDFPPLDSNEPIHKFGFSTLALVEKYSSPGLTSKESLFVRINAAHGFSLIQVDNTKVTMKEILLKAVKRRKGSQKVSGPQYRLEKQSEPNVAVDLDSTLESQSAWEFCLVRENSSRADGVFEEDSQIDIATVQDMLSSHHYKSFKVSMIHRLRFTTDVQLGISGDKVEIDPVTNQKASTKFWIKQKPISIDSDLLCACDLAEEKSPSHAIFKLTYLSNHDYKHLYFESDAATVNEIVLKVNYILESRASTARADYFAQKQRKLNRRTSFSFQKEKKSGQQ

SEQ ID NO: 310983 - DNA, 993 bp, Artificial Sequence
  derived and/or modified sequence
atgaccgtggtgaccatggccagcgccagagtgcaggacctgatcggcctgatctgctggcagtacaccagcgagggcagagagcccaagctgaacgacaacgtgagcgcctactgcctgcacatcgccgaggacgacggcgaggtggacaccgacttcccccccctggacagcaacgagcccatccacaagttcggcttcagcaccctggccctggtggagaagtacagcagccccggcctgaccagcaaggagagcctgttcgtgagaatcaacgccgcccacggcttcagcctgatccaggtggacaacaccaaggtgaccatgaaggagatcctgctgaaggccgtgaagagaagaaagggcagccagaaggtgagcggcccccagtacagactggagaagcagagcgagcccaacgtggccgtggacctggacagcaccctggagagccagagcgcctgggagttctgcctggtgagagagaacagcagcagagccgacggcgtgttcgaggaggacagccagatcgacatcgccaccgtgcaggacatgctgagcagccaccactacaagagcttcaaggtgagcatgatccacagactgagattcaccaccgacgtgcagctgggcatcagcggcgacaaggtggagatcgaccccgtgaccaaccagaaggccagcaccaagttctggatcaagcagaagcccatcagcatcgacagcgacctgctgtgcgcctgcgacctggccgaggagaagagccccagccacgccatcttcaagctgacctacctgagcaaccacgactacaagcacctgtacttcgagagcgacgccgccaccgtgaacgagatcgtgctgaaggtgaactacatcctggagagcagagccagcaccgccagagccgactacttcgcccagaagcagagaaagctgaacagaagaaccagcttcagcttccagaaggagaagaagagcggccagcagtag

SEQ ID NO: 310984 - DNA, 285 bp, Artificial Sequence
  derived and/or modified sequence
tgaaagagcttcaaggtgagcatgatccacagactgagattcaccaccgacgtgcagctgggccacgccatcttcaagctgacctacctgagcaaccacgactacaagcacctgtacttcgagagcgacgccgccaccgtgaacgagatcgtgctgaaggtgaactacatcctggagagcagagccagcaccgccagagccgactacttcgcccagaagcagagaaagctgaacagaagaaccagcttcagcttccagaaggagaagaagagcggccagcagtag

SEQ ID NO: 310985 - DNA, 993 bp, Artificial Sequence
  derived and/or modified sequence
atgacagttgtgacgatggcaagtgccagggttcaggacctcatcggcctgatatgctggcagtacactagtgaaggccgcgagcccaagttgaacgataatgtgtccgcatactgcctgcacattgccgaagatgacggtgaggtagacaccgatttcccacctttagatagtaacgagcccatccacaagtttggattcagcacgctggccctggtagaaaagtactcttctccaggcctgacctcgaaggaatcgctatttgtcagaatcaacgctgcacatggcttcagcctcatacaggtggataataccaaggttaccatgaaggagatactgctcaaggctgtgaagagaagaaaaggaagtcagaaggttagcgggccgcagtacagacttgagaaacaatctgaaccaaacgtagccgttgatcttgatagcacactggagtcccagagcgcctgggagttctgccttgtgcgcgaaaattcaagcagggccgatggggtcttcgaggaggactcccagattgatatcgctaccgtccaggacatgttgtccagccaccactataaatccttcaaagtttctatgattcatcgcctcaggtttaccacagatgtgcagctgggcatcagcggcgataaggtcgagatcgacccggtgacgaaccagaaagctagtacgaaattctggatcaaacaaaaacctatttctattgacagtgacttactttgtgcgtgtgatctggcagaagagaaatccccctcacatgctatttttaaattgacatacctctccaatcacgactataagcacttgtacttcgagagtgacgctgccaccgttaacgaaattgtgctgaaggtgaactacattctagaatccagagcaagcactgcgcgagccgattacttcgcacagaaacaacgcaagctcaatagaaggacgtctttcagctttcagaaggagaagaaatcaggtcagcaatag

SEQ ID NO: 310986 - DNA, 993 bp, Artificial Sequence
  derived and/or modified sequence
atgaccgtcgtgaccatggcttctgctcgcgttcaggacttgattggacttatttgttggcagtacacctcggaagggcgcgagccaaagctgaatgacaacgtgagtgcctattgcctgcatatcgctgaggatgacggcgaggtggatactgacttccctcctctggacagtaatgagcccattcacaagttcgggttcagcacgctggctttggtggagaagtactcgtctccaggcctcacgtccaaggaaagcctttttgttcgaatcaacgcggctcatgggttttccttgattcaggttgacaatacgaaggtgaccatgaaagaaattttgctcaaggctgtgaaacgcaggaaaggctcccaaaaagtatccggtccccagtatcgccttgagaagcagagcgagccaaacgttgctgtggacttggacagcactctcgagagtcagtctgcctgggagttttgtctggtaagagagaactctagccgcgccgacggggtctttgaggaggacagccagatcgacattgcgacagtgcaggacatgttgtcgagccatcactataaatcctttaaagtgagtatgatccaccggctgcgctttaccacagatgtacagcttggcatatcaggcgacaaagtcgagatcgacccagttacaaaccaaaaagcttctactaagttttggatcaaacaaaaacctataagcatcgactccgatttgctctgtgcatgtgatctggctgaagagaagtctccgagccacgccatattcaaacttacgtacctctcaaaccatgattacaaacacttgtactttgagtctgatgcagcaactgtcaatgagatcgtgttgaaggtgaattacatactggagtcccgcgccagcactgctcgagccgactatttcgcccaaaagcagcggaagctcaataggagaacgtctttctctttccaaaaggagaaaaaatcaggtcagcagtag

SEQ ID NO: 310987 - DNA, 285 bp, Artificial Sequence
  derived and/or modified sequence
tgaaagagtttcaaggtgtctatgatccaccggctgcggttcactacagatgtgcagctcggccacgcaatctttaagcttacatatctgtctaaccacgactacaaacacctgtacttcgaaagcgatgccgccactgtgaatgagatagtgctgaaggtgaactacatcctggagtcaagggcaagcacagcccgtgccgactactttgcacagaagcagcgtaagctaaaccgacgcacgagcttctcctttcaaaaggaaaagaaaagcggccagcagtag

SEQ ID NO: 310988 - DNA, 993 bp, Artificial Sequence
  derived and/or modified sequence
atgacagtggtgaccatggccagcgcccgggtgcaggacctgattggcctcatctgctggcagtacaccagcgagggccgggagcccaagctgaatgacaacgtgtctgcctactgcctgcacatcgccgaggatgatggagaggtggacacagacttcccccccctggacagcaatgagcccatccacaagtttggcttcagcaccctggccctggtggagaagtacagcagccctggcctgaccagcaaggagagcctgtttgtgcgcatcaatgctgcccacggcttcagcctcatccaggtggacaacaccaaggtgaccatgaaggagatcctgctgaaggctgtgaagaggaggaagggcagccagaaggtgtctggcccccagtaccgcctggagaagcagagcgagcccaacgtggccgtggacctggacagcaccctggagagccagagcgcctgggagttctgcctggtgcgggagaacagcagcagagcagatggagtgtttgaggaggacagccagattgatattgccaccgtgcaggacatgctgagcagccaccactacaagagcttcaaggtgtccatgatccaccggctgcgcttcaccacagatgtgcagctgggcatcagcggggacaaggtggagattgatcctgtgaccaaccagaaggccagcaccaagttctggatcaagcagaagcccatcagcattgacagcgacctgctgtgtgcctgtgacctggccgaggagaagagccccagccacgccatcttcaagctgacctacctgagcaaccacgactacaagcacctgtactttgaaagtgatgctgccaccgtgaatgagatcgtgctgaaggtgaactacatcctggagagccgggccagcacagcccgggctgactactttgcccagaagcagaggaagctgaacagaaggaccagcttctccttccagaaggagaagaagagcggccagcagtag

SEQ ID NO: 310989 - DNA, 285 bp, Artificial Sequence
  derived and/or modified sequence
tgaaaatccttcaaggtgtccatgatccaccggctgcgcttcaccacagatgtgcagctgggccacgccatcttcaagctgacctacctgagcaaccacgactacaagcacctgtactttgaaagtgatgctgccaccgtgaatgagatcgtgctgaaggtgaactacatcctggagagccgggccagcacagcccgggctgactactttgcccagaagcagaggaagctgaacagaaggaccagcttctccttccagaaggagaagaagagcggccagcagtag

SEQ ID NO: 310990 - DNA, 701 bp, Artificial Sequence
  derived and/or modified sequence
caagtcattcaaagtcagcatgatccacagactgcgattcacaaccgacgtacagctaggtcacgcaatatttaaactcacgtatctaagcaatcacgactataaacacctctactttgaatcggacgctgctaccgtcaatgaaattgtgctcaaggttaactacatcctggaatcgcgagctagcactgcccgggctgactactttgctcaaaaacaaagaaaactgaacagacgtacgagcttcagcttccagaaggagaagaaatccgggcagcagtgacactggcctccagcctcaatctgttccgtagctcagagcctgcctgccagggccaagtgccctagagtccacccggtgtcctgaagtcctcggggggaggccagcccctggctcactggcacagggcaggtgggctctcggggaaggtgtcgggggccccctaggagggagcgctggggacattgccatgggacggaagtctgcttggcagtggctttgataagcgatgcttgggggtcagaccaccccctagaggagccacgtgccgcccagccaccttcaatgcctgccaccctgcccgaggatgtacagagccgtgcccacacatttccttgcaacttgatcaaatttcttaaagcaaacaacaaaaatgtacatttctgtttttccttttaataaacaggtgtactctttatca

SEQ ID NO: 310991 - DNA, 993 bp, Artificial Sequence
  derived and/or modified sequence
atgaccgtggtgaccatggccagcgcccgggtgcaggacctgatcggactaatctgttggcagtacacttctgaggggcgcgagcccaaactgaacgacaacgtgtcggcttactgccttcacatagcggaggacgatggtgaagttgatacggacttccccccattggatagcaatgaacctatacataagtttggtttctccaccttggccctagtggaaaagtatagtagcccggggctgactagtaaagaatcactttttgttcggatcaatgcggcacacgggttctcactcattcaggttgacaacacaaaggttaccatgaaggagattttactgaaggcggtgaaaaggaggaaggggagtcagaaggtgtctgggccgcaataccgactcgaaaagcagtctgagcctaacgtggctgttgacctagactctacactcgagtctcagtctgcctgggagttctgcctggtgagagagaatagttccagggccgatggagtttttgaggaggacagccagattgacattgccaccgtccaggacatgctctctagccatcactataaatcttttaaggtgagtatgattcatcggctgaggtttactaccgacgtgcagctgggcatttcaggggataaggtggaaatagatcccgtaacgaatcaaaaggcctcaacgaagttttggatcaagcaaaagccaatatctatcgactcagatctgctgtgcgcttgcgatctggccgaggagaaaagcccatctcacgccatttttaagctgacgtatctttccaaccatgactataaacacctgtacttcgagtctgacgctgccactgtaaatgaaattgtgctcaaagtgaactatattctggagtcccgggcctccaccgctagagcagattactttgcccagaagcaacggaagctcaacagaaggacgtcattctcttttcaaaaggaaaagaagagcggccaacagtag

SEQ ID NO: 310992 - DNA, 993 bp, Artificial Sequence
  derived and/or modified sequence
atgaccgtggtgaccatggccagcgcccgggtgcaggacctgatcggattgatctgttggcagtatacctcagagggccgggaacctaaactgaacgataatgttagcgcatattgtctgcacatcgccgaggatgacggcgaagtcgatacagattttcctcccctcgactccaacgaacctattcataagtttggcttttcaacgcttgcccttgtggaaaagtattcatccccggggctgaccagcaaggaatccctctttgtcaggattaacgcagcccacggcttcagtctgatacaggttgacaatactaaggtcaccatgaaggagattttgctaaaggccgtcaaacgcagaaagggatcacagaaggtttccgggcctcaatatcgtttggagaaacaatctgagcctaatgtcgccgtggacctggattcaaccttggagtctcagagtgcttgggagttctgtctggtgcgggagaactcttcgagggccgatggagtgttcgaagaagattcgcagatcgacatcgccacagtgcaggacatgttgagttcacaccactataagtcgtttaaagtttccatgatacaccgcctcagattcacaaccgatgtccagctcgggatttccggtgataaggtggaaatcgaccccgtgaccaatcagaaggcctcaaccaagttttggatcaaacagaaacccatctccattgactcagatttactctgcgcatgtgacctcgcagaggaaaaatccccttcgcatgcaatcttcaaactcacatatctcagtaaccacgactacaaacacctgtacttcgagagtgatgccgcaaccgtaaacgaaattgtgctgaaagtgaattacatactagaatccagagccagcacggcgcgcgccgattactttgcccagaagcagcgtaagctcaatcgccggacaagttttagctttcagaaggagaaaaagtccggtcagcagtag

SEQ ID NO: 310993 - DNA, 285 bp, Artificial Sequence
  derived and/or modified sequence
tgaaagagcttcaaggtgagcatgatccaccggctgcggttcaccaccgatgtgcaactgggccacgccattttcaagttaacgtacctaagcaatcacgattataagcacttgtattttgagagcgatgccgcaaccgtgaatgagattgtgcttaaggtaaattatattctcgagtcgcgtgcctccactgccagagcagattacttcgctcagaagcaacgtaagcttaaccggcgtacttcattttcctttcagaaggagaagaaatctggacagcagtag

SEQ ID NO: 310994 - DNA, 993 bp, Artificial Sequence
  derived and/or modified sequence
atgaccgtggtcactatggcctcagctcgggtacaagatctgattggactcatctgctggcagtacacttccgagggacgggaaccgaaactgaatgataatgtgagtgcctactgtctccatatcgccgaggatgatggagaggttgatacagatttccctcccctggattctaacgaacccatccacaagttcggattctcaacgctggcccttgtggaaaagtattcatcgcctggcctgacctcgaaggaatccctgtttgtacgcattaatgccgcacacggtttcagcctgattcaggtggacaacaccaaggttactatgaaggagatcctgctgaaagccgtaaaacggcgtaaaggtagtcagaaggtttcaggaccacagtacaggctagagaagcagagtgagcctaatgtggcagtggacctggactccacactagaatcccagtccgcgtgggaattttgcctggtgagagaaaattccagccgagccgacggagtctttgaggaagattcccagatcgatatcgcaacggtgcaggatatgctcagtagtcaccattacaaatcttttaaagtctcgatgattcatcgactcagattcacgacggatgtccagctgggtataagtggggacaaggtggagattgatccggtaactaatcagaaggcttccacgaagttctggatcaaacagaagcctatcagtatcgatagcgatctgctgtgtgcctgtgatcttgctgaagaaaaaagtccctcacacgccatttttaaactcacatacctatcaaatcacgactacaagcacttgtattttgaatccgatgccgcaaccgtaaatgagatcgtcctgaaggtgaactatattttggaatcgcgcgcttccacagcaagggcagactactttgctcagaaacaaagaaaactgaaccgaagaacctctttctcgtttcagaaggagaaaaaatctggtcagcaatag

SEQ ID NO: 310995 - DNA, 993 bp, Artificial Sequence
  derived and/or modified sequence
atgacagttgtgacgatggcttcggccagggtccaggatttaattggattgatttgctggcagtacacctccgagggcagggagccaaagctcaatgacaatgtgagcgcatattgtttacatatagccgaggatgacggggaggtggatacagatttcccgccactggactctaatgaacctatacacaagtttggcttctccactctggcgctggtggaaaaatacagctcgcccggtctcacttctaaggagtcactgttcgtgagaattaacgccgcacatggtttcagcctgatccaggtggataatactaaggtgactatgaaggagattttacttaaagctgtcaaacgtagaaagggtagccaaaaggtatcagggcctcaatacagactagaaaaacagtcagagccaaacgtggctgtagacttggactccaccttagaatcgcaatctgcgtgggaattctgcttggtccgggagaactcctcacgggctgatggcgttttcgaagaggattcccagatcgacattgcgacggtgcaggatatgcttagcagccatcactacaagtctttcaaagtttcgatgatccacagattgcggtttaccacagatgtacagctcggcatttccggcgataaggttgagatcgacccggtcacaaaccagaaggcgtcaactaaattctggatcaaacagaaacctatcagcatagatagcgatttgttgtgtgcctgtgatcttgctgaagagaagagtccatctcacgcgatttttaaactgacatatttgagcaatcatgattacaagcatctgtatttcgagtctgatgccgctacagtgaatgagatcgtgctgaaagttaattacattctggaatctagagcctcaaccgccagggctgactattttgcccaaaagcaacgcaaactgaataggcgtacctcgttctcttttcagaaagaaaagaagtcgggacaacagtag

SEQ ID NO: 310996 - DNA, 285 bp, Artificial Sequence
  derived and/or modified sequence
taaaagagctttaaagtaagcatgatacaccggttgagattcaccacggatgtgcaactcggccatgccatcttcaaactgacctatctctctaatcacgactataaacacctttattttgagtccgatgcagctaccgtgaatgagatcgtcctgaaggtgaattatatcctggaatcccgcgctagtaccgccagggccgattatttcgctcagaaacagaggaagttgaaccggagaacaagctttagttttcaaaaagagaagaagagcggacagcagtag

SEQ ID NO: 310997 - DNA, 2478 bp, Artificial Sequence
  derived and/or modified sequence
atggcggccgatgagggaagcgctgagaagcaggccggcgaggctcacatggcagcggatggtgagaccaacggtagctgcgaaaattctgatgcctcttcccatgctaatgcggctaagcatacacaggactccgctcgggtcaacccccaagatggtaccaacaccctcactagaatcgccgaaaacggggtctcagagcgcgattccgaagccgcaaagcagaaccacgttacggccgacgattttgttcaaacatctgtcataggttcaaatggttatatcctcaacaagcctgcccttcaagcccagcctctcagaaccaccagcaccctcgccagttccttgccggggcacgccgctaagaccttgcccggcggcgcgggaaaggggaggaccccctcggcctttccgcagactcctgccgcccccccagcaacactgggcgaaggaagcgccgataccgaggaccgcaagcttccagcacctggggcggatgtcaaggtacatcgcgcgaggaaaaccatgcccaaaagcgtggtgggactccatgctgcttcaaaggatcctagggaggtgagagaggctcgcgatcataaagaaccgaaggaagagatcaacaagaacattagtgacttcgggaggcagcagctcctgcccccctttccgagtctacatcagtcactcccccagaaccagtgctatatggccactaccaagtcccagacagcttgtttgccttttgtgctggctgcagcggtgagcaggaagaagaagagacggatggggacttacagtctagttccaaagaaaaaaaccaaagtgctgaagcagcggaccgtgattgaaatgtttaaaagcataacccacagcaccgtgggctccaagggggagaaggacctgggggcctctagtctgcatgtaaatggcgagagcttagagatggattccgatgaagacgacagcgaggaactcgaggaggacgatggtcacggggctgagcaagctgcagcctttccaacagaagattctaggacaagcaaggaatctatgagcgaggcagacagggcacaaaagatggatggggagagtgaagaggagcaagagtctgtggatacaggcgaggaagaagaaggaggtgacgaatccgatctgtctagtgaatccagcatcaagaagaagttcctgaagaggaagggaaaaacggacagcccatggattaaaccggcaagaaagcggcgccggcgctcaaggaaaaagccatcgggggctctagggtctgaatcctataaatcatccgcagggtccgcggagcagaccgctccgggcgatagtaccggctatatggaagtatctctagattccctggaccttcgagtcaaggggatcctttcctcccaggcagaaggacttgctaacgggccggacgtactggagacagacgggctgcaggaggtaccattgtgtagctgccgaatggagacccctaagtctagagagatcaccactctcgctaataatcagtgtatggctacagaatcggtggaccacgaattgggacgttgcacaaatagcgtggtcaaatacgagctgatgcggccttctaataaagcccccctgctcgtactctgcgaggaccaccgtggcaggatggtcaaacatcaatgctgccctgggtgtggctacttttgcactgccggcaattttatggaatgccagcccgagtccagcatctcacacagatttcataaggactgcgcttcgagggtgaacaacgccagttactgccctcattgcggagaggagagttccaaggctaaggaggtgacaatcgccaaggctgatacaacgagcacagtcactcctgtgcccggccaggagaaaggctctgcactggagggccgtgctgacactaccaccgggtccgccgccggaccccccttatcggaagatgacaagctgcaaggcgccgctagccacgtgccggagggtttcgatcctaccgggcccgccggactcggacgccccactcctggcttgtcacaggggcctggcaaggagaccctcgaaagcgcgttgattgcgctggactccgaaaagcccaagaagttgcgatttcatccaaagcagctttattttagtgcacgccagggagagctgcagaaggtgttgctcatgttagttgacggcattgatccaaatttcaagatggaacatcagaacaagcggagcccgctgcacgctgccgccgaggccgggcacgtagacatctgccatatgctggtccaggcaggcgctaacatagatacatgttccgaggaccagagaacgcccctgatggaagctgctgaaaacaatcacttggaagcagtgaaatatctcatcaaagccggggccttagtcgatccaaagattcaaaaaacaagcaaagtatacacggaatcacaggagacccagagatctcagacgattctctag

SEQ ID NO: 310998 - DNA, 2478 bp, Artificial Sequence
  derived and/or modified sequence
atggctgctgatgagggcagcgctgagaagcaggccggggaggcccacatggctgctgatggagagaccaacggcagctgtgagaacagtgatgccagcagccacgccaatgctgccaagcacacccaggacagcgcccgggtgaacccccaggacggcaccaacaccctgaccagaattgctgaaaatggagtgtctgagcgggacagcgaggccgccaagcagaaccacgtgacagcagatgactttgtgcagacctctgtgattggcagcaatggctacatcctgaacaagccagccctgcaggcccagcccctgcggaccaccagcaccctggccagcagcctgcccggccacgccgccaagaccctgcctggaggagctgggaagggccgcaccccatctgccttcccccagaccccagctgcccccccagccaccctgggggagggcagcgctgacacagaggacaggaagctgcctgcccctggagcagatgtgaaggtgcaccgggccaggaagaccatgcccaagtctgtggtgggcctgcatgctgccagcaaggacccccgggaggtgcgggaggcccgggaccacaaggagcccaaggaggagatcaacaagaacatcagtgactttggccggcagcagctgctgccccccttccccagcctgcaccagagcctgccccagaaccagtgctacatggccaccaccaagagccagacagcctgcctgccctttgtgctggccgctgctgtgtccaggaagaagaagaggaggatgggcacctacagcctggtgcccaagaagaagaccaaggtgctgaagcagaggacagtcatcgagatgttcaagagcatcacccacagcacagtgggcagcaagggggagaaggacctgggcgccagcagcctgcacgtgaatggagagagcctggagatggacagtgatgaagatgacagcgaggagctggaggaggatgatggccatggagctgagcaggccgccgccttccccacagaggacagcaggaccagcaaggagagcatgtctgaggccgaccgggcccagaagatggatggagagagcgaggaggagcaggagagcgtggacacaggagaggaggaggagggcggagatgaaagtgacctgagcagcgagagcagcatcaagaagaagttcctgaagaggaagggcaagacagacagcccctggatcaagccagccaggaagagaagaagaagaagcaggaagaagcccagcggggccctgggcagcgagagctacaagagcagcgctggcagcgctgagcagacagcccctggggacagcacaggctacatggaggtgtccctggacagcctggacctgcgggtgaagggcatcctgagcagccaggccgagggcctggccaatggaccagatgtgctggagacagatggcctgcaggaggtgcccctgtgcagctgcaggatggagacccccaagagccgggagatcaccaccctggccaacaaccagtgcatggccacagagagcgtggaccacgagctgggccgctgcaccaacagcgtggtgaagtatgagctgatgaggcccagcaacaaggcccccctgctggtgctgtgtgaggaccaccggggccgcatggtgaagcaccagtgctgccccggctgcggctacttctgcacagctggcaacttcatggagtgccagcctgagagcagcatcagccaccgcttccacaaggactgtgccagccgggtgaacaatgccagctactgcccccactgtggggaggagagcagcaaggccaaggaggtgaccatcgccaaggctgacaccaccagcacagtgacccctgtgcccggccaggagaagggcagcgccctggagggccgggctgacaccaccaccggcagcgctgctggcccccccctgtctgaagatgacaagctgcagggcgccgccagccacgtgcctgagggctttgaccccaccggccctgctggcctgggccggcccaccccaggcctgagccagggccctgggaaggagaccctggagagcgccctgattgccctggacagcgagaagcccaagaagctgcgcttccaccccaagcagctgtacttcagcgcccggcagggcgagctgcagaaggtgctgctgatgctggtggatggcatcgaccccaacttcaagatggagcaccagaacaagaggagccccctgcacgccgctgctgaggccggccacgtggacatctgccacatgctggtgcaggccggggccaacatcgacacctgcagcgaggaccagaggacccccctgatggaggccgctgagaacaaccacctggaggccgtgaagtacctgatcaaggccggggccctggtggaccccaagatccagaagaccagcaaggtgtacacagagagccaggagacccagaggagccagaccatcctgtag

SEQ ID NO: 310999 - DNA, 2478 bp, Artificial Sequence
  derived and/or modified sequence
atggccgccgacgagggcagcgccgagaagcaggccggcgaggcccacatggctgctgacggggagaccaacgggagttgcgagaattctgatgcaagttctcatgcaaatgccgccaagcacacccaggattccgctcgcgtaaacccccaggatggcacaaataccctgacaaggatagctgagaatggagtatcagaacgggactccgaggcggccaagcagaatcatgtcaccgcagacgatttcgtccagacgagcgtcattggttctaacggatacatattaaacaaacctgccttacaggcacagcccctgcgcacaacttcgaccttggcttcctccctgccaggacatgccgcaaaaacactccctggcggtgccggaaagggccgaactccttcagcctttccacagactccagccgcacctcctgccactttgggagaaggctccgcagataccgaagacagaaagttgcccgcacccggggccgacgtaaaggtccacagagcaaggaagacgatgcccaaatctgtcgtgggactgcacgccgcatcaaaagatccaagagaggtccgagaggcacgagatcacaaagagccaaaggaggaaatcaacaagaatatttctgattttgggaggcagcagctactaccgcccttccccagccttcaccaaagcctgccccagaaccagtgctatatggccacaaccaaaagtcagactgcgtgtctgcccttcgtattggcagctgccgtgtctaggaaaaagaagcgccgtatgggtacatattctctggtccccaaaaagaagacaaaggtcctgaaacaaaggaccgtcattgagatgttcaagagtattactcacagtactgtgggaagcaagggcgaaaaggatctgggtgcttcttctttgcacgttaatggagagagcctggagatggatagcgacgaggatgattcagaagaactcgaagaggatgatggtcatggcgcggagcaggctgccgctttccccacagaagacagtaggacaagcaaagagtccatgtctgaggctgatagagcccagaagatggacggggagagcgaggaggaacaagagtctgtggataccggagaggaggaggaggggggagacgagagtgacttatcttctgaaagctctatcaaaaaaaaatttctgaaacgaaaaggaaaaacggacagtccttggattaagcccgcccggaagcggcggagacgttcacgtaagaagccctccggagccctgggctctgaatcatataagtcgtccgccggttcagccgagcagacagcaccaggggacagcacaggctatatggaggtgagcttggactcactggacttacgtgtaaaagggattttaagttctcaagcagagggcttggccaatggaccagatgtcctagagacagatggtctgcaggaggtgcccttatgttcttgccggatggagacacccaaatcccgggagatcactacacttgctaataatcagtgtatggcgacagagtcagtcgaccacgagctgggaaggtgcactaactccgtggttaagtacgaacttatgcggccgtctaataaggcaccacttcttgtgctgtgcgaggaccaccggggaaggatggtgaaacaccaatgttgccccggctgcggctatttctgcacagccgggaactttatggaatgtcagcctgaatcaagcatcagccacagattccacaaagactgtgcatcacgggtgaacaacgcctcttactgcccccactgcggtgaagaaagcagcaaggccaaagaggtgaccatagctaaagcagacacaaccagcactgtcacaccggtgcctggacaggagaagggctcagctctcgaaggccgggcagatactaccaccggcagcgctgctggaccccctctgagcgaggatgacaagctgcaaggtgccgcctctcacgttcccgagggcttcgatcctacagggccagctggtctgggccgacctactcctggattgagtcagggaccaggaaaggagacacttgaaagtgccctcatcgcgttggactcagaaaaaccgaaaaaactgagatttcacccaaagcagctgtatttttccgctagacagggagagctgcagaaagtgttattgatgctggttgacggcatcgatcctaacttcaaaatggaacatcaaaataagcgttcacccttgcacgctgccgccgaggccgggcatgtcgacatctgccacatgctcgttcaagccggggcgaatatagatacttgcagcgaggaccagcgcaccccactgatggaggccgcagagaataatcacctcgaggcagtcaaatacctcataaaggcaggagctcttgtggatcccaagatccagaagacatccaaagtatacactgaatctcaggagactcagcgatcacagaccatcttgtag

SEQ ID NO: 311000 - DNA, 2478 bp, Artificial Sequence
  derived and/or modified sequence
atggccgcagatgaaggatcagcagagaagcaggctggcgaggctcacatggccgctgatggggagactaacggcagctgcgagaatagcgatgcatcaagccatgcaaatgccgctaagcacactcaggacagcgccagggttaatccccaggacggaactaacactctcacgcggattgctgagaacggcgtctctgaacgagactctgaggctgcaaaacagaaccatgtgaccgctgatgatttcgtccaaacatctgtgataggcagtaatggctacatactcaacaaacctgccctgcaagcgcagccgctccgcacaacctctaccctggcaagcagcctgcctggccacgcagccaagactctgccaggtggtgctggcaagggcaggacgccatctgctttcccacagacaccagcggctcccccagctaccttaggagaggggtcagccgatacagaagataggaagcttcccgcaccaggcgcagatgtaaaggtccaccgggcacgcaagaccatgccaaagtcagtggttgggctgcacgcagctagcaaagatccacgagaggtccgggaggccagggaccacaaggagcccaaagaggaaatcaacaagaatattagtgacttcggccgacaacaattgctgcccccatttccgtctttacaccagtccctgcctcagaatcagtgttacatggcgacaaccaaatctcagactgcctgccttcctttcgtactggctgcagctgtatctcggaagaaaaagcggaggatgggaacatactctctagtgcccaaaaaaaagacaaaagtcctgaagcagcgtacggtgattgaaatgttcaagtccattacccattccaccgttggttcaaaaggtgaaaaagacttgggtgcaagtagtctacatgtgaacggcgaatctctcgaaatggattcggacgaagacgactctgaagaactcgaggaggacgatggccacggagctgagcaggctgccgcattcccaacagaggatagcaggacatcgaaggagtcaatgtccgaggccgacagagctcagaagatggatggggaatccgaagaagagcaggagagcgtggacactggagaggaggaggaggggggtgatgagagtgacctgtcgagtgagagcagcatcaagaaaaaatttttgaagcgaaagggaaaaaccgattctccctggattaagcctgccaggaagaggcggcgacgaagccgcaagaaaccttcaggcgctctgggctccgaatcgtacaagtcctcagcagggtccgcggagcagactgctccaggcgattcgacaggctatatggaggtgagcctggattcattggacctgcgggttaagggtatcctgtcctcccaggctgaggggttagctaacggaccagacgtattggagacggatggactgcaggaagtgcctctatgctcctgtagaatggaaaccccaaagtctcgcgaaattactacgttggcgaataatcagtgcatggccaccgagtcggttgatcacgagctgggcaggtgcactaattccgtcgttaaatacgagttgatgagaccctcaaataaagcaccccttctcgtgctgtgcgaagaccaccggggtcgaatggtgaaacaccaatgttgtccaggctgtgggtacttctgtaccgctggcaacttcatggaatgtcaaccggaatcgtcaatttctcatagattccacaaggattgcgcaagccgtgtgaacaatgcctcgtactgtccgcactgcggggaagagtcatcaaaggcgaaagaggtaactatcgctaaggctgataccactagcaccgtaacccccgtccccggtcaagagaagggttctgctctggaaggtagggccgacacaactaccggcagcgctgctgggccaccattaagtgaagatgataagcttcagggagctgcttctcacgtaccagagggctttgatccgactggccctgcaggactggggagacctacaccaggactctctcagggaccgggtaaggagacccttgaaagcgccctgatcgccctggactctgagaaacctaaaaaactgcgcttccaccctaagcagctgtatttctctgcaagacaaggcgaactacaaaaagtgctgctcatgcttgtggacggcatcgatccaaatttcaagatggagcaccagaacaaaaggagtccactccatgccgcagccgaggcaggccacgtggatatctgccatatgttggtccaggccggagcaaacattgacacctgctcggaggaccagcgcacacctttgatggaagcagccgaaaataatcatctcgaggcagtgaaatatttaattaaagccggagctttggtcgatccgaaaattcagaaaacaagtaaggtctatactgaatctcaggagacacagagaagccagacaattctttag

SEQ ID NO: 311001 - DNA, 2478 bp, Artificial Sequence
  derived and/or modified sequence
atggccgccgacgagggcagcgccgagaagcaggccggcgaggcccacatggccgccgacggcgagaccaacggcagctgcgagaacagcgacgccagcagccacgccaacgccgccaagcacacccaggacagcgccagagtgaacccccaggacggcaccaacaccctgaccagaatcgccgagaacggcgtgagcgagagagacagcgaggccgccaagcagaaccacgtgaccgccgacgacttcgtgcagaccagcgtgatcggcagcaacggctacatcctgaacaagcccgccctgcaggcccagcccctgagaaccaccagcaccctggccagcagcctgcccggccacgccgccaagaccctgcccggcggcgccggcaagggcagaacccccagcgccttcccccagacccccgccgccccccccgccaccctgggcgagggcagcgccgacaccgaggacagaaagctgcccgcccccggcgccgacgtgaaggtgcacagagccagaaagaccatgcccaagagcgtggtgggcctgcacgccgccagcaaggaccccagagaggtgagagaggccagagaccacaaggagcccaaggaggagatcaacaagaacatcagcgacttcggcagacagcagctgctgccccccttccccagcctgcaccagagcctgccccagaaccagtgctacatggccaccaccaagagccagaccgcctgcctgcccttcgtgctggccgccgccgtgagcagaaagaagaagagaagaatgggcacctacagcctggtgcccaagaagaagaccaaggtgctgaagcagagaaccgtgatcgagatgttcaagagcatcacccacagcaccgtgggcagcaagggcgagaaggacctgggcgccagcagcctgcacgtgaacggcgagagcctggagatggacagcgacgaggacgacagcgaggagctggaggaggacgacggccacggcgccgagcaggccgccgccttccccaccgaggacagcagaaccagcaaggagagcatgagcgaggccgacagagcccagaagatggacggcgagagcgaggaggagcaggagagcgtggacaccggcgaggaggaggagggcggcgacgagagcgacctgagcagcgagagcagcatcaagaagaagttcctgaagagaaagggcaagaccgacagcccctggatcaagcccgccagaaagagaagaagaagaagcagaaagaagcccagcggcgccctgggcagcgagagctacaagagcagcgccggcagcgccgagcagaccgcccccggcgacagcaccggctacatggaggtgagcctggacagcctggacctgagagtgaagggcatcctgagcagccaggccgagggcctggccaacggccccgacgtgctggagaccgacggcctgcaggaggtgcccctgtgcagctgcagaatggagacccccaagagcagagagatcaccaccctggccaacaaccagtgcatggccaccgagagcgtggaccacgagctgggcagatgcaccaacagcgtggtgaagtacgagctgatgagacccagcaacaaggcccccctgctggtgctgtgcgaggaccacagaggcagaatggtgaagcaccagtgctgccccggctgcggctacttctgcaccgccggcaacttcatggagtgccagcccgagagcagcatcagccacagattccacaaggactgcgccagcagagtgaacaacgccagctactgcccccactgcggcgaggagagcagcaaggccaaggaggtgaccatcgccaaggccgacaccaccagcaccgtgacccccgtgcccggccaggagaagggcagcgccctggagggcagagccgacaccaccaccggcagcgccgccggcccccccctgagcgaggacgacaagctgcagggcgccgccagccacgtgcccgagggcttcgaccccaccggccccgccggcctgggcagacccacccccggcctgagccagggccccggcaaggagaccctggagagcgccctgatcgccctggacagcgagaagcccaagaagctgagattccaccccaagcagctgtacttcagcgccagacagggcgagctgcagaaggtgctgctgatgctggtggacggcatcgaccccaacttcaagatggagcaccagaacaagagaagccccctgcacgccgccgccgaggccggccacgtggacatctgccacatgctggtgcaggccggcgccaacatcgacacctgcagcgaggaccagagaacccccctgatggaggccgccgagaacaaccacctggaggccgtgaagtacctgatcaaggccggcgccctggtggaccccaagatccagaagaccagcaaggtgtacaccgagagccaggagacccagagaagccagaccatcctgtag

SEQ ID NO: 311002 - DNA, 2608 bp, Artificial Sequence
  derived and/or modified sequence
gcgcgggaggggcggggccacgctgcgggcccgggccatggccgccgccgatgccgaggcagttccggcgaggggggagcctcagcaggattgctgtgtgaaaaccgagctgctgggagaagagacacctatggctgccgatgaaggctcagcagagaaacaggcaggagaggcccacatggctgcggacggtgagaccaatgggtcttgtgaaaacagcgatgccagcagtcatgcaaatgctgcaaagcacactcaggacagcgcaagggtcaacccccaggatggcaccaacacactaactcggatagcggaaaatggggtttcagaaagagactcagaagcggcgaagcaaaaccacgtcactgccgacgactttgtgcagacttctgtcatcggcagcaacggatacatcttaaataagccggccctacaggcacagcccttgaggactaccagcactctggcctcttcgctgcctggccatgctgcaaaaacccttcctggaggggctggcaaaggcaggactccaagcgcttttccccagacgccagccgccccaccagccacccttggggaggggagtgctgacacagaggacaggaagctcccggcccctggcgccgacgtcaaggtccacagggcacgcaagaccatgccgaagtccgtcgtgggcctgcatgcagccagtaaagatcccagagaagttcgagaagctagagatcataaggaaccaaaagaggagatcaacaaaaacatttctgactttggacgacagcagcttttaccccccttcccatcccttcatcagtcgctacctcagaaccagtgctacatggccaccacaaaatcacagacagcttgcttgccttttgttttagcagctgcagtatctcggaagaaaaaacgaagaatgggaacctatagcctggttcctaagaaaaagaccaaagtattaaaacagaggacggtgattgagatgtttaagagcataactcattccactgtgggttccaagggggagaaggacctgggcgccagcagcctgcacgtgaatggggagagcctggagatggactcggatgaggacgactcagaggagctcgaggaggacgacggccatggtgcagagcaggcggccgcgttccccacagaggacagcaggacttccaaggagagcatgtcggaggctgatcgcgcccagaagatggacggggagtccgaggaggagcaggagtccgtggacaccggggaggaggaggaaggcggtgacgagtctgacctgagttcggaatccagcattaagaagaaatttctcaagaggaaaggaaagaccgacagtccctggatcaagccagccaggaaaaggaggcggagaagtagaaagaagcccagcggtgccctcggttctgagtcgtataagtcatctgcaggaagcgctgagcagacggcaccaggagacagcacagggtacatggaagtttctctggactccctggatctccgagtcaaaggaattctgtcttcacaagcagaagggttggccaacggtccagatgtgctggagacagacggcctccaggaagtgcctctctgcagctgccggatggaaacaccgaagagtcgagagatcaccacactggccaacaaccagtgcatggctacagagagcgtggaccatgaattgggccggtgcacaaacagcgtggtcaagtatgagctgatgcgcccctccaacaaggccccgctcctcgtgctgtgtgaagaccaccggggccgcatggtgaagcaccagtgctgtcctggctgtggctacttctgcacagcgggtaattttatggagtgtcagcccgagagcagcatctctcaccgtttccacaaagactgtgcctctcgagtcaataacgccagctattgtccccactgtggggaggagagctccaaggccaaagaggtgacgatagctaaagcagacaccacctcgaccgtgacaccagtccccgggcaggagaagggctcggccctggagggcagggccgacaccacaacgggcagtgctgccgggccaccactctcggaggacgacaagctgcagggtgcagcctcccacgtgcccgagggctttgatccaacgggacctgctgggcttgggaggccaactcccggcctttcccagggaccagggaaggaaaccttggagagcgctctcatcgccctcgactcggaaaaacccaagaagcttcgcttccacccaaagcagctgtacttctccgccaggcaaggggagcttcagaaggtgctcctcatgctggtggacggaattgaccccaacttcaaaatggagcaccagaataagcgctctccactgcacgccgcggcagaggctggacacgtggacatctgccacatgctggttcaggcgggcgctaatattgacacctgctcagaagaccagaggaccccgttgatggaagcagccgaaaacaaccatctggaagcagtgaagtacctcatcaaggctggggccctggtggatcccaagatacagaaaacttctaaagtttatacggagtctcaagagacccagagaagccaaacaattttgtga

SEQ ID NO: 311003 - DNA, 2707 bp, Artificial Sequence
  derived and/or modified sequence
gcgcgggaggggcggggccacgctgcgggcccgggccatggccgccgccgatgccgaggcagttccggcgaggggggagcctcagcaggattgctgtgtgaaaaccgagctgctgggagaagagacacctatggctgccgatgaaggctcagcagagaaacaggcaggagaggcccacatggctgcggacggtgagaccaatgggtcttgtgaaaacagcgatgccagcagtcatgcaaatgctgcaaagcacactcaggacagcgcaagggtcaacccccaggatggcaccaacacactaactcggatagcggaaaatggggtttcagaaagagactcagaagcggcgaagcaaaaccacgtcactgccgacgactttgtgcagacttctgtcatcggcagcaacggatacatcttaaataagccggccctacaggcacagcccttgaggactaccagcactctggcctcttcgctgcctggccatgctgcaaaaacccttcctggaggggctggcaaaggcaggactccaagcgcttttccccagacgccagccgccccaccagccacccttggggaggggagtgctgacacagaggacaggaagctcccggcccctggcgccgacgtcaaggtccacagggcacgcaagaccatgccgaagtccgtcgtgggcctgcatgcagccagtaaagatcccagagaagttcgagaagctagagatcataaggaaccaaaagaggagatcaacaaaaacatttctgactttggacgacagcagcttttaccccccttcccatcccttcatcagtcgctacctcagaaccagtgctacatggccaccacaaaatcacagacagcttgcttgccttttgttttagcagctgcagtatctcggaagaaaaaacgaagaatgggaacctatagcctggttcctaagaaaaagaccaaagtattaaaacagaggacggtgattgagatgtttaagagcataactcattccactgtgggttccaagggggagaaggacctgggcgccagcagcctgcacgtgaatggggagagcctggagatggactcggatgaggacgactcagaggagctcgaggaggacgacggccatggtgcagagcaggcggccgcgttccccacagaggacagcaggacttccaaggagagcatgtcggaggctgatcgcgcccagaagatggacggggagtccgaggaggagcaggagtccgtggacaccggggaggaggaggaaggcggtgacgagtctgacctgagttcggaatccagcattaagaagaaatttctcaagaggaaaggaaagaccgacagtccctggatcaagccagccaggaaaaggaggcggagaagtagaaagaagcccagcggtgccctcggttctgagtcgtataagtcatctgcaggaagcgctgagcagacggcaccaggagacagcacagggtacatggaagtttctctggactccctggatctccgagtcaaaggaattctgtcttcacaagcagaagggttggccaacggtccagatgtgctggagacagacggcctccaggaagtgcctctctgcagctgccggatggaaacaccgaagagtcgagagatcaccacactggccaacaaccagtgcatggctacagagagcgtggaccatgaattgggccggtgcacaaacagcgtggtcaagtatgagctgatgcgcccctccaacaaggccccgctcctcgtgctgtgtgaagaccaccggggccgcatggtgaagcaccagtgctgtcctggctgtggctacttctgcacagcgggtaattttatggagtgtcagcccgagagcagcatctctcaccgtttccacaaagactgtgcctctcgagtcaataacgccagctattgtccccactgtggggaggagagctccaaggccaaagaggtgacgatagctaaagcagacaccacctcgaccgtgacaccagtccccgggcaggagaagggctcggccctggagggcagggccgacaccacaacgggcagtgctgccgggccaccactctcggaggacgacaagctgcagggtgcagcctcccacgtgcccgagggctttgatccaacgggacctgctgggcttgggaggccaactcccggcctttcccagggaccagggaaggaaaccttggagagcgctctcatcgccctcgactcggaaaaacccaagaagcttcgcttccacccaaagcagctgtacttctccgccaggcaaggggagcttcagaaggtgctcctcatgctggtggacggaattgaccccaacttcaaaatggagcaccagaataagcgctctccactgcacgccgcggcagaggctggacacgtggacatctgccacatgctggttcagttctgcaggctgggaagcccaaggtcgaggggctgcctttggtgacttatggtgaggacctcgtgctgttcccgaacacagccaggaaccacgccaagaggaagatgctccagcacagccttgctgtggaccaggccgcccacagggagcaggtccattcctgggggctgactccgcctttcagagaggcgtggctccatcttcacagcctcgtagcctcttaaaggcccagcctcaaaacctcattggggcccccagccccggtaaataaattgcattcagaccata

SEQ ID NO: 311004 - protein, 625 aa, Artificial Sequence
  derived and/or modified sequence
MNVTSIALRAETWLLAAWHVKVPPMWLEACINWIQEENNNVNLSQAQMNKQVFEQWLLTDLRDLEHPLLPDGILEIPKGELNGFYALQINSLVDVSQPAYSQIQKLRGKNTTNDLVTAEAQVTPKPWEAKPSRMLMLQLTDGIVQIQGMEYQPIPILHSDLPPGTKILIYGNISFRLGVLLLKPENVKVLGGEVDALLEEYAQEKVLARLIGEPDLVVSVIPNNSNENIPRVTDVLDPALGPSDEELLASLDENDELTANNDTSSERCFTTGSSSNTIPTRQSSFEPEFVISPRPKEEPSNLSIHVMDGELDDFSLEEALLLEETVQKEQMETKELQPLTFNRNADRSIERFSHNPNTTNNFSLTCKNGNNNWSEKNVSEQMTNEDKSFGCPSVRDQNRSIFSVHCNVPLAHDFTNKEKNLETDNKIKQTSSSDSHSLNNKILNREVVNYVQKRNSQISNENDCNLQSCSLRSSENSINLSIAMDLYSPPFVYLSVLMASKPKEVTTVKVKAFIVTLTGNLSSSGGIWSITAKVSDGTAYLDVDFVDEILTSLIGFSVPEMKQSKKDPLQYQKFLEGLQKCQRDLIDLCCLMTISFNPSLSKAMVLALQDVNMEHLENLKKRLNK

SEQ ID NO: 311005 - protein, 415 aa, Artificial Sequence
  derived and/or modified sequence
MNVTSIALRAETWLLAAWHVKVPPMWLEACINWIQEENNNVNLSQAQMNKQVFEQWLLTDLRDLEHPLLPDGILEIPKGELNGFYALQINSLVDVSQPAYSQIQKLRGKNTTNDLVTAEAQVTPKPWEAKPSRMLMLQLTDGIVQIQGMEYQPIPILHSDLPPGTKILIYGNISFRLGVLLLKPENVKVLGGEVDALLEEYAQEKVLARLIGEPDLVVSVIPNNSNENIPRVTDVLDPALGPSDEELLASLDENDELTANNDTSSERCFTTGSSSNTIPTRQSSFEPEFVISPRPKEEPSNLSIHVMDGELDDFSLEEALLLEETVQKEQMETKELQPLTFNRNADRSIERFSHNPNTTNNFSLTCKNGNNNWSEKNVSEQMTNEDKSFGCPSVRDQNRSIFSVHCNVPLAHDFT

SEQ ID NO: 311006 - DNA, 1878 bp, Artificial Sequence
  derived and/or modified sequence
atgaacgtcacctctatagcgctgagagcagaaacatggttgctagcagcctggcacgttaaggttccgcctatgtggctggaagcctgtatcaactggatccaggaagagaacaacaacgtgaatctgagccaggctcagatgaacaaacaggtctttgagcagtggctgctgaccgacttacgcgacctcgaacaccccctcctccccgatgggatcctggagatccccaaaggcgaactgaatgggttctatgccttgcagataaacagcctagtggacgtcagccaaccggcttattctcagatccaaaagctgagaggcaaaaacactactaatgatctcgtaacggctgaggcccaggtcaccccaaaaccctgggaggctaagccttcccggatgctaatgctgcagctgacagacgggatagtccagatccaggggatggaatatcaaccaatacctatcttgcattcagatctgcctccagggacaaagattctgatatacggaaatattagcttcaggctcggagtcctccttcttaaacccgaaaatgtaaaggtactgggaggagaggtggacgctctactcgaagagtatgctcaggagaaggttctggcgaggctcatcggcgaaccagacctggtggtgagtgttatccccaacaacagtaacgagaacatccctcgcgtgactgacgtcctcgacccagcacttgggccctctgatgaagagttgctggctagcctagatgagaatgatgagttgactgccaataatgataccagtagtgagcggtgttttaccacaggctctagcagcaacactatccctacaaggcagagtagcttcgagcctgaattcgtgatcagtccaaggcctaaggaggagccttccaacttgagcatccacgtgatggatggggagcttgacgatttttcactggaggaggcgcttctgcttgaggaaactgtccaaaaggaacagatggaaacgaaagagcttcaaccactgacgttcaaccgaaacgccgaccgctctattgagcggttcagccataacccgaacaccactaacaattttagcctcacctgtaagaatggaaacaacaactggtccgagaagaacgtttctgaacagatgacaaacgaagacaaaagtttcggatgcccttcggtccgggaccagaatagaagcatattcagcgtccactgcaacgtgcctctcgcgcacgactttaccaataaagagaaaaacttggaaaccgataacaaaatcaagcagacctctagtagcgacagccactctcttaataataagatcctcaatcgtgaggttgtgaattatgtgcagaaacgaaatagccagattagcaacgagaacgactgtaatctccaatcatgcagccttcggtccagcgagaatagtattaatcttagcattgccatggatctttatagccccccgttcgtctacctcagtgtgctgatggccagcaagcctaaggaggtcactacggtaaaagtgaaagcctttatcgttacgctgaccggtaatctgagtagtagcggaggtatctggtctatcactgccaaggtcagcgatgggacagcatatctggatgtggattttgtggatgagatcttaacgagcctgattggtttttctgttccagagatgaagcaatccaagaaggaccccctgcagtaccagaaattcttggagggtctgcagaagtgtcagagggacttgatagatctatgttgcctaatgaccatctccttcaacccatcactgagcaaggcgatggtgctggcactacaagacgtcaatatggaacacttagaaaacctgaaaaagcgcctcaacaagtag

SEQ ID NO: 311007 - DNA, 1878 bp, Artificial Sequence
  derived and/or modified sequence
atgaatgtgaccagcatcgccctgcgggcagagacctggctgctggccgcctggcacgtgaaggtgccccccatgtggctggaggcctgcatcaactggatccaggaggagaacaacaacgtgaacctgagccaggcccagatgaacaagcaggtgtttgagcagtggctgctgacagacctgcgggacctggagcaccccctgctgcctgatggcatcctggagatccccaagggggagctgaatggcttctacgccctgcagatcaacagcctggtggatgtgtcccagcctgcctacagccagatccagaagctgcggggcaagaacaccaccaatgacctggtgacagctgaggcccaggtgacccccaagccctgggaggccaagcccagcaggatgctgatgctgcagctgacagatggcatcgtgcagatccagggcatggagtaccagcccatccccatcctgcacagcgacctgcccccaggcaccaagatcctgatctacggcaacatctccttccggctgggcgtgctgctgctgaagccagaaaatgtgaaggtgctgggcggggaggtggatgccctgctggaggagtatgcccaggagaaggtgctggcccggctgattggagagccagacctggtggtgtctgtcatccccaacaacagcaatgaaaacatcccccgggtgacagatgtgctggaccctgccctgggccccagtgatgaggagctgctggccagcctggatgaaaatgatgagctgacagccaacaatgacaccagcagcgagcgctgcttcaccaccggcagcagcagcaacaccatccccacccggcagagcagctttgagcctgagtttgtgatcagcccccggcccaaggaggagcccagcaacctgagcatccacgtgatggatggagagctggatgacttcagcctggaggaggccctgctgctggaggagaccgtgcagaaggagcagatggagaccaaggagctgcagcccctgaccttcaacagaaatgctgacaggagcattgagcgcttcagccacaaccccaacaccaccaacaacttcagcctgacctgcaagaatggaaacaacaactggagcgagaagaatgtgtctgagcagatgaccaatgaagacaagagctttggctgccccagcgtgcgggaccagaacagaagcatcttctctgtgcactgcaatgtgcccctggcccatgacttcaccaacaaggagaagaacctggagacagacaacaagatcaagcagaccagcagcagtgacagccacagcctgaacaacaagatcctgaaccgggaggtggtgaactacgtgcagaagaggaacagccagatcagcaatgaaaatgactgcaacctgcagagctgcagcctgcggagcagtgaaaattccatcaacctgagcatcgccatggacctgtacagccccccatttgtgtacctgtctgtgctgatggccagcaagcccaaggaggtgaccaccgtgaaggtgaaggccttcatcgtgaccctgaccggcaacctgagcagcagcggcggcatctggagcatcacagccaaggtgtctgatggaacagcctacctggatgtggactttgtggatgagatcctgaccagcctcatcggcttctctgtgcctgagatgaagcagagcaagaaggaccccctgcagtaccagaagttcctggagggcctgcagaagtgccagagggacctgattgacctgtgctgcctgatgaccatctccttcaaccccagcctgagcaaggccatggtgctggccctgcaggatgtgaacatggagcacctggagaacctgaagaagaggctgaacaagtag

SEQ ID NO: 311008 - DNA, 3416 bp, Artificial Sequence
  derived and/or modified sequence
aaaaaggaactgggagcgcgccgcggcggttcctgtccttacagttgcgctgcccagggaccgatgttgcgcgaggaaaatgcgggacgcccaggtcggtgctcggcccagacttatgcccgtgttttcacagcccacactcgtgcccgaagccccttaccccgccccgggctgtggtctgtgggctgtgggacgagctgcggcgcgggccatttctgagcagtggaggtttcaagtaatccactaacaaccagttccaaattctgtcatcaaatcctgtgctgctgttcctcgtggtaatagatgcatattatttcttttatttaaaagaaatgaatgtgactagtattgcattaagagctgaaacttggcttttagctgcatggcatgttaaagtacctccgatgtggctggaagcttgtattaactggattcaagaagaaaataataatgttaacttgagtcaggcccaaatgaataaacaagtgtttgagcagtggctccttactgatctgagggatttggagcatcctcttttacccgatggcattttagaaattccaaaaggagaattaaatggattttatgctctgcagattaattccttggttgatgtaagtcagcctgcatactcccagatacagaagttgagaggaaagaatacaacaaatgatctagttacagctgaagcacaagtaaccccaaaaccttgggaagcaaagccttcacgaatgttgatgctgcagctaactgatggaatcgtacaaatacagggaatggaatatcagcctattccaattcttcatagtgatcttcctccaggtacaaaaattttgatttatggaaatatatctttccgtcttggtgttctcttattgaaaccagaaaacgtgaaagtgttaggaggtgaagtagatgctcttttagaagaatatgcccaagaaaaagtacttgcaagattaataggggaacctgatcttgtagtttcagtcataccaaacaattctaacgaaaacattcccagagttacagatgttctagatcctgcattaggtccttctgatgaagaactcttggcaagtcttgatgaaaatgatgagcttacagcaaataatgacacttcctcagaacgatgtttcaccacaggtagttcctcaaataccattcccacaagacagtcaagttttgagccagaatttgttatttctccaagaccaaaagaggaaccatcaaacctatctatacatgtaatggatggagaattagatgacttttcactggaggaggccttgcttttagaagaaactgtccagaaagaacagatggaaactaaggaattgcaaccattgacttttaacagaaatgccgatcgaagtatagagagattttcacataatcctaatactacgaataacttttctttgacttgcaaaaatggaaacaataattggagtgaaaaaaatgtatctgaacaaatgactaatgaagacaaatcatttggttgtccatctgttagagaccaaaacaggagtattttttcagttcattgtaatgtacccttagcccatgattttacaaataaagaaaagaacttagagacagataataaaataaaacaaaccagcagttcagatagccattccttaaataataaaatattaaatagagaggtggtcaactatgtacagaaaaggaattcacaaatttctaatgaaaatgattgtaatttacagagttgttctttaagatcatcagagaatagcattaatctttctattgccatggatttgtattctccaccctttgtctatttgtctgttctaatggccagcaaaccaaaggaagttacaacagtgaaagtgaaagcatttattgtaaccttaactggaaatctctcaagttctggtggtatttggagtataactgcaaaggtgtctgatggtactgcatatctagatgtagactttgtggatgaaatacttactagcttgatagggttctcagtaccagaaatgaaacagtcaaaaaaggatcctcttcaataccaaaagttcctggaagggttgcagaaatgtcaaagagatctaatagatttgtgctgtctaatgactatttcatttaatccttccttgtctaaagcaatggtactggcattacaagatgttaatatggaacaccttgagaatctaaagaagcggttaaataaataattaaactaaaatagtattaggaacaattaaaaacaacaaggaaatatttagaatttgttcacaattttacttatgatactttgtgtaaaaaggaaaaatgaaatttcatagcttatttcagtttaattttaaagtgtttaatcatgtttgttatatgtggagcttttgaaaataagttaatctttttttttttttttttaatgtcagggtattgctctgttgcccaggctagagtgcagtggcatgatcataggttattgcatcaacctcttgagctcaagcgatcctcctgccttagcctcttgagttgctgggactataggcatgtaccaccatgcccagctaatttataattactattattgttttgtagggacagagttttgctatgttgcccagattggtctcaaactcctggcctctcactcctgccgtcatggcctccaaagtttactttttttaaaagtaactgttagatggaggaatatggtgacccactattgttgagaaatttgttttccacttgtcacgtcacataagatgattgctaaaatattgtactggtgttcggtggtgagtcatatttttgaaagttaataattataaataggtaatttccttctaatatgttggtactgtctatggccataccaccctgaacatgcctgagcttgtcataatatgttgagtacccaaaagatttgtttatattgttaatcttagggaaaaaaaattaaaatccagtagatcagaacatcaggctttcagatacaaattgatttactggtttttattttgctgattataatatttggtatatttaaggtaatctagttaactagatgctatttcatagattatattgaatgatttaaaactttattttcaaggatagtttattttaaatggcatattgaaaacatcattattaagatccagtaggtaggacatttattggattaaaatgaagcatttatctatgtctttaggtgtcattgttccctttctgaattagctgtacatataagccttcctttggttttaagtactgatttttttttaaaaaaaagagggactgtttaccattcttccactgtgctgttataaagttgtatttgaaaggtaatgttgtttttattaatcttttgtcttaaaataatttaaagtgctttgaattttaaaacattaaacaaatccttaaataac

SEQ ID NO: 311009 - DNA, 1878 bp, Artificial Sequence
  derived and/or modified sequence
atgaacgtgaccagcatcgccctgcgggccgagacctggctgctggcagcctggcacgttaaagtgcctcccatgtggctggaagcttgtatcaattggatccaggaggagaataataatgtcaatctgtcccaggcccagatgaacaagcaggtttttgaacagtggcttcttacagacctaagggatctggagcaccctctactccccgacggcatactggagatcccaaagggggagttgaacggattttacgcactacagattaactctttagtcgacgtatctcagcccgcttactcgcagatccagaagcttagaggtaagaacaccactaacgacttggtaacagccgaagcccaggttacacccaaaccatgggaggcaaagcccagcaggatgctgatgcttcagctcacagatgggattgtccagattcagggtatggagtatcagcctatcccaattctgcatagcgatctgcctcccggaacaaagattctgatctacggcaacatctccttccgtctcggtgttctgctcctgaaacctgaaaacgtgaaagttctgggtggggaagtggatgccttgctagaggaatacgcccaggaaaaagtgcttgccagactcattggggagcccgaccttgtggtcagcgtcatcccaaataatagtaacgaaaacattccccgagtcaccgacgtcttagatccagctctgggacccagcgacgaagagttactggcaagtctagacgaaaacgacgaattaacagcaaacaacgatacctctagtgaacgctgttttaccaccgggtcttccagcaacaccatacctacaaggcagagcagtttcgagccggagtttgtgataagtccccggcccaaggaagaaccgtctaatctgtctatccacgttatggacggggaactggacgatttttcactggaggaggcattgctacttgaagagaccgtccaaaaagaacagatggaaacaaaagagctgcagcccctgacgtttaatcgcaacgccgacaggagtatcgaacgcttttctcacaaccccaacactacaaacaatttcagtttaacatgtaaaaacggaaacaataattggagcgagaaaaacgtctccgagcaaatgacaaatgaggataagagctttgggtgtccttctgtgagggaccagaacagatctatattttcggtccactgcaacgtgcctctcgcccatgatttcactaacaaagaaaagaaccttgaaaccgacaataaaatcaaacagacctcgagctcagatagccactcgttgaacaacaaaatcctgaacagggaagtcgtcaattatgtgcaaaaaaggaatagtcaaatttctaatgagaacgactgtaatctccagtcatgcagtcttcgctccagcgagaactccatcaatctttctattgcgatggatctgtactctccgccttttgtctacctatccgtcctgatggcaagtaaacccaaggaagtgactactgttaaggtaaaggcctttattgttacattaaccggcaatttatctagttccgggggcatatggagcattacggccaaggtgagcgatggcacagcgtatctggacgttgattttgttgacgaaatactgacctcactgataggtttctcagtgcccgaaatgaaacagagtaagaaggatcctctccagtatcagaagttcttggaagggcttcagaagtgccagagggatctcatcgatctatgttgcctcatgacaataagcttcaacccctccctgtcaaaagcaatggtgttagctctgcaagacgtaaacatggagcacttggaaaacctcaagaaacgactgaacaaatag

SEQ ID NO: 311010 - DNA, 1878 bp, Artificial Sequence
  derived and/or modified sequence
atgaatgtgacttccatcgctctgcgagccgaaacctggctgctcgcagcatggcatgtgaaggtgcccccaatgtggctggaggcctgtatcaactggattcaggaggaaaataacaatgtgaatctcagccaggcccaaatgaacaaacaggtgtttgagcagtggctcttgaccgatcttcgcgatctggagcatcctttactgcccgacggaatcctcgaaattccaaagggcgagctcaacggtttctacgccctgcagattaacagtctcgtggacgttagccagcccgcttacagtcagatacaaaagctgcgtggtaaaaacaccactaacgatctggtgaccgcggaggcacaggtgactcctaagccatgggaagcaaaaccctctcggatgcttatgcttcaactcacagatggcattgttcaaattcagggcatggagtatcagcccatccctatccttcactcagacctgcctcctgggactaaaatcttgatttatggaaatattagctttaggcttggggtgctcctgctgaaacccgagaacgttaaggtgcttggcggagaggtggatgctctcctagaggaatacgcacaagaaaaggtccttgccagattaatcggggaaccagacctggtggtgagtgtgattccaaacaactcaaacgaaaatatacctagggttacagacgtcctggatccagccctgggaccttctgatgaggagttactcgcctcactggacgaaaatgacgagcttacagcaaacaacgacacctccagtgagcggtgttttacgactggctcaagctctaatactatcccaacccggcagtcctcttttgagcccgagtttgtgattagcccaagaccgaaggaggagccctctaacctgagcattcacgttatggacggtgaattggatgattttagtcttgaggaagcactgctcctggaggaaaccgtgcagaaggagcagatggagactaaggagcttcagcctctaacattcaacaggaacgcagaccgctccatcgagcggttcagccataaccctaataccaccaacaacttctccctcacatgcaagaatggcaacaacaattggtccgagaaaaatgtctcggaacagatgacgaatgaggataaaagttttggatgtccgagtgttcgagaccaaaaccgttccattttctcagtacattgtaacgtccccctggcacacgactttacaaacaaagaaaaaaatctcgaaactgataacaagataaaacagacatcctcatccgattcacactcactgaacaataagatcctcaacagagaggtcgttaattacgtccagaaacggaacagccagatttccaatgaaaacgattgtaatttgcagtcctgttccctcaggagtagtgagaattctattaacctgagcatcgccatggacttgtacagtccaccgttcgtttatctgagcgttctgatggcctccaaacctaaagaagtgaccaccgtaaaggtcaaggccttcatcgtgacccttaccgggaacctgtcatcttccggtggcatttggagtatcaccgcaaaagttagtgacggcactgcttacctcgatgttgactttgtggacgagattttgacatccttgatcggattttccgtgcccgaaatgaagcagagcaagaaggatcccttgcaataccagaagtttctggagggtctgcagaagtgtcagcgtgatctgatagacctgtgctgtctcatgacaatctccttcaatcccagcctaagcaaggcaatggtgctggcactccaagatgttaatatggaacacctggagaatcttaaaaaaaggctgaacaaatag

SEQ ID NO: 311011 - DNA, 1878 bp, Artificial Sequence
  derived and/or modified sequence
atgaacgtgaccagcatcgccctgagagccgagacctggctgctggccgcctggcacgtgaaggtgccccccatgtggctggaggcctgcatcaactggatccaggaggagaacaacaacgtgaacctgagccaggcccagatgaacaagcaggtgttcgagcagtggctgctgaccgacctgagagacctggagcaccccctgctgcccgacggcatcctggagatccccaagggcgagctgaacggcttctacgccctgcagatcaacagcctggtggacgtgagccagcccgcctacagccagatccagaagctgagaggcaagaacaccaccaacgacctggtgaccgccgaggcccaggtgacccccaagccctgggaggccaagcccagcagaatgctgatgctgcagctgaccgacggcatcgtgcagatccagggcatggagtaccagcccatccccatcctgcacagcgacctgccccccggcaccaagatcctgatctacggcaacatcagcttcagactgggcgtgctgctgctgaagcccgagaacgtgaaggtgctgggcggcgaggtggacgccctgctggaggagtacgcccaggagaaggtgctggccagactgatcggcgagcccgacctggtggtgagcgtgatccccaacaacagcaacgagaacatccccagagtgaccgacgtgctggaccccgccctgggccccagcgacgaggagctgctggccagcctggacgagaacgacgagctgaccgccaacaacgacaccagcagcgagagatgcttcaccaccggcagcagcagcaacaccatccccaccagacagagcagcttcgagcccgagttcgtgatcagccccagacccaaggaggagcccagcaacctgagcatccacgtgatggacggcgagctggacgacttcagcctggaggaggccctgctgctggaggagaccgtgcagaaggagcagatggagaccaaggagctgcagcccctgaccttcaacagaaacgccgacagaagcatcgagagattcagccacaaccccaacaccaccaacaacttcagcctgacctgcaagaacggcaacaacaactggagcgagaagaacgtgagcgagcagatgaccaacgaggacaagagcttcggctgccccagcgtgagagaccagaacagaagcatcttcagcgtgcactgcaacgtgcccctggcccacgacttcaccaacaaggagaagaacctggagaccgacaacaagatcaagcagaccagcagcagcgacagccacagcctgaacaacaagatcctgaacagagaggtggtgaactacgtgcagaagagaaacagccagatcagcaacgagaacgactgcaacctgcagagctgcagcctgagaagcagcgagaacagcatcaacctgagcatcgccatggacctgtacagcccccccttcgtgtacctgagcgtgctgatggccagcaagcccaaggaggtgaccaccgtgaaggtgaaggccttcatcgtgaccctgaccggcaacctgagcagcagcggcggcatctggagcatcaccgccaaggtgagcgacggcaccgcctacctggacgtggacttcgtggacgagatcctgaccagcctgatcggcttcagcgtgcccgagatgaagcagagcaagaaggaccccctgcagtaccagaagttcctggagggcctgcagaagtgccagagagacctgatcgacctgtgctgcctgatgaccatcagcttcaaccccagcctgagcaaggccatggtgctggccctgcaggacgtgaacatggagcacctggagaacctgaagaagagactgaacaagtag

SEQ ID NO: 311012 - DNA, 1248 bp, Artificial Sequence
  derived and/or modified sequence
atgaacgtgaccagcatcgccctgagagccgagacctggctgctggccgcctggcacgtgaaggtgccccccatgtggctggaggcctgcatcaactggatccaggaggagaacaacaacgtgaacctgagccaggcccagatgaacaagcaggtgttcgagcagtggctgctgaccgacctgagagacctggagcaccccctgctgcccgacggcatcctggagatccccaagggcgagctgaacggcttctacgccctgcagatcaacagcctggtggacgtgagccagcccgcctacagccagatccagaagctgagaggcaagaacaccaccaacgacctggtgaccgccgaggcccaggtgacccccaagccctgggaggccaagcccagcagaatgctgatgctgcagctgaccgacggcatcgtgcagatccagggcatggagtaccagcccatccccatcctgcacagcgacctgccccccggcaccaagatcctgatctacggcaacatcagcttcagactgggcgtgctgctgctgaagcccgagaacgtgaaggtgctgggcggcgaggtggacgccctgctggaggagtacgcccaggagaaggtgctggccagactgatcggcgagcccgacctggtggtgagcgtgatccccaacaacagcaacgagaacatccccagagtgaccgacgtgctggaccccgccctgggccccagcgacgaggagctgctggccagcctggacgagaacgacgagctgaccgccaacaacgacaccagcagcgagagatgcttcaccaccggcagcagcagcaacaccatccccaccagacagagcagcttcgagcccgagttcgtgatcagccccagacccaaggaggagcccagcaacctgagcatccacgtgatggacggcgagctggacgacttcagcctggaggaggccctgctgctggaggagaccgtgcagaaggagcagatggagaccaaggagctgcagcccctgaccttcaacagaaacgccgacagaagcatcgagagattcagccacaaccccaacaccaccaacaacttcagcctgacctgcaagaacggcaacaacaactggagcgagaagaacgtgagcgagcagatgaccaacgaggacaagagcttcggctgccccagcgtgagagaccagaacagaagcatcttcagcgtgcactgcaacgtgcccctggcccacgacttcacctag

SEQ ID NO: 311013 - DNA, 1248 bp, Artificial Sequence
  derived and/or modified sequence
atgaacgtcacatccatagccttgagggcggaaacttggctgctagccgcctggcacgttaaagtgccccccatgtggctggaggcctgcatcaattggatccaagaagaaaacaacaatgtgaatctctcccaggcacagatgaataagcaagtattcgagcagtggctactcacagatctccgagatcttgaacatccactgcttccagacggcatcctggagatcccaaagggggaactgaatgggttttacgcgctgcagattaactcactggttgacgtctcacaacccgcttatagtcagattcagaagctgaggggaaagaatactacaaatgatctcgtcaccgctgaggctcaggttacccccaagccatgggaagctaaacctagtagaatgctgatgctgcaactgaccgacggtatcgtccaaatccaagggatggagtatcaacctatacctatactgcattcagacctgcctcctggaaccaagatccttatttatggaaacattagcttccgcctcggtgtgctgctcctgaagcctgagaatgtcaaagttctagggggggaggtcgacgctcttctcgaggagtacgcacaagaaaaagttttagcccggttgatcggggagccagatttggttgtgtcagtgattcccaacaacagcaatgagaatatcccccgggttacggatgtgcttgatcctgctctggggccttcagacgaggaactccttgctagcttggatgagaatgatgaactaactgctaacaatgacacttcctccgaaaggtgttttaccaccgggtcttccagcaacaccatccccactcggcagagtagttttgagccagaattcgtaattagccctaggcccaaggaggaaccctcaaatctttcaattcatgttatggacggagagttggatgactttagcctggaagaagcccttttacttgaggagaccgtacagaaagaacaaatggagaccaaggaattgcaaccactgacctttaacaggaacgcggaccggagcatcgagcgctttagccataacccaaatacgactaacaactttagtcttacatgcaagaatggtaacaacaattggtcagagaaaaatgtttcagaacagatgactaacgaggacaaatcgtttggctgcccatctgttcgagaccagaaccggtccatcttctcagtacactgcaatgtgccgctcgcccacgacttcacctag

SEQ ID NO: 311014 - DNA, 1248 bp, Artificial Sequence
  derived and/or modified sequence
atgaatgtgaccagcatcgccctgcgggcagagacctggctgctggccgcctggcacgtgaaggtgccccccatgtggctggaggcctgcatcaactggatccaggaggagaacaacaacgtgaacctgagccaggcccagatgaacaagcaggtgtttgagcagtggctgctgacagacctgcgggacctggagcaccccctgctgcctgatggcatcctggagatccccaagggggagctgaatggcttctacgccctgcagatcaacagcctggtggatgtgtcccagcctgcctacagccagatccagaagctgcggggcaagaacaccaccaatgacctggtgacagctgaggcccaggtgacccccaagccctgggaggccaagcccagcaggatgctgatgctgcagctgacagatggcatcgtgcagatccagggcatggagtaccagcccatccccatcctgcacagcgacctgcccccaggcaccaagatcctgatctacggcaacatctccttccggctgggcgtgctgctgctgaagccagaaaatgtgaaggtgctgggcggggaggtggatgccctgctggaggagtatgcccaggagaaggtgctggcccggctgattggagagccagacctggtggtgtctgtcatccccaacaacagcaatgaaaacatcccccgggtgacagatgtgctggaccctgccctgggccccagtgatgaggagctgctggccagcctggatgaaaatgatgagctgacagccaacaatgacaccagcagcgagcgctgcttcaccaccggcagcagcagcaacaccatccccacccggcagagcagctttgagcctgagtttgtgatcagcccccggcccaaggaggagcccagcaacctgagcatccacgtgatggatggagagctggatgacttcagcctggaggaggccctgctgctggaggagaccgtgcagaaggagcagatggagaccaaggagctgcagcccctgaccttcaacagaaatgctgacaggagcattgagcgcttcagccacaaccccaacaccaccaacaacttcagcctgacctgcaagaatggaaacaacaactggagcgagaagaatgtgtctgagcagatgaccaatgaagacaagagctttggctgccccagcgtgcgggaccagaacagaagcatcttctctgtgcactgcaatgtgcccctggcccatgacttcacctag

SEQ ID NO: 311015 - DNA, 1248 bp, Artificial Sequence
  derived and/or modified sequence
atgaacgtgaccagcatcgccctgcgggccgagacctggctgctggccgcttggcacgtgaaagttcctcctatgtggctggaggcgtgtatcaattggatccaggaggagaataataacgtgaacctcagtcaggctcagatgaataaacaggtgtttgagcaatggttactcactgatctgcgggacctggaacatccgctgttgccagacggcatactcgaaatcccaaagggagaactgaatggtttttacgctttacaaattaactccttggtcgacgtgtcccagcctgcttatagccagatacaaaagctgcgcggcaagaacaccactaacgacctggtgacagccgaggcacaggtgactcctaagccgtgggaggctaagccaagtcgcatgctcatgctccagctgacggatggcatcgtgcagattcagggcatggagtaccagcctatcccaatccttcactctgaccttccacctggcaccaaaattctcatctacggaaatatcagtttcagactgggcgtactgctgctgaagcccgagaacgtgaaagtgctgggcggcgaagtggatgcactcttggaggaatacgcacaggagaaggtcctggcacgcctgatcggggaacctgacctggtggtaagtgtcatccccaacaactctaacgagaatattcctagagtgactgatgtcttagaccccgcattgggaccttctgatgaggaactgctggctagcctggatgagaatgacgagctcacagctaataacgatacttcttctgagagatgctttaccacaggatcctcctccaataccatccctacacggcagagttcttttgaacccgagttcgttattagtccaaggccaaaagaagagcctagcaacctttcaatccacgtgatggacggtgagctggacgattttagcctggaagaggcactgcttcttgaagagacagtgcagaaggagcagatggaaacgaaggaacttcagcctctcactttcaatcggaacgccgaccgatcaatcgaacggtttagccacaacccaaacactacaaataactttagtctcacctgcaaaaatggcaacaataactggagtgaaaaaaacgttagtgagcagatgacgaatgaggacaaaagcttcgggtgtccttcagtaagagatcagaataggtccatcttttcagtgcattgcaatgtgccactcgcccatgattttacttag

SEQ ID NO: 311016 - DNA, 1248 bp, Artificial Sequence
  derived and/or modified sequence
atgaacgtaacgtctattgcactgcgggcagaaacatggctgctggccgcttggcatgtcaaggtacctcccatgtggctggaggcctgtataaactggatccaggaagagaataacaacgttaacctgagtcaggctcagatgaacaagcaggtcttcgaacaatggctgctgactgatctgcgcgatttagagcaccctctgctgcctgacggtatccttgaaatccccaagggagaactgaatgggttctatgcccttcagatcaacagtctcgttgacgtgtcacagcccgcatactcacagatacagaagctccggggaaagaataccactaatgatttagttacagcggaagcccaggttacacccaagccctgggaggcaaaacccagccgcatgctgatgctccaactcaccgacggtattgtgcagattcaaggtatggagtaccagccaatccctatattgcatagcgatttgccgcctggcacgaaaattctgatttacggcaacattagctttcgtctcggcgtgctgttactgaagcctgagaatgttaaagtattaggcggagaagtcgacgccctgctggaggaatatgctcaggaaaaagtcttggcacgtttaataggagaaccagacttggtagtctcagtgattcctaacaacagcaacgagaatattccgcgtgttaccgacgtgttggatccagcgctcggtccatctgacgaagagttgctcgcatcgctcgacgagaacgacgaactgacggccaataatgatacctcctctgagaggtgcttcaccaccggaagctctagtaacacaattcccactcgtcaatcttcttttgaaccagaattcgtgataagccctcgtccaaaggaagagccttctaatctatccatccacgtaatggacggcgagttggacgacttttctctggaagaagcactgctcctcgaggaaactgtacaaaaagagcagatggagactaaggaactccagcccctgacatttaaccgcaacgccgaccgatcaattgagagattttctcacaatcctaacacaaccaacaatttctctctgacttgtaagaatgggaacaacaattggtccgagaagaatgtgagcgaacagatgacaaacgaagataagtcatttggctgccctagtgtgagggaccagaatcggagcatctttagtgttcactgcaatgttcctttagctcatgatttcacatag

SEQ ID NO: 311017 - DNA, 1553 bp, Artificial Sequence
  derived and/or modified sequence
ggggaaggggcgttttccagccccgaaggagtcctttggggttggaggaggggcgcgagcgcgcggcaaatcgggcgggaagaggtaaaaaaggaactgggagcgcgccgcggcggttcctgtccttacagttgcgctgcccagggaccgatgttgcgcgaggaaaatgcgggacgcccagggccatttctgagcagtggaggtttcaagtaatccactaacaaccagttccaaattctgtcatcaaatcctgtgctgctgttcctcgtggtaatagatgcatattatttcttttatttaaaagaaatgaatgtgactagtattgcattaagagctgaaacttggcttttagctgcatggcatgttaaagtacctccgatgtggctggaagcttgtattaactggattcaagaagaaaataataatgttaacttgagtcaggcccaaatgaataaacaagtgtttgagcagtggctccttactgatctgagggatttggagcatcctcttttacccgatggcattttagaaattccaaaaggagaattaaatggattttatgctctgcagattaattccttggttgatgtaagtcagcctgcatactcccagatacagaagttgagaggaaagaatacaacaaatgatctagttacagctgaagcacaagtaaccccaaaaccttgggaagcaaagccttcacgaatgttgatgctgcagctaactgatggaatcgtacaaatacagggaatggaatatcagcctattccaattcttcatagtgatcttcctccaggtacaaaaattttgatttatggaaatatatctttccgtcttggtgttctcttattgaaaccagaaaacgtgaaagtgttaggaggtgaagtagatgctcttttagaagaatatgcccaagaaaaagtacttgcaagattaataggggaacctgatcttgtagtttcagtcataccaaacaattctaacgaaaacattcccagagttacagatgttctagatcctgcattaggtccttctgatgaagaactcttggcaagtcttgatgaaaatgatgagcttacagcaaataatgacacttcctcagaacgatgtttcaccacaggtagttcctcaaataccattcccacaagacagtcaagttttgagccagaatttgttatttctccaagaccaaaagaggaaccatcaaacctatctatacatgtaatggatggagaattagatgacttttcactggaggaggccttgcttttagaagaaactgtccagaaagaacagatggaaactaaggaattgcaaccattgacttttaacagaaatgccgatcgaagtatagagagattttcacataatcctaatactacgaataacttttctttgacttgcaaaaatggaaacaataattggagtgaaaaaaatgtatctgaacaaatgactaatgaagacaaatcatttggttgtccatctgttagagaccaaaacaggagtattttttcagttcattgtaatgtacccttagcccatgattttacaaa

SEQ ID NO: 311018 - protein, 1734 aa, Artificial Sequence
  derived and/or modified sequence
MGKKWRDAAEMERGCSDREDNAESRRRSRSASRGRFAESWKRLSSKQGSTKRSGLPSQQTPAQKSWIERAFYKRECVHIIPSTKDPHRCCCGRLIGQHVGLTPSISVLQNEKNESRLSRNDIQSEKWSISKHTQLSPTDAFGTIEFQGGGHSNKAMYVRVSFDTKPDLLLHLMTKEWQLELPKLLISVHGGLQNFELQPKLKQVFGKGLIKAAMTTGAWIFTGGVNTGVIRHVGDALKDHASKSRGKICTIGIAPWGIVENQEDLIGRDVVRPYQTMSNPMSKLTVLNSMHSHFILADNGTTGKYGAEVKLRRQLEKHISLQKINTRCLPFFSLDSRLFYSFWGSCQLDSVGIGQGVPVVALIVEGGPNVISIVLEYLRDTPPVPVVVCDGSGRASDILAFGHKYSEEGGLINESLRDQLLVTIQKTFTYTRTQAQHLFIILMECMKKKELITVFRMGSEGHQDIDLAILTALLKGANASAPDQLSLALAWNRVDIARSQIFIYGQQWPVGSLEQAMLDALVLDRVDFVKLLIENGVSMHRFLTISRLEELYNTRHGPSNTLYHLVRDVKKGNLPPDYRISLIDIGLVIEYLMGGAYRCNYTRKRFRTLYHNLFGPKRPKALKLLGMEDDIPLRRGRKTTKKREEEVDIDLDDPEINHFPFPFHELMVWAVLMKRQKMALFFWQHGEEAMAKALVACKLCKAMAHEASENDMVDDISQELNHNSRDFGQLAVELLDQSYKQDEQLAMKLLTYELKNWSNATCLQLAVAAKHRDFIAHTCSQMLLTDMWMGRLRMRKNSGLKVILGILLPPSILSLEFKNKDDMPYMSQAQEIHLQEKEAEEPEKPTKEKEEEDMELTAMLGRNNGESSRKKDEEEVQSKHRLIPLGRKIYEFYNAPIVKFWFYTLAYIGYLMLFNYIVLVKMERWPSTQEWIVISYIFTLGIEKMREILMSEPGKLLQKVKVWLQEYWNVTDLIAILLFSVGMILRLQDQPFRSDGRVIYCVNIIYWYIRLLDIFGVNKYLGPYVMMIGKMMIDMMYFVIIMLVVLMSFGVARQAILFPNEEPSWKLAKNIFYMPYWMIYGEVFADQIDPPCGQNETREDGKIIQLPPCKTGAWIVPAIMACYLLVANILLVNLLIAVFNNTFFEVKSISNQVWKFQRYQLIMTFHERPVLPPPLIIFSHMTMIFQHLCCRWRKHESDPDERDYGLKLFITDDELKKVHDFEEQCIEEYFREKDDRFNSSNDERIRVTSERVENMSMRLEEVNEREHSMKASLQTVDIRLAQLEDLIGRMATALERLTGLERAESNKIRSRTSSDCTDAAYIVRQSSFNSQEGNTFKLQESIDPAGEETMSPTSPTLMPRMRSHSFYSVNMKDKGGIEKLESIFKERSLSLHRATSSHSVAKEPKAPAAPANTLAIVPDSRRPSSCIDIYVSAMDELHCDIDPLDNSVNILGLGEPSFSTPVPSTAPSSSAYATLAPTDRPPSRSIDFEDITSMDTRSFSSDYTHLPECQNPWDSEPPMYHTIERSKSSRYLATTPFLLEEAPIVKSHSFMFSPSRSYYANFGVPVKTAEYTSITDCIDTRCVNAPQAIADRAAFPGGLGDKVEDLTCCHPEREAELSHPSSDSEENEAKGRRATIAISSQEGDNSERTLSNNITVPKIERANSYSAEEPSAPYAHTRKSFSISDKLDRQRNTASLRNPFQRSKSSKPEGRGDSLSMRRLSRTSAFQSFESKHN

SEQ ID NO: 311019 - DNA, 90 bp, Artificial Sequence
  derived and/or modified sequence
taaagaaaaacaaacaaacagaaatcaatgaaaatcccattcaaaggtcagcaacctcaaagactgaaggtagataagcccacaaggatg

SEQ ID NO: 311020 - DNA, 5205 bp, Artificial Sequence
  derived and/or modified sequence
atgggcaagaagtggagagacgccgccgagatggagagaggctgcagcgacagagaggacaacgccgagagcagaagaagaagcagaagcgccagcagaggcagattcgccgagagctggaagagactgagcagcaagcagggcagcaccaagagaagcggcctgcccagccagcagacccccgcccagaagagctggatcgagagagccttctacaagagagagtgcgtgcacatcatccccagcaccaaggacccccacagatgctgctgcggcagactgatcggccagcacgtgggcctgacccccagcatcagcgtgctgcagaacgagaagaacgagagcagactgagcagaaacgacatccagagcgagaagtggagcatcagcaagcacacccagctgagccccaccgacgccttcggcaccatcgagttccagggcggcggccacagcaacaaggccatgtacgtgagagtgagcttcgacaccaagcccgacctgctgctgcacctgatgaccaaggagtggcagctggagctgcccaagctgctgatcagcgtgcacggcggcctgcagaacttcgagctgcagcccaagctgaagcaggtgttcggcaagggcctgatcaaggccgccatgaccaccggcgcctggatcttcaccggcggcgtgaacaccggcgtgatcagacacgtgggcgacgccctgaaggaccacgccagcaagagcagaggcaagatctgcaccatcggcatcgccccctggggcatcgtggagaaccaggaggacctgatcggcagagacgtggtgagaccctaccagaccatgagcaaccccatgagcaagctgaccgtgctgaacagcatgcacagccacttcatcctggccgacaacggcaccaccggcaagtacggcgccgaggtgaagctgagaagacagctggagaagcacatcagcctgcagaagatcaacaccagatgcctgcccttcttcagcctggacagcagactgttctacagcttctggggcagctgccagctggacagcgtgggcatcggccagggcgtgcccgtggtggccctgatcgtggagggcggccccaacgtgatcagcatcgtgctggagtacctgagagacaccccccccgtgcccgtggtggtgtgcgacggcagcggcagagccagcgacatcctggccttcggccacaagtacagcgaggagggcggcctgatcaacgagagcctgagagaccagctgctggtgaccatccagaagaccttcacctacaccagaacccaggcccagcacctgttcatcatcctgatggagtgcatgaagaagaaggagctgatcaccgtgttcagaatgggcagcgagggccaccaggacatcgacctggccatcctgaccgccctgctgaagggcgccaacgccagcgcccccgaccagctgagcctggccctggcctggaacagagtggacatcgccagaagccagatcttcatctacggccagcagtggcccgtgggcagcctggagcaggccatgctggacgccctggtgctggacagagtggacttcgtgaagctgctgatcgagaacggcgtgagcatgcacagattcctgaccatcagcagactggaggagctgtacaacaccagacacggccccagcaacaccctgtaccacctggtgagagacgtgaagaagggcaacctgccccccgactacagaatcagcctgatcgacatcggcctggtgatcgagtacctgatgggcggcgcctacagatgcaactacaccagaaagagattcagaaccctgtaccacaacctgttcggccccaagagacccaaggccctgaagctgctgggcatggaggacgacatccccctgagaagaggcagaaagaccaccaagaagagagaggaggaggtggacatcgacctggacgaccccgagatcaaccacttccccttccccttccacgagctgatggtgtgggccgtgctgatgaagagacagaagatggccctgttcttctggcagcacggcgaggaggccatggccaaggccctggtggcctgcaagctgtgcaaggccatggcccacgaggccagcgagaacgacatggtggacgacatcagccaggagctgaaccacaacagcagagacttcggccagctggccgtggagctgctggaccagagctacaagcaggacgagcagctggccatgaagctgctgacctacgagctgaagaactggagcaacgccacctgcctgcagctggccgtggccgccaagcacagagacttcatcgcccacacctgcagccagatgctgctgaccgacatgtggatgggcagactgagaatgagaaagaacagcggcctgaaggtgatcctgggcatcctgctgccccccagcatcctgagcctggagttcaagaacaaggacgacatgccctacatgagccaggcccaggagatccacctgcaggagaaggaggccgaggagcccgagaagcccaccaaggagaaggaggaggaggacatggagctgaccgccatgctgggcagaaacaacggcgagagcagcagaaagaaggacgaggaggaggtgcagagcaagcacagactgatccccctgggcagaaagatctacgagttctacaacgcccccatcgtgaagttctggttctacaccctggcctacatcggctacctgatgctgttcaactacatcgtgctggtgaagatggagagatggcccagcacccaggagtggatcgtgatcagctacatcttcaccctgggcatcgagaagatgagagagatcctgatgagcgagcccggcaagctgctgcagaaggtgaaggtgtggctgcaggagtactggaacgtgaccgacctgatcgccatcctgctgttcagcgtgggcatgatcctgagactgcaggaccagcccttcagaagcgacggcagagtgatctactgcgtgaacatcatctactggtacatcagactgctggacatcttcggcgtgaacaagtacctgggcccctacgtgatgatgatcggcaagatgatgatcgacatgatgtacttcgtgatcatcatgctggtggtgctgatgagcttcggcgtggccagacaggccatcctgttccccaacgaggagcccagctggaagctggccaagaacatcttctacatgccctactggatgatctacggcgaggtgttcgccgaccagatcgaccccccctgcggccagaacgagaccagagaggacggcaagatcatccagctgcccccctgcaagaccggcgcctggatcgtgcccgccatcatggcctgctacctgctggtggccaacatcctgctggtgaacctgctgatcgccgtgttcaacaacaccttcttcgaggtgaagagcatcagcaaccaggtgtggaagttccagagataccagctgatcatgaccttccacgagagacccgtgctgcccccccccctgatcatcttcagccacatgaccatgatcttccagcacctgtgctgcagatggagaaagcacgagagcgaccccgacgagagagactacggcctgaagctgttcatcaccgacgacgagctgaagaaggtgcacgacttcgaggagcagtgcatcgaggagtacttcagagagaaggacgacagattcaacagcagcaacgacgagagaatcagagtgaccagcgagagagtggagaacatgagcatgagactggaggaggtgaacgagagagagcacagcatgaaggccagcctgcagaccgtggacatcagactggcccagctggaggacctgatcggcagaatggccaccgccctggagagactgaccggcctggagagagccgagagcaacaagatcagaagcagaaccagcagcgactgcaccgacgccgcctacatcgtgagacagagcagcttcaacagccaggagggcaacaccttcaagctgcaggagagcatcgaccccgccggcgaggagaccatgagccccaccagccccaccctgatgcccagaatgagaagccacagcttctacagcgtgaacatgaaggacaagggcggcatcgagaagctggagagcatcttcaaggagagaagcctgagcctgcacagagccaccagcagccacagcgtggccaaggagcccaaggcccccgccgcccccgccaacaccctggccatcgtgcccgacagcagaagacccagcagctgcatcgacatctacgtgagcgccatggacgagctgcactgcgacatcgaccccctggacaacagcgtgaacatcctgggcctgggcgagcccagcttcagcacccccgtgcccagcaccgcccccagcagcagcgcctacgccaccctggcccccaccgacagaccccccagcagaagcatcgacttcgaggacatcaccagcatggacaccagaagcttcagcagcgactacacccacctgcccgagtgccagaacccctgggacagcgagccccccatgtaccacaccatcgagagaagcaagagcagcagatacctggccaccacccccttcctgctggaggaggcccccatcgtgaagagccacagcttcatgttcagccccagcagaagctactacgccaacttcggcgtgcccgtgaagaccgccgagtacaccagcatcaccgactgcatcgacaccagatgcgtgaacgccccccaggccatcgccgacagagccgccttccccggcggcctgggcgacaaggtggaggacctgacctgctgccaccccgagagagaggccgagctgagccaccccagcagcgacagcgaggagaacgaggccaagggcagaagagccaccatcgccatcagcagccaggagggcgacaacagcgagagaaccctgagcaacaacatcaccgtgcccaagatcgagagagccaacagctacagcgccgaggagcccagcgccccctacgcccacaccagaaagagcttcagcatcagcgacaagctggacagacagagaaacaccgccagcctgagaaaccccttccagagaagcaagagcagcaagcccgagggcagaggcgacagcctgagcatgagaagactgagcagaaccagcgccttccagagcttcgagagcaagcacaactag

SEQ ID NO: 311021 - DNA, 5205 bp, Artificial Sequence
  derived and/or modified sequence
atgggtaaaaaatggcgggacgccgcggagatggaacgcgggtgttccgaccgagaggataacgccgagtcacgcagaagaagcaggagcgccagtaggggtcggttcgcagagtcctggaaacgtctcagttctaagcagggctcaaccaaacgttctgggcttcctagtcagcagactcctgctcaaaaaagttggatcgagcgcgccttctacaaaagggagtgcgtgcacataattcctagcaccaaagacccccatcgatgttgttgtggccgactgatcgggcagcacgtcggactcaccccctccatcagcgtcctccaaaacgagaagaacgagagccgcttgtctaggaacgacatccagtcggaaaagtggtccattagtaaacatacccagctgagccctactgacgccttcggaaccattgagttccaaggggggggccactccaacaaggcaatgtacgttcgggtctcttttgacaccaaacccgacctgttactacacctgatgacaaaggaatggcagctggaactccctaagctcttgatctcggttcatggcggtcttcagaatttcgagcttcagcctaagttgaagcaagttttcggcaaggggcttatcaaagccgccatgacaactggcgcctggatcttcacggggggagtgaatacaggggtaataagacatgtgggtgacgctctgaaagatcatgctagcaagtctcggggaaaaatttgtacaatcggcatcgccccctggggtatagttgaaaaccaggaagacctgatcgggcgggacgtggtgcgcccctatcagaccatgagcaacccaatgtctaaactgactgttctgaactctatgcacagtcactttatcctagctgacaacggcaccaccggcaagtatggagccgaagtgaaactcagacggcagctagagaagcatataagtctccaaaagattaacacaaggtgccttcctttctttagtttagacagccggctcttctacagcttttggggaagctgccagctggattcagttggcattggtcaaggcgtgcctgtcgtggccctgatcgtggagggaggccccaacgtaatcagcatcgtgctggagtacctgcgagacacgccccctgttccagtggtggtttgcgacgggtctgggagggcgtcagacatcctggcctttggacacaagtactcagaagaaggaggcttaataaacgaatccttgcgggatcagcttctcgttacaatccaaaaaacatttacctatacccgcactcaggctcagcacctgttcatcatcctgatggagtgtatgaaaaagaaggaactgattactgtgttccggatgggtagcgaaggccaccaggacatagatctggccatcctaactgccctcctaaagggcgctaatgccagcgcgccagaccagttgtccctggcgctggcttggaacagagtcgacatcgcccgctctcagatcttcatctacggccaacaatggcctgtgggtagcctggagcaggccatgcttgatgccctggtgctggatagggtagatttcgtcaagctcctgatcgagaatggtgttagcatgcaccgattcctgaccatttctcgactcgaagagctatacaatacacgccacggccccagcaacacgctgtaccatctggtgagagacgttaaaaaaggcaacttgccccctgattatcgcatcagcttaattgacatcggcttagttatcgagtatctgatgggtggtgcctataggtgtaattacacaaggaagagatttcgaaccctctatcacaacctgtttggcccaaagcgtccaaaggcgctgaagctgctcggaatggaagatgatattccactgagacgggggaggaagacgaccaaaaagagggaggaggaggtagatattgacctcgacgaccccgaaattaatcactttccctttcctttccacgagctgatggtgtgggccgttctcatgaagcgccagaagatggccctgtttttttggcagcatggggaagaggccatggcgaaggccctggtcgcatgtaagctgtgcaaagcaatggcccacgaggcctctgagaatgatatggttgacgacatttcacaggaattgaaccacaacagtcgggactttggccagctggctgtcgagcttctggaccagtcatataagcaagacgagcagctggcaatgaaactcctcacctatgaactgaagaactggtcaaacgccacctgtctccaactggccgtcgccgcgaagcacagggactttattgcccacacttgcagtcagatgctgctcactgatatgtggatggggcggctgcggatgcggaaaaactcaggactgaaagtcatccttggcatccttctccctccttctatcctcagtctggaatttaaaaacaaggatgacatgccttacatgtcccaggctcaggaaatccatcttcaggagaaagaggcggaagagcccgaaaaaccaacaaaagaaaaggaagaggaggacatggaattgaccgccatgctaggaagaaacaatggtgagtcaagccgtaagaaggacgaggaggaagtccagtccaaacatcggttaatcccactcggaagaaagatctatgagttctataacgcacccatcgtgaaattttggttctatactctggcctatatcggctatttgatgctttttaattacattgtgcttgttaaaatggaaagatggccaagcacgcaagagtggattgttatctcttacatcttcaccctgggaatcgaaaagatgcgagagatcctgatgagtgagcccggaaaactcctgcaaaaagtgaaggtatggctgcaggagtactggaacgtgaccgatttgatagcaatcctgctgttcagcgtgggcatgatcctgcgactccaggatcaaccttttcgttcagacgggcgggtgatttactgtgtgaacatcatttactggtatattaggttgttggatattttcggtgtcaacaaatacctgggcccctacgtgatgatgatcgggaaaatgatgatcgatatgatgtacttcgtcatcattatgctcgtggtcctcatgagctttggggtcgcaaggcaagctatactgtttccgaatgaggagccatcctggaaattagccaaaaacattttctacatgccctattggatgatctatggagaagtttttgcggaccaaatagatccaccctgcggtcagaacgaaaccagggaagatggcaagattatccaactgccaccctgcaaaactggtgcctggattgtgccagcaatcatggcgtgctatctactggtggccaatatactgttggtcaatttgctgattgctgttttcaataataccttttttgaggtgaagtctatctcaaaccaggtttggaaattccagcgatatcagctgatcatgacatttcacgagcgtcccgtgcttcctcctccactgatcattttctcccatatgactatgatattccaacacctgtgttgtcgctggcggaaacacgaaagcgatccagacgagcgcgactatggtctaaagttgttcatcacggacgacgaactcaaaaaagtccatgattttgaagagcagtgcattgaggagtactttcgagaaaaggatgaccgattcaactctagtaacgacgagcggattcgggtcacatccgaaagggttgagaacatgagcatgagactcgaagaagttaacgagagggaacattcgatgaaagcctccctgcagactgtcgatatcagactggcccaactggaagaccttattggtcgtatggcgacggcgctggagaggctgactggccttgagagggcggaatctaataagatccgaagcaggacttcaagcgattgtacagatgctgcttacatcgtccgtcagagttccttcaacagccaagaaggcaatactttcaagttacaagagtcaatcgatcctgctggggaggagaccatgtccccaacatctccaaccctaatgccaaggatgcggtcacactccttctattccgtgaacatgaaagacaaaggaggcattgagaagctagaatctatcttcaaggagaggtctctctcgctgcaccgcgccacatcctcacactcggtggccaaagagcctaaggctcccgctgcgcccgccaacacccttgccattgttcccgattcccggcgaccgagctcatgcatcgatatctacgttagtgctatggatgaactgcactgtgatatcgaccctctggataacagcgtgaacattcttgggttgggtgagcccagcttttcaacgcccgttccttccactgcgccttccagcagtgcatacgccacactagcccctacagacaggcccccatcgagatccatagacttcgaagacattacatctatggatactcggtccttttcttcagattatacacacctgccagagtgccagaatccatgggactctgagccaccaatgtatcatactatagagagatcgaagtcgtccagatatttggctaccaccccatttttattggaagaggcaccgattgttaaaagccacagctttatgttttccccgtcgcggtcctattatgctaattttggcgtgcctgtgaagaccgccgagtataccagcattactgattgcattgatacacggtgtgttaacgcaccacaggctatcgcagacagggccgccttccctggtggccttggcgataaagtcgaggatctaacctgttgccatcctgaaagagaggcagagctgagccaccctagctctgatagcgaggagaatgaggccaaaggcaggagagccactatcgccatttcatcacaggaaggcgacaattcggagcgtaccctgtccaacaacatcaccgtccctaagattgagcgtgcgaattcctatagtgccgaggagccctcggccccctatgcccacacgcgtaagtccttttcgataagcgataaattggatcgacagcggaatacagcatcactcaggaatccatttcagaggtctaaaagtagtaaacccgagggtcgaggcgacagccttagcatgaggagactcagtcgcacctcggccttccagtcatttgagtcaaagcacaattag

SEQ ID NO: 311022 - DNA, 5205 bp, Artificial Sequence
  derived and/or modified sequence
atgggcaagaagtggagagatgctgctgagatggagcggggctgcagcgacagagaagataatgctgagagcagaagaagaagccgcagcgccagccggggccgctttgctgagagctggaagaggctgagcagcaagcagggcagcaccaagaggagcggcctgcccagccagcagaccccagcccagaagtcctggattgagcgggccttctacaagagagaatgtgtgcacatcatccccagcaccaaggacccccaccgctgctgctgcggccgcctgattggccagcacgtgggcctgacccccagcatctctgtgctgcagaatgagaagaatgaaagccggctgagcagaaatgacatccagagcgagaagtggagcatcagcaagcacacccagctgagccccacagatgccttcggcaccatcgagttccagggcggcggccacagcaacaaggccatgtatgtgcgggtgtcctttgacaccaagccagacctgctgctgcacctgatgaccaaggagtggcagctggagctgcccaagctgctgatctctgtgcatggaggcctgcagaactttgagctgcagcccaagctgaagcaggtgtttgggaagggcctcatcaaggccgccatgaccaccggggcctggatcttcaccggcggcgtgaacacaggagtcatccgccacgtgggagatgccctgaaggaccacgccagcaagagccggggcaagatctgcaccatcggcatcgccccctggggcatcgtggagaaccaggaggacctgattggaagagatgtggtgcggccctaccagaccatgagcaaccccatgagcaagctgactgtgctgaacagcatgcacagccacttcatcctggccgacaatggcaccaccgggaagtatggagctgaggtgaagctgcggcggcagctggagaagcacatcagcctgcagaagatcaacacccgctgcctgcccttcttcagcctggacagccgcctcttctacagcttctggggcagctgccagctggacagcgtgggcatcggccagggcgtgcctgtggtggccctgattgtggagggcggccccaacgtcatcagcatcgtgctggagtacctgcgggacaccccacctgtgcctgtggtggtgtgtgatggcagcggccgggccagtgacatcctggccttcggccacaagtacagcgaggagggcggcctcatcaatgaaagcctgcgggaccagctgctggtgaccatccagaagaccttcacctacaccaggacccaggcccagcacctgttcatcatcctgatggagtgcatgaagaagaaggagctgatcaccgtcttcaggatgggcagcgagggccaccaggacatcgacctggccatcctgacagccctgctgaagggggccaatgccagcgccccagaccagctgagcctggccctggcctggaacagagtggacatcgcccggagccagatcttcatctacggccagcagtggcctgtgggcagcctggagcaggccatgctggatgccctggtgctggacagagtggactttgtgaagctgctgattgaaaatggagtgtccatgcaccgcttcctgaccatcagccggctggaggagctgtacaacaccaggcatggccccagcaacaccctgtaccacctggtgagagatgtgaagaagggcaacctgcccccagactaccgcatcagcctgattgatattggcctggtgattgagtacctgatgggcggggcctaccgctgcaactacaccaggaagcgcttccgcaccctgtaccacaacctgtttggccccaagaggcccaaggccctgaagctgctgggcatggaggatgacatccccctgcggcggggcaggaagaccaccaagaagcgggaggaggaggtggacatcgacctggatgatcctgagatcaaccacttccccttccccttccacgagctgatggtgtgggccgtgctgatgaagaggcagaagatggccctcttcttctggcagcacggggaggaggccatggccaaggccctggtggcctgcaagctgtgcaaggccatggcccacgaggcctctgaaaatgacatggtggatgacatcagccaggagctgaaccacaacagccgggactttggccagctggccgtggagctgctggaccagagctacaagcaggatgagcagctggccatgaagctgctgacctatgagctgaagaactggagcaatgccacctgcctgcagctggccgtggccgccaagcaccgggacttcatcgcccacacctgcagccagatgctgctgacagacatgtggatgggccgcctgaggatgaggaagaacagcggcctgaaggtgatcctgggcatcctgctgcccccatccatcctgagcctggagttcaagaacaaggatgacatgccctacatgagccaggcccaggagatccacctgcaggagaaggaggccgaggagcctgagaagcccaccaaggagaaggaggaggaggacatggagctgacagccatgctgggcaggaacaacggggagagcagcaggaagaaggatgaggaggaggtgcagagcaagcacaggctcatccccctgggcaggaagatctatgagttctacaatgcccccatcgtgaagttctggttctacaccctggcctacatcggctacctgatgctgttcaactacatcgtgctggtgaagatggagcgctggcccagcacccaggagtggatcgtcatctcctacatcttcaccctgggcatcgagaagatgagggagatcctgatgtctgagcccgggaagctgctgcagaaggtgaaggtgtggctgcaggagtactggaatgtgacagacctgattgccatcctgctcttctctgtgggcatgatcctgcggctgcaggaccagcccttcagaagtgatggccgggtcatctactgtgtgaacatcatctactggtacatccggctgctggacatctttggagtgaacaagtacctgggcccctacgtgatgatgattggcaagatgatgattgacatgatgtacttcgtcatcatcatgctggtggtgctgatgagctttggagtggcccggcaggccatcctcttccccaatgaggagcccagctggaagctggccaagaacatcttctacatgccctactggatgatctacggggaggtgtttgctgaccagattgaccccccctgtggccagaatgagaccagagaagatggcaagatcatccagctgcccccctgcaagacaggagcctggatcgtgcctgccatcatggcctgctacctgctggtggccaacatcctgctggtgaacctgctgattgctgtgttcaacaacaccttctttgaggtgaagagcatcagcaaccaggtgtggaagttccagcgctaccagctgatcatgaccttccacgagaggcctgtgctgcccccacccctcatcatcttcagccacatgaccatgatcttccagcacctgtgctgccgctggaggaagcatgaaagtgaccctgatgagcgggactatggcctgaagctgttcatcacagatgatgagctgaagaaggtgcatgactttgaggagcagtgcatcgaggagtacttccgggagaaggatgaccgcttcaacagcagcaatgatgagcgcatccgggtgaccagcgagcgggtggagaacatgtccatgaggctggaggaggtgaatgaaagagagcacagcatgaaggccagcctgcagacagtggacatccggctggcccagctggaggacctgattggaaggatggccacagccctggagcggctgaccggcctggagagagctgagagcaacaagatccgcagcaggaccagcagtgactgcacagatgctgcctacatcgtgcggcagagcagcttcaacagccaggagggcaacaccttcaagctgcaggagagcattgatcctgctggggaggagaccatgagccccaccagccccaccctgatgcccaggatgaggagccacagcttctacagcgtgaacatgaaggacaagggcggcatcgagaagctggagagcatcttcaaggagaggagcctgagcctgcaccgggccaccagcagccacagcgtggccaaggagcccaaggccccagctgccccagccaacaccctggccatcgtgcctgacagcagaagacccagcagctgcatcgacatctacgtgtctgccatggatgagctgcactgtgacatcgaccccctggacaacagcgtgaacatcctgggcctgggggagcccagcttcagcacccctgtgcccagcacagcccccagcagcagcgcctatgccaccctggcccccacagacaggcctcccagccgcagcattgactttgaggacatcacctccatggacaccaggagcttcagcagtgactacacccacctgcctgagtgccagaacccctgggacagcgagccccccatgtaccacaccatcgagaggagcaagagcagccgctacctggccaccacccccttcctgctggaggaggcccccatcgtgaagagccacagcttcatgttcagccccagccgcagctactatgccaactttggagtgcctgtgaagacagctgagtacaccagcatcacagactgcatcgacacccgctgtgtgaatgccccccaggccatcgctgacagagctgccttccctgggggcctgggggacaaggtggaggacctgacctgctgccaccctgagcgggaggccgagctgagccaccccagcagtgacagcgaggagaatgaggccaagggccggcgggccaccatcgccatcagcagccaggagggggacaacagcgagaggaccctgagcaacaacatcaccgtgcccaagattgagcgggccaacagctacagcgctgaggagcccagcgccccctatgcccacaccaggaagagcttcagcatcagtgacaagctggaccggcagaggaacacagccagcctgaggaaccccttccagaggagcaagagcagcaagccagagggccgcggggacagcctgtccatgaggcggctgagcaggaccagcgccttccagagctttgagagcaagcacaactag

SEQ ID NO: 311023 - DNA, 5205 bp, Artificial Sequence
  derived and/or modified sequence
atgggcaagaagtggcgggacgccgccgagatggagcggggctgctccgacagggaagataacgctgagtctaggaggcggagtcgatctgcctctcgtggccggtttgcagaaagttggaagagactaagttcaaaacaggggtccactaagagaagtggccttccctcacagcagacaccagctcagaagtcatggatcgagcgggctttttacaagagagaatgcgtgcatatcattccatcaacgaaagacccacaccgatgttgttgtggccgactgatcgggcagcacgtgggcctcactcccagcatttccgttttgcagaacgagaagaatgaatccagactcagtcggaatgacatccaaagtgaaaagtggtctattagtaaacacactcaactaagccccactgatgccttcgggactatcgagttccaaggcgggggacacagcaataaagcgatgtacgtgcgagtatccttcgatacaaagccagacttgttacttcacttaatgaccaaggagtggcaacttgagcttccaaaactcctgatttccgtgcacggggggctccaaaattttgaactgcaaccaaaactgaaacaagtattcggtaaggggctcataaaggccgccatgaccaccggcgcctggattttcacggggggagtgaacaccggcgtgatccggcacgttggcgacgccttgaaagatcacgccagcaaatcccggggcaagatctgtacaatcggcattgccccgtgggggatcgtggaaaaccaggaggacctgattggtagagatgttgtccggccctaccagacaatgagcaaccccatgagcaagttgacagtcttaaattcaatgcactcccattttattctggccgacaatggcactacaggcaagtatggcgccgaagtgaagttgcgtagacagctcgaaaagcatatcagcttacagaagatcaacactaggtgtctgcccttctttagcctggacagtcgcctgttttactctttttggggctcctgccaattggacagcgttgggattggtcagggcgtgcctgtggtggcactgatagtggagggggggccgaacgtgatcagcatcgtgttagaatacctaagggatacaccacccgtccctgtggttgtctgcgatggctctggacgggcatcagacatactggctttcggccacaaatactccgaggagggaggccttatcaatgagtcactcagagaccagctgctggtcaccatccagaagactttcacatatacacgaacgcaggcccagcacctatttattattttgatggagtgcatgaagaaaaaggagctcataactgtgttcagaatgggcagtgaaggccatcaggatattgatcttgctatcctgacggcactacttaagggagccaacgcatccgcgccagaccagctgtccctcgccttagcgtggaacagagtcgacattgcccggtcacagattttcatctacgggcaacaatggcccgtcggctcacttgaacaggccatgctggacgccctggtcctcgacagagtcgactttgttaagctgctgatcgaaaacggagtttccatgcatcggtttctaaccatcagcaggttggaagaactttataatacccggcatggtcctagcaatacattgtatcacctggtcagggacgtgaaaaaaggaaatctgccaccagactatcggatatcccttattgatatcggactggtgattgagtatctgatgggcggggcttatcgctgcaattacactcgtaaaagattccggactctgtatcacaaccttttcgggcctaaaaggcccaaagctctgaagttgcttgggatggaggatgatattcccctgaggcgggggaggaagactaccaagaaaagggaggaagaggttgatatcgatcttgacgacccagaaattaatcattttccgttcccgtttcacgagctcatggtgtgggccgttcttatgaagcgccagaaaatggcattgttcttttggcagcacggcgaggaggccatggccaaagcactggtggcctgtaagttatgcaaagcaatggcgcacgaggcatccgagaatgatatggtggatgatattagccaggaactgaatcacaacagtagggatttcggccagttggccgtcgaactgctggaccagtcttacaaacaagatgagcaattggccatgaagcttctgacctacgagttaaaaaattggtccaatgcaacctgtcttcaattagctgtcgctgcaaagcaccgcgattttattgcgcatacatgtagccagatgctgctgacagatatgtggatgggtaggctacgcatgaggaaaaacagtggtctcaaggttattctcggcattttgttgccaccatcaatattaagcctggaatttaaaaacaaagacgatatgccatacatgagccaagcacaggagatccacttacaggagaaagaggccgaggagccagagaaacccacaaaggaaaaggaagaggaggatatggagctcacggccatgttgggcagaaacaacggggagtcctcccgtaagaaggacgaggaggaggtgcagtctaagcatcgtctcatacctctgggccggaagatttatgaattctacaacgcgcccattgtcaaattttggttttacaccctggcgtacatcggctacctcatgctgttcaactacattgttctcgtcaaaatggaaaggtggccgtccactcaggagtggatagtcattagttatatctttactttaggcatcgaaaaaatgcgggaaatcctgatgagcgagccaggaaaactgctgcagaaggtcaaggtctggttgcaggaatattggaacgtgaccgacttgattgctattcttttattctccgtggggatgattttgcggctccaagatcaaccttttaggagcgacgggcgagtgatttactgtgttaatataatttactggtatatccggctcttggatattttcggtgtgaataagtacctcggcccgtatgtgatgatgatcggaaagatgatgatagacatgatgtactttgtgatcatcatgctggtggtgctgatgagtttcggagtggccagacaggccatattgtttcccaacgaagagccatcatggaaactggcaaaaaatatcttctatatgccttattggatgatctacggtgaggtgtttgctgaccaaattgatccaccctgtggtcagaatgaaacccgagaggacgggaaaattattcagctaccaccctgcaaaaccggcgcatggattgtgcctgctatcatggcatgttatctcctcgtggcaaatatcttactcgtgaatctcttgatcgcagtgttcaacaatacattttttgaagttaagtccatcagtaaccaggtgtggaaattccagaggtaccagttgatcatgaccttccacgagcgacctgttctgccacccccccttataatttttagtcacatgaccatgatttttcagcacctttgctgtcggtggcggaagcacgagtctgacccggacgagcgggactatgggctaaagttgtttatcactgacgacgaactgaaaaaggtgcacgacttcgaggaacagtgcatcgaggagtactttagagaaaaagatgaccgcttcaactcaagtaacgacgaaaggatccgcgtgaccagtgaaagggtcgagaatatgtctatgagactggaggaggtgaatgaacgggagcattcgatgaaggcctctcttcagactgtggatataaggctggcccagctagaagatctgataggtaggatggcaacagctctggagcgtctcacgggcctagaacgggctgagtccaataaaatccgttcgcggacctcttctgactgcacagacgcagcgtatatcgtgcgccaatctagttttaatagccaagaaggcaatactttcaagctgcaggagtccatcgatccagccggagaggaaaccatgtctcccacaagtcctacgctgatgcctcgaatgagaagtcactctttttactccgtcaatatgaaggataagggtggtatcgagaagctggaaagtatctttaaggagagatccctgagcttacaccgggccacatcttcgcattccgtggccaaagaaccaaaggctcctgcagcccccgcaaatacactagctattgttccagattcccggcggccctcgagctgtattgatatctacgtttcagccatggacgagctgcactgcgacattgaccctctggacaacagtgttaacatactcgggctaggcgaaccgtccttttccaccccagtgccctctaccgctccctcatcaagcgcgtatgcgacgttggcgcctacagatcggccaccttcccgctcgatcgactttgaggatatcacaagtatggacacccggtccttttcaagtgactatacccacctgccagaatgccagaatccatgggactcggagcccccaatgtatcacaccatagagagaagtaagagcagtcggtacttggcaactacgccttttctgctcgaggaagcaccaatcgtgaagtcccattctttcatgttttcaccttctcggtcttactatgccaacttcggcgtgccagtaaaaactgccgaatatacttccataaccgactgtatcgacacccggtgcgtcaatgcgccacaggcaattgcggaccgagctgcattcccaggagggctaggagacaaggttgaagatctgacatgttgtcatcctgagcgcgaagcggagctaagtcatccatcttctgatagtgaggaaaacgaggccaagggtagacgcgccacgatcgcaatctctagtcaggaaggcgacaacagcgaaaggacgctgagtaataatattactgtgcctaagattgagcgagctaattcttactccgcggaggagccctctgccccttacgcgcacacacgcaaatctttctctatttctgataaattagatcggcagcgtaataccgccagtctgagaaatcccttccagcggagcaagagcagcaagcctgaaggacgaggcgatagcttatctatgagacggctgtccaggacttcagcatttcagtcttttgaatctaagcacaattag

SEQ ID NO: 311024 - DNA, 5204 bp, Artificial Sequence
  derived and/or modified sequence
atggggaaaaagtggagagacgcagccgaaatggaacggggttgctcggaccgcgaagacaacgcggagagtaggaggcggagcagatctgcatcccgcggtcgatttgctgagagctggaagagactgagctctaaacagggctcaactaaacgttctgggctcccttcacagcagaccccagctcaaaagtcttggatcgaaagggcattctataaaagagagtgcgtacacataatcccgagcaccaaggatcctcaccgttgctgctgtggcagattgatcggacagcatgtcgggctgaccccctccatttctgtcctccaaaatgagaagaacgaaagccgcctgtcaagaaatgatattcaaagcgagaagtggagcatctccaagcacactcagctgtccccaacagacgccttcgggaccatagagttccagggaggaggccacagcaacaaggcaatgtacgtgagggtttctttcgatactaagccagaccttcttttgcatctcatgacaaaagagtggcagttggagttgccaaaacttctgataagtgtgcacggaggcctgcagaacttcgagttgcagcccaaacttaaacaggtttttggaaaaggcctgattaaggcggcaatgactaccggcgcttggatctttacagggggagtgaacaccggggtgatcagacacgtgggggatgcactaaaagatcacgctagcaagtctagggggaagatttgtaccatcggaatcgccccttggggaattgtggagaatcaggaggacctgatcggcagagacgtggttcggccataccagacaatgtccaacccaatgagcaagctgaccgtgttgaactcaatgcattctcattttatcttggctgataacggaacgaccgggaagtatggtgccgaggtgaagttgcggcgacagctagaaaagcatatttctctccagaaaattaatacgcgctgcctgcctttcttttccctcgatagtcggcttttctacagtttttggggaagctgccagcttgattctgtcggtatcggccagggagtccctgtggtcgccttaatcgtcgagggcggacctaacgtgatctcaattgttctcgaatatttgcgcgacacaccacccgtgccagttgttgtgtgcgacgggtccgggagggctagcgacatactggcttttggacataagtatagcgaagagggcggtttgatcaatgagagcctgcgcgaccagctgctcgtgaccattcagaagacctttacctatacacggacccaagcgcagcacctgttcataatcctgatggagtgtatgaagaagaaagaacttatcacggtgttcagaatgggaagtgaaggacaccaggatattgacctcgcaatactgacagccctgctgaaaggcgctaacgcttctgcccctgatcagctgtctttggccctggcctggaaccgtgtggacatcgccaggtcccagatcttcatctatggccaacaatggcccgtgggcagcctagaacaggctatgctagatgcactggtgctcgatcgcgtagacttcgtgaagctgcttatcgaaaacggggtctccatgcaccgttttctgacaatttctcgcttagaggaactttataatacacgccacggaccaagcaacacactgtaccacctggtgagggacgtgaagaaaggcaatttacccccagactaccgtattagtctgatagatatcggcctggtgattgagtacctgatgggcggagcctatcggtgtaactatacaaggaaacggttcaggaccctgtaccataatctgtttgggccaaagagacccaaagcattgaaactccttggcatggaagacgatatccctctgcgacggggacgaaagaccactaagaagagggaagaagaggtagatatcgacctagatgatccagaaatcaaccacttcccattccccttccacgaactgatggtatgggcagtgttaatgaagcggcagaagatggcactgttcttttggcagcatggcgaggaggccatggcaaaagccctggtggcctgtaagctttgcaaagctatggcccatgaggcctcagagaatgatatggtcgatgacatcagtcaagagttgaaccacaactctcgagatttcggtcagttggcagtcgaactactggatcaaagctacaaacaggatgaacagctcgccatgaaactcctcacctatgagcttaaaaattggagtaatgctacatgcctgcagttggccgtggcagctaagcaccgcgatttcatcgctcacacatgcagccagatgctgcttacagatatgtggatgggcaggctgaggatgcgtaagaatagtggacttaaggttatccttgggatattgcttccacctagcatcctgagcctggaatttaaaaataaagacgacatgccctatatgagccaagcccaggaaatccatctgcaagaaaaggaggcggaagaacccgaaaagcccactaaagaaaaagaagaggaagatatggaattgactgctatgctgggacgaaataacggcgagagctctcgcaagaaagatgaagaggaagtacagagcaagcaccgcctcatccccctgggaaggaagatttacgaattttacaacgctcctattgtgaaattctggttttacaccctcgcgtacatcggctaccttatgctgttcaattatattgttttggtgaaaatggagaggtggccctcaactcaggagtggatagtgatatcctacatcttcaccctcggcattgaaaaaatgcgtgagatcctgatgtctgagccaggcaagctattgcagaaggttaaagtgtggttgcaggagtattggaacgtgacagacttgattgctatcctcctgttttctgtgggcatgattctgaggctgcaggatcaaccctttagatctgacggaagggtgatctattgtgtgaacataatctactggtatattcgacttctagacatcttcggcgtgaataagtacctcgggccatacgtgatgatgattgggaaaatgatgatcgatatgatgtactttgtcattattatgttggtagtgttgatgtctttcggagtcgcacgtcaagcaattctttttccgaacgaggagcccagctggaagctggctaagaacattttctatatgccctattggatgatttacggtgaagtctttgctgatcagatcgatccaccttgcggccagaatgagacccgtgaggacgggaaaatcatacagttgcccccttgtaagacgggagcttggatagtgcccgctattatggcatgttacttgctcgtagcaaatatactgctcgttaacttgcttattgctgttttcaataatacgttcttcgaggtgaaatcgatctctaaccaggtctggaaattccagcgatatcagctcattatgacctttcacgagaggcctgtcttgccccctccattgatcatattcagccatatgaccatgattttccagcatctgtgctgccgctggcggaagcatgaatctgaccctgatgagcgggactatggcctaaagttgttcatcactgacgacgagctcaaaaaggtgcacgactttgaagaacagtgcattgaggagtacttcagggaaaaagatgatcggtttaatagttccaacgatgaaagaatacgcgtcacatctgagcgtgtcgagaatatgagtatgagactagaagaggttaacgaacgggaacactccatgaaggcgtcacttcagacagtcgatattagactggcacaacttgaggaccttatcggtcgcatggcaaccgctctggaacgcctaaccggattagagagagctgaatcgaacaaaattaggtccagaacctcttctgactgcacagatgccgcatatatcgtgcgacagtcttcattcaatagccaggaggggaacacgtttaagctccaggaaagcatcgacccagcgggagaggagacaatgtctccaaccagcccgactctgatgcctcgcatgcgcagtcatagcttttacagtgtaaacatgaaggacaaagggggtatagagaaactcgagagtatctttaaggaaagatccctgtcactgcaccgtgccacaagcagtcattcagtggccaaggaacccaaagcccctgctgccccagctaacactctggccatcgtgccagactctagacgcccttcctcctgtatcgatatttacgtgtctgctatggacgaattgcactgtgatatagatcccctggataatagtgtgaatatcctgggactgggcgaaccttccttctcgacccctgtccccagcacagcacctagttcaagcgcatatgcaactctagctcccacagatagacccccttcccggtctattgacttcgaggatattacatccatggacacaagaagttttagtagcgattacacccacttacctgaatgccagaacccatgggactcagaaccccctatgtaccacactatcgagcggtcaaaatcttctcggtacttggcaaccacacctttcctgctggaagaggcaccaatagttaaatctcactctttcatgttctctccctcacgctcctactatgcaaactttggcgtacccgtgaagaccgccgagtacacctcaattactgattgcatcgacacacgctgcgtcaacgctcctcaggcaatagcagaccgggcagcttttcccggaggtctgggagacaaggtcgaagacctcacatgctgtcaccctgagcgcgaggccgagcttagtcacccctcgtccgatagcgaggagaacgaagccaaaggacgacgggcaaccatcgcaatttcctcacaggaaggcgacaattcggagcgaactctctccaataacataactgtccctaaaatcgaacgcgctaacagctactctgcggaagagcccagtgccccttatgcgcatacgcggaagtcattttccattagcgataaactggatcgccagaggaacactgccagcctgcgaaacccctttcagcgcagtaagtcgtctaaacctgaagggaggggagattcgctctccatgcggaggctgtccagaaccagcgcttttcaatccttcgagagcaaacacaacta

SEQ ID NO: 311025 - DNA, 5205 bp, Artificial Sequence
  derived and/or modified sequence
atggggaagaagtggagggatgcggcggaaatggagcggggctgctccgaccgcgaggacaacgcggagagccgcagacgcagccggagcgccagccggggcaggtttgccgagtcgtggaaaaggttaagttccaagcaggggtccaccaaacgctcgggactcccgtcgcagcagacgccggctcagaaatcctggatagaaagagcattttataaaagagaatgtgtccacatcatacccagcaccaaagacccccataggtgttgctgtgggcgtctgataggccagcatgttggcctcacccccagtatctccgtgcttcagaatgagaaaaatgaaagtcgcctctcccgaaatgacatccagtctgaaaagtggtccatcagcaaacacactcaactcagccctacggatgcttttgggaccattgagttccaaggaggtggccattccaacaaagccatgtatgtgcgagtatcttttgatacaaaacctgatctcctcttacacctgatgaccaaggaatggcagttggagcttcccaagcttctcatctctgtccatgggggcctgcagaactttgaactccagccaaaactcaagcaagtctttgggaaagggctcatcaaagcagcaatgacaactggagcgtggatattcactggaggggttaacacaggtgttattcgtcatgttggcgatgccttgaaggatcatgcctctaagtctcgaggaaagatatgcaccataggtattgccccctggggaattgtggaaaaccaggaggacctcattggaagagatgttgtccggccataccagaccatgtccaatcccatgagcaagctcactgttctcaacagcatgcattcccacttcattctggctgacaacgggaccactggaaaatatggagcagaggtgaaacttcgaagacaactggaaaagcatatttcactccagaagataaacacaagatgcctgccgtttttctctcttgactcccgcttgttttattcattttggggtagttgccagttagactcagttggaatcggtcaaggtgttcctgtggtggcactcatagtggaaggaggacccaatgtgatctcgattgttttggagtaccttcgagacacccctcccgtgccagtggttgtctgtgatgggagtggacgggcatcggacatcctggcctttgggcataaatactcagaagaaggcggactgataaatgaatctttgagggaccagctgttggtgactatacagaagactttcacatacactcgaacccaagctcagcatctgttcatcatcctcatggagtgcatgaagaagaaggaattgattacggtatttcggatgggatcagaaggacaccaggacattgatttggctatcctgacagctttactcaaaggagccaatgcctcggccccagaccaactgagcttagctttagcctggaacagagtcgacatcgctcgcagccagatctttatttacgggcaacagtggccggtgggatctctggagcaagccatgttggatgccttagttctggacagagtggattttgtgaaattactcatagagaatggagtaagcatgcaccgttttctcaccatctccagactagaggaattgtacaatacgagacatgggccctcaaatacattgtaccacttggtcagggatgtcaaaaaggggaacctgcccccagactacagaatcagcctgattgacatcggcctggtgatcgagtacctgatgggcggggcttatcgctgcaactacacgcgcaagcgcttccggaccctctaccacaacctcttcggccccaagaggcccaaagccttgaaactgctgggaatggaggatgatattcccttgaggcgaggaagaaagacaaccaagaaacgtgaagaagaggtggacattgacttggatgatcctgagatcaaccacttccccttccctttccatgagctcatggtgtgggctgttctcatgaagcggcagaagatggccctgttcttctggcagcacggtgaggaggccatggccaaggccctggtggcctgcaagctctgcaaagccatggctcatgaggcctctgagaacgacatggttgacgacatttcccaggagctgaatcacaattccagagactttggccagctggctgtggagctcctggaccagtcctacaagcaggacgaacagctggccatgaaactgctgacgtatgagctgaagaactggagcaacgccacgtgcctgcagcttgccgtggctgccaaacaccgcgacttcatcgcgcacacgtgcagccagatgctgctcaccgacatgtggatgggccggctccgcatgcgcaagaactcaggcctcaaggtaattctgggaattctacttcctccttcaattctcagcttggagttcaagaacaaagacgacatgccctatatgtctcaggcccaggaaatccacctccaagagaaggaggcagaagaaccagagaagcccacaaaggaaaaagaggaagaggacatggagctcacagcaatgttgggacgaaacaacggggagtcctccaggaagaaggatgaagaggaagttcagagcaagcaccggttaatccccctcggcagaaaaatctatgaattctacaatgcacccatcgtgaagttctggttctacacactggcgtatatcggatacctgatgctcttcaactatatcgtgttagtgaagatggaacgctggccgtccacccaggaatggatcgtaatctcctatattttcaccctgggaatagaaaagatgagagagattctgatgtcagagccagggaagttgctacagaaagtgaaggtatggctgcaggagtactggaatgtcacggacctcatcgccatccttctgttttctgtcggaatgatccttcgtctccaagaccagcccttcaggagtgacgggagggtcatctactgcgtgaacatcatttactggtatatccgtctcctagacatcttcggcgtgaacaagtatttgggcccgtatgtaatgatgattggaaaaatgatgatagacatgatgtactttgtcatcattatgctggtggttctgatgagctttggggtcgccaggcaagccatcctttttcccaatgaggagccatcatggaaactggccaagaacatcttctacatgccctattggatgatttatggggaagtgtttgcggaccagatagaccctccctgtggacagaatgagacccgagaggatggtaaaataatccagctgcctccctgcaagacaggagcttggatcgtgccggccatcatggcctgctacctcttagtggcaaacatcttgctggtcaacctcctcattgctgtctttaacaatacattttttgaagtaaaatcgatatccaaccaagtctggaagtttcagaggtatcagctcatcatgactttccatgaaaggccagttctgcccccaccactgatcatcttcagccacatgaccatgatattccagcacctgtgctgccgatggaggaaacacgagagcgacccggatgaaagggactacggcctgaaactcttcataaccgatgatgagctcaagaaagtacatgactttgaagagcaatgcatagaagaatacttcagagaaaaggatgatcggttcaactcatctaatgatgagaggatacgggtgacttcagaaagggtggagaacatgtctatgcggctggaggaagtcaacgagagagagcactccatgaaggcttcactccagaccgtggacatccggctggcgcagctggaagaccttatcgggcgcatggccacggccctggagcgcctgacaggtctggagcgggccgagtccaacaaaatccgctcgaggacctcgtcagactgcacggacgccgcctacattgtccgtcagagcagcttcaacagccaggaagggaacaccttcaagctccaagagagtatagaccctgcaggtgaggagaccatgtccccaacttctccaaccttaatgccccgtatgcgaagccattctttctattcggtcaatatgaaagacaaaggtggtatagaaaagttggaaagtatttttaaagaaaggtccctgagcctacaccgggctactagttcccactctgtagcaaaagaacccaaagctcctgcagcccctgccaacaccttggccattgttcctgattccagaagaccatcatcgtgtatagacatctatgtctctgctatggatgagctccactgtgatatagaccctctggacaattccgtgaacatccttgggctgggcgagccaagcttttcaactccagtaccttccacagccccttcaagtagtgcctatgcaacacttgcacccacagacagacctccaagccggagcattgattttgaggacatcacctccatggacactagatctttttcttcagactacacccacctcccagaatgccaaaacccctgggactcagagcctccgatgtaccacaccattgagcgttccaaaagtagccgctacctagccaccacaccctttcttctagaagaggctcccattgtgaaatctcatagctttatgttttccccctcaaggagctattatgccaactttggggtgcctgtaaaaacagcagaatacacaagtattacagactgtattgacacaaggtgtgtcaatgcccctcaagcaattgcggacagagctgccttccctggaggtcttggagacaaagtggaggacttaacttgctgccatccagagcgagaagcagaactgagtcaccccagctctgacagtgaggagaatgaggccaaaggccgcagagccaccattgcaatatcctcccaggagggtgataactcagagagaaccctgtccaacaacatcactgttcccaagatagagcgcgccaacagctactcggcagaggagccaagtgcgccatatgcacacaccaggaagagcttctccatcagtgacaaactcgacaggcagcggaacacagcaagcctgcgaaatcccttccagagaagcaagtcctccaagccggagggccgaggggacagcctgtccatgaggagactgtccagaacatcggctttccaaagctttgaaagcaagcacaactaa

SEQ ID NO: 311026 - DNA, 4740 bp, Artificial Sequence
  derived and/or modified sequence
atgtacgtgagagtgagcttcgacaccaagcccgacctgctgctgcacctgatgaccaaggagtggcagctggagctgcccaagctgctgatcagcgtgcacggcggcctgcagaacttcgagctgcagcccaagctgaagcaggtgttcggcaagggcctgatcaaggccgccatgaccaccggcgcctggatcttcaccggcggcgtgaacaccggcgtgatcagacacgtgggcgacgccctgaaggaccacgccagcaagagcagaggcaagatctgcaccatcggcatcgccccctggggcatcgtggagaaccaggaggacctgatcggcagagacgtggtgagaccctaccagaccatgagcaaccccatgagcaagctgaccgtgctgaacagcatgcacagccacttcatcctggccgacaacggcaccaccggcaagtacggcgccgaggtgaagctgagaagacagctggagaagcacatcagcctgcagaagatcaacaccagatgcctgcccttcttcagcctggacagcagactgttctacagcttctggggcagctgccagctggacagcgtgggcatcggccagggcgtgcccgtggtggccctgatcgtggagggcggccccaacgtgatcagcatcgtgctggagtacctgagagacaccccccccgtgcccgtggtggtgtgcgacggcagcggcagagccagcgacatcctggccttcggccacaagtacagcgaggagggcggcctgatcaacgagagcctgagagaccagctgctggtgaccatccagaagaccttcacctacaccagaacccaggcccagcacctgttcatcatcctgatggagtgcatgaagaagaaggagctgatcaccgtgttcagaatgggcagcgagggccaccaggacatcgacctggccatcctgaccgccctgctgaagggcgccaacgccagcgcccccgaccagctgagcctggccctggcctggaacagagtggacatcgccagaagccagatcttcatctacggccagcagtggcccgtgggcagcctggagcaggccatgctggacgccctggtgctggacagagtggacttcgtgaagctgctgatcgagaacggcgtgagcatgcacagattcctgaccatcagcagactggaggagctgtacaacaccagacacggccccagcaacaccctgtaccacctggtgagagacgtgaagaagggcaacctgccccccgactacagaatcagcctgatcgacatcggcctggtgatcgagtacctgatgggcggcgcctacagatgcaactacaccagaaagagattcagaaccctgtaccacaacctgttcggccccaagagacccaaggccctgaagctgctgggcatggaggacgacatccccctgagaagaggcagaaagaccaccaagaagagagaggaggaggtggacatcgacctggacgaccccgagatcaaccacttccccttccccttccacgagctgatggtgtgggccgtgctgatgaagagacagaagatggccctgttcttctggcagcacggcgaggaggccatggccaaggccctggtggcctgcaagctgtgcaaggccatggcccacgaggccagcgagaacgacatggtggacgacatcagccaggagctgaaccacaacagcagagacttcggccagctggccgtggagctgctggaccagagctacaagcaggacgagcagctggccatgaagctgctgacctacgagctgaagaactggagcaacgccacctgcctgcagctggccgtggccgccaagcacagagacttcatcgcccacacctgcagccagatgctgctgaccgacatgtggatgggcagactgagaatgagaaagaacagcggcctgaaggtgatcctgggcatcctgctgccccccagcatcctgagcctggagttcaagaacaaggacgacatgccctacatgagccaggcccaggagatccacctgcaggagaaggaggccgaggagcccgagaagcccaccaaggagaaggaggaggaggacatggagctgaccgccatgctgggcagaaacaacggcgagagcagcagaaagaaggacgaggaggaggtgcagagcaagcacagactgatccccctgggcagaaagatctacgagttctacaacgcccccatcgtgaagttctggttctacaccctggcctacatcggctacctgatgctgttcaactacatcgtgctggtgaagatggagagatggcccagcacccaggagtggatcgtgatcagctacatcttcaccctgggcatcgagaagatgagagagatcctgatgagcgagcccggcaagctgctgcagaaggtgaaggtgtggctgcaggagtactggaacgtgaccgacctgatcgccatcctgctgttcagcgtgggcatgatcctgagactgcaggaccagcccttcagaagcgacggcagagtgatctactgcgtgaacatcatctactggtacatcagactgctggacatcttcggcgtgaacaagtacctgggcccctacgtgatgatgatcggcaagatgatgatcgacatgatgtacttcgtgatcatcatgctggtggtgctgatgagcttcggcgtggccagacaggccatcctgttccccaacgaggagcccagctggaagctggccaagaacatcttctacatgccctactggatgatctacggcgaggtgttcgccgaccagatcgaccccccctgcggccagaacgagaccagagaggacggcaagatcatccagctgcccccctgcaagaccggcgcctggatcgtgcccgccatcatggcctgctacctgctggtggccaacatcctgctggtgaacctgctgatcgccgtgttcaacaacaccttcttcgaggtgaagagcatcagcaaccaggtgtggaagttccagagataccagctgatcatgaccttccacgagagacccgtgctgcccccccccctgatcatcttcagccacatgaccatgatcttccagcacctgtgctgcagatggagaaagcacgagagcgaccccgacgagagagactacggcctgaagctgttcatcaccgacgacgagctgaagaaggtgcacgacttcgaggagcagtgcatcgaggagtacttcagagagaaggacgacagattcaacagcagcaacgacgagagaatcagagtgaccagcgagagagtggagaacatgagcatgagactggaggaggtgaacgagagagagcacagcatgaaggccagcctgcagaccgtggacatcagactggcccagctggaggacctgatcggcagaatggccaccgccctggagagactgaccggcctggagagagccgagagcaacaagatcagaagcagaaccagcagcgactgcaccgacgccgcctacatcgtgagacagagcagcttcaacagccaggagggcaacaccttcaagctgcaggagagcatcgaccccgccggcgaggagaccatgagccccaccagccccaccctgatgcccagaatgagaagccacagcttctacagcgtgaacatgaaggacaagggcggcatcgagaagctggagagcatcttcaaggagagaagcctgagcctgcacagagccaccagcagccacagcgtggccaaggagcccaaggcccccgccgcccccgccaacaccctggccatcgtgcccgacagcagaagacccagcagctgcatcgacatctacgtgagcgccatggacgagctgcactgcgacatcgaccccctggacaacagcgtgaacatcctgggcctgggcgagcccagcttcagcacccccgtgcccagcaccgcccccagcagcagcgcctacgccaccctggcccccaccgacagaccccccagcagaagcatcgacttcgaggacatcaccagcatggacaccagaagcttcagcagcgactacacccacctgcccgagtgccagaacccctgggacagcgagccccccatgtaccacaccatcgagagaagcaagagcagcagatacctggccaccacccccttcctgctggaggaggcccccatcgtgaagagccacagcttcatgttcagccccagcagaagctactacgccaacttcggcgtgcccgtgaagaccgccgagtacaccagcatcaccgactgcatcgacaccagatgcgtgaacgccccccaggccatcgccgacagagccgccttccccggcggcctgggcgacaaggtggaggacctgacctgctgccaccccgagagagaggccgagctgagccaccccagcagcgacagcgaggagaacgaggccaagggcagaagagccaccatcgccatcagcagccaggagggcgacaacagcgagagaaccctgagcaacaacatcaccgtgcccaagatcgagagagccaacagctacagcgccgaggagcccagcgccccctacgcccacaccagaaagagcttcagcatcagcgacaagctggacagacagagaaacaccgccagcctgagaaaccccttccagagaagcaagagcagcaagcccgagggcagaggcgacagcctgagcatgagaagactgagcagaaccagcgccttccagagcttcgagagcaagcacaactag

SEQ ID NO: 311027 - DNA, 4740 bp, Artificial Sequence
  derived and/or modified sequence
atgtatgtccgcgtgtccttcgataccaagccagacctgctgcttcatctgatgacaaaagagtggcaactggagcttcccaagttgctgatcagtgtgcacggtggtcttcagaatttcgagctgcagcctaagttaaagcaagtgttcggcaagggactcatcaaggccgcgatgacaaccggggcctggatcttcacgggtggagtgaacacgggcgtcattcggcacgtgggtgatgctctgaaagatcacgcatcaaagagtcgtgggaagatttgcaccatcggtattgccccatggggtatcgtagaaaaccaagaagatctgataggcagagacgtggtgcggccctatcaaactatgagcaaccccatgtctaagttaactgtacttaactctatgcactctcactttatccttgcggacaacggcactaccggaaaatatggcgccgaggtcaagctcagacgacagcttgagaagcacatcagcctgcagaagataaacaccaggtgccttcccttcttctcccttgactcacgactcttttattcattttggggctcttgtcaactagatagcgtcggcataggtcagggggtgccggttgtggctctcatcgtagaaggagggcccaacgtgatttcaattgtgctggagtatttgagggacactcctcctgttcctgtcgtcgtctgtgatgggtctgggagagccagcgacattctcgctttcggacacaagtactccgaggagggggggctgatcaatgaatcgctgcgcgaccaactgcttgtcacaatccagaaaacatttacgtacacccggacacaggcacagcacctgtttatcatcttgatggaatgcatgaagaaaaaagagctgatcaccgtgtttcggatgggctccgaaggtcaccaggacatcgacttggccatcctcaccgctctgttaaaaggggccaacgcaagtgcccccgaccagttgtcgttagctctggcttggaatagagtagacattgctagatcgcagatttttatctacggacagcagtggcctgttggctctttggaacaagcgatgctcgatgcccttgttctggatagggtggatttcgtcaaactgctgatcgaaaatggggtgtccatgcaccgattcctcacaattagtcggctcgaggaactgtacaataccagacacggtccctctaatacactgtatcatctggtacgcgacgtgaagaagggaaatctcccccccgactatcggatctctcttatcgacattggtcttgtgatcgagtatctaatggggggagcatacaggtgcaattatacccgaaaacgatttcgcacactgtaccacaacttgttcggaccgaaacgtccaaaagctctgaaactgttgggcatggaagacgatataccactgaggcggggacgcaaaactactaaaaagagggaagaggaggtggacatcgaccttgatgatccagagatcaaccacttcccttttccattccatgaactgatggtgtgggcagtgcttatgaaacgtcagaagatggcgttattcttttggcagcatggcgaagaggcaatggccaaagccttagtcgcatgcaaactctgcaaggccatggcccatgaggcctccgagaatgatatggtcgacgacatttcccaagagctgaaccataattctcgcgatttcggtcagcttgctgtggagctgctcgatcagtcctacaaacaggatgaacaactcgcgatgaagctgctgacatatgagctgaaaaactggagtaatgccacatgtcttcagttggccgtggctgctaagcaccgtgactttatcgcccatacatgcagtcaaatgctgctgacagatatgtggatgggtagactccgcatgcgtaaaaactccggactgaaggtgatactaggaatactacttcctccatctatactcagcctcgaattcaagaacaaagatgacatgccatacatgtcacaggcacaggagatccacctacaagaaaaggaggcggaggagccagagaagccaaccaaagaaaaggaggaggaagacatggaactgaccgcaatgcttggtcggaataatggcgagagctctaggaagaaggacgaggaagaagtgcagagcaaacatcggttaatcccgctcggaagaaaaatatacgagttctataacgcgcctattgttaagttttggttctatacactggcctatatcggctaccttatgctttttaattacatcgtcctggtcaaaatggagcggtggccaagtacgcaggaatggatagttatctcttatatctttacactgggaatcgagaagatgagggaaattctcatgagcgagccaggaaaactcctacaaaaagtcaaagtgtggctgcaggagtactggaacgtgactgaccttatcgccattctgttattttcagtgggcatgattctgcggctgcaggaccagccatttcgtagcgacggacgcgttatatactgcgtcaacatcatttactggtacatcaggttgctcgatatctttggcgttaataaatatttgggaccctacgtgatgatgatcggcaagatgatgatcgatatgatgtactttgtgattattatgctggtagtgctaatgagcttcggcgtggcccggcaggccattctgttccccaatgaagagccgagctggaaacttgcaaagaacattttttacatgccgtactggatgatctacggagaagtgttcgccgaccagattgatcctccttgtgggcagaacgaaacaagggaagatggtaaaatcatccagttgcccccctgtaaaacaggcgcatggatcgtaccagcgatcatggcctgttatctgttggtcgctaatatcctgctggtgaacctacttatcgctgtcttcaacaatactttctttgaagtaaagtccatcagtaatcaagtctggaagttccagcgttaccaactgatcatgacattccatgagcgccccgtgctgccccccccgctcatcattttctcacacatgacaatgatattccagcatttatgctgccggtggcgtaagcatgagagcgatcccgatgagagagactacggtctgaagctgttcatcacagacgacgagcttaaaaaagttcacgactttgaagagcaatgcattgaagaatattttcgcgagaaagatgaccggtttaattctagcaatgatgagcgcatccgtgtgacaagcgagagagtcgagaatatgtctatgcgcttagaagaggtgaacgagagggaacattccatgaaagcttccctacagaccgtggacatcaggctagcccagcttgaggatctgatcgggagaatggccaccgcactcgagcgactgactggtctcgagcgcgccgaatcgaacaagatccgctctcgcaccagcagtgactgtacagacgccgcctatatcgttagacagagctcattcaatagccaagagggaaatactttcaaactgcaggagagcatagatccggcgggcgaggaaacgatgtcccccacttcgcccacattgatgcctcgaatgcggtcacacagtttttacagtgtaaatatgaaggataagggaggcatcgagaagctggaatcaatctttaaagaaaggagcctgtccttgcaccgggctacatcgagccattccgttgccaaagaacctaaggcccccgccgctcccgccaacaccctggcaatcgttcccgactcccggaggccgagcagttgtattgacatctatgtgtccgctatggacgagctgcattgcgacatcgaccctttggacaactccgttaatatccttggacttggggaaccctcattctcaaccccagtgcctagtacagcgccctcttcatcagcatatgccacacttgcaccgacagaccgtccaccaagccgatccattgactttgaggacatcacaagtatggacacccggtcgttttctagcgattatacacatcttcccgagtgccagaatccctgggattccgagcctcctatgtatcacaccattgagagatccaagtcatctcggtacttggcaaccaccccgtttctgctggaagaggcaccaatagtcaagagccatagtttcatgtttagtcctagtcgatcgtactacgctaattttggcgtcccagtgaaaacagcggaatataccagtattaccgattgtatcgatactagatgtgtcaacgcacctcaggccatcgctgaccgtgcagccttccccggtggactcggtgacaaggtggaagatctcacttgttgtcatcccgaaagggaggcagaactctcgcacccatcctctgattcggaggagaacgaggcaaaaggtcggcgagctactattgctatctcctcacaggagggggacaacagcgaacgtacgctgtccaacaacatcactgtgcccaagatcgaaagggctaactcgtactcagccgaggaacccagcgctccctacgctcacactcgcaaatcatttagcatcagcgacaagctggataggcagaggaacactgccagcctgcgtaacccttttcagcggtcaaagtcatccaagcccgaaggcagaggcgatagcctgtctatgcgtcgcctaagccgcaccagcgccttccagagctttgagtcgaagcacaactag

SEQ ID NO: 311028 - DNA, 4740 bp, Artificial Sequence
  derived and/or modified sequence
atgtacgtacgcgtgtctttcgataccaagccagatctgcttttgcacttgatgaccaaagaatggcagctggaactccccaagctgctgatctctgttcacgggggccttcaaaattttgaattacagcctaagctgaagcaagtgttcggcaaggggctgattaaggccgctatgacgactggggcctggatctttaccggtggtgtcaacacaggtgtgatcaggcacgtgggcgatgcactgaaggatcacgcatccaagagcaggggcaagatctgcacgatcggtatagccccatggggaattgtggaaaaccaggaagaccttatcgggagagacgttgtgaggccctatcagaccatgagtaacccgatgagcaagcttaccgtccttaacagtatgcactcacatttcatactggctgataatggcactaccggcaagtatggtgccgaggtgaagctcaggcgccagttggagaaacacatttccctgcaaaagatcaatacacgatgtttaccgttctttagccttgacagcaggctattttactctttctggggcagctgccagctagattcagttggaataggacagggggtgccagtagtcgcacttattgtggaaggtgggccaaatgtgatctctatcgtcctggagtacctgagggacactccccccgtgccggtcgtggtctgcgacggaagcgggagggcaagtgacatattagcgttcggtcataagtattcagaagaaggggggctcatcaacgaaagtttgcgggaccagctgctggtgaccattcagaagacctttacatatactaggacccaagctcagcatctgttcatcattctgatggaatgtatgaaaaagaaggaactgataaccgtgttccggatgggttccgaaggccatcaggatattgacctcgcaatcctcactgcattattaaagggtgctaacgcctctgctcctgaccagctaagcctggcactggcatggaaccgcgtggacatcgcacggtctcagatcttcatttacggccagcaatggccagtcggatcgctagaacaggcgatgctagatgcattagtcctcgacagagtagattttgtcaaactgcttatcgagaatggggtctccatgcatcgattcttgacaatttctcgcttagaggagctgtacaatacaaggcacggtccatcgaataccctctaccacctggtgagggatgttaagaagggcaatctgcctcctgactacagaatttctctgatagatatcggtttggtgattgaatatcttatgggcggggcctatcggtgcaattacacccgcaagaggtttaggaccctgtaccataacctctttggtcctaagagaccaaaggctctgaagctcttaggaatggaggacgacatccctttgcgcaggggccgaaaaactacaaagaagagggaagaagaggtggacattgatttggacgatcctgagatcaatcatttcccttttccctttcatgaactcatggtatgggcggtcctgatgaagcgccagaagatggccctctttttctggcagcacggcgaagaggcgatggcaaaggcactggttgcatgtaaattgtgcaaggccatggcccacgaggcatcagaaaatgatatggtcgacgatatttcccaggagcttaaccataacagtagggacttcggccaattggctgttgaactcctcgatcagagctataagcaagacgagcagctcgccatgaaactgctgacatacgagctgaaaaactggtctaatgccacttgtctgcagctcgctgtcgccgctaagcacagagatttcattgcacacacttgttcccagatgctgctgaccgacatgtggatgggcagactgcgcatgcgcaagaactctggacttaaggtgattctggggatcctcctacctcctagtatcctcagcttggagttcaagaataaagatgacatgccttatatgagtcaagctcaggagatacacctacaggagaaagaagctgaagaaccagagaaacctacgaaagaaaaggaagaggaagacatggagctgacagccatgcttggtagaaacaacggggagtccagcaggaaaaaggatgaagaggaagtccaatccaagcacaggctgatacctttgggacgcaagatatacgagttctataacgctccaatcgtcaagttctggttttacaccctcgcgtacattggatatctgatgttattcaactatatcgtcctcgtaaagatggaaagatggccaagcactcaggagtggatagttatttcctacatcttcacactgggcatcgaaaaaatgagggagatccttatgtctgagcctggtaagctccttcagaaggtcaaggtgtggctgcaggaatactggaacgtgaccgacctaattgctatcttgctgttctcagtaggcatgattttgcggctccaggatcaaccgttcaggagtgacggcagagtgatttactgtgtcaatatcatatattggtacatacgcctgctcgatattttcggcgttaataaatacttgggtccctacgtcatgatgattggaaagatgatgatagacatgatgtatttcgtaattatcatgctggtagttttgatgagcttcggagtcgcgcggcaggccatactcttccccaatgaagagccttcatggaagctggctaaaaatatattttacatgccgtattggatgatttatggggaagtgttcgcagatcaaatcgacccaccatgcggtcagaatgagactcgggaagacggtaagatcatccagcttcccccctgtaagacgggcgcttggatagtcccagccatcatggcttgttatctgctcgtcgctaatattttgttggtgaacctccttatagctgtttttaacaacacgttcttcgaagttaaatctatctcaaatcaggtgtggaaatttcagcgttatcagctcataatgacattccatgagcggcccgtgctgcccccacccctgattatcttctcacacatgacaatgatcttccagcatctttgctgtcgctggcggaagcacgagtctgaccccgatgagcgggattatgggctgaaactcttcatcaccgatgatgagttgaagaaggtgcacgactttgaagaacagtgcattgaggaatactttagggaaaaagatgaccggttcaacagttcaaacgacgagagaatcagggtgacctctgaaagagtggaaaatatgagtatgcgattggaagaagtgaatgagagagaacacagcatgaaggctagccttcaaacggtggacattaggttagcgcaacttgaggatctgatcgggcgcatggccaccgcactcgaacggctgaccgggctcgaacgcgccgagtccaataaaattaggtctaggacgagtagtgattgtaccgatgccgcatacattgttagacaatcatctttcaatagtcaggaaggcaacacgtttaagctgcaggagagcatcgaccccgctggcgaggaaaccatgagccccactagccccactctcatgccaaggatgaggagtcatagtttttatagcgttaacatgaaagataagggtggtatcgaaaagctggaatccattttcaaagagagatccttgagtctacacagagctacgtcttctcactccgttgccaaagaacctaaggctcctgccgcaccagccaacaccttggcaatagtgccagatagtcggcgtccaagtagctgcatcgatatctatgtgagcgccatggacgaactgcactgtgacatagatccactggataattccgttaatatcctgggcctcggggagccaagcttctcgacacccgttccttccactgcccctagtagtagtgcttacgcaactctggcccctaccgacagaccaccaagtcgatccatcgattttgaggatatcactagcatggatacgagaagcttttcatctgattacacacatctaccggaatgccaaaacccatgggactctgaaccgcctatgtaccacactatagagcgctctaaaagctctcggtatctggctacgacccctttccttctggaagaagcacctatcgtgaagtcccactccttcatgttcagcccttcccgctcctattatgccaacttcggtgtgcctgtgaagacagccgaatacacctccattaccgactgcatcgacacacggtgtgtaaatgcccctcaagccattgctgatcgagccgctttccccggcggtctgggcgacaaggtggaagatctgacatgctgccacccagaaagggaagcagagctctcccatccaagctcggattctgaagagaatgaagccaagggtcgacgggcaactattgccatctcatcacaagagggtgacaacagtgaacggactctgagtaacaacatcactgttccaaaaattgagagagctaactcctactcggctgaggaaccttccgctccgtacgcccatacccgcaaatcttttagcatctccgataaactggaccggcagagaaacacagccagcttacgcaaccccttccagcgctcaaagtcatcgaaaccagagggcaggggggacagtctgagtatgagacgcctcagcagaacctcagcatttcagagtttcgaaagtaagcataactag

SEQ ID NO: 311029 - DNA, 4740 bp, Artificial Sequence
  derived and/or modified sequence
atgtatgtgcgggtgtcctttgacaccaagccagacctgctgctgcacctgatgaccaaggagtggcagctggagctgcccaagctgctgatctctgtgcacggcggcctgcagaactttgagctgcagcccaagctgaagcaggtgtttgggaagggcctcatcaaggccgccatgaccactggagcctggatcttcaccggaggagtgaacacaggagtcatcagacatgtgggagatgccctgaaggaccacgccagcaagagccggggcaagatctgcaccatcggcatcgccccctggggcatcgtggagaaccaggaggacctgattggaagagatgtggtgcggccctaccagaccatgagcaaccccatgagcaagctgactgtgctgaacagcatgcacagccacttcatcctggccgacaatggcaccaccgggaagtacggggctgaggtgaagctgcggcggcagctggagaagcacatcagcctgcagaagatcaacacccgctgcctgcccttcttcagcctggacagccgcctcttctacagcttctggggcagctgccagctggacagcgtgggcatcggccagggcgtgcctgtggtggccctgattgtggagggcggccccaacgtcatcagcatcgtgctggagtacctgcgggacaccccacctgtgcctgtggtggtgtgtgatggcagcggccgggccagtgacatcctggccttcggccacaagtacagcgaggagggcggcctcatcaatgaaagcctgcgggaccagctgctggtgaccatccagaagaccttcacctacaccaggacccaggcccagcacctgttcatcatcctgatggagtgcatgaagaagaaggagctgatcaccgtcttcaggatgggcagcgagggccaccaggacatcgacctggccatcctgacagccctgctgaagggggccaatgccagcgccccagaccagctgagcctggccctggcctggaacagagtggacatcgcccggagccagatcttcatctacggccagcagtggcctgtgggcagcctggagcaggccatgctggatgccctggtgctggacagagtggactttgtgaagctgctgattgaaaatggagtgtccatgcaccgcttcctgaccatcagccggctggaggagctgtacaacaccaggcatggccccagcaacaccctgtaccacctggtgagagatgtgaagaagggcaacctgcccccagactaccgcatcagcctgattgacatcggcctggtgattgagtacctgatgggcggggcctaccgctgcaactacaccaggaagcgcttccgcaccctgtaccacaacctgtttggccccaagaggcccaaggccctgaagctgctgggcatggaggatgacatccccctgcggcggggcaggaagaccaccaagaagcgggaggaggaggtggacatcgacctggatgatcctgagatcaaccacttccccttccccttccacgagctgatggtgtgggccgtgctgatgaagaggcagaagatggccctcttcttctggcagcacggggaggaggccatggccaaggccctggtggcctgcaagctgtgcaaggccatggcccacgaggcctctgaaaatgacatggtggatgacatcagccaggagctgaaccacaacagccgggactttggccagctggccgtggagctgctggaccagagctacaagcaggatgagcagctggccatgaagctgctgacctatgagctgaagaactggagcaatgccacctgcctgcagctggccgtggccgccaagcaccgggacttcatcgcccacacctgcagccagatgctgctgacagacatgtggatgggccgcctgaggatgaggaagaacagcggcctgaaggtgatcctgggcatcctgctgccccccagcatcctgagcctggagttcaagaacaaggatgacatgccctacatgagccaggcccaggagatccacctgcaggagaaggaggccgaggagcctgagaagcccaccaaggagaaggaggaggaggacatggagctgacagccatgctgggcagaaataatggagagagcagcaggaagaaggatgaggaggaggtgcagagcaagcacaggctcatccccctgggcaggaagatctatgagttctacaatgcccccatcgtgaagttctggttctacaccctggcctacatcggctacctgatgctgttcaactacatcgtgctggtgaagatggagcgctggcccagcacccaggagtggatcgtcatctcctacatcttcaccctgggcatcgagaagatgagggagatcctgatgtctgagcccgggaagctgctgcagaaggtgaaggtgtggctgcaggagtactggaatgtgacagacctgattgccatcctgctcttctctgtgggcatgatcctgcggctgcaggaccagcccttcagaagtgatggccgggtcatctactgtgtgaacatcatctactggtacatccggctgctggacatcttcggcgtgaacaagtacctgggcccctacgtgatgatgattggcaagatgatgattgacatgatgtactttgtgatcatcatgctggtggtgctgatgagctttggagtggcccggcaggccatcctcttccccaatgaggagcccagctggaagctggccaagaacatcttctacatgccctactggatgatctatggagaggtgtttgctgaccagattgatcctccctgtggccagaatgagacccgggaggatggcaagatcatccagctgcccccctgcaagacaggagcctggatcgtgcctgccatcatggcctgctacctgctggtggccaacatcctgctggtgaacctgctgattgctgtgttcaacaacaccttctttgaggtgaagagcatcagcaaccaggtgtggaagttccagcgctaccagctgatcatgaccttccacgagaggcctgtgctgcccccacccctcatcatcttcagccacatgaccatgatcttccagcacctgtgctgccgctggaggaagcatgaaagtgaccctgatgagcgggactatggcctgaagctgttcatcacagatgatgagctgaagaaggtgcatgactttgaggagcagtgcatcgaggagtacttccgggagaaggatgaccgcttcaacagcagcaatgatgagcgcatccgggtgaccagcgagcgggtggagaacatgtccatgaggctggaggaggtgaatgaaagagagcacagcatgaaggccagcctgcagacagtggacatccggctggcccagctggaggacctgattggccgcatggccacagccctggagcggctgaccggcctggagcgggcagagagcaacaagatccgcagcaggaccagcagtgactgcacagatgctgcctacatcgtgcggcagagcagcttcaacagccaggagggcaacaccttcaagctgcaggagagcattgatcctgctggggaggagaccatgagccccaccagccccaccctgatgcccaggatgaggagccacagcttctacagcgtgaacatgaaggacaagggcggcatcgagaagctggagagcatcttcaaggagaggagcctgagcctgcaccgggccaccagcagccacagcgtggccaaggagcccaaggccccagctgccccagccaacaccctggccatcgtgcctgacagccggcggcccagcagctgcatcgacatctacgtgtctgccatggatgagctgcactgtgacatcgaccccctggacaacagcgtgaacatcctgggcctgggggagcccagcttcagcacccctgtgcccagcacagcccccagcagcagcgcctatgccaccctggcccccacagaccggccccccagccgcagcattgactttgaggacatcacctccatggacaccaggagcttcagcagtgactacacccacctgcctgagtgccagaacccctgggacagcgagccccccatgtaccacaccatcgagaggagcaagagcagccgctacctggccaccacccccttcctgctggaggaggcccccatcgtgaagagccacagcttcatgttcagccccagccgcagctactatgccaactttggagtgcctgtgaagacagctgagtacaccagcatcacagactgcatcgacacccgctgtgtgaatgccccccaggccatcgctgaccgggccgccttccctgggggcctgggggacaaggtggaggacctgacctgctgccaccctgagcgggaggccgagctgagccaccccagcagtgacagtgaagaaaatgaggccaagggcagaagagccaccatcgccatcagcagccaggagggggacaacagcgagaggaccctgagcaacaacatcaccgtgcccaagattgaaagagccaacagctacagcgctgaggagcccagcgccccctatgcccacaccaggaagagcttcagcatcagtgacaagctggaccggcagaggaacacagccagcctgaggaaccccttccagaggagcaagagcagcaagccagagggccgcggggacagcctgtccatgaggcggctgagcaggaccagcgccttccagagctttgagagcaagcacaactag

SEQ ID NO: 311030 - DNA, 4740 bp, Artificial Sequence
  derived and/or modified sequence
atgtacgtgcgggtgagcttcgacaccaagcccgacctgctgctgcatctgatgacaaaggagtggcagctggagctgccaaaactcctgatttcagtgcatggaggactgcaaaattttgagttgcagcctaagctaaaacaggtctttgggaaggggcttattaaagctgcaatgacaacgggggcatggattttcacaggcggtgtcaacactggagttatcaggcacgttggggacgctctaaaagaccatgctagcaaaagccgcggaaagatttgtaccatcggaattgcaccgtgggggatagtcgaaaaccaggaagaccttattgggcgagacgtagtgagaccttaccagaccatgtcaaaccccatgagcaaacttaccgtcctgaattccatgcatagtcattttattctcgccgacaatggaactacaggtaaatacggcgccgaagtgaagcttcggcgtcaacttgagaaacacatcagcctgcagaagatcaatacacggtgtcttcccttcttttccctggactcacggttattctactctttttgggggagttgccagctcgactcagtggggattggtcagggagttccggttgtggcgctcatcgtggaagggggaccaaatgtgatttcgatcgtgttagagtatctgcgcgacacaccccccgtaccagttgtggtgtgcgatggctccggacgagcgtccgacatccttgccttcgggcataaatacagtgaagagggagggcttattaatgagtctcttcgagaccagctgctagtaaccatccaaaaaaccttcacatacacaagaacgcaggctcagcatctgtttatcatcctcatggaatgcatgaagaaaaaagaacttatcacggtttttagaatgggatccgaggggcaccaagatattgacctggcgattcttactgcgcttctcaaaggcgcaaacgccagcgccccggatcagctaagtcttgcactcgcctggaatagggttgatatcgctcggtcacagattttcatttatggtcagcagtggcccgtgggaagtcttgaacaagccatgctggacgccctggtgttggaccgtgttgactttgtcaaactcctgatcgaaaatggggtgtccatgcataggttcctgacgatttcccgcctcgaggaactatacaacacccgacacgggccgtccaacacgttgtatcatctggtgcgtgacgttaaaaaagggaatcttccaccggattataggatcagtttaatagacataggactggtcatcgagtatctgatgggtggggcttaccgatgcaattacaccaggaaacgcttccggactctgtaccataacctctttggacctaagagacctaaggctctgaaattacttggaatggaggacgacatacctctgaggagaggacggaagacaactaagaaacgggaggaggaggtcgatatcgacttggatgatccggaaatcaatcacttccccttccctttccacgagcttatggtgtgggccgttctcatgaagagacagaagatggcactttttttctggcagcatggggaagaggccatggctaaggccctggtcgcctgtaagctctgtaaggccatggcccacgaagcatccgaaaatgatatggtggatgacatcagccaggagctgaatcataacagtcgtgactttggccagcttgctgttgagcttctcgatcagagctataaacaggacgagcagctggcaatgaaactgctgacatacgaactgaaaaattggtctaatgcaacatgcttgcagcttgccgtcgctgccaagcatagggactttattgcgcacacttgcagtcaaatgctcctgactgatatgtggatgggtagactgaggatgaggaagaactctggattgaaagttatcctgggaatactgttgccgccctctatcctgtctttagaatttaagaataaggatgatatgccttatatgtcccaagcacaagaaatccacttacaggaaaaggaagcggaggagccagagaagccaaccaaggaaaaggaggaggaagacatggagctgactgcgatgctaggcagaaacaatggagaatcatcacggaagaaagatgaggaggaagtacagtcaaagcaccgcctgatccccctagggaggaagatatatgagttttacaatgcccctatagtcaaattttggttttacacccttgcttacatcgggtatctgatgcttttcaactatatagtgctggtgaaaatggagcggtggcccagcacccaggagtggattgttattagctacattttcacattggggattgagaaaatgagagaaatcctgatgtccgagccagggaagctgctccagaaggtcaaggtctggctgcaggaatactggaatgtgaccgacctcattgctatcctgctgttctctgtggggatgattttaagactgcaggaccaacccttccgatctgacgggcgggttatttactgcgtcaatattatctactggtatatcagattacttgatatatttggtgtcaataagtatctgggcccttatgtcatgatgatcggcaagatgatgatcgacatgatgtatttcgtgattatcatgctagttgtgctcatgtccttcggtgttgccaggcaggccatactctttcccaatgaggagccatcatggaagctggcaaagaacattttttatatgccctattggatgatctacggagaggtctttgccgaccaaatcgacccaccatgtggccagaacgagacccgtgaagacgggaagattatccagctcccgccttgcaaaactggtgcatggatagtgccagctatcatggcctgctatctcctagttgccaatatcctcttggtgaatctcctcatagccgttttcaataacacattctttgaggtcaaatctatctccaatcaggtgtggaaattccagcgctaccagcttataatgactttccatgagcggcctgtcctgcccccacccctgataatcttctctcatatgaccatgatctttcagcatctgtgctgtagatggcggaaacacgaatctgaccccgacgaacgcgactacggattgaaattattcattaccgacgacgagctgaagaaagttcatgattttgaggagcagtgcatcgaagagtatttccgggaaaaggacgataggttcaactctagtaacgatgaacggatccgggtgacatcagagcgtgtggagaacatgagcatgcgcttagaagaggttaacgagagggagcactccatgaaggcctctctacagacagtggatatcagactggcacaactggaggaccttattggccgaatggctactgcattggagcgattaactggacttgagagagcagaatccaacaagattagatcccggactagctcagattgcactgacgctgcttacatcgttcggcagtccagtttcaacagccaggagggcaacacattcaagctgcaggaatccattgatcctgcaggcgaggagactatgagtccgaccagccccactcttatgccgagaatgcgctcccacagtttttactctgtaaatatgaaggacaaaggtggaattgagaaactagaatcaatcttcaaggagaggagcttgtcgctgcaccgagcaacctcctctcacagtgtggctaaggagccgaaggctcctgcagctccagccaacaccctcgcaattgtacccgattcccgccgacccagcagctgcatagacatatacgtgtcagctatggatgaactgcactgtgatattgaccccctggacaactcagttaatatcctcggcttgggagagccatccttttctacccctgtaccaagtacagctccttcctcaagtgcctatgcaaccttagctcccaccgatcgacccccgagtaggtccattgactttgaggacataacaagcatggacactcggtcattctcttctgactacacccatctgccagagtgccaaaacccctgggactcagaaccaccaatgtatcataccattgaaagatcaaagagcagtcgctatttggctacaactccctttcttcttgaagaggcgcctatcgtcaagtcccatagctttatgttctccccgtcccgatcatattacgccaatttcggagtgcccgttaagactgccgagtacactagcatcactgattgtatcgacaccagatgcgtgaacgcaccacaggctattgccgaccgggctgcatttcctggcggtttgggggataaggtcgaagatctgacctgttgtcaccccgagcgcgaagccgagctctcccacccgtcaagtgattccgaagaaaatgaagccaaaggtaggagagccactattgccatttcatctcaggagggagacaatagcgaacggaccttatccaataacattaccgtcccaaaaatcgagagagccaattcttattccgccgaagaaccgagcgctccatacgcgcacactaggaagtcgttttctatatccgataagttggatagacagcggaatactgcatccctccgaaaccccttccagcggtctaagagcagcaaacccgaaggcaggggtgactctttatctatgagacgtctcagtagaacgtccgccttccagtccttcgaatccaagcacaattag

SEQ ID NO: 311031 - DNA, 4740 bp, Artificial Sequence
  derived and/or modified sequence
atgtacgtgcgggtgagcttcgacaccaagcccgacctgctgctgcacctcatgactaaagagtggcaacttgagttgcccaaactgttgatcagcgtgcacggtgggctacagaacttcgaacttcagccgaagttgaaacaggtctttggcaaaggacttatcaaggctgctatgaccaccggcgcgtggatcttcactggaggagtgaatacaggcgtgattcgacatgtcggtgacgccctgaaggaccacgctagcaagtctcggggtaaaatctgcactatcggcatagccccctggggaatagtggaaaaccaggaagatctcattggacgagacgtggttcggccctaccaaaccatgagcaaccccatgtccaaattaaccgttttgaacagcatgcattctcatttcattctggccgacaatggtacgaccggtaaatatggtgctgaagtgaaactacggcgtcagctggaaaagcacatttctctgcaaaaaattaacacgagatgtctgccttttttttctctagacagccgcctgttctacagcttctggggaagctgccagctcgatagtgtgggaattggtcagggcgtgccggtagtggcacttatagtggagggcggccccaatgtcatctcgatagtattggagtatttacgtgacacaccccccgtgcccgtggtggtctgtgacggatctggccgcgccagcgatatcttagccttcggacacaaatactccgaagagggcggcctgatcaatgagtccctgcgggatcagctcttggtgacgattcaaaaaacttttacctacactcggactcaggcacagcacctgttcatcatcctgatggagtgcatgaagaaaaaggagctgatcaccgtatttagaatgggctccgaaggtcaccaagatatcgacctggctatcctgacggctctgctcaaaggggcaaatgcaagtgcccccgaccaactgagcctggcactcgcgtggaacagagtggacattgcacgctctcagattttcatttatggacagcagtggccagtgggctctctggagcaggctatgctggacgctctagtgctggacagagttgatttcgtcaagctcctgattgaaaacggagtgagtatgcatcggtttctcacaatttctagactggaagaactgtataacacacggcacggtccatcgaacaccttataccatctcgtccgagacgttaagaagggaaacctcccccctgactacaggatctctcttatagatattgggctcgtcatcgaatacttaatgggcggcgcttatcgctgcaactatacacgcaagagatttcgcaccctgtaccacaatctgttcggccctaaacggccgaaggctttaaaactgctcggcatggaagatgatatacccctccggagaggaaggaagacaactaaaaaacgcgaagaagaggtggatattgacctcgacgaccccgaaatcaatcatttcccgttcccattccacgagctcatggtttgggcagtgctaatgaaacggcagaagatggctttgttcttctggcagcacggtgaagaggccatggcgaaggctctcgtggcatgtaaactgtgtaaagctatggcacacgaagcttctgagaacgacatggtagacgacatttcccaagagctgaaccacaatagccgcgactttggacaactcgctgttgaactgctcgatcaatcctataagcaagatgagcagcttgcaatgaagctattaacctatgaattgaagaactggtctaatgctacatgtctgcagctcgccgtcgccgccaaacaccgtgattttatcgcgcacacttgttcccagatgttgttgacagacatgtggatgggccgcctcaggatgcggaagaatagtggcctgaaagtgatactgggtatcctcttgcctcctagtattctgtccttagagttcaaaaacaaagatgatatgccctacatgtcacaggcacaggaaatccatctgcaggagaaggaagcagaggagcccgagaaacctaccaaagaaaaggaggaagaagatatggagttaacagccatgttgggaaggaataacggagagagttctcgcaaaaaggatgaagaagaagtgcagtcgaaacatagactgatccctttggggaggaagatctacgagttttacaatgcacccatcgtgaagttctggttttacacactagcctacattggctacctaatgttgtttaattatattgtcttagtgaaaatggagcgatggcctagtacccaggagtggatcgtaatctcgtacatctttaccctcggcatcgaaaaaatgcgggagatcctgatgtcggaaccagggaagctgctgcagaaagttaaggtgtggcttcaggagtattggaatgtgacggacctgatcgccattctcctcttcagtgtaggcatgatactgcgtttgcaggaccagccctttcgctccgacgggagggtgatctactgcgtaaacattatatactggtacatccgcctgcttgatatctttggagtaaacaagtatctggggccttatgtgatgatgatcgggaagatgatgatcgacatgatgtacttcgttatcatcatgctggtcgtcctgatgagttttggcgtggcacggcaggcaattctctttcccaatgaggaaccgtcctggaagctggccaaaaacatcttctacatgccctattggatgatctacggggaggtgttcgcagatcaaatagatccgccatgtgggcagaacgagacccgcgaggatggtaagatcattcagttacctccttgtaagacgggcgcttggattgtgccagccatcatggcttgctacttgctggttgctaatattctccttgtaaacctgttaatcgccgtgtttaataacactttttttgaggttaagagtatttcaaaccaagtgtggaagtttcagagatatcagctcattatgacttttcatgaacggcctgtgctccctccaccgcttattatcttctctcacatgactatgatttttcagcatttgtgttgccggtggagaaaacatgaatcagaccccgacgagagggactacggtctgaaactctttattacagatgacgagcttaagaaggtccacgatttcgaggaacagtgtatcgaagagtactttcgtgagaaagacgatagattcaattcctctaacgacgaaaggatccgggtgaccagcgagcgcgtagaaaatatgtcgatgagactggaagaggttaacgaacgggaacatagtatgaaagcctccctgcagactgtagacatacgactggcccagctcgaggatttaatcggacggatggcaaccgccctcgagaggcttactgggctggagagggctgagtcaaataaaattcggagtagaacttcttccgattgcacagacgctgcttacattgtgagacaaagctcttttaactctcaggagggtaatacctttaagcttcaggagtcgatagaccctgctggcgaggagacaatgtcacccacatcgcctaccctgatgcccaggatgcggtctcatagcttttactcggtgaatatgaaggataagggcggcatcgagaagctggagagcatcttcaaagagcgaagcttgtcacttcacagagcgactagtagtcacagcgtcgcgaaggagcccaaagctccagcagcccccgctaacacgctggcgatcgtccccgattcccgacgaccaagttcgtgcatcgacatctacgtgtccgctatggacgagctgcattgcgacatagacccattagacaattcagttaacatcctgggccttggtgagccttccttctctacgcctgtgccttccaccgcacccagctcctccgcctatgcaacattggccccaactgatagaccaccatctcggtcaatcgacttcgaagatattaccagtatggatactcgatctttcagcagtgactacacccatctgccagaatgccagaacccatgggactctgagccacccatgtaccataccattgagcgctccaagtcctcccgttacctggccacaacgccgttcctgctcgaagaggcaccgatcgtgaagagtcacagcttcatgttttccccatctaggtcatattatgcaaacttcggggttcctgtgaagacggctgaatacacctctataacagactgtatcgacaccagatgcgtgaacgccccgcaagccatcgccgatcgagctgcgttccctggggggctgggagataaggtggaggacctcacatgctgccatccggaaagagaggccgaacttagccacccatcctcagattcagaggagaacgaggctaagggcaggcgtgccaccatagccatatcaagtcaagaaggcgacaattcagagcgcaccctgtccaacaacatcactgtccccaagattgagagagccaacagttattccgctgaggaacctagcgctccctacgcccacactcgaaagtctttcagcatctctgataaactcgaccgtcagcggaacacagctagcctgagaaaccccttccagaggagcaagtcatccaaaccagaagggcgtggagactccctatctatgcggagactatctaggacctctgcctttcagtcatttgagtccaagcacaattag

SEQ ID NO: 311032 - DNA, 4740 bp, Artificial Sequence
  derived and/or modified sequence
atgtatgtgagagtgtcgtttgatactaaaccggacctcctcctccacctcatgacaaaagagtggcaactggaacttcctaaattgctgataagcgtacatggcggtctgcaaaacttcgagctacagcctaaactaaagcaagtgttcggaaaaggcttgattaaagccgcaatgacaaccggcgcatggatctttactggcggtgtcaatacaggcgttatcagacatgttggcgatgcactgaaggaccacgccagtaagtcacggggaaagatctgcacaattggaatagcaccttgggggatagtggagaaccaagaagaccttatcgggcgagatgtggtccggccttatcagaccatgtctaacccaatgtccaaacttactgtgctgaatagcatgcatagccacttcattcttgccgacaacggcacgacagggaaatatggggcagaagtgaagctgagacggcagctggaaaagcacattagcttgcaaaaaataaacacccgctgtctgccattctttagccttgattcccggctgttttactcattctggggaagttgtcaactagatagtgtgggcatcggacaaggggtgcccgtggtagcgctgatcgtggaaggcggtccaaacgtgatctccatcgtgctggagtatcttcgggatacaccgccagtccccgttgttgtatgcgatggatctggcagggcatctgatattctggcttttggtcacaaatacagcgaggaagggggactgatcaacgagtcactccgggaccagctcctggtcaccatacagaaaacttttacatatacccgcacccaggcgcaacatttgtttataatcctgatggagtgtatgaagaagaaggaacttattacagtgttccgcatgggatcagagggtcaccaggacatcgacctagctatcctgaccgccctcctgaagggggctaacgcttcggcccctgaccaactcagcctggcgctcgcatggaatagggtagacatcgccaggagtcagatctttatctacggccagcagtggccggtgggttctctggagcaagccatgctggacgctctggtgctagaccgagtggactttgtgaagctgttgatagagaatggcgtaagtatgcaccgcttcttaacaattagtaggctggaggagctgtacaacaccagacacggaccatctaataccctgtaccacctggtgagagacgttaaaaagggaaatctaccacccgactatcgcatatccctgatagatatcggcctggttattgaatatttaatgggcggtgcttacagatgcaattataccaggaaacgtttcagaacactctatcacaatctgttcggtccaaagcggccaaaagccctaaagttgctgggaatggaggacgacatcccactgcggagaggaaggaagaccaccaaaaaacgggaagaggaagtcgatattgatctggatgacccagagataaatcattttcctttccctttccatgaacttatggtatgggctgtcttaatgaaacggcagaagatggccctttttttttggcaacacggagaagaggctatggccaaagctctggttgcttgcaagctctgtaaggcgatggcccacgaggcttccgagaatgacatggtagacgatatctcccaagaattgaaccacaattcccgtgacttcggccagttggctgtggaacttttagaccagtcatacaagcaggatgagcagctggctatgaaattgcttacctacgagctcaaaaattggagcaacgcgacttgcctgcagctggcagtggccgctaagcatagagacttcatcgcccacacatgtagccagatgctcctgacagatatgtggatgggaagactgagaatgagaaagaactcaggtctgaaggtgatactggggattttactcccccctagcatcctctcccttgagttcaaaaataaggacgatatgccttatatgagccaggcacaggagatccatctccaggagaaggaggccgaggaaccagaaaagcctactaaagagaaagaggaggaagacatggaactcaccgcaatgctcggacgaaataacggagagtcttctcgcaaaaaggatgaggaggaagtgcagtctaaacacagactcattccattagggcgtaagatttacgaattttacaatgcaccaatcgtaaagttctggttctacacattggcttatatcggctacctgatgttgttcaactacatcgtcctggtaaaaatggagcgctggccctccactcaggagtggattgtcataagttacatttttacgctcggaatcgaaaagatgagagaaattcttatgagcgagccaggcaagttacttcagaaggtgaaagtatggctccaagagtattggaatgtcacagatctcatcgctattctgcttttcagtgttggtatgatcctccgactgcaagaccagccatttagaagcgacgggcgtgtgatctattgcgtcaatattatctattggtacataaggttgctagatatctttggcgtgaacaagtacttagggccttacgtcatgatgattggcaagatgatgatagacatgatgtacttcgttattattatgctggtcgtgctcatgtcattcggggtggccagacaggctattctgtttcctaatgaagaaccatcctggaaactggcgaaaaacattttttacatgccctattggatgatatatggcgaggtgtttgccgatcagatcgatccaccctgcggccagaacgagacccgtgaagacggcaaaattattcagttacccccatgcaaaaccggcgcttggatagttcccgcaatcatggcctgctacctactggtcgcaaacattttgctggtaaacctgcttatagccgtgtttaataacacatttttcgaggtaaagtccatttccaaccaggtgtggaagttccagagatatcagctaatcatgacatttcacgaaagaccagttctgcctccgcctttaattatcttctcccacatgacaatgatcttccaacacctctgctgtcgctggaggaagcatgagagcgatcctgacgagcgagactatggtctgaaactgtttatcacagacgacgagctcaagaaggtgcacgactttgaggagcaatgcattgaagagtattttcgcgaaaaagacgatcgatttaattcatctaacgacgaacgcatcagagttacaagtgaaagagtggagaacatgtcgatgcgtcttgaggaggtgaatgagagggagcactccatgaaggctagtttacagactgtcgatatccgactggcgcagctggaggatctgatcgggcgaatggcaaccgctttggagagactcacaggcctggaacgagcagagagtaacaagattcgttcacgtacttccagcgattgcaccgacgccgcatacatcgtccgacaatcatccttcaactctcaggaaggaaatacatttaagctgcaggagtctattgatccggcaggcgaggaaacaatgagtccgacttcccctactctcatgcccagaatgcgctcccactctttttatagcgtaaatatgaaggataaaggtgggatagagaaactagagtcaatctttaaggagagatctctaagcctccatagagcgacttctagccactcggtagctaaagagcccaaggcgccagccgctccggcaaacaccctagcaatagtgcccgacagcaggaggccgagcagctgcattgacatctatgtgagcgcaatggatgagctccactgtgacatcgatccccttgataacagcgtgaatatacttgggctcggcgagccttccttctccacacctgtcccatcaacagctccttctagctctgcctacgccaccctggcccctacagaccggccaccgagtcgcagtatagactttgaggacatcacaagcatggacacacgttctttcagctccgactacacacatctccccgaatgccaaaatccttgggacagcgagccacccatgtaccacacaatcgagagaagtaagtcctcacggtaccttgccaccacacctttcttgttggaagaggctccaatcgtgaagagtcacagttttatgttctctccatctagatcatactatgctaacttcggcgtacccgtaaagaccgcagagtacaccagcataaccgattgcatagataccaggtgcgtcaacgcccctcaggccatcgcggacagagcagctttccctggaggactgggcgacaaggtcgaagaccttacttgctgtcatcctgaaagggaggctgagctgtcacatccctcctctgacagcgaagagaatgaggccaaaggcagaagagcaactatcgcgatcagctcccaggagggagacaacagcgagcgcacattgtcaaacaacattaccgtccctaagatcgagcgggcaaatagctatagcgcagaggagccctcagctccctacgctcatactagaaaatcattttccatttcagacaagctcgaccgtcagagaaacaccgctagcctccggaacccgttccaaaggagcaaatcttccaagcccgaagggaggggggactccctgtccatgaggaggttgagcaggacctctgctttccagtcatttgagtcaaagcataactag

SEQ ID NO: 311033 - DNA, 4740 bp, Artificial Sequence
  derived and/or modified sequence
atgtacgtcagagtgtcttttgacactaaacccgacctcttactgcacttaatgactaaagagtggcagctcgaattgcctaagctcttgatcagtgtgcacgggggattacagaatttcgagttgcagccaaaactgaaacaggtgtttggaaaaggattgatcaaggcagcaatgacaacaggggcatggatattcaccggaggagtgaatacaggagtgatcagacatgtgggggatgcacttaaggatcacgcaagcaaaagcagaggcaagatttgcacaattgggattgccccatgggggattgtggaaaatcaggaggatctgattgggagggacgtggtccgaccctatcagacgatgtctaaccctatgtcgaaactcactgtccttaattctatgcacagtcactttattctcgccgataacgggacgaccggtaaatatggcgctgaagtcaagctgcgcagacagctggaaaaacatattagtctccagaaaattaacactagatgcttaccttttttttcactggattcacgtttattttattccttctggggctcctgccagctagattccgtgggcatcgggcagggcgtgccggtggttgcattaatcgtggagggcggacctaacgtgatcagcattgtccttgaataccttagagacacacctccggtgcccgtggtggtgtgcgatggatccggcagagcatcagatattctggcctttgggcacaagtacagcgaggagggcggactcatcaacgaatccttgagagatcaactcctggttaccatccaaaagacattcacctacacccggactcaggctcagcacctgtttattatactgatggagtgcatgaaaaagaaagagttaattactgtgtttcgcatgggaagcgagggccatcaggatatcgatcttgctattctgaccgctctgctgaagggcgcaaacgctagtgcacctgatcagctgtcactggccctggcatggaaccgggtggatattgccaggagccagatttttatctatggccaacagtggccagtgggtagtctggagcaagccatgctggacgcactggttcttgaccgggtggactttgtcaaactcctcatcgaaaatggcgtaagcatgcaccggtttctcactatctcccgactggaggaattgtacaatactcgccatgggcctagcaatactctatatcacttggtgagggatgtgaaaaagggcaacctcccacccgactatcggatttctttgatcgacattggcttagtaatcgagtatctaatgggtggagcataccgatgcaactatacgcgcaaaaggttcagaacactgtatcacaatctgttcggaccgaagaggcccaaggcactcaagcttctcggcatggaggatgacatccctcttcgcagggggcgaaagaccacaaagaagagggaagaggaagtcgatatcgatctcgatgaccccgaaatcaaccacttcccgtttccgtttcacgagttgatggtgtgggccgtgcttatgaaaaggcagaagatggccttgtttttttggcagcacggagaggaggccatggcaaaagcactcgtcgcatgtaagctgtgtaaagctatggctcatgaggcatcagaaaacgacatggtagatgacatctcccaggaacttaatcacaattctagggactttgggcaactggctgtcgaacttctcgatcaaagctataaacaggatgaacaactggctatgaagcttctcacatacgagttaaaaaactggtctaacgcaacttgtctgcagttggcagttgctgccaagcaccgcgactttatagctcatacctgttcccagatgctattgactgacatgtggatgggaagacttcgaatgcgtaagaactccgggctaaaagtcatcctgggaattctgctccccccatctattctgtcacttgaattcaagaataaggacgacatgccatacatgtctcaggcgcaggaaatccatttgcaagaaaaggaggcagaggagccagaaaaaccaactaaggagaaggaagaagaagacatggagttgacagcgatgctgggcaggaataatggggaatcgtctcgcaagaaagacgaggaagaagtgcagagtaagcaccggttgatcccgcttgggaggaagatctatgaattctataacgccccaatagtgaagttttggttctataccctggcatatatcggctacttgatgcttttcaactatatcgtacttgtaaagatggagaggtggccatcaactcaagaatggatcgtgatcagctacatcttcaccctggggatcgaaaagatgagagagattttgatgagcgagccaggcaagttacttcagaaagtgaaggtctggctccaggaatattggaacgtgacggatctgattgctatcctgttgttctccgtgggtatgatcctgcgcctccaagatcagccttttagatcagatggcagagttatctattgcgtgaacatcatttattggtacatccgtctgctggatatcttcggcgtaaacaagtacctgggcccttacgtcatgatgatcggcaagatgatgatcgacatgatgtactttgtgatcatcatgttggtcgtcctcatgtctttcggggtggcaagacaggcaatattgtttcctaatgaggaaccttcgtggaagttggccaaaaatatcttttacatgccttattggatgatttatggagaagttttcgctgaccagatcgaccccccatgtggtcaaaacgaaactcgagaagacggcaagatcattcagctaccgccatgcaaaaccggggcatggattgttccagccattatggcttgctatctccttgtcgccaacattctgctcgttaacctgctcatcgcagtattcaataacaccttttttgaggttaagagcatctccaaccaggtctggaaattccaacggtaccaacttatcatgacctttcatgaacggcctgtgcttccacccccactgataatcttcagccacatgaccatgatttttcagcacctgtgctgccggtggagaaaacacgaaagtgatcctgacgagcgagattatggactcaaactattcatcaccgatgacgagttaaaaaaggtgcatgattttgaagagcagtgtatagaggagtattttagggagaaagacgaccggtttaacagctctaacgacgaaaggataagggtgacgagtgagagggtggaaaacatgtctatgcgcctcgaagaggtgaacgaaagggaacactccatgaaagcttcccttcagactgtcgacatcagactggctcagctcgaagacttaatcggcaggatggccaccgcactggaaaggctgaccggattggaaagagcagaaagtaacaagattcgcagtcgaacttcttcagactgtactgacgccgcatatatcgtgaggcagtcctccttcaacagccaagaaggaaacacttttaagctgcaggaatccatagaccccgctggagaggagaccatgagccccactagtcccaccctgatgccacgaatgcggagccactccttctattctgtcaatatgaaagataagggcggaatagagaagctggagtcaattttcaaggaacgcagtctatcacttcatagggccacatctagtcattctgtagccaaggagccaaaagctccagccgctccagcgaacacattggctattgtgcctgatagcaggcgccctagcagctgcatagatatctacgtgtccgccatggacgaactacattgtgacatagacccactggataactccgtgaatatcctcggcttgggcgaaccgtcgttttctactccagtgccaagtacagcaccatcctcttctgcctacgcaaccttggccccaactgaccgtcccccttcccgctcaatcgactttgaggatatcacaagcatggatacgcggagcttttcatccgattacacgcacctcccagaatgccaaaacccttgggatagcgagcctcccatgtaccacaccatcgaacgatccaaatcctcccggtatttggccactacaccattccttctggaggaggcccctatcgtgaagagtcactccttcatgtttagccctagcaggagctattatgctaatttcggcgttccagtcaagaccgcggaatacacttcaattacagattgcatcgatacccgatgtgtcaacgcaccacaagcaatagcggatcgggctgccttccctggcggactgggggataaagtggaggatctcacatgttgtcatccagaacgcgaggcagagctgtcacacccctcctcagatagcgaagaaaacgaggcgaaaggcaggcgagccaccattgccatctcttctcaggagggtgacaacagcgagcgcacactgtcaaacaatataactgtcccgaagatagaacgcgcaaattcctatagcgcagaggagccctctgccccatatgcacacaccaggaaaagcttcagcatttctgataaactggatcggcagcgcaatacggccagtctcagaaacccttttcagcgctcaaagtcctcaaagcccgagggcagaggggattcacttagcatgcgccgtttgtcacggacctccgctttccagtcattcgagagcaagcacaattag

SEQ ID NO: 311034 - DNA, 5996 bp, Artificial Sequence
  derived and/or modified sequence
agctgcagcaaaatgaaagcaacaggagctgctccggggactgcttttgccagtacccagaatcagtgctcaggctcagaaatcctggatagaaagagcattttataaaagagaatgtgtccacatcatacccagcaccaaagacccccataggtgttgctgtgggcgtctgataggccagcatgttggcctcacccccagtatctccgtgcttcagaatgagaaaaatgaaagtcgcctctcccgaaatgacatccagtctgaaaagtggtccatcagcaaacacactcaactcagccctacggatgcttttgggaccattgagttccaaggaggtggccattccaacaaagccatgtatgtgcgagtatcttttgatacaaaacctgatctcctcttacacctgatgaccaaggaatggcagttggagcttcccaagcttctcatctctgtccatgggggcctgcagaactttgaactccagccaaaactcaagcaagtctttgggaaagggctcatcaaagcagcaatgacaactggagcgtggatattcactggaggggttaacacaggtgttattcgtcatgttggcgatgccttgaaggatcatgcctctaagtctcgaggaaagatatgcaccataggtattgccccctggggaattgtggaaaaccaggaggacctcattggaagagatgttgtccggccataccagaccatgtccaatcccatgagcaagctcactgttctcaacagcatgcattcccacttcattctggctgacaacgggaccactggaaaatatggagcagaggtgaaacttcgaagacaactggaaaagcatatttcactccagaagataaacacaagatgcctgccgtttttctctcttgactcccgcttgttttattcattttggggtagttgccagttagactcagttggaatcggtcaaggtgttcctgtggtggcactcatagtggaaggaggacccaatgtgatctcgattgttttggagtaccttcgagacacccctcccgtgccagtggttgtctgtgatgggagtggacgggcatcggacatcctggcctttgggcataaatactcagaagaaggcggactgataaatgaatctttgagggaccagctgttggtgactatacagaagactttcacatacactcgaacccaagctcagcatctgttcatcatcctcatggagtgcatgaagaagaaggaattgattacggtatttcggatgggatcagaaggacaccaggacattgatttggctatcctgacagctttactcaaaggagccaatgcctcggccccagaccaactgagcttagctttagcctggaacagagtcgacatcgctcgcagccagatctttatttacgggcaacagtggccggtgggatctctggagcaagccatgttggatgccttagttctggacagagtggattttgtgaaattactcatagagaatggagtaagcatgcaccgttttctcaccatctccagactagaggaattgtacaatacgagacatgggccctcaaatacattgtaccacttggtcagggatgtcaaaaaggggaacctgcccccagactacagaatcagcctgattgacatcggcctggtgatcgagtacctgatgggcggggcttatcgctgcaactacacgcgcaagcgcttccggaccctctaccacaacctcttcggccccaagaggcccaaagccttgaaactgctgggaatggaggatgatattcccttgaggcgaggaagaaagacaaccaagaaacgtgaagaagaggtggacattgacttggatgatcctgagatcaaccacttccccttccctttccatgagctcatggtgtgggctgttctcatgaagcggcagaagatggccctgttcttctggcagcacggtgaggaggccatggccaaggccctggtggcctgcaagctctgcaaagccatggctcatgaggcctctgagaacgacatggttgacgacatttcccaggagctgaatcacaattccagagactttggccagctggctgtggagctcctggaccagtcctacaagcaggacgaacagctggccatgaaactgctgacgtatgagctgaagaactggagcaacgccacgtgcctgcagcttgccgtggctgccaaacaccgcgacttcatcgcgcacacgtgcagccagatgctgctcaccgacatgtggatgggccggctccgcatgcgcaagaactcaggcctcaaggtaattctgggaattctacttcctccttcaattctcagcttggagttcaagaacaaagacgacatgccctatatgtctcaggcccaggaaatccacctccaagagaaggaggcagaagaaccagagaagcccacaaaggaaaaagaggaagaggacatggagctcacagcaatgttgggacgaaacaacggggagtcctccaggaagaaggatgaagaggaagttcagagcaagcaccggttaatccccctcggcagaaaaatctatgaattctacaatgcacccatcgtgaagttctggttctacacactggcgtatatcggatacctgatgctcttcaactatatcgtgttagtgaagatggaacgctggccgtccacccaggaatggatcgtaatctcctatattttcaccctgggaatagaaaagatgagagagattctgatgtcagagccagggaagttgctacagaaagtgaaggtatggctgcaggagtactggaatgtcacggacctcatcgccatccttctgttttctgtcggaatgatccttcgtctccaagaccagcccttcaggagtgacgggagggtcatctactgcgtgaacatcatttactggtatatccgtctcctagacatcttcggcgtgaacaagtatttgggcccgtatgtaatgatgattggaaaaatgatgatagacatgatgtactttgtcatcattatgctggtggttctgatgagctttggggtcgccaggcaagccatcctttttcccaatgaggagccatcatggaaactggccaagaacatcttctacatgccctattggatgatttatggggaagtgtttgcggaccagatagaccctccctgtggacagaatgagacccgagaggatggtaaaataatccagctgcctccctgcaagacaggagcttggatcgtgccggccatcatggcctgctacctcttagtggcaaacatcttgctggtcaacctcctcattgctgtctttaacaatacattttttgaagtaaaatcgatatccaaccaagtctggaagtttcagaggtatcagctcatcatgactttccatgaaaggccagttctgcccccaccactgatcatcttcagccacatgaccatgatattccagcacctgtgctgccgatggaggaaacacgagagcgacccggatgaaagggactacggcctgaaactcttcataaccgatgatgagctcaagaaagtacatgactttgaagagcaatgcatagaagaatacttcagagaaaaggatgatcggttcaactcatctaatgatgagaggatacgggtgacttcagaaagggtggagaacatgtctatgcggctggaggaagtcaacgagagagagcactccatgaaggcttcactccagaccgtggacatccggctggcgcagctggaagaccttatcgggcgcatggccacggccctggagcgcctgacaggtctggagcgggccgagtccaacaaaatccgctcgaggacctcgtcagactgcacggacgccgcctacattgtccgtcagagcagcttcaacagccaggaagggaacaccttcaagctccaagagagtatagaccctgcaggtgaggagaccatgtccccaacttctccaaccttaatgccccgtatgcgaagccattctttctattcggtcaatatgaaagacaaaggtggtatagaaaagttggaaagtatttttaaagaaaggtccctgagcctacaccgggctactagttcccactctgtagcaaaagaacccaaagctcctgcagcccctgccaacaccttggccattgttcctgattccagaagaccatcatcgtgtatagacatctatgtctctgctatggatgagctccactgtgatatagaccctctggacaattccgtgaacatccttgggctgggcgagccaagcttttcaactccagtaccttccacagccccttcaagtagtgcctatgcaacacttgcacccacagacagacctccaagccggagcattgattttgaggacatcacctccatggacactagatctttttcttcagactacacccacctcccagaatgccaaaacccctgggactcagagcctccgatgtaccacaccattgagcgttccaaaagtagccgctacctagccaccacaccctttcttctagaagaggctcccattgtgaaatctcatagctttatgttttccccctcaaggagctattatgccaactttggggtgcctgtaaaaacagcagaatacacaagtattacagactgtattgacacaaggtgtgtcaatgcccctcaagcaattgcggacagagctgccttccctggaggtcttggagacaaagtggaggacttaacttgctgccatccagagcgagaagcagaactgagtcaccccagctctgacagtgaggagaatgaggccaaaggccgcagagccaccattgcaatatcctcccaggagggtgataactcagagagaaccctgtccaacaacatcactgttcccaagatagagcgcgccaacagctactcggcagaggagccaagtgcgccatatgcacacaccaggaagagcttctccatcagtgacaaactcgacaggcagcggaacacagcaagcctgcgaaatcccttccagagaagcaagtcctccaagccggagggccgaggggacagcctgtccatgaggagactgtccagaacatcggctttccaaagctttgaaagcaagcacaactaaaccttcttaatatccgccacagaaggctcaagaatccagccctaaaattctctccaactccagtttttcccctttccttgaatcatacctgctttattcttagctgagcaaaacaagcaatgctttgggaggtgttaactcaaaggtgacttctgggccacagatcaagaaagcatttgatctgacccagtgccagacacaggggatttaaggcatgttcacacttgctgggcagggagggggaagagagggagaaggaagggttagagatgaatgtgtatccgcagtcacagcagaaagccatgagagcaggggaaacaaggggcttcgagcacgctccatgccaggaggcatctgttgatttctgaccattatcaagagttgtaggatgcagggctaaattgcaaaataaaataaaatagccagcgtacacaatgagatattctaaacttccattctgttttcttttcacattggctccatcactggtgactgatgaagagcatcctctttattcagtataagccggcagcaagcagttctacctaacgtcccacatccttctcatgccaacacttctgtaattgatcattataaagaaaaaacaaggtaacagtcatagttcacctgtctcttatctattcacttctggtgccacaactgtttatccttttttgaagaaaataagggaacagaaatgcctttttgtattgcaatcgaaatgaaagaagagttgatgttaaaaaaacaaaagtcaagtgatttattatatacagtgggcgttcaagtctagtcgagcaagctcaggagaatgtaattaaataattttatattttttaatttattttgtatctcacctgtcatggatgaattcattcactgaatatgtaatattgaactt

SEQ ID NO: 311035 - DNA, 4740 bp, Artificial Sequence
  derived and/or modified sequence
atgtatgtgcgagtatcttttgatacaaaacctgatctcctcttacacctgatgaccaaggaatggcagttggagcttcccaagcttctcatctctgtccatgggggcctgcagaactttgaactccagccaaaactcaagcaagtctttgggaaagggctcatcaaagcagcaatgacaactggagcgtggatattcactggaggggttaacacaggtgttattcgtcatgttggcgatgccttgaaggatcatgcctctaagtctcgaggaaagatatgcaccataggtattgccccctggggaattgtggaaaaccaggaggacctcattggaagagatgttgtccggccataccagaccatgtccaatcccatgagcaagctcactgttctcaacagcatgcattcccacttcattctggctgacaacgggaccactggaaaatatggagcagaggtgaaacttcgaagacaactggaaaagcatatttcactccagaagataaacacaagatgcctgccgtttttctctcttgactcccgcttgttttattcattttggggtagttgccagttagactcagttggaatcggtcaaggtgttcctgtggtggcactcatagtggaaggaggacccaatgtgatctcgattgttttggagtaccttcgagacacccctcccgtgccagtggttgtctgtgatgggagtggacgggcatcggacatcctggcctttgggcataaatactcagaagaaggcggactgataaatgaatctttgagggaccagctgttggtgactatacagaagactttcacatacactcgaacccaagctcagcatctgttcatcatcctcatggagtgcatgaagaagaaggaattgattacggtatttcggatgggatcagaaggacaccaggacattgatttggctatcctgacagctttactcaaaggagccaatgcctcggccccagaccaactgagcttagctttagcctggaacagagtcgacatcgctcgcagccagatctttatttacgggcaacagtggccggtgggatctctggagcaagccatgttggatgccttagttctggacagagtggattttgtgaaattactcatagagaatggagtaagcatgcaccgttttctcaccatctccagactagaggaattgtacaatacgagacatgggccctcaaatacattgtaccacttggtcagggatgtcaaaaaggggaacctgcccccagactacagaatcagcctgattgacatcggcctggtgatcgagtacctgatgggcggggcttatcgctgcaactacacgcgcaagcgcttccggaccctctaccacaacctcttcggccccaagaggcccaaagccttgaaactgctgggaatggaggatgatattcccttgaggcgaggaagaaagacaaccaagaaacgtgaagaagaggtggacattgacttggatgatcctgagatcaaccacttccccttccctttccatgagctcatggtgtgggctgttctcatgaagcggcagaagatggccctgttcttctggcagcacggtgaggaggccatggccaaggccctggtggcctgcaagctctgcaaagccatggctcatgaggcctctgagaacgacatggttgacgacatttcccaggagctgaatcacaattccagagactttggccagctggctgtggagctcctggaccagtcctacaagcaggacgaacagctggccatgaaactgctgacgtatgagctgaagaactggagcaacgccacgtgcctgcagcttgccgtggctgccaaacaccgcgacttcatcgcgcacacgtgcagccagatgctgctcaccgacatgtggatgggccggctccgcatgcgcaagaactcaggcctcaaggtaattctgggaattctacttcctccttcaattctcagcttggagttcaagaacaaagacgacatgccctatatgtctcaggcccaggaaatccacctccaagagaaggaggcagaagaaccagagaagcccacaaaggaaaaagaggaagaggacatggagctcacagcaatgttgggacgaaacaacggggagtcctccaggaagaaggatgaagaggaagttcagagcaagcaccggttaatccccctcggcagaaaaatctatgaattctacaatgcacccatcgtgaagttctggttctacacactggcgtatatcggatacctgatgctcttcaactatatcgtgttagtgaagatggaacgctggccgtccacccaggaatggatcgtaatctcctatattttcaccctgggaatagaaaagatgagagagattctgatgtcagagccagggaagttgctacagaaagtgaaggtatggctgcaggagtactggaatgtcacggacctcatcgccatccttctgttttctgtcggaatgatccttcgtctccaagaccagcccttcaggagtgacgggagggtcatctactgcgtgaacatcatttactggtatatccgtctcctagacatcttcggcgtgaacaagtatttgggcccgtatgtaatgatgattggaaaaatgatgatagacatgatgtactttgtcatcattatgctggtggttctgatgagctttggggtcgccaggcaagccatcctttttcccaatgaggagccatcatggaaactggccaagaacatcttctacatgccctattggatgatttatggggaagtgtttgcggaccagatagaccctccctgtggacagaatgagacccgagaggatggtaaaataatccagctgcctccctgcaagacaggagcttggatcgtgccggccatcatggcctgctacctcttagtggcaaacatcttgctggtcaacctcctcattgctgtctttaacaatacattttttgaagtaaaatcgatatccaaccaagtctggaagtttcagaggtatcagctcatcatgactttccatgaaaggccagttctgcccccaccactgatcatcttcagccacatgaccatgatattccagcacctgtgctgccgatggaggaaacacgagagcgacccggatgaaagggactacggcctgaaactcttcataaccgatgatgagctcaagaaagtacatgactttgaagagcaatgcatagaagaatacttcagagaaaaggatgatcggttcaactcatctaatgatgagaggatacgggtgacttcagaaagggtggagaacatgtctatgcggctggaggaagtcaacgagagagagcactccatgaaggcttcactccagaccgtggacatccggctggcgcagctggaagaccttatcgggcgcatggccacggccctggagcgcctgacaggtctggagcgggccgagtccaacaaaatccgctcgaggacctcgtcagactgcacggacgccgcctacattgtccgtcagagcagcttcaacagccaggaagggaacaccttcaagctccaagagagtatagaccctgcaggtgaggagaccatgtccccaacttctccaaccttaatgccccgtatgcgaagccattctttctattcggtcaatatgaaagacaaaggtggtatagaaaagttggaaagtatttttaaagaaaggtccctgagcctacaccgggctactagttcccactctgtagcaaaagaacccaaagctcctgcagcccctgccaacaccttggccattgttcctgattccagaagaccatcatcgtgtatagacatctatgtctctgctatggatgagctccactgtgatatagaccctctggacaattccgtgaacatccttgggctgggcgagccaagcttttcaactccagtaccttccacagccccttcaagtagtgcctatgcaacacttgcacccacagacagacctccaagccggagcattgattttgaggacatcacctccatggacactagatctttttcttcagactacacccacctcccagaatgccaaaacccctgggactcagagcctccgatgtaccacaccattgagcgttccaaaagtagccgctacctagccaccacaccctttcttctagaagaggctcccattgtgaaatctcatagctttatgttttccccctcaaggagctattatgccaactttggggtgcctgtaaaaacagcagaatacacaagtattacagactgtattgacacaaggtgtgtcaatgcccctcaagcaattgcggacagagctgccttccctggaggtcttggagacaaagtggaggacttaacttgctgccatccagagcgagaagcagaactgagtcaccccagctctgacagtgaggagaatgaggccaaaggccgcagagccaccattgcaatatcctcccaggagggtgataactcagagagaaccctgtccaacaacatcactgttcccaagatagagcgcgccaacagctactcggcagaggagccaagtgcgccatatgcacacaccaggaagagcttctccatcagtgacaaactcgacaggcagcggaacacagcaagcctgcgaaatcccttccagagaagcaagtcctccaagccggagggccgaggggacagcctgtccatgaggagactgtccagaacatcggctttccaaagctttgaaagcaagcacaactaa

SEQ ID NO: 311036 - DNA, 4710 bp, Artificial Sequence
  derived and/or modified sequence
atgtacgtgagagtgagcttcgacaccaagcccgacctgctgctgcacctgatgaccaaggagtggcagctggagctgcccaagctgctgatcagcgtgcacggcggcctgcagaacttcgagctgcagcccaagctgaagcaggtgttcggcaagggcctgatcaaggccgccatgaccaccggcgcctggatcttcaccggcggcgtgaacaccggcgtgatcagacacgtgggcgacgccctgaaggaccacgccagcaagagcagaggcaagatctgcaccatcggcatcgccccctggggcatcgtggagaaccaggaggacctgatcggcagagacgtggtgagaccctaccagaccatgagcaaccccatgagcaagctgaccgtgctgaacagcatgcacagccacttcatcctggccgacaacggcaccaccggcaagtacggcgccgaggtgaagctgagaagacagctggagaagcacatcagcctgcagaagatcaacaccagatgcctgcccttcttcagcctggacagcagactgttctacagcttctggggcagctgccagctggacagcgtgggcatcggccagggcgtgcccgtggtggccctgatcgtggagggcggccccaacgtgatcagcatcgtgctggagtacctgagagacaccccccccgtgcccgtggtggtgtgcgacggcagcggcagagccagcgacatcctggccttcggccacaagtacagcgaggagggcggcctgatcaacgagagcctgagagaccagctgctggtgaccatccagaagaccttcacctacaccagaacccaggcccagcacctgttcatcatcctgatggagtgcatgaagaagaaggagctgatcaccgtgttcagaatgggcagcgagggccaccaggacatcgacctggccatcctgaccgccctgctgaagggcgccaacgccagcgcccccgaccagctgagcctggccctggcctggaacagagtggacatcgccagaagccagatcttcatctacggccagcagtggcccgtgggcagcctggagcaggccatgctggacgccctggtgctggacagagtggacttcgtgaagctgctgatcgagaacggcgtgagcatgcacagattcctgaccatcagcagactggaggagctgtacaacaccagacacggccccagcaacaccctgtaccacctggtgagagacgtgaagaagggcaacctgccccccgactacagaatcagcctgatcgacatcggcctggtgatcgagtacctgatgggcggcgcctacagatgcaactacaccagaaagagattcagaaccctgtaccacaacctgttcggccccaagagagacgacatccccctgagaagaggcagaaagaccaccaagaagagagaggaggaggtggacatcgacctggacgaccccgagatcaaccacttccccttccccttccacgagctgatggtgtgggccgtgctgatgaagagacagaagatggccctgttcttctggcagcacggcgaggaggccatggccaaggccctggtggcctgcaagctgtgcaaggccatggcccacgaggccagcgagaacgacatggtggacgacatcagccaggagctgaaccacaacagcagagacttcggccagctggccgtggagctgctggaccagagctacaagcaggacgagcagctggccatgaagctgctgacctacgagctgaagaactggagcaacgccacctgcctgcagctggccgtggccgccaagcacagagacttcatcgcccacacctgcagccagatgctgctgaccgacatgtggatgggcagactgagaatgagaaagaacagcggcctgaaggtgatcctgggcatcctgctgccccccagcatcctgagcctggagttcaagaacaaggacgacatgccctacatgagccaggcccaggagatccacctgcaggagaaggaggccgaggagcccgagaagcccaccaaggagaaggaggaggaggacatggagctgaccgccatgctgggcagaaacaacggcgagagcagcagaaagaaggacgaggaggaggtgcagagcaagcacagactgatccccctgggcagaaagatctacgagttctacaacgcccccatcgtgaagttctggttctacaccctggcctacatcggctacctgatgctgttcaactacatcgtgctggtgaagatggagagatggcccagcacccaggagtggatcgtgatcagctacatcttcaccctgggcatcgagaagatgagagagatcctgatgagcgagcccggcaagctgctgcagaaggtgaaggtgtggctgcaggagtactggaacgtgaccgacctgatcgccatcctgctgttcagcgtgggcatgatcctgagactgcaggaccagcccttcagaagcgacggcagagtgatctactgcgtgaacatcatctactggtacatcagactgctggacatcttcggcgtgaacaagtacctgggcccctacgtgatgatgatcggcaagatgatgatcgacatgatgtacttcgtgatcatcatgctggtggtgctgatgagcttcggcgtggccagacaggccatcctgttccccaacgaggagcccagctggaagctggccaagaacatcttctacatgccctactggatgatctacggcgaggtgttcgccgaccagatcgaccccccctgcggccagaacgagaccagagaggacggcaagatcatccagctgcccccctgcaagaccggcgcctggatcgtgcccgccatcatggcctgctacctgctggtggccaacatcctgctggtgaacctgctgatcgccgtgttcaacaacaccttcttcgaggtgaagagcatcagcaaccaggtgtggaagttccagagataccagctgatcatgaccttccacgagagacccgtgctgcccccccccctgatcatcttcagccacatgaccatgatcttccagcacctgtgctgcagatggagaaagcacgagagcgaccccgacgagagagactacggcctgaagctgttcatcaccgacgacgagctgaagaaggtgcacgacttcgaggagcagtgcatcgaggagtacttcagagagaaggacgacagattcaacagcagcaacgacgagagaatcagagtgaccagcgagagagtggagaacatgagcatgagactggaggaggtgaacgagagagagcacagcatgaaggccagcctgcagaccgtggacatcagactggcccagctggaggacctgatcggcagaatggccaccgccctggagagactgaccggcctggagagagccgagagcaacaagatcagaagcagaaccagcagcgactgcaccgacgccgcctacatcgtgagacagagcagcttcaacagccaggagggcaacaccttcaagctgcaggagagcatcgaccccgccggcgaggagaccatgagccccaccagccccaccctgatgcccagaatgagaagccacagcttctacagcgtgaacatgaaggacaagggcggcatcgagaagctggagagcatcttcaaggagagaagcctgagcctgcacagagccaccagcagccacagcgtggccaaggagcccaaggcccccgccgcccccgccaacaccctggccatcgtgcccgacagcagaagacccagcagctgcatcgacatctacgtgagcgccatggacgagctgcactgcgacatcgaccccctggacaacagcgtgaacatcctgggcctgggcgagcccagcttcagcacccccgtgcccagcaccgcccccagcagcagcgcctacgccaccctggcccccaccgacagaccccccagcagaagcatcgacttcgaggacatcaccagcatggacaccagaagcttcagcagcgactacacccacctgcccgagtgccagaacccctgggacagcgagccccccatgtaccacaccatcgagagaagcaagagcagcagatacctggccaccacccccttcctgctggaggaggcccccatcgtgaagagccacagcttcatgttcagccccagcagaagctactacgccaacttcggcgtgcccgtgaagaccgccgagtacaccagcatcaccgactgcatcgacaccagatgcgtgaacgccccccaggccatcgccgacagagccgccttccccggcggcctgggcgacaaggtggaggacctgacctgctgccaccccgagagagaggccgagctgagccaccccagcagcgacagcgaggagaacgaggccaagggcagaagagccaccatcgccatcagcagccaggagggcgacaacagcgagagaaccctgagcaacaacatcaccgtgcccaagatcgagagagccaacagctacagcgccgaggagcccagcgccccctacgcccacaccagaaagagcttcagcatcagcgacaagctggacagacagagaaacaccgccagcctgagaaaccccttccagagaagcaagagcagcaagcccgagggcagaggcgacagcctgagcatgagaagactgagcagaaccagcgccttccagagcttcgagagcaagcacaactag

SEQ ID NO: 311037 - DNA, 4710 bp, Artificial Sequence
  derived and/or modified sequence
atgtatgttcgcgtgtccttcgacacgaaacccgacttgctgctgcaccttatgaccaaagagtggcagctggagctgcctaagcttctgatatctgtgcacggcggattgcagaattttgagctgcagcctaagctgaagcaggtcttcggaaagggcttgatcaaggcagccatgactaccggtgcctggatctttaccgggggggtcaacactggagttatccgccacgtcggcgatgctctgaaggaccacgctagcaaaagtagaggaaaaatctgcactatcggaatcgctccatgggggattgttgaaaaccaggaggatctgatcggtcgagatgtcgtcaggccttaccaaaccatgagtaatccaatgtccaaactgacagtgctcaattctatgcatagccatttcatccttgctgataatggaacaaccggaaaatacggcgcagaggtaaagctccggagacagctggagaaacacatcagcctgcagaagataaacaccagatgtcttcctttcttcagtctcgactcaagactcttctactctttctggggcagctgtcagctggacagcgtaggcatcggccagggagtgccagtggtcgccttgatcgtggaaggaggacctaacgtgatctccattgtgctcgagtatttgcgagataccccacccgtgcccgtcgttgtctgcgatggctccggtagagcgtctgacatcctggcttttggccataaatatagcgaggaagggggactgatcaatgagagcctgagagatcaactgttggtgactattcagaaaactttcacctatacgcggactcaggcccagcatttgtttattattctgatggaatgtatgaagaaaaaggaactgatcaccgtgtttaggatgggatctgaaggacaccaggatatcgacttagccattttaactgcattgctgaaaggggctaacgccagtgcgccggaccaactctcccttgccctcgcctggaacagggtggacattgctcgcagtcagattttcatatatggtcagcagtggcccgtcggctctctcgaacaggctatgctggacgcattggtgctggaccgggtggactttgtgaagctgctgatcgaaaatggcgtatctatgcacaggttcttgacgattagcaggctggaagagctgtataatacaagacacggacccagtaacactctttaccatctggtgagagatgtgaaaaaagggaatctccctccggattaccgcatatcattgattgatattggccttgttatcgaatacctgatggggggcgcctaccggtgtaactatacaagaaaacgttttagaacactataccacaatctcttcggacccaaacgcgatgatatcccactgagacgaggtcgcaagacaacaaaaaaaagagaggaagaggtggacattgaccttgacgacccagaaatcaaccactttccttttccgtttcacgagcttatggtctgggctgtattgatgaagaggcagaagatggcacttttcttctggcagcatggcgaagaggctatggcgaaggcccttgtggcctgtaagctgtgcaaagctatggctcatgaggccagcgagaacgatatggtggatgatatctctcaggaattaaaccacaattccagggactttggccagctggccgtcgaactgctggaccaatcttataagcaggatgagcaattggccatgaagctcctcacgtatgagctcaaaaattggtccaatgcaacctgtctgcagctcgctgttgcggccaaacatcgggactttattgctcatacatgctctcaaatgcttctcaccgatatgtggatgggcaggctgaggatgcgcaagaactcagggctgaaggtaatcctcggaatcctgctgcctccctccattctcagtctcgaattcaaaaacaaggacgacatgccatacatgtcacaagcccaagaaatacacctgcaagagaaggaagccgaagaaccagaaaaacccaccaaggagaaggaggaagaagatatggagctgaccgcgatgctcggtcggaataatggtgaaagctccaggaaaaaggatgaggaggaagtccaatcgaagcacagattgatccctttgggaagaaagatctacgagttctacaatgccccgatagtcaagttctggttctacaccctcgcatacattggttaccttatgttgtttaactacattgtgctggttaagatggagcggtggcctagcacccaggaatggatcgtgatatcatacatctttactctggggattgagaagatgcgggagatcttaatgtctgagccaggcaagctccttcaaaaggtcaaggtgtggctacaggagtactggaacgttactgacctaatcgccattctcctcttttccgtagggatgattctccggcttcaagatcagcctttccgatccgacggcagggtgatttattgtgtgaatataatttattggtacatcaggctgttggatatcttcggagtgaacaagtatttagggccatacgtgatgatgatcggaaagatgatgatcgatatgatgtactttgtgatcatcatgctcgttgtgctgatgtcttttggggtcgcgaggcaggcgattctgttccccaacgaggagccgagctggaagctcgccaaaaatatcttctacatgccatattggatgatttacggggaggtgttcgccgaccagattgacccaccatgtggccagaacgaaaccagggaggacgggaagatcattcagctgcctccctgcaagactggagcgtggattgtgcctgccatcatggcttgctatctgctcgtcgccaatatccttctggtgaacctgctgattgccgtgttcaataatacattttttgaagttaagagcatctccaatcaggtgtggaaatttcagagatatcaactcatcatgacatttcacgagagacctgtgcttccccctccgcttattatttttagccatatgaccatgatattccagcacctgtgctgtcgctggcgcaagcatgagtccgaccccgacgagcgcgattacggactgaagctttttatcacggacgacgaactgaaaaaagtgcacgacttcgaggagcaatgcatagaagagtactttcgagaaaaggacgatcggtttaattcctctaatgacgaacggatcagagttactagcgagcgggtggagaatatgagtatgcgcctggaggaggtcaacgagcgcgagcactcaatgaaagcaagcctgcagacggtggacattcgcttggcacagctggaagacctgatcggccgaatggcaacagcacttgagcgcctaactgggttggaaagagccgagtcgaataagatcaggtcgcgtacttcctctgattgcacagatgcagcctatatagtgaggcaaagttccttcaatagccaggagggaaacactttcaagctccaggaaagcattgatcccgccggggaggaaactatgtcaccgacctcccccactctaatgccacgcatgcgatcgcattccttctatagcgtgaacatgaaggataagggtggaattgagaagttggagagcattttcaaagagcggtcgctgtccctgcaccgggcaactagctcccacagcgtggcgaaggagcccaaggcccctgcagctcctgcaaatacacttgcgattgtcccagacagccgcaggccttcctcctgtatagatatctacgtgtccgcaatggacgagctccactgtgacatcgatccactggataattcagtgaacatcctgggcctgggtgagccgagcttctcaactcccgtcccttctaccgccccaagctcttccgcttacgccactctggctccgaccgatcgtccccccagccgatcaatagacttcgaggatataacttccatggacaccaggtccttttctagcgattacactcaccttcctgaatgtcagaacccctgggattcagaaccaccaatgtatcacactatagaacgctctaaaagctcccgctatttagctacaacccctttcttactcgaagaagctcccattgtaaagtctcattccttcatgttctcccccagtaggagctactacgcaaacttcggagtgcctgtgaaaactgccgagtacaccagcattactgactgcattgacacccgctgcgtaaatgcgccacaggctatcgcggaccgtgctgccttccctggtggcctcggggacaaggtggaagacctgacttgttgccatccagaacgggaggccgaactctcacacccttcttccgatagcgaagaaaatgaagcaaagggaagaagagccactatcgcaatctccagccaggagggcgacaattcggagcgaacgctgtcgaataatataactgtccccaaaatcgagcgtgcgaactcctattctgctgaggaaccatcagctccgtacgctcatactcggaagtcattcagcatcagcgacaaactcgaccgccaaagaaatacagcatccctgcggaatcccttccagcggtctaaaagctcaaagcccgaaggaaggggggatagtctctccatgcggagactgtctcgaacttccgctttccagagtttcgaatccaaacataactag

SEQ ID NO: 311038 - DNA, 4710 bp, Artificial Sequence
  derived and/or modified sequence
atgtacgtccgagtgagcttcgacacgaagcccgatctgctgcttcaccttatgaccaaagagtggcaacttgagctgcccaagctgcttatttctgttcatggcggacttcaaaactttgagctgcagccaaagctgaaacaggtctttgggaaggggctgataaaggctgccatgacaaccggggcctggatattcactggtggggtaaacacgggagttattcgacacgtgggagacgccctgaaagatcatgctagtaaatctagaggtaagatctgtacgatcggaatcgctccatgggggatagtggagaatcaagaagatttaatcgggcgagacgtcgttcggccctatcaaactatgagcaatcccatgtcaaagctgaccgtgctgaattcaatgcacagccattttatcttggctgataacggaaccactggtaaatacggcgctgaagtcaagctgcgtcgacagctagagaaacacatttcactccagaaaataaatactcgctgtctgccgttcttttctctcgacagtcgtctgttttactctttctggggaagctgccagctggatagcgtcggaatcggccagggagtacctgtggtcgccttgatcgtagaaggcggccctaatgtcatttcgattgtgctagagtacctaagagacacaccaccagtgccagttgtcgtctgcgacggttcaggtcgggcgtctgacatattggctttcggacacaaatactctgaggagggcggcttgatcaacgaatcgttacgtgaccagctgctggttacaatccagaagacctttacttacaccaggactcaggcacagcatctgtttattattctgatggagtgtatgaagaagaaggagcttattactgtctttcgcatgggcagtgaggggcatcaggacatagacctggccattctcacagctttgttgaagggagccaacgcttccgctccggaccagctttccttggcattggcatggaaccgcgtggatattgcccgctcccagatttttatttacggccagcaatggcccgttggaagcctagaacaagcaatgctcgacgctttagtgcttgaccgagttgatttcgtcaagctcctgatcgagaacggagtttctatgcataggttcctcaccatctcgcgcctcgaggagctttacaacactcgccacggtccgtctaatacactataccacctggtgagagatgtcaagaaagggaatctccctccagactatagaatatcactgattgatatagggctggtgatcgaatatctgatggggggggcataccgctgtaactatactaggaagcgatttcgcaccctataccacaatctctttggtcctaaaagagacgatatcccgctgcgtcgcggaaggaagacaacaaagaaaagagaagaagaggtcgacatcgatctcgacgaccctgagattaaccacttccccttcccattccacgaactgatggtttgggccgtgctgatgaaacgccagaaaatggctctgtttttctggcagcatggagaggaggccatggccaaggcattggtcgcatgtaagctctgcaaggctatggcccacgaagccagtgagaatgatatggtcgacgatatctcccaggaactgaaccacaactctcgggacttcggacaacttgctgtggagctactggaccagtcctataagcaggacgagcaactggccatgaagctgctgacctacgaactgaagaactggagcaacgcgacctgcctccagctggccgttgccgctaagcatcgcgatttcatcgctcacacttgtagccaaatgctcttgacagatatgtggatgggccgactaaggatgcgaaaaaactcgggcctgaaggtcatattaggcatcctgctccctccgagtatcctgtctctggaattcaaaaataaagatgatatgccctacatgtcccaagcccaggagattcacttgcaggaaaaggaggctgaagagccagagaagccgaccaaggaaaaggaggaggaggatatggaattaactgcgatgcttggaagaaacaatggggaaagctcacgcaaaaaggacgaagaggaagttcagtctaaacatagactgattccgcttggccggaaaatctacgagttctataatgcccctattgttaagttctggttctacactctggcctacatcgggtatctgatgctttttaactatattgtgcttgtgaaaatggagagatggccatccacacaggagtggatcgtgatatcctatattttcacccttggaatcgagaaaatgcgcgagattttaatgtccgagccaggcaagctcttgcagaaagtcaaggtgtggctccaggaatattggaatgtgactgatttaattgccatcctgctgttctctgtaggcatgatactcagactgcaggatcaaccttttcgttccgatgggagagtaatctattgcgtgaatatcatctactggtatattaggctcctggacattttcggagtcaataagtacctgggtccctacgtcatgatgattgggaagatgatgatcgacatgatgtatttcgttatcatcatgttggtagtgctgatgtccttcggagtcgcccgacaagccatccttttccctaacgaggagcctagctggaaattggcaaagaatatcttctatatgccttattggatgatctacggcgaagtgtttgcggatcagatagaccctccttgtggacagaacgagactcgagaagatgggaagattatacagctgcccccctgcaagacgggcgcctggatagtaccagccatcatggcctgttacctgctcgtggccaatatactgctcgtaaatcttctgatagccgtttttaacaacaccttcttcgaagttaagagtatctcgaatcaggtttggaaattccagcgttaccagctgataatgaccttccatgagcgccccgttttgccccctcccttaattattttttctcacatgaccatgatcttccaacatctgtgttgcagatggcgtaagcacgaatctgatccggacgaacgagactacggactaaagctgttcattaccgatgacgagctgaaaaaggtgcacgatttcgaggagcagtgtatcgaggagtacttcagggaaaaagatgatcggtttaactcaagcaacgacgagaggatacgcgttacgtcggaaagggtagaaaacatgagtatgcggctggaggaggtgaatgaaagggagcacagtatgaaggcctccctccaaactgttgacattcgactcgctcagctggaggatctcatcggtagaatggcaacagccctcgaacgccttactgggctcgagagggctgaatcaaacaagattaggtccagaacgagcagcgattgcaccgatgccgcatatatcgttaggcaaagctcattcaacagccaggagggcaataccttcaaactgcaggaaagtattgaccccgcaggcgaagaaacgatgagcccgacttcccctactctaatgccgaggatgagatcacacagcttctacagcgttaacatgaaagacaaaggtgggatcgagaaactggagagtatcttcaaagagaggtcactgtctctgcatagggctactagctcgcactctgttgcaaaggagccgaaagcccccgctgcgccggcaaacactctcgcaattgtgcctgattcacggagaccttcgtcttgcatcgatatatatgtgtctgcgatggacgagctccattgcgacattgatccactggataactccgtcaacatcctgggactcggggaaccgagcttctcgacccctgtgcctagtactgccccctccagcagcgcatatgccaccctggcgcctaccgatagacctccatctaggagcatagactttgaggatatcacatccatggataccagatctttctcttctgactacacccatctccccgagtgccaaaacccctgggattctgaacccccaatgtatcacactatcgaacgaagtaaatcgagccgttacctcgccactaccccctttcttcttgaagaggctccgattgtgaagtctcatagctttatgttttctccgagtaggtcatattatgctaactttggggtgcccgtaaagactgccgagtacacgagcattacagattgcattgacactagatgtgtgaacgcaccccaggcaattgccgaccgtgccgccttcccgggagggctgggagataaagtcgaggatttgacctgctgccatcccgagagagaagcagagctgtcacatccatcatctgactccgaggaaaatgaggccaaggggagacgcgcgacgattgcgatatcctcacaggagggagacaacagcgagagaacactgtctaataatattacggtgcctaagatagaacgggccaacagctattccgccgaggagccatcagctccatacgctcacactaggaagtccttcagtatttccgataagctggatcggcaaagaaatactgctagcctgaggaatccttttcagaggtctaagagtagcaagcctgaagggaggggggactctctatcaatgcggcgcctttcgaggacatctgcattccagagctttgaatccaaacacaactag

SEQ ID NO: 311039 - DNA, 4710 bp, Artificial Sequence
  derived and/or modified sequence
atgtatgtgcgggtgtcctttgacaccaagccagacctgctgctgcacctgatgaccaaggagtggcagctggagctgcccaagctgctgatctctgtgcacggcggcctgcagaactttgagctgcagcccaagctgaagcaggtgtttgggaagggcctcatcaaggccgccatgaccactggagcctggatcttcaccggaggagtgaacacaggagtcatcagacatgtgggagatgccctgaaggaccacgccagcaagagccggggcaagatctgcaccatcggcatcgccccctggggcatcgtggagaaccaggaggacctgattggaagagatgtggtgcggccctaccagaccatgagcaaccccatgagcaagctgactgtgctgaacagcatgcacagccacttcatcctggccgacaatggcaccaccgggaagtacggggctgaggtgaagctgcggcggcagctggagaagcacatcagcctgcagaagatcaacacccgctgcctgcccttcttcagcctggacagccgcctcttctacagcttctggggcagctgccagctggacagcgtgggcatcggccagggcgtgcctgtggtggccctgattgtggagggcggccccaacgtcatcagcatcgtgctggagtacctgcgggacaccccacctgtgcctgtggtggtgtgtgatggcagcggccgggccagtgacatcctggccttcggccacaagtacagcgaggagggcggcctcatcaatgaaagcctgcgggaccagctgctggtgaccatccagaagaccttcacctacaccaggacccaggcccagcacctgttcatcatcctgatggagtgcatgaagaagaaggagctgatcaccgtcttcaggatgggcagcgagggccaccaggacatcgacctggccatcctgacagccctgctgaagggggccaatgccagcgccccagaccagctgagcctggccctggcctggaacagagtggacatcgcccggagccagatcttcatctacggccagcagtggcctgtgggcagcctggagcaggccatgctggatgccctggtgctggacagagtggactttgtgaagctgctgattgaaaatggagtgtccatgcaccgcttcctgaccatcagccggctggaggagctgtacaacaccaggcatggccccagcaacaccctgtaccacctggtgagagatgtgaagaagggcaacctgcccccagactaccgcatcagcctgattgacatcggcctggtgattgagtacctgatgggcggggcctaccgctgcaactacaccaggaagcgcttccgcaccctgtaccacaacctgtttggccccaagagagatgacatccccctgcggcggggcaggaagaccaccaagaagcgggaggaggaggtggacatcgacctggatgatcctgagatcaaccacttccccttccccttccacgagctgatggtgtgggccgtgctgatgaagaggcagaagatggccctcttcttctggcagcacggggaggaggccatggccaaggccctggtggcctgcaagctgtgcaaggccatggcccacgaggcctctgaaaatgacatggtggatgacatcagccaggagctgaaccacaacagccgggactttggccagctggccgtggagctgctggaccagagctacaagcaggatgagcagctggccatgaagctgctgacctatgagctgaagaactggagcaatgccacctgcctgcagctggccgtggccgccaagcaccgggacttcatcgcccacacctgcagccagatgctgctgacagacatgtggatgggccgcctgaggatgaggaagaacagcggcctgaaggtgatcctgggcatcctgctgccccccagcatcctgagcctggagttcaagaacaaggatgacatgccctacatgagccaggcccaggagatccacctgcaggagaaggaggccgaggagcctgagaagcccaccaaggagaaggaggaggaggacatggagctgacagccatgctgggcagaaataatggagagagcagcaggaagaaggatgaggaggaggtgcagagcaagcacaggctcatccccctgggcaggaagatctatgagttctacaatgcccccatcgtgaagttctggttctacaccctggcctacatcggctacctgatgctgttcaactacatcgtgctggtgaagatggagcgctggcccagcacccaggagtggatcgtcatctcctacatcttcaccctgggcatcgagaagatgagggagatcctgatgtctgagcccgggaagctgctgcagaaggtgaaggtgtggctgcaggagtactggaatgtgacagacctgattgccatcctgctcttctctgtgggcatgatcctgcggctgcaggaccagcccttcagaagtgatggccgggtcatctactgtgtgaacatcatctactggtacatccggctgctggacatcttcggcgtgaacaagtacctgggcccctacgtgatgatgattggcaagatgatgattgacatgatgtactttgtgatcatcatgctggtggtgctgatgagctttggagtggcccggcaggccatcctcttccccaatgaggagcccagctggaagctggccaagaacatcttctacatgccctactggatgatctatggagaggtgtttgctgaccagattgatcctccctgtggccagaatgagacccgggaggatggcaagatcatccagctgcccccctgcaagacaggagcctggatcgtgcctgccatcatggcctgctacctgctggtggccaacatcctgctggtgaacctgctgattgctgtgttcaacaacaccttctttgaggtgaagagcatcagcaaccaggtgtggaagttccagcgctaccagctgatcatgaccttccacgagaggcctgtgctgcccccacccctcatcatcttcagccacatgaccatgatcttccagcacctgtgctgccgctggaggaagcatgaaagtgaccctgatgagcgggactatggcctgaagctgttcatcacagatgatgagctgaagaaggtgcatgactttgaggagcagtgcatcgaggagtacttccgggagaaggatgaccgcttcaacagcagcaatgatgagcgcatccgggtgaccagcgagcgggtggagaacatgtccatgaggctggaggaggtgaatgaaagagagcacagcatgaaggccagcctgcagacagtggacatccggctggcccagctggaggacctgattggccgcatggccacagccctggagcggctgaccggcctggagcgggcagagagcaacaagatccgcagcaggaccagcagtgactgcacagatgctgcctacatcgtgcggcagagcagcttcaacagccaggagggcaacaccttcaagctgcaggagagcattgatcctgctggggaggagaccatgagccccaccagccccaccctgatgcccaggatgaggagccacagcttctacagcgtgaacatgaaggacaagggcggcatcgagaagctggagagcatcttcaaggagaggagcctgagcctgcaccgggccaccagcagccacagcgtggccaaggagcccaaggccccagctgccccagccaacaccctggccatcgtgcctgacagccggcggcccagcagctgcatcgacatctacgtgtctgccatggatgagctgcactgtgacatcgaccccctggacaacagcgtgaacatcctgggcctgggggagcccagcttcagcacccctgtgcccagcacagcccccagcagcagcgcctatgccaccctggcccccacagaccggccccccagccgcagcattgactttgaggacatcacctccatggacaccaggagcttcagcagtgactacacccacctgcctgagtgccagaacccctgggacagcgagccccccatgtaccacaccatcgagaggagcaagagcagccgctacctggccaccacccccttcctgctggaggaggcccccatcgtgaagagccacagcttcatgttcagccccagccgcagctactatgccaactttggagtgcctgtgaagacagctgagtacaccagcatcacagactgcatcgacacccgctgtgtgaatgccccccaggccatcgctgaccgggccgccttccctgggggcctgggggacaaggtggaggacctgacctgctgccaccctgagcgggaggccgagctgagccaccccagcagtgacagtgaagaaaatgaggccaagggcagaagagccaccatcgccatcagcagccaggagggggacaacagcgagaggaccctgagcaacaacatcaccgtgcccaagattgaaagagccaacagctacagcgctgaggagcccagcgccccctatgcccacaccaggaagagcttcagcatcagtgacaagctggaccggcagaggaacacagccagcctgaggaaccccttccagaggagcaagagcagcaagccagagggccgcggggacagcctgtccatgaggcggctgagcaggaccagcgccttccagagctttgagagcaagcacaactag

SEQ ID NO: 311040 - DNA, 4710 bp, Artificial Sequence
  derived and/or modified sequence
atgtacgtgcgggtgagcttcgacaccaagcccgacctgctgctgcacctcatgacaaaggagtggcagctggagcttccgaagctcctgatctccgtccatggcgggctccagaattttgagctacagcctaagctgaaacaggtatttggaaaggggctaataaaggccgctatgacaactggcgcctggattttcacaggaggcgtcaacacaggagtcatcagacatgtcggagacgccttaaaagatcacgctagtaagagtcgagggaagatttgcactataggcattgctccgtggggcatcgttgagaatcaggaggacctgataggccgcgatgtggttcggccgtaccagactatgtcaaatcccatgtctaaactgacggtgcttaacagcatgcactcacattttatccttgcagacaatggcacaaccggtaaatacggtgccgaggtgaagctccgccgtcaactggaaaagcatatctcactgcagaagataaataccagatgccttccattcttcagcctggactccaggctgttttacagcttctgggggtcttgtcagctggactctgtcggcatcgggcaaggcgtgcctgtggtggccctgatagtagagggcggacccaatgtaatatcaatcgtattggaatatctccgggatacaccaccggttcccgtcgtagtttgtgacgggagcggtagagctagtgatatcttggcattcggccataagtactcagaagagggaggtctgattaatgagtccctgcgagaccagctcttggtgactatccaaaagacttttacctatactcgcacacaggcccaacatctgttcattattctgatggagtgtatgaaaaaaaaggaactgattacagtctttaggatgggcagtgaagggcaccaagatattgacctagccatcctgactgctttattgaaaggagcaaacgcaagtgccccagaccaactgtctcttgccttggcctggaatcgggttgatatcgccagatctcagatctttatttacggccaacagtggccagtaggatccctggaacaggctatgttagatgcattggtgctggatagagtagatttcgtaaagttgcttatagagaatggcgtatctatgcaccgcttcttgactatcagccgtttggaggaactgtacaacacccggcatggtcccagtaacacactctaccatttggtgcgcgacgttaagaaaggaaacctgcccccagactaccgcatctccttgatcgatatcggcttagtgattgaatacttgatgggaggcgcatatagatgtaactatactcggaagagattcaggactttgtaccacaacctgttcggcccaaaacgggatgacattcctctccggcgaggccggaagactactaagaagcgggaggaggaagtggatattgatttggatgaccctgagattaatcattttcctttcccattccacgaactcatggtttgggcagtactgatgaagcgccagaaaatggctttgttcttttggcaacacggagaggaggccatggcaaaggcattagtggcctgcaagctgtgtaaagctatggctcacgaggcatcggagaatgatatggtggacgacatctcgcaggaactgaatcataattcccgggactttggtcagctggcagtggaactgctggatcagtcctataaacaggatgagcagctggctatgaaactactcacctatgagctaaaaaattggtcaaacgccacctgcctgcagctggcggtggccgcgaaacaccgggacttcattgctcacacctgctcccagatgctgctcacagacatgtggatgggcaggctcaggatgagaaaaaattccggactgaaggtgattctaggcatactgctgcctcctagcatcctttcactggagttcaagaacaaggatgacatgccttacatgtctcaggcccaggaaatccacctgcaggagaaggaggccgaggagcccgaaaagcccacaaaggagaaagaggaggaggacatggagctaaccgcaatgttggggaggaacaacggggagagcagtagaaagaaggatgaggaggaagttcagtccaagcacaggttaattccgctgggccgaaaaatatacgagttttacaatgctccgattgttaagttctggttctatactctggcttatattggctacctcatgctctttaactatatcgtgcttgtcaagatggagcgctggccaagcacacaggagtggattgtcatcagctatattttcaccttgggcatcgaaaagatgcgcgaaatcttgatgagtgagcctggcaaactgctccagaaagtaaaagtgtggctccaggaatattggaacgttaccgatctcatcgccatcttgctcttttccgtcggtatgatcctgcggctacaggaccaaccctttcgtagtgacggccgagttatctattgcgttaatattatttactggtatataaggcttcttgacatattcggagtcaacaaatacctgggcccatatgtgatgatgatcggcaaaatgatgattgacatgatgtattttgttattatcatgctagtagtccttatgagcttcggagtagccagacaggctattctgttcccgaacgaggagccatcctggaagctggcgaagaacattttttatatgccctactggatgatctacggagaagtgttcgcggatcagattgaccctccatgtggccagaatgagactcgtgaggacgggaaaatcatccaacttccaccgtgcaagactggcgcgtggattgttccagcaatcatggcatgctacctgctggtcgccaatattcttctggtcaatcttctcattgccgtgtttaataacactttctttgaggtcaagagtatttccaatcaagtgtggaagttccagcgctaccagctgataatgaccttccacgaaaggcctgtcctcccacctcctttaattatttttagccatatgacaatgattttccagcacttatgttgtcgctggagaaagcatgaatctgacccagatgaacgggattacggtctgaaactgttcataacggacgatgagcttaagaaggttcatgacttcgaggagcagtgtattgaggagtatttccgcgagaaagacgataggtttaactccagtaatgacgaacgaatccgcgtgacctctgagagggtcgaaaacatgtccatgaggctggaggaggtgaacgagcgtgaacattcaatgaaggcctctctccagactgtggacattcgtctggctcagctcgaggatttgattggtcgtatggccacagcgctggagcggctgactggtttagagagagctgaaagcaataaaatccgtagtagaactagctcagattgtactgacgccgcctatatagttcgacagtcctctttcaactcgcaagaaggaaacacattcaagctgcaggagtccatcgaccctgctggggaggaaacaatgagtcctaccagccccactttaatgcctcgcatgcgctcccactccttttacagtgttaacatgaaggacaaaggcgggattgagaaactggagtccatctttaaggaacgttcattgtctctgcacagagctacctcttcccattcagttgcgaaggagcctaaggctcccgcagctcctgccaacacattggccatcgtgcccgactctagacgaccgtcttcatgcatagacatctacgtgtctgctatggatgagctgcactgcgatatcgatccgctagacaacagcgtaaacattctggggctgggggagccaagcttcagcacccctgtgccaagtaccgctccctcatcttctgcctacgccacgcttgctcccactgacagaccacctagccgttcgatcgattttgaggacatcacatctatggacactaggtcattcagtagcgattacacacacctgcccgaatgtcaaaacccatgggactcagaacccccaatgtaccatactatcgagaggtccaaaagttcacggtacctggctaccaccccattcctgctagaggaggcaccaattgtgaaatcccactcttttatgttctctccatcacgtagctattacgctaacttcggggtgcctgtgaaaacagctgaatatactagtataaccgactgtattgacacccggtgcgtgaacgcgccacaggcaattgctgatagggcagcctttccaggtggcctcggagataaggttgaggaccttacctgctgccaccccgaaagggaggcagagctgtcccatcctagttcggatagcgaagaaaatgaggcaaaaggccggcgtgccaccatcgccatcagttctcaagagggcgataattcagaaagaacgctctctaacaatatcaccgtgccgaagatcgaaagagctaacagttattcggcagaagagcccagtgctccatatgcacatactagaaaatcattctcaatctccgacaagctcgacaggcaacggaataccgcgagcttgagaaacccgttccaacgatctaaaagctcaaaacctgaggggcggggggacagtctctcaatgcgcagactcagcaggaccagcgcattccagtcctttgagtcaaaacacaactag

SEQ ID NO: 311041 - DNA, 4710 bp, Artificial Sequence
  derived and/or modified sequence
atgtacgtgcgggtgagcttcgacaccaagcccgacctgctgctgcatttgatgactaaagaatggcaacttgaacttcctaagcttctgatcagcgtgcatgggggtctgcagaacttcgagctccagcctaagctcaaacaagtcttcggcaaaggcttgattaaggccgccatgaccaccggggcctggatctttactggaggggtcaacacgggtgtcattcgtcacgttggcgacgccttgaaggaccatgcatccaagagccgcggaaagatctgcactatcggtattgctccttggggtattgtcgagaatcaggaggacctgatcggccgggacgtcgtgcgcccgtaccagacaatgagcaacccaatgtctaaactgaccgtgctgaatagtatgcactctcactttattctggcagataacggtactactgggaagtatggtgcagaggtgaaactccgacggcaacttgaaaaacatatatctcttcagaagatcaacaccagatgcttgcccttcttttctttggattccaggttattctacagtttctggggaagctgtcagctcgatagtgtcggaatcggtcagggagtgcccgtggttgccctgatcgttgaggggggacccaatgtgatttccatcgtactagaatacctgcgcgacacgccaccagtaccagtcgttgtgtgcgacgggtccgggagagcttcagatattctggcgttcggtcataagtactcagaggagggcggtctaattaacgagagcctcagagaccaactgcttgtgaccatacagaaaacattcacctatacaaggacccaggcacagcaccttttcatcatactgatggagtgtatgaagaagaaggaattgataactgtgtttcgtatggggtctgagggtcaccaggacatagacctggctatcctcaccgccctgttaaagggggcaaatgcctcagcacctgaccagctgtctctcgctctcgcttggaatcgcgtagacattgcgcgtagtcagattttcatatacggacagcagtggcctgtggggtcccttgagcaggcaatgctagatgcgctggtgctggaccgagtggatttcgtgaagctcttgatcgagaacggagtctccatgcataggtttttgaccatcagccgcctggaggagctctataacacacgccacggccctagtaatacactgtatcaccttgtgagggacgttaaaaaaggaaacctaccgcctgactacagaatcagcctgatagatattggtctggtcattgagtacctgatgggtggagcctatcggtgtaactatacaaggaaacgatttcgcactctatatcacaatctcttcggaccgaagcgggatgatatccctcttcggagaggcaggaagaccacgaagaagcgcgaggaagaggttgatattgacctagacgacccagagattaaccactttccatttccctttcatgagttaatggtatgggcagttttgatgaaacggcaaaagatggctttattcttctggcagcatggggaggaggccatggcaaaggctctggtcgcatgcaagctctgcaaggccatggcacatgaggcatctgagaacgacatggtggatgatatcagtcaggagctcaaccataattcacgcgactttggccagctggccgtggagttgctggatcagtcgtacaagcaagacgagcagttggccatgaagctattgacctacgaactgaaaaattggtctaatgctacttgtctgcagttggcagtggcagccaagcatagagacttcattgctcatacttgttcccagatgctgttgaccgacatgtggatgggccgtctacggatgagaaaaaacagcggactaaaggtgattctaggtatactgttgcccccctctattttatcactggaattcaagaacaaggatgatatgccgtacatgtctcaggctcaggaaatccacctgcaggaaaaggaagccgaagagccagagaaacctaccaaggagaaggaagaagaagatatggaactgactgccatgctgggccgcaacaacggcgaatcctccagaaagaaggatgaagaggaggtgcaatcgaaacaccgcttgatccccctgggacgcaagatttacgagttctataacgctccaattgttaagttctggttctatacgctggcctacatcggatatctcatgctttttaactacatcgtgttagtaaaaatggagcggtggcctagcactcaagaatggatcgttatttcatatattttcacccttggcatagagaagatgcgggaaattctaatgtccgagccaggcaagctgctccagaaggttaaggtgtggcttcaggagtattggaacgtaacagatttaatagctatcctcttgttctcagtcgggatgattctgagactgcaggaccaacccttcaggtcagatggtagagtcatctattgcgtgaacattatttactggtatattagacttctcgatatttttggagtaaacaagtacctcggtccttatgttatgatgattggcaaaatgatgatcgatatgatgtatttcgtgattatcatgctggtagtgttaatgagtttcggggtggcaaggcaagccattctgtttccaaacgaggaaccaagctggaagttggcgaaaaatatattttatatgccctactggatgatttatggtgaagtgtttgccgaccagatagatcctccctgcggccaaaatgagacacgagaggacggtaagattatccagctcccaccttgcaaaacaggcgcttggatcgtccctgccattatggcctgctaccttcttgttgcaaacatcctattggtgaacttactgatcgctgtcttcaataataccttttttgaagtcaaatctatctccaaccaggtgtggaagtttcagagataccagctcatcatgaccttccatgagaggccggttctcccacctcctctgattatcttcagtcatatgactatgatatttcaacatctctgttgtaggtggcgtaagcacgaaagcgaccccgacgaaagagattatggcctgaaactgtttattacggatgacgagctgaagaaagtgcatgatttcgaggagcagtgcatcgaggagtactttcgcgagaaggatgaccgcttcaattcatcaaatgatgaacgtattagggtgacatcagagcgggtggagaatatgagtatgcgcctcgaagaagttaatgagagggaacatagcatgaaggcatcactgcaaacagtggacatacggctggctcagctggaggacctcatcggcagaatggctactgcactggaacggttgacaggactggagcgcgcagagtcaaataagatacgaagtagaacttccagtgactgcactgatgctgcgtacattgtgcgccagtcctcctttaattcccaggaaggcaatacctttaagctgcaggagagtatcgaccctgcaggtgaagagacaatgtccccgacctctcctacattaatgcctcggatgaggtcccactctttctattcagtcaatatgaaggataagggcgggatcgagaagctagagtccatcttcaaggagcgcagcctctcactgcatagagctacctccagccattccgtggccaaagagcccaaagcaccggccgccccggccaacaccctcgccatagtcccggactcgcggcgccccagcagctgcattgatatctatgtgtcagcaatggacgaactgcactgtgatatcgatcccctcgataacagtgtcaacatcctcggcctgggcgaacccagcttttccacacctgtcccgagcacagccccctccagcagtgcctacgctaccctcgctccaactgatcgcccaccctccagatctatcgacttcgaggatatcacgtccatggatactcggtctttttcctctgactacacccacttacccgaatgtcagaacccctgggatagcgagcctccgatgtaccatactattgagcgcagcaaatccagccgctacctggctactacaccctttctgctggaagaggctcctatcgtaaaatcacactcattcatgttttccccaagccgctcatactatgcgaactttggggttccagtcaagacagcagagtacaccagcatcacagactgtatcgacacacggtgtgtgaatgccccacaggctattgccgacagggcggcttttcccggcggtctcggcgacaaggttgaggacctgacatgctgtcacccagagcgggaggcagagctgtctcatcctagctctgatagcgaggaaaatgaagccaaggggagaagggcaactattgccatttcatctcaggagggagacaactctgagagaaccctttctaataacataactgtgcctaagatcgagcgtgccaattcctatagtgccgaggagccaagcgccccatacgcacatacaagaaagagcttttctattagcgataagctggacaggcagcgtaatacagcaagtctgcggaaccctttccagagatctaagtcctcaaagcccgagggcaggggggattcgttgtccatgagacgcctaagtagaacatctgcctttcagtctttcgaaagcaagcacaattag

SEQ ID NO: 311042 - DNA, 4710 bp, Artificial Sequence
  derived and/or modified sequence
atgtatgtgagggtgagtttcgacactaagccagacctgctgttgcacctcatgactaaagaatggcagttagagctgccaaaacttcttatttcagtccatggcggtctccagaatttcgagcttcagccaaagcttaaacaggtttttggcaaaggactgatcaaagccgctatgacaacaggggcatggattttcactgggggagtcaataccggtgtgatacgacacgtgggggatgctctgaaggatcacgcctccaagagccggggtaagatttgcacgataggtatcgccccttggggcatcgtggagaatcaggaggacttgatcggacgcgatgtggtcaggccataccagacaatgtcaaaccctatgagcaaactgaccgtgctaaactcaatgcactctcacttcatcctggctgacaacgggacaacggggaaatatggagcagaagtcaagctgcgacggcagttagagaagcacatctccctacagaaaattaatacaaggtgtctcccatttttctccctggacagccgactgttttatagcttctgggggtcctgccagctcgattctgtgggtatcggacagggtgtacccgtagtggccttgattgtcgaaggaggtcccaacgttattagcattgtcttagagtatcttcgcgacactccgcctgttccggttgttgtttgcgatggatccggcagggcatctgatattctcgccttcggtcataagtacagtgaggaaggtgggctgatcaatgaatcactgagggaccagctgttggtgacgatccaaaagactttcacctatacgaggacacaggctcagcatttattcatcatactgatggagtgtatgaaaaaaaaagaactgatcaccgttttccgtatgggtagcgagggccaccaagacatcgatctcgctatccttacggccctacttaagggcgcaaacgccagcgccccagatcagctatctctggcactggcctggaacagagtcgacattgctaggagccagatctttatctacggtcagcagtggcccgtaggctcattagaacaagccatgctggatgcactcgtattggatcgagtcgattttgttaaactgctcatcgagaacggggtgtccatgcacaggtttctgaccatcagcagactcgaggaactgtacaacactagacacggcccatcgaacaccttgtaccatctcgtccgtgatgtaaaaaaaggaaatctaccgcctgactatagaatctctctgattgatataggactcgtaattgagtatctgatggggggtgcatacagatgcaattacacacgcaagcgctttaggacactgtatcacaacctgtttggacctaagagagacgacatcccactgaggagaggcaggaagacgacgaaaaaaagagaagaagaagtagacatcgatctggatgacccagagatcaatcacttccccttccccttccacgagctgatggtgtgggccgtgctcatgaagagacagaagatggccttgttcttctggcagcatggcgaggaagccatggccaaagccctggtagcttgtaaactctgcaaagcgatggcacatgaagcctcggaaaacgatatggtcgacgatatctcacaggaactgaaccacaatagccgcgattttggtcaactggccgtcgagctgttggaccagtcttacaagcaggatgaacagcttgccatgaagttgcttacctacgagttgaagaactggtcaaatgcgacctgcctgcagctcgcggtcgccgctaagcacagagacttcatcgcccatacatgcagtcaaatgcttttaaccgatatgtggatgggccgtttgagaatgagaaagaactccggcctgaaggttattctggggattctgctccctccgtccatcctgagcctggagttcaaaaataaagatgatatgccttacatgtcccaggctcaagagatccacctgcaggagaaagaagcggaggagcctgaaaagcctacgaaagagaaggaggaagaagatatggagctgacagcaatgctggggagaaataacggggagagttctaggaagaaggatgaagaggaagttcaatcaaagcaccggctgatccctctcggaaggaagatctatgagttctacaatgcacctatcgtgaaattctggttttatacacttgcttacatcgggtatctaatgctgtttaattacatagtcctggtgaagatggagcggtggccttcaacccaggaatggattgtgatctcatacatattcactcttgggatagagaagatgcgggaaattctcatgtccgagccaggtaagctccttcagaaggttaaggtgtggctgcaagagtactggaacgtcaccgacctgatcgccattctcctattctccgtggggatgatcctgagactccaggatcagcctttccgcagcgatggaagagtaatatattgcgtgaacatcatttactggtatattcgtctcttagacattttcggcgtcaataagtatctggggccttatgtgatgatgatcggtaagatgatgatagatatgatgtacttcgttataatcatgctagtcgtgttgatgtccttcggagtggctaggcaggccatcctattcccaaacgaggagccatcctggaagctcgcgaaaaacattttctatatgccatactggatgatttatggcgaagtgtttgccgaccagatagaccctccatgcggccaaaatgaaacacgggaggatggaaagattatccagctgccaccctgtaagacgggtgcttggatcgtgcccgcaataatggcctgttatctgctggtggctaacattctcttggttaatttactgatcgcagtttttaacaacacatttttcgaggtcaaaagcattagtaatcaggtatggaagttccagcggtaccaactgattatgaccttccacgagcgtccagtcctcccgccacccttaataattttcagtcatatgactatgatctttcaacatctctgctgcaggtggcgtaagcacgagtccgatcccgatgagagggattatggcctcaaactgttcataacagatgatgagttaaagaaggtacatgactttgaggaacagtgcattgaggagtatttcagggaaaaagatgaccgatttaacagctcaaatgacgaaagaatccgtgttacatctgagcgtgtcgaaaacatgtctatgaggctcgaagaggttaacgagcgagaacattccatgaaggcaagtctgcagaccgtggatattcggttggcccagctggaagatcttattgggaggatggccaccgccctcgagcggctcacggggttggaaagggctgaatctaacaaaatccgcagtagaacgagctcagactgtaccgacgccgcatatatcgttcggcaatctagttttaattcccaggaggggaacacctttaagcttcaggagtctatagaccctgccggtgaggagaccatgtcacccacttctcccacacttatgcctcgcatgagatcgcattcattttacagtgtgaatatgaaagataagggtggcatcgaaaagctcgagagtatattcaaggaacgcagcctatctctacatagggcaacaagctctcacagcgtcgcaaaggagcccaaagcgcctgcggctcccgcaaatacgcttgcgatagtgccagacagccggcgtccgtcatcatgcatcgatatttacgtgtccgcaatggatgaattgcactgcgatatagaccctctcgacaattcagttaacattctagggcttggagagccaagcttttccacacccgtgccgtccaccgccccatcctcctcagcctatgctacacttgccccaaccgatcggcctccatccaggtcaattgatttcgaggacatcactagcatggacaccagaagcttctcaagtgactatacgcaccttcccgaatgccagaacccatgggatagtgaacctcctatgtatcatacaattgaaaggtctaagtcctctagatacttagccaccacgccatttttacttgaggaggcacccattgtgaagagtcattcctttatgtttagtccttcacgcagctactacgctaactttggggttccggtgaagaccgcggaatatacctctatcaccgactgtattgacacacgctgtgtgaatgcccctcaggccatcgctgatcgcgcagcttttccagggggtctcggcgataaggtggaagacctaacttgctgtcaccccgagcgggaggcagaactgtcccacccctcctccgacagcgaggagaatgaggccaagggcagaagagcgaccatagccatcagcagccaggagggagacaattccgagcgaacactatctaacaatatcacggtcccaaagatcgagagagcaaattcctattctgcagaagagccttcagccccatacgcccatacccgcaaaagcttcagcatcagcgataaactggaccgacagcggaataccgcatccctgcggaacccctttcaacgatctaagagctcaaagccagagggaagaggggatagtctcagcatgaggagattgtcgagaacatcagcatttcagagtttcgaatctaagcacaactag

SEQ ID NO: 311043 - DNA, 4710 bp, Artificial Sequence
  derived and/or modified sequence
atgtacgtgcgcgtgagctttgacacaaagccagatctattgctgcatcttatgacgaaggaatggcagttggaactccccaaactgctgatctcagttcacgggggtctgcagaacttcgagcttcaacccaaacttaagcaggtctttggcaaagggctgatcaaggccgcaatgaccacaggagcatggattttcacaggtggggtcaataccggcgtgatcagacacgttggcgatgctttaaaagaccacgcgagcaagagtcgaggcaaaatctgcaccatcggtatcgcgccatgggggatcgtggaaaaccaagaagatctcatcggcagggatgtcgtacggccatatcagacaatgtctaacccaatgtcgaaactaactgtcctgaattcaatgcactcccacttcatcctggctgataacggaaccactgggaagtatggggctgaggtcaaactaaggaggcagctcgaaaagcatattagcctccaaaagattaacactagatgcctcccgtttttctctctggactcacggctgttttattctttttgggggtcatgccagctggatagtgtgggcattggccaaggagtccccgtcgtggcactgattgtggaaggcggtcccaatgtaattagcattgtcctcgagtatctcagggacaccccacctgtgcccgttgtcgtatgcgatggaagcggtcgcgcaagcgacattttagctttcgggcacaagtactcagaagagggtgggctgattaatgagtcactgagagaccaacttttggtgacaatccagaagacattcacttatacccggacacaggcacagcatctcttcatcattcttatggaatgcatgaaaaaaaaagaactcattaccgttttccggatgggctcagagggtcatcaagatattgacctcgcaatcctcaccgccctattgaaaggcgcaaatgcatccgcaccagaccaactgagtctggcccttgcttggaatcgcgtggacattgctcgtagccagatctttatctatggacagcagtggcccgtgggctccttggagcaggcgatgctggacgcacttgttctggatagggtggattttgtgaaactgttaatagagaacggggtctccatgcacagatttctaaccatcagcaggttggaggaactctataacactaggcacggaccctctaacacgctataccacctcgtgagggatgtcaagaaaggcaacctccccccagattaccggatatcactgattgatatagggctcgtaatcgaataccttatgggaggagcttaccgatgcaactacacgcgcaaaagatttaggactttgtatcacaacctgttcgggcctaagcgcgacgatatcccactgcgacgaggccgaaagactacgaaaaaacgtgaggaggaagtggatatcgacctggatgatccggagatcaaccacttccccttcccctttcacgagctgatggtttgggcagtgttgatgaaaaggcagaagatggcactgttcttttggcagcacggcgaggaggccatggccaaagccctggtcgcttgcaagctctgcaaagcaatggctcatgaagccagtgaaaatgatatggtagacgacatttctcaagagttaaaccacaattcacgcgactttggccagcttgccgtagagctgttagatcaaagctacaagcaggatgaacagctcgccatgaagctactcacctacgagttgaaaaactggagcaatgccacatgcctgcagctagcagtggccgctaagcatagagactttatagctcatacctgcagccagatgctgctgacagacatgtggatgggacggctacgcatgagaaagaattccgggctgaaggtcatccttggtattttattgccacccagcattctgagtcttgagtttaaaaacaaggacgatatgccttatatgtctcaggcacaagaaatccatctgcaagagaaggaggccgaagagccagagaagcccaccaaggaaaaggaggaagaggacatggagctgaccgcgatgcttggaaggaataatggtgaaagtagtcgaaaaaaagacgaggaagaggtgcagagtaagcatagactgatccctctgggcagaaagatctatgagttctataacgcgccaatagtcaaattttggttttatactctcgcctatatcggctatctcatgctctttaattatattgtccttgtgaaaatggagcgttggccctcaacacaagagtggatcgtgatttcttatattttcactctggggattgaaaaaatgagagaaatactgatgagtgaaccaggcaaattactgcagaaagtcaaggtgtggctgcaagaatactggaacgtgaccgaccttatagccatcctgctgttttcagtaggcatgattctgcgcctgcaggatcagcctttcagaagcgacggcagagtaatctattgtgtcaacattatctactggtacatccggctgctggacatctttggcgtgaacaaatatctgggcccatacgtaatgatgatcggcaagatgatgattgacatgatgtacttcgtgatcatcatgcttgtcgtccttatgtcatttggtgtggccagacaggcaattcttttccccaacgaggagccctcttggaagctggctaagaacattttttacatgccctactggatgatttacggtgaagtgttcgcagaccaaattgatcccccatgtggacagaatgagacgagagaggatgggaagataatccaactccctccttgcaaaaccggagcctggattgtgcccgcaatcatggcgtgctacctcctcgtcgccaacattcttctggtcaatctgttgatcgcagtgtttaataacacttttttcgaggtcaaatcaatctctaaccaagtttggaagtttcagagataccagctcatcatgacatttcatgagcgcccagttctgcccccacccctgatcatcttttcccacatgacgatgatattccagcacctgtgctgtaggtggagaaaacatgagtccgacccagacgagagagactatggcctaaaactcttcattaccgacgacgaactgaagaaggtgcacgactttgaggaacaatgcattgaagaatactttcgcgagaaagacgacaggtttaatagttccaatgacgaacgtattcgagtcacgtccgagcgcgtggagaacatgtccatgcggctggaggaggtgaatgagcgagaacattctatgaaggcatctttgcagactgtggacatcagattagcccagcttgaggaccttatcggcaggatggccaccgctctggagagactgacaggactcgaacgcgcagagtcgaacaagatccggagccggacttctagcgactgcactgatgccgcttatatcgttaggcagagttccttcaattcacaggagggtaacacttttaaactccaggaatctatcgaccccgcaggtgaagagacgatgagtccaaccagcccaactctgatgccgaggatgagaagtcatagcttttacagtgttaatatgaaggataaggggggaatcgaaaaactcgaaagcattttcaaggaaagaagcctatcactacatcgggcaactagctcccactccgtggccaaggaacccaaagccccagcagccccagcgaatactcttgctattgtacctgacagccgtagacccagttcatgcatagacatatatgtttccgcaatggacgagttacactgcgatattgaccccttggataacagcgtgaacatccttgggttaggcgagccaagtttctcaacccccgtccccagcacagcaccctctagttccgcttacgccactcttgctcccacagaccgaccaccttcacgatcgatcgatttcgaggacatcacatccatggatactcggtccttttcctctgattatacccatttaccggagtgtcagaatccatgggacagcgaacctcccatgtaccacactatcgagagatctaagtcctcacgctatttagccactacgccgtttcttctggaagaagcgccaatcgtcaaaagccactcttttatgttcagcccttcccggagctattacgccaattttggggtaccagttaagactgccgaatacactagtataaccgattgtattgacacacgttgcgtgaacgccccacaggccatagcagaccgcgcagcatttccgggtggcctgggcgataaggtggaggacctgacctgctgtcaccccgagcgggaggcagaactctcccatccaagctccgactccgaggaaaacgaggctaagggtcggagggccacaatcgccatttctagtcaggagggcgataatagtgagcgtacactgtccaacaatatcaccgtgcccaagatagagagggccaacagctattccgcagaggaaccatccgcaccctacgcgcacacgcgaaagtccttcagcattagcgataagcttgaccgccagcgaaatacagccagcctgaggaacccctttcagcgcagcaaatctagcaagcccgaaggcagaggggacagcttatcaatgaggcgcctctcgagaacctcggccttccagtcatttgaatccaagcacaattag

SEQ ID NO: 311044 - DNA, 4710 bp, Artificial Sequence
  derived and/or modified sequence
atgtatgtgcgagtatcttttgatacaaaacctgatctcctcttacacctgatgaccaaggaatggcagttggagcttcccaagcttctcatctctgtccatgggggcctgcagaactttgaactccagccaaaactcaagcaagtctttgggaaagggctcatcaaagcagcaatgacaactggagcgtggatattcactggaggggttaacacaggtgttattcgtcatgttggcgatgccttgaaggatcatgcctctaagtctcgaggaaagatatgcaccataggtattgccccctggggaattgtggaaaaccaggaggacctcattggaagagatgttgtccggccataccagaccatgtccaatcccatgagcaagctcactgttctcaacagcatgcattcccacttcattctggctgacaacgggaccactggaaaatatggagcagaggtgaaacttcgaagacaactggaaaagcatatttcactccagaagataaacacaagatgcctgccgtttttctctcttgactcccgcttgttttattcattttggggtagttgccagttagactcagttggaatcggtcaaggtgttcctgtggtggcactcatagtggaaggaggacccaatgtgatctcgattgttttggagtaccttcgagacacccctcccgtgccagtggttgtctgtgatgggagtggacgggcatcggacatcctggcctttgggcataaatactcagaagaaggcggactgataaatgaatctttgagggaccagctgttggtgactatacagaagactttcacatacactcgaacccaagctcagcatctgttcatcatcctcatggagtgcatgaagaagaaggaattgattacggtatttcggatgggatcagaaggacaccaggacattgatttggctatcctgacagctttactcaaaggagccaatgcctcggccccagaccaactgagcttagctttagcctggaacagagtcgacatcgctcgcagccagatctttatttacgggcaacagtggccggtgggatctctggagcaagccatgttggatgccttagttctggacagagtggattttgtgaaattactcatagagaatggagtaagcatgcaccgttttctcaccatctccagactagaggaattgtacaatacgagacatgggccctcaaatacattgtaccacttggtcagggatgtcaaaaaggggaacctgcccccagactacagaatcagcctgattgacatcggcctggtgatcgagtacctgatgggcggggcttatcgctgcaactacacgcgcaagcgcttccggaccctctaccacaacctcttcggccccaagagggatgatattcccttgaggcgaggaagaaagacaaccaagaaacgtgaagaagaggtggacattgacttggatgatcctgagatcaaccacttccccttccctttccatgagctcatggtgtgggctgttctcatgaagcggcagaagatggccctgttcttctggcagcacggtgaggaggccatggccaaggccctggtggcctgcaagctctgcaaagccatggctcatgaggcctctgagaacgacatggttgacgacatttcccaggagctgaatcacaattccagagactttggccagctggctgtggagctcctggaccagtcctacaagcaggacgaacagctggccatgaaactgctgacgtatgagctgaagaactggagcaacgccacgtgcctgcagcttgccgtggctgccaaacaccgcgacttcatcgcgcacacgtgcagccagatgctgctcaccgacatgtggatgggccggctccgcatgcgcaagaactcaggcctcaaggtaattctgggaattctacttcctccttcaattctcagcttggagttcaagaacaaagacgacatgccctatatgtctcaggcccaggaaatccacctccaagagaaggaggcagaagaaccagagaagcccacaaaggaaaaagaggaagaggacatggagctcacagcaatgttgggacgaaacaacggggagtcctccaggaagaaggatgaagaggaagttcagagcaagcaccggttaatccccctcggcagaaaaatctatgaattctacaatgcacccatcgtgaagttctggttctacacactggcgtatatcggatacctgatgctcttcaactatatcgtgttagtgaagatggaacgctggccgtccacccaggaatggatcgtaatctcctatattttcaccctgggaatagaaaagatgagagagattctgatgtcagagccagggaagttgctacagaaagtgaaggtatggctgcaggagtactggaatgtcacggacctcatcgccatccttctgttttctgtcggaatgatccttcgtctccaagaccagcccttcaggagtgacgggagggtcatctactgcgtgaacatcatttactggtatatccgtctcctagacatcttcggcgtgaacaagtatttgggcccgtatgtaatgatgattggaaaaatgatgatagacatgatgtactttgtcatcattatgctggtggttctgatgagctttggggtcgccaggcaagccatcctttttcccaatgaggagccatcatggaaactggccaagaacatcttctacatgccctattggatgatttatggggaagtgtttgcggaccagatagaccctccctgtggacagaatgagacccgagaggatggtaaaataatccagctgcctccctgcaagacaggagcttggatcgtgccggccatcatggcctgctacctcttagtggcaaacatcttgctggtcaacctcctcattgctgtctttaacaatacattttttgaagtaaaatcgatatccaaccaagtctggaagtttcagaggtatcagctcatcatgactttccatgaaaggccagttctgcccccaccactgatcatcttcagccacatgaccatgatattccagcacctgtgctgccgatggaggaaacacgagagcgacccggatgaaagggactacggcctgaaactcttcataaccgatgatgagctcaagaaagtacatgactttgaagagcaatgcatagaagaatacttcagagaaaaggatgatcggttcaactcatctaatgatgagaggatacgggtgacttcagaaagggtggagaacatgtctatgcggctggaggaagtcaacgagagagagcactccatgaaggcttcactccagaccgtggacatccggctggcgcagctggaagaccttatcgggcgcatggccacggccctggagcgcctgacaggtctggagcgggccgagtccaacaaaatccgctcgaggacctcgtcagactgcacggacgccgcctacattgtccgtcagagcagcttcaacagccaggaagggaacaccttcaagctccaagagagtatagaccctgcaggtgaggagaccatgtccccaacttctccaaccttaatgccccgtatgcgaagccattctttctattcggtcaatatgaaagacaaaggtggtatagaaaagttggaaagtatttttaaagaaaggtccctgagcctacaccgggctactagttcccactctgtagcaaaagaacccaaagctcctgcagcccctgccaacaccttggccattgttcctgattccagaagaccatcatcgtgtatagacatctatgtctctgctatggatgagctccactgtgatatagaccctctggacaattccgtgaacatccttgggctgggcgagccaagcttttcaactccagtaccttccacagccccttcaagtagtgcctatgcaacacttgcacccacagacagacctccaagccggagcattgattttgaggacatcacctccatggacactagatctttttcttcagactacacccacctcccagaatgccaaaacccctgggactcagagcctccgatgtaccacaccattgagcgttccaaaagtagccgctacctagccaccacaccctttcttctagaagaggctcccattgtgaaatctcatagctttatgttttccccctcaaggagctattatgccaactttggggtgcctgtaaaaacagcagaatacacaagtattacagactgtattgacacaaggtgtgtcaatgcccctcaagcaattgcggacagagctgccttccctggaggtcttggagacaaagtggaggacttaacttgctgccatccagagcgagaagcagaactgagtcaccccagctctgacagtgaggagaatgaggccaaaggccgcagagccaccattgcaatatcctcccaggagggtgataactcagagagaaccctgtccaacaacatcactgttcccaagatagagcgcgccaacagctactcggcagaggagccaagtgcgccatatgcacacaccaggaagagcttctccatcagtgacaaactcgacaggcagcggaacacagcaagcctgcgaaatcccttccagagaagcaagtcctccaagccggagggccgaggggacagcctgtccatgaggagactgtccagaacatcggctttccaaagctttgaaagcaagcacaactaa

SEQ ID NO: 311045 - DNA, 5966 bp, Artificial Sequence
  derived and/or modified sequence
agctgcagcaaaatgaaagcaacaggagctgctccggggactgcttttgccagtacccagaatcagtgctcaggctcagaaatcctggatagaaagagcattttataaaagagaatgtgtccacatcatacccagcaccaaagacccccataggtgttgctgtgggcgtctgataggccagcatgttggcctcacccccagtatctccgtgcttcagaatgagaaaaatgaaagtcgcctctcccgaaatgacatccagtctgaaaagtggtccatcagcaaacacactcaactcagccctacggatgcttttgggaccattgagttccaaggaggtggccattccaacaaagccatgtatgtgcgagtatcttttgatacaaaacctgatctcctcttacacctgatgaccaaggaatggcagttggagcttcccaagcttctcatctctgtccatgggggcctgcagaactttgaactccagccaaaactcaagcaagtctttgggaaagggctcatcaaagcagcaatgacaactggagcgtggatattcactggaggggttaacacaggtgttattcgtcatgttggcgatgccttgaaggatcatgcctctaagtctcgaggaaagatatgcaccataggtattgccccctggggaattgtggaaaaccaggaggacctcattggaagagatgttgtccggccataccagaccatgtccaatcccatgagcaagctcactgttctcaacagcatgcattcccacttcattctggctgacaacgggaccactggaaaatatggagcagaggtgaaacttcgaagacaactggaaaagcatatttcactccagaagataaacacaagatgcctgccgtttttctctcttgactcccgcttgttttattcattttggggtagttgccagttagactcagttggaatcggtcaaggtgttcctgtggtggcactcatagtggaaggaggacccaatgtgatctcgattgttttggagtaccttcgagacacccctcccgtgccagtggttgtctgtgatgggagtggacgggcatcggacatcctggcctttgggcataaatactcagaagaaggcggactgataaatgaatctttgagggaccagctgttggtgactatacagaagactttcacatacactcgaacccaagctcagcatctgttcatcatcctcatggagtgcatgaagaagaaggaattgattacggtatttcggatgggatcagaaggacaccaggacattgatttggctatcctgacagctttactcaaaggagccaatgcctcggccccagaccaactgagcttagctttagcctggaacagagtcgacatcgctcgcagccagatctttatttacgggcaacagtggccggtgggatctctggagcaagccatgttggatgccttagttctggacagagtggattttgtgaaattactcatagagaatggagtaagcatgcaccgttttctcaccatctccagactagaggaattgtacaatacgagacatgggccctcaaatacattgtaccacttggtcagggatgtcaaaaaggggaacctgcccccagactacagaatcagcctgattgacatcggcctggtgatcgagtacctgatgggcggggcttatcgctgcaactacacgcgcaagcgcttccggaccctctaccacaacctcttcggccccaagagggatgatattcccttgaggcgaggaagaaagacaaccaagaaacgtgaagaagaggtggacattgacttggatgatcctgagatcaaccacttccccttccctttccatgagctcatggtgtgggctgttctcatgaagcggcagaagatggccctgttcttctggcagcacggtgaggaggccatggccaaggccctggtggcctgcaagctctgcaaagccatggctcatgaggcctctgagaacgacatggttgacgacatttcccaggagctgaatcacaattccagagactttggccagctggctgtggagctcctggaccagtcctacaagcaggacgaacagctggccatgaaactgctgacgtatgagctgaagaactggagcaacgccacgtgcctgcagcttgccgtggctgccaaacaccgcgacttcatcgcgcacacgtgcagccagatgctgctcaccgacatgtggatgggccggctccgcatgcgcaagaactcaggcctcaaggtaattctgggaattctacttcctccttcaattctcagcttggagttcaagaacaaagacgacatgccctatatgtctcaggcccaggaaatccacctccaagagaaggaggcagaagaaccagagaagcccacaaaggaaaaagaggaagaggacatggagctcacagcaatgttgggacgaaacaacggggagtcctccaggaagaaggatgaagaggaagttcagagcaagcaccggttaatccccctcggcagaaaaatctatgaattctacaatgcacccatcgtgaagttctggttctacacactggcgtatatcggatacctgatgctcttcaactatatcgtgttagtgaagatggaacgctggccgtccacccaggaatggatcgtaatctcctatattttcaccctgggaatagaaaagatgagagagattctgatgtcagagccagggaagttgctacagaaagtgaaggtatggctgcaggagtactggaatgtcacggacctcatcgccatccttctgttttctgtcggaatgatccttcgtctccaagaccagcccttcaggagtgacgggagggtcatctactgcgtgaacatcatttactggtatatccgtctcctagacatcttcggcgtgaacaagtatttgggcccgtatgtaatgatgattggaaaaatgatgatagacatgatgtactttgtcatcattatgctggtggttctgatgagctttggggtcgccaggcaagccatcctttttcccaatgaggagccatcatggaaactggccaagaacatcttctacatgccctattggatgatttatggggaagtgtttgcggaccagatagaccctccctgtggacagaatgagacccgagaggatggtaaaataatccagctgcctccctgcaagacaggagcttggatcgtgccggccatcatggcctgctacctcttagtggcaaacatcttgctggtcaacctcctcattgctgtctttaacaatacattttttgaagtaaaatcgatatccaaccaagtctggaagtttcagaggtatcagctcatcatgactttccatgaaaggccagttctgcccccaccactgatcatcttcagccacatgaccatgatattccagcacctgtgctgccgatggaggaaacacgagagcgacccggatgaaagggactacggcctgaaactcttcataaccgatgatgagctcaagaaagtacatgactttgaagagcaatgcatagaagaatacttcagagaaaaggatgatcggttcaactcatctaatgatgagaggatacgggtgacttcagaaagggtggagaacatgtctatgcggctggaggaagtcaacgagagagagcactccatgaaggcttcactccagaccgtggacatccggctggcgcagctggaagaccttatcgggcgcatggccacggccctggagcgcctgacaggtctggagcgggccgagtccaacaaaatccgctcgaggacctcgtcagactgcacggacgccgcctacattgtccgtcagagcagcttcaacagccaggaagggaacaccttcaagctccaagagagtatagaccctgcaggtgaggagaccatgtccccaacttctccaaccttaatgccccgtatgcgaagccattctttctattcggtcaatatgaaagacaaaggtggtatagaaaagttggaaagtatttttaaagaaaggtccctgagcctacaccgggctactagttcccactctgtagcaaaagaacccaaagctcctgcagcccctgccaacaccttggccattgttcctgattccagaagaccatcatcgtgtatagacatctatgtctctgctatggatgagctccactgtgatatagaccctctggacaattccgtgaacatccttgggctgggcgagccaagcttttcaactccagtaccttccacagccccttcaagtagtgcctatgcaacacttgcacccacagacagacctccaagccggagcattgattttgaggacatcacctccatggacactagatctttttcttcagactacacccacctcccagaatgccaaaacccctgggactcagagcctccgatgtaccacaccattgagcgttccaaaagtagccgctacctagccaccacaccctttcttctagaagaggctcccattgtgaaatctcatagctttatgttttccccctcaaggagctattatgccaactttggggtgcctgtaaaaacagcagaatacacaagtattacagactgtattgacacaaggtgtgtcaatgcccctcaagcaattgcggacagagctgccttccctggaggtcttggagacaaagtggaggacttaacttgctgccatccagagcgagaagcagaactgagtcaccccagctctgacagtgaggagaatgaggccaaaggccgcagagccaccattgcaatatcctcccaggagggtgataactcagagagaaccctgtccaacaacatcactgttcccaagatagagcgcgccaacagctactcggcagaggagccaagtgcgccatatgcacacaccaggaagagcttctccatcagtgacaaactcgacaggcagcggaacacagcaagcctgcgaaatcccttccagagaagcaagtcctccaagccggagggccgaggggacagcctgtccatgaggagactgtccagaacatcggctttccaaagctttgaaagcaagcacaactaaaccttcttaatatccgccacagaaggctcaagaatccagccctaaaattctctccaactccagtttttcccctttccttgaatcatacctgctttattcttagctgagcaaaacaagcaatgctttgggaggtgttaactcaaaggtgacttctgggccacagatcaagaaagcatttgatctgacccagtgccagacacaggggatttaaggcatgttcacacttgctgggcagggagggggaagagagggagaaggaagggttagagatgaatgtgtatccgcagtcacagcagaaagccatgagagcaggggaaacaaggggcttcgagcacgctccatgccaggaggcatctgttgatttctgaccattatcaagagttgtaggatgcagggctaaattgcaaaataaaataaaatagccagcgtacacaatgagatattctaaacttccattctgttttcttttcacattggctccatcactggtgactgatgaagagcatcctctttattcagtataagccggcagcaagcagttctacctaacgtcccacatccttctcatgccaacacttctgtaattgatcattataaagaaaaaacaaggtaacagtcatagttcacctgtctcttatctattcacttctggtgccacaactgtttatccttttttgaagaaaataagggaacagaaatgcctttttgtattgcaatcgaaatgaaagaagagttgatgttaaaaaaacaaaagtcaagtgatttattatatacagtgggcgttcaagtctagtcgagcaagctcaggagaatgtaattaaataattttatattttttaatttattttgtatctcacctgtcatggatgaattcattcactgaatatgtaatattgaactt

SEQ ID NO: 311046 - DNA, 4701 bp, Artificial Sequence
  derived and/or modified sequence
atgtacgtgagagtgagcttcgacaccaagcccgacctgctgctgcacctgatgaccaaggagtggcagctggagctgcccaagctgctgatcagcgtgcacggcggcctgcagaacttcgagctgcagcccaagctgaagcaggtgttcggcaagggcctgatcaaggccgccatgaccaccggcgcctggatcttcaccggcggcgtgaacaccggcgtgatcagacacgtgggcgacgccctgaaggaccacgccagcaagagcagaggcaagatctgcaccatcggcatcgccccctggggcatcgtggagaaccaggaggacctgatcggcagagacgtggtgagaccctaccagaccatgagcaaccccatgagcaagctgaccgtgctgaacagcatgcacagccacttcatcctggccgacaacggcaccaccggcaagtacggcgccgaggtgaagctgagaagacagctggagaagcacatcagcctgcagaagatcaacaccagaatcggccagggcgtgcccgtggtggccctgatcgtggagggcggccccaacgtgatcagcatcgtgctggagtacctgagagacaccccccccgtgcccgtggtggtgtgcgacggcagcggcagagccagcgacatcctggccttcggccacaagtacagcgaggagggcggcctgatcaacgagagcctgagagaccagctgctggtgaccatccagaagaccttcacctacaccagaacccaggcccagcacctgttcatcatcctgatggagtgcatgaagaagaaggagctgatcaccgtgttcagaatgggcagcgagggccaccaggacatcgacctggccatcctgaccgccctgctgaagggcgccaacgccagcgcccccgaccagctgagcctggccctggcctggaacagagtggacatcgccagaagccagatcttcatctacggccagcagtggcccgtgggcagcctggagcaggccatgctggacgccctggtgctggacagagtggacttcgtgaagctgctgatcgagaacggcgtgagcatgcacagattcctgaccatcagcagactggaggagctgtacaacaccagacacggccccagcaacaccctgtaccacctggtgagagacgtgaagaagagagagtaccccggcttcggctggatctacttcaagggcaacctgccccccgactacagaatcagcctgatcgacatcggcctggtgatcgagtacctgatgggcggcgcctacagatgcaactacaccagaaagagattcagaaccctgtaccacaacctgttcggccccaagagacccaaggccctgaagctgctgggcatggaggacgacatccccctgagaagaggcagaaagaccaccaagaagagagaggaggaggtggacatcgacctggacgaccccgagatcaaccacttccccttccccttccacgagctgatggtgtgggccgtgctgatgaagagacagaagatggccctgttcttctggcagcacggcgaggaggccatggccaaggccctggtggcctgcaagctgtgcaaggccatggcccacgaggccagcgagaacgacatggtggacgacatcagccaggagctgaaccacaacagcagagacttcggccagctggccgtggagctgctggaccagagctacaagcaggacgagcagctggccatgaagctgctgacctacgagctgaagaactggagcaacgccacctgcctgcagctggccgtggccgccaagcacagagacttcatcgcccacacctgcagccagatgctgctgaccgacatgtggatgggcagactgagaatgagaaagaacagcggcctgaaggtgatcctgggcatcctgctgccccccagcatcctgagcctggagttcaagaacaaggacgacatgccctacatgagccaggcccaggagatccacctgcaggagaaggaggccgaggagcccgagaagcccaccaaggagaaggaggaggaggacatggagctgaccgccatgctgggcagaaacaacggcgagagcagcagaaagaaggacgaggaggaggtgcagagcaagcacagactgatccccctgggcagaaagatctacgagttctacaacgcccccatcgtgaagttctggttctacaccctggcctacatcggctacctgatgctgttcaactacatcgtgctggtgaagatggagagatggcccagcacccaggagtggatcgtgatcagctacatcttcaccctgggcatcgagaagatgagagagatcctgatgagcgagcccggcaagctgctgcagaaggtgaaggtgtggctgcaggagtactggaacgtgaccgacctgatcgccatcctgctgttcagcgtgggcatgatcctgagactgcaggaccagcccttcagaagcgacggcagagtgatctactgcgtgaacatcatctactggtacatcagactgctggacatcttcggcgtgaacaagtacctgggcccctacgtgatgatgatcggcaagatgatgatcgacatgatgtacttcgtgatcatcatgctggtggtgctgatgagcttcggcgtggccagacaggccatcctgttccccaacgaggagcccagctggaagctggccaagaacatcttctacatgccctactggatgatctacggcgaggtgttcgccgaccagatcgaccccccctgcggccagaacgagaccagagaggacggcaagatcatccagctgcccccctgcaagaccggcgcctggatcgtgcccgccatcatggcctgctacctgctggtggccaacatcctgctggtgaacctgctgatcgccgtgttcaacaacaccttcttcgaggtgaagagcatcagcaaccaggtgtggaagttccagagataccagctgatcatgaccttccacgagagacccgtgctgcccccccccctgatcatcttcagccacatgaccatgatcttccagcacctgtgctgcagatggagaaagcacgagagcgaccccgacgagagagactacggcctgaagctgttcatcaccgacgacgagctgaagaaggtgcacgacttcgaggagcagtgcatcgaggagtacttcagagagaaggacgacagattcaacagcagcaacgacgagagaatcagagtgaccagcgagagagtggagaacatgagcatgagactggaggaggtgaacgagagagagcacagcatgaaggccagcctgcagaccgtggacatcagactggcccagctggaggacctgatcggcagaatggccaccgccctggagagactgaccggcctggagagagccgagagcaacaagatcagaagcagaaccagcagcgactgcaccgacgccgcctacatcgtgagacagagcagcttcaacagccaggagggcaacaccttcaagctgcaggagagcatcgaccccgccggcgaggagaccatgagccccaccagccccaccctgatgcccagaatgagaagccacagcttctacagcgtgaacatgaaggacaagggcggcatcgagaagctggagagcatcttcaaggagagaagcctgagcctgcacagagccaccagcagccacagcgtggccaaggagcccaaggcccccgccgcccccgccaacaccctggccatcgtgcccgacagcagaagacccagcagctgcatcgacatctacgtgagcgccatggacgagctgcactgcgacatcgaccccctggacaacagcgtgaacatcctgggcctgggcgagcccagcttcagcacccccgtgcccagcaccgcccccagcagcagcgcctacgccaccctggcccccaccgacagaccccccagcagaagcatcgacttcgaggacatcaccagcatggacaccagaagcttcagcagcgactacacccacctgcccgagtgccagaacccctgggacagcgagccccccatgtaccacaccatcgagagaagcaagagcagcagatacctggccaccacccccttcctgctggaggaggcccccatcgtgaagagccacagcttcatgttcagccccagcagaagctactacgccaacttcggcgtgcccgtgaagaccgccgagtacaccagcatcaccgactgcatcgacaccagatgcgtgaacgccccccaggccatcgccgacagagccgccttccccggcggcctgggcgacaaggtggaggacctgacctgctgccaccccgagagagaggccgagctgagccaccccagcagcgacagcgaggagaacgaggccaagggcagaagagccaccatcgccatcagcagccaggagggcgacaacagcgagagaaccctgagcaacaacatcaccgtgcccaagatcgagagagccaacagctacagcgccgaggagcccagcgccccctacgcccacaccagaaagagcttcagcatcagcgacaagctggacagacagagaaacaccgccagcctgagaaaccccttccagagaagcaagagcagcaagcccgagggcagaggcgacagcctgagcatgagaagactgagcagaaccagcgccttccagagcttcgagagcaagcacaactag

SEQ ID NO: 311047 - DNA, 4701 bp, Artificial Sequence
  derived and/or modified sequence
atgtacgtaagagtcagtttcgacaccaagcctgaccttctgcttcacctcatgaccaaggagtggcagctcgaattgcctaagctgctaatcagtgtccacggtggattgcaaaattttgagctgcagccaaagctgaagcaagtttttggaaaaggcctgatcaaggcagctatgactacaggcgcttggatcttcaccggaggcgtgaacaccggggtcattagacacgtcggtgacgccttgaaagaccatgcgtcaaagtccaggggcaagatttgcaccattggtatagccccttggggcattgttgagaatcaagaagaccttatcggtagggacgttgtcaggccataccagacgatgtccaaccccatgtccaaacttaccgtcctgaactccatgcatagtcacttcattctagccgataacggaactacgggaaaatatggggcagaagtaaaactgcggcgtcaattggagaagcatattagtctccagaaaataaatacccgtattgggcagggcgtcccagttgtagctttaatagtggagggcggtcccaacgtgatttcaattgtgctggaatacttgcgcgacactccaccagtccccgtggtcgtttgtgacggttcggggcgggcatcagatattctcgcctttggccacaagtactctgaggagggcggactcattaatgagtccctccgggaccagttgctcgtaacgatccaaaagacgttcacatatacacgcactcaggcccagcacttgtttattatcctcatggagtgcatgaaaaaaaaggagctaatcacagtttttcgcatggggagtgaaggccatcaggacatcgacctggctattctgacagctcttctgaaaggggcaaacgcctcagccccagatcaattgagcctggctctggcctggaatcgggtggatatagcacggtcgcagattttcatatatgggcagcaatggcctgtaggatccctggaacaggccatgctcgacgccttagtgttagatagggtggactttgtcaaactgctgatcgagaatggcgtgtctatgcaccgtttcctcacgattagtcggctagaggagctttacaataccaggcatggccccagcaatacgctgtatcacctcgtgcgagacgtcaagaagagagagtaccctggtttcggctggatctactttaagggcaatctcccccctgattaccgaatctccctgatcgacatcggcttggtcattgaatatcttatgggcggggcttacagatgcaattacacaaggaagcgtttcaggacactgtatcacaatttgtttggccccaaacgtcctaaggcactcaagctgctaggaatggaagacgatattccgctgaggcggggtagaaagactaccaagaagcgcgaggaagaagtggacatcgatcttgatgaccctgagatcaatcactttcctttccctttccacgaactgatggtctgggcggtgctcatgaagagacagaaaatggcactgttcttttggcagcatggggaggaggccatggccaaggctctggtggcttgcaagctgtgcaaggctatggcccacgaggcctcagagaacgacatggtggacgatatctcccaggaattaaaccacaattcccgggacttcggccagctggctgtggaattgctcgaccagtcatataagcaagacgaacagctcgcgatgaagctgcttacttacgaactgaagaactggagcaatgcaacatgcctgcaactggccgttgccgcaaaacaccgggatttcattgctcacacgtgcagtcagatgttacttactgacatgtggatggggcgcttgaggatgaggaaaaactccggccttaaagtcatcttgggaatcctcctccctccttctatactctccttggaattcaagaacaaggacgacatgccgtacatgtcacaggctcaggagatccacctgcaggaaaaggaagccgaggagcccgagaagcccactaaggaaaaggaggaagaggacatggaactgacggcaatgctgggaaggaacaatggcgagtctagcagaaaaaaggatgaggaggaagtgcagagcaaacaccggctcatccctctaggcagaaagatctacgaattttacaacgcccctattgtgaaattctggttttacacactcgcttatatcggctacttgatgctgttcaattatatcgtgctggtgaagatggaacgatggcccagcacccaggagtggatagtgatctcatatatatttacgcttggtattgaaaagatgcgggagattctcatgagcgagcccggcaagctcttgcaaaaagtgaaagtctggctccaggaatactggaatgtgactgacctgatagcaatcctccttttcagcgtcgggatgattctacgtcttcaggatcagccgtttcgctccgatggtagagtcatctattgcgtgaacattatttattggtacatcagactgctggatatattcggtgtgaacaaatacctggggccctatgtgatgatgattggcaagatgatgatcgatatgatgtattttgtgataatcatgctggtggtgcttatgtcattcggtgtggcacgtcaggccattctgtttcccaacgaagagccttcatggaagctcgccaagaacatcttttatatgccatactggatgatttacggtgaggttttcgctgaccagattgatcctccatgcgggcagaacgaaacgagagaagacgggaagatcatacaactccccccctgcaaaacaggagcctggatcgtgcctgcaatcatggcgtgctacctgctggtggcaaacattctcctagttaaccttcttatagccgtgttcaacaacactttctttgaagtgaaatctatttcaaatcaggtatggaaatttcagcgttatcaactcataatgacattccacgaacgccccgtcctgccaccaccattgattatattcagccatatgaccatgattttccagcacttatgctgcaggtggcgaaagcacgaatctgaccctgacgagagggactacggcttaaagctcttcatcacagatgatgaactcaagaaggtccacgactttgaggagcagtgcattgaagagtacttcagagaaaaggatgacagatttaactcttccaacgatgagcggatccgtgtgacatctgaacgagtcgaaaatatgtcgatgcggcttgaggaggtgaacgagagagagcacagcatgaaggccagcttgcagactgtggatatcagactagcccaactggaagatcttatcggcagaatggcaaccgcattagaacgcctgacgggactcgaaagagccgagtccaacaaaatccggtcacggacctctagcgactgcacagatgcagcctatattgtgcgtcagtcctccttcaacagtcaggaaggtaacacatttaagctgcaggaaagtattgatccagctggcgaagaaaccatgagccctaccagtccaaccctcatgcctaggatgagaagccactccttctacagcgtcaatatgaaagataaaggaggcatcgagaaattggagagcatctttaaagaacggtcactgtctcttcatagagcaacttcctcgcacagcgtagctaaagagcctaaagcaccagccgctcctgctaatacactggctattgtcccggactctcgaagaccttccagctgcatcgacatttatgtaagtgccatggacgagctccactgcgacatcgaccccctggacaattcagttaatatcctcggattaggggagccttccttcagcacccccgtcccttcaactgccccctcgagtagtgcatacgctactctagcacccaccgaccggcccccctctaggtctattgacttcgaagatataactagcatggacacaagatcgtttagctccgattacacacacctgccagagtgtcaaaacccttgggattctgaaccacccatgtatcacacgatagaaagatccaagtcctcgaggtacctggcaacgacgccatttctcctggaggaggcaccaatcgtcaagagtcattccttcatgttctccccaagcagatcctactacgccaatttcggagtacctgtcaaaactgccgagtacacttccatcacagattgcatcgatacacggtgcgtgaacgccccccaagcgattgccgatcgggcggcattccccggtgggctgggcgacaaggtcgaagatttgacatgttgccaccctgagagggaagctgaactgtctcatccatctagtgactcagaggaaaacgaggctaaaggcaggcgcgcgacgattgcaatcagctcgcaggagggcgataactccgagaggacactgagcaataacatcaccgtgccgaaaatagagcgcgcaaatagttacagtgcagaggagcccagcgcaccatacgcacatacaaggaagagcttttctatctcagacaagttagaccgacaacgtaatactgccagcttaagaaacccatttcaaaggtcaaagagctcaaagccagagggtagaggagatagcctatcgatgcgccgattaagtaggacctcagcttttcagagcttcgagagcaagcataactag

SEQ ID NO: 311048 - DNA, 4701 bp, Artificial Sequence
  derived and/or modified sequence
atgtacgtgcgagtcagctttgacactaaacctgatctgctcctacatctcatgaccaaggagtggcaactggaactaccgaagctgttgatttccgtccacggcggcctgcaaaacttcgaactccaacctaagttgaagcaggtgtttggcaaagggctgataaaagcagccatgaccacaggcgcttggatcttcaccggtggtgtgaacactggggtgatcaggcacgtcggtgacgctctgaaagaccatgcctcgaagagtcgaggaaaaatttgcactattggcattgcaccatgggggatagtcgagaaccaggaggacctgattggacgggacgtcgtaaggccataccagacaatgagcaatcctatgtctaagctgactgtgctgaactcgatgcacagccatttcatcctagctgataatggaaccacaggtaagtacggggccgaggtgaagctccggaggcaactagaaaagcacattagcctgcaaaaaattaatacacggatcggtcagggagtgccggtggtggctctgatcgtggagggcggcccaaacgttatttctatcgtattggagtatctgagggatactcccccggtccctgttgtcgtgtgcgatggatcgggacgagcatcagacatcctggcctttggacataagtactctgaagagggcggattgatcaatgaaagcttaagagatcaattgctagtgaccatccaaaagaccttcacctacacaaggactcaggcccagcatttgttcatcatcctgatggaatgtatgaagaagaaagagctaattacagtgttccgcatggggagcgagggacaccaagatatcgacctggccatcctgactgcattactgaagggcgctaacgcctctgccccagaccagctcagtctggcccttgcatggaacagggtagatatagcaagaagccagatttttatttatgggcaacaatggccagtaggcagtctggaacaggccatgctcgacgctctcgtgttagatagagtcgacttcgtgaaactgctaatcgaaaacggcgtctcaatgcaccgtttcctgacgataagccggctcgaggaactctataacacccggcacggcccaagcaataccctctatcacctcgtgagggacgtcaagaagcgtgagtatcccggctttgggtggatctacttcaagggaaatcttccgccagattatcggattagccttatagatatcggtctagtaatcgaatatctcatgggcggtgcctatagatgtaactacacccggaaacgcttcagaacactctaccataaccttttcggtccaaagaggcccaaggctctgaagctgctggggatggaggacgacattccattgcggcgcggaaggaagaccaccaaaaaaagggaggaggaggtggatattgaccttgatgatccagagattaatcactttccctttccgtttcatgagctcatggtttgggccgtgctcatgaaacggcagaagatggctctattcttttggcagcatggcgaagaggccatggcaaaagcgctagttgcttgcaaactctgcaaggctatggcgcacgaagccagtgagaatgatatggtagacgacatttcgcaggagctgaatcacaattctcgcgatttcggccaactggcagtggaactgttggaccagtcttacaaacaggacgagcagttggcaatgaaactgctgacatacgagttgaagaactggtcaaatgctacatgtctccagctggccgtggctgcaaagcaccgggacttcattgctcacacttgctcccaaatgctcctcaccgatatgtggatgggccggctgagaatgagaaaaaactccggattaaaagtgatcctcggaattctactgccaccatccatcctgtccctggagtttaagaataaggacgatatgccttatatgtctcaggcccaagagatccacctgcaggagaaggaggccgaagagcccgaaaaacccactaaagaaaaagaggaagaagatatggaactcacagcgatgctaggacgaaacaacggagagtctagtcggaagaaggatgaagaagaggtacagtctaaacaccgactaatcccactggggagaaaaatttatgagttttataatgcgccaatcgttaaattctggttttacaccttagcatatatcggatacctcatgctgtttaattacattgtgcttgttaaaatggagcgttggccgtccacccaagagtggatcgtaatttcttacatattcaccctgggaattgagaaaatgcgcgaaattcttatgtccgaaccggggaagttgttacagaaggtgaaggtgtggcttcaggaatattggaatgtaaccgacttgatcgccatcctcctattctcagtagggatgattttaagattacaagaccagccattccggagtgatggacgagtgatctattgtgtgaacataatatattggtatatccgcctgctggatattttcggggtgaacaaatacctgggcccttatgtgatgatgattgggaagatgatgatagacatgatgtacttcgttatcatcatgctggtggtgttgatgtccttcggcgtggcaaggcaagctatcctgtttccgaacgaggagccaagttggaagcttgccaaaaatatcttttacatgccttattggatgatttacggggaagtcttcgccgaccaaattgatcccccctgcggccagaatgagactagagaagatggcaagattatccagttgccgccttgtaagacgggcgcttggatcgtacccgccattatggcctgctacctcctagttgccaatattctccttgtgaaccttctgatcgctgtgtttaataatacgttttttgaagtgaagtccatctccaatcaagtatggaaattccagagatatcagctgatcatgacatttcacgagagacccgtcctgcctccacctctgatcatcttctcccatatgacaatgattttccagcacctctgctgtcgctggaggaaacatgagtctgatccggacgaaagggattatgggctgaagttattcattacggacgacgaattgaaaaaagttcacgacttcgaagagcagtgtattgaagaatatttcagggagaaggacgaccggttcaatagttccaacgacgagaggatccgagtcaccagcgaaagggttgagaatatgtcaatgaggcttgaagaagtgaatgaaagggagcactcgatgaaggcgtccctgcaaaccgtggatatacgcctggcccagctggaggacttgattggccgaatggcaaccgccttggagaggctgactggcttggaacgtgccgagagcaacaagatccgaagtcgcactagcagtgattgtacagacgccgcttacatcgttcggcagtcctctttcaattcgcaggagggtaacacctttaagcttcaggagagtatcgacccggctggagaagagacgatgtctccaactagccccactttgatgccccggatgaggagccactccttttattcagtgaatatgaaggataaaggggggattgagaaactggagagcatcttcaaagaacgctccctgtcgctccacagggctacaagcagccatagtgttgctaaggaaccaaaggcaccagctgcacctgcaaacactctcgctatcgtgcccgattcacggagaccctcttcgtgcatcgatatctatgtgtctgcaatggatgaactacactgcgacatagatccgttggataacagtgttaacatactcggtctgggagaaccaagcttcagcactcccgtgccaagcaccgctccttcgtcctctgcttatgctactctggcgccaactgatagacccccctcccggagtattgactttgaggacattaccagcatggatacacgcagcttcagctcagattatacccacttgcctgaatgccagaatccctgggacagtgaacctccaatgtatcacacaattgagcggtcaaagagttcacggtaccttgccactaccccgttcctgcttgaagaggcgccaattgttaagagccactctttcatgttctctccgtccaggtcctactacgcaaattttggcgtccctgtgaaaaccgcggaatacactagcattactgactgtattgacacccggtgcgtgaatgccccacaggccatcgccgaccgagccgccttccctggtggacttggagacaaggtcgaagatttaacttgttgccacccagaacgggaggctgaactgtctcacccttctagcgactctgaggaaaatgaggccaagggtagaagggccaccattgccatctcaagccaggaaggggacaatagcgagcggacactgtctaataacataacggtccccaaaattgagcgcgccaattcctacagcgccgaagagccaagcgctccttatgctcacactcgcaagtcttttagcatttctgataaactggacagacaacgcaacaccgccagtttaaggaatccctttcagcggagtaagagcagtaaaccagaggggcgcggcgattcactatcaatgagacggttgtcccgaaccagcgcctttcaatcctttgagtctaaacacaattag

SEQ ID NO: 311049 - DNA, 4701 bp, Artificial Sequence
  derived and/or modified sequence
atgtatgtgcgggtgtcctttgacaccaagccagacctgctgctgcacctgatgaccaaggagtggcagctggagctgcccaagctgctgatctctgtgcacggcggcctgcagaactttgagctgcagcccaagctgaagcaggtgtttgggaagggcctcatcaaggccgccatgaccactggagcctggatcttcaccggaggagtgaacacaggagtcatcagacatgtgggagatgccctgaaggaccacgccagcaagagccggggcaagatctgcaccatcggcatcgccccctggggcatcgtggagaaccaggaggacctgattggaagagatgtggtgcggccctaccagaccatgagcaaccccatgagcaagctgactgtgctgaacagcatgcacagccacttcatcctggccgacaatggcaccaccgggaagtacggggctgaggtgaagctgcggcggcagctggagaagcacatcagcctgcagaagatcaacaccagaattggccagggcgtgcctgtggtggccctgattgtggagggcggccccaacgtcatcagcatcgtgctggagtacctgcgggacaccccacctgtgcctgtggtggtgtgtgatggcagcggccgggccagtgacatcctggccttcggccacaagtacagcgaggagggcggcctcatcaatgaaagcctgcgggaccagctgctggtgaccatccagaagaccttcacctacaccaggacccaggcccagcacctgttcatcatcctgatggagtgcatgaagaagaaggagctgatcaccgtcttcaggatgggcagcgagggccaccaggacatcgacctggccatcctgacagccctgctgaagggggccaatgccagcgccccagaccagctgagcctggccctggcctggaacagagtggacatcgcccggagccagatcttcatctacggccagcagtggcctgtgggcagcctggagcaggccatgctggatgccctggtgctggacagagtggactttgtgaagctgctgattgaaaatggagtgtccatgcaccgcttcctgaccatcagccggctggaggagctgtacaacaccaggcatggccccagcaacaccctgtaccacctggtgagagatgtgaagaagcgggagtacccaggcttcggctggatctacttcaagggcaacctgcccccagactaccgcatcagcctgattgatattggcctggtgattgagtacctgatgggcggggcctaccgctgcaactacaccaggaagcgcttccgcaccctgtaccacaacctgtttggccccaagaggcccaaggccctgaagctgctgggcatggaggatgacatccccctgcggcggggcaggaagaccaccaagaagcgggaggaggaggtggacatcgacctggatgatcctgagatcaaccacttccccttccccttccacgagctgatggtgtgggccgtgctgatgaagaggcagaagatggccctcttcttctggcagcacggggaggaggccatggccaaggccctggtggcctgcaagctgtgcaaggccatggcccacgaggcctctgaaaatgacatggtggatgacatcagccaggagctgaaccacaacagccgggactttggccagctggccgtggagctgctggaccagagctacaagcaggatgagcagctggccatgaagctgctgacctatgagctgaagaactggagcaatgccacctgcctgcagctggccgtggccgccaagcaccgggacttcatcgcccacacctgcagccagatgctgctgacagacatgtggatgggccgcctgaggatgaggaagaacagcggcctgaaggtgatcctgggcatcctgctgcccccatccatcctgagcctggagttcaagaacaaggatgacatgccctacatgagccaggcccaggagatccacctgcaggagaaggaggccgaggagcctgagaagcccaccaaggagaaggaggaggaggacatggagctgacagccatgctgggcaggaacaacggggagagcagcaggaagaaggatgaggaggaggtgcagagcaagcacaggctcatccccctgggcaggaagatctatgagttctacaatgcccccatcgtgaagttctggttctacaccctggcctacatcggctacctgatgctgttcaactacatcgtgctggtgaagatggagcgctggcccagcacccaggagtggatcgtcatctcctacatcttcaccctgggcatcgagaagatgagggagatcctgatgtctgagcccgggaagctgctgcagaaggtgaaggtgtggctgcaggagtactggaatgtgacagacctgattgccatcctgctcttctctgtgggcatgatcctgcggctgcaggaccagcccttcagaagtgatggccgggtcatctactgtgtgaacatcatctactggtacatccggctgctggacatctttggagtgaacaagtacctgggcccctacgtgatgatgattggcaagatgatgattgacatgatgtacttcgtcatcatcatgctggtggtgctgatgagctttggagtggcccggcaggccatcctcttccccaatgaggagcccagctggaagctggccaagaacatcttctacatgccctactggatgatctacggggaggtgtttgctgaccagattgaccccccctgtggccagaatgagaccagagaagatggcaagatcatccagctgcccccctgcaagacaggagcctggatcgtgcctgccatcatggcctgctacctgctggtggccaacatcctgctggtgaacctgctgattgctgtgttcaacaacaccttctttgaggtgaagagcatcagcaaccaggtgtggaagttccagcgctaccagctgatcatgaccttccacgagaggcctgtgctgcccccacccctcatcatcttcagccacatgaccatgatcttccagcacctgtgctgccgctggaggaagcatgaaagtgaccctgatgagcgggactatggcctgaagctgttcatcacagatgatgagctgaagaaggtgcatgactttgaggagcagtgcatcgaggagtacttccgggagaaggatgaccgcttcaacagcagcaatgatgagcgcatccgggtgaccagcgagcgggtggagaacatgtccatgaggctggaggaggtgaatgaaagagagcacagcatgaaggccagcctgcagacagtggacatccggctggcccagctggaggacctgattggaaggatggccacagccctggagcggctgaccggcctggagagagctgagagcaacaagatccgcagcaggaccagcagtgactgcacagatgctgcctacatcgtgcggcagagcagcttcaacagccaggagggcaacaccttcaagctgcaggagagcattgatcctgctggggaggagaccatgagccccaccagccccaccctgatgcccaggatgaggagccacagcttctacagcgtgaacatgaaggacaagggcggcatcgagaagctggagagcatcttcaaggagaggagcctgagcctgcaccgggccaccagcagccacagcgtggccaaggagcccaaggccccagctgccccagccaacaccctggccatcgtgcctgacagcagaagacccagcagctgcatcgacatctacgtgtctgccatggatgagctgcactgtgacatcgaccccctggacaacagcgtgaacatcctgggcctgggggagcccagcttcagcacccctgtgcccagcacagcccccagcagcagcgcctatgccaccctggcccccacagacaggcctcccagccgcagcattgactttgaggacatcacctccatggacaccaggagcttcagcagtgactacacccacctgcctgagtgccagaacccctgggacagcgagccccccatgtaccacaccatcgagaggagcaagagcagccgctacctggccaccacccccttcctgctggaggaggcccccatcgtgaagagccacagcttcatgttcagccccagccgcagctactatgccaactttggagtgcctgtgaagacagctgagtacaccagcatcacagactgcatcgacacccgctgtgtgaatgccccccaggccatcgctgacagagctgccttccctgggggcctgggggacaaggtggaggacctgacctgctgccaccctgagcgggaggccgagctgagccaccccagcagtgacagcgaggagaatgaggccaagggccggcgggccaccatcgccatcagcagccaggagggggacaacagcgagaggaccctgagcaacaacatcaccgtgcccaagattgagcgggccaacagctacagcgctgaggagcccagcgccccctatgcccacaccaggaagagcttcagcatcagtgacaagctggaccggcagaggaacacagccagcctgaggaaccccttccagaggagcaagagcagcaagccagagggccgcggggacagcctgtccatgaggcggctgagcaggaccagcgccttccagagctttgagagcaagcacaactag

SEQ ID NO: 311050 - DNA, 4701 bp, Artificial Sequence
  derived and/or modified sequence
atgtacgtgcgggtgagcttcgacaccaagcccgacctgctgctgcatctgatgaccaaggaatggcaactggagttaccgaaactattaatctcggttcacggaggtctacagaattttgagctgcagcctaaattaaagcaagtgtttggcaaaggccttattaaagccgcaatgaccactggggcttggatcttcacaggaggggtaaacaccggcgtgattaggcacgtcggggatgcactgaaggatcacgcatcaaagagccgtggcaaaatctgtacgatcggaatcgcgccttggggtattgtagagaatcaggaggatctcattggccgggacgtcgtgaggccctatcagactatgtctaaccccatgtctaaactgacggtccttaactcaatgcacagtcattttatactggcggataatgggaccacaggaaagtatggagctgaggtgaaactcagaaggcagctggagaaacacattagcctgcagaagatcaacacccgtattggccagggggtgcccgtggtggcgttgatcgttgagggggggcccaatgtaatcagcatcgtgcttgagtacttgcgcgacacacccccagtcccggtggtggtgtgcgatggctccgggagggcatccgacatcttagcctttggtcacaagtatagcgaggagggtggccttatcaacgagagtctgcgcgatcagctactggtgaccattcagaagacttttacatatactcgtacccaggcccagcacctgtttattattttgatggaatgtatgaaaaagaaggagctgatcactgtcttccgcatgggaagcgaaggccaccaggatattgatctggcaatactgacagctctgctgaaaggagcaaacgcctcagcccccgatcagttgtccctagctctggcttggaaccgtgttgatatcgcccgcagccagatctttatctatggacaacaatggccagtcgggtccctagagcaggccatgctagatgctctcgtgcttgaccgggttgactttgtgaagctgctcattgagaacggcgtatcgatgcacagatttctgactatttctcggcttgaggaattgtataacacaaggcacgggccttctaatactctgtatcacctagtgcgggacgtgaaaaagcgcgagtaccccggattcggctggatttactttaaagggaacctgccaccagattatcggatcagcctgatcgatatcggactggtgatcgaatacttaatgggaggggcatatcggtgtaactatacccggaagagattccgcaccttgtatcacaacttgtttggacccaaaagaccaaaggccttaaagttgctggggatggaggacgacatccctctgagacgcggtagaaaaaccacaaagaaacgagaggaagaggttgacattgacttagacgaccctgaaattaaccattttccattccctttccatgagttgatggtctgggcagttttgatgaagcggcagaagatggccctgttcttctggcaacacggcgaggaagcgatggctaaagcgctagtagcctgtaagctgtgcaaggcaatggcacacgaggcatccgagaatgacatggttgacgacattagccaggagctgaaccacaattcccgggattttggtcagctcgccgtcgaactcttggaccagtcatataagcaggatgaacaactcgctatgaagctactaacatatgaattaaaaaattggagcaatgctacatgcctgcaattggctgtggctgccaaacaccgggactttatcgctcacacctgctctcagatgctgctgacggacatgtggatgggtcgcttgaggatgcgcaaaaattcgggcttgaaggtcatcctgggaattttgctcccaccttctatactgagcctagaatttaagaataaggatgatatgccgtacatgagtcaggcacaggagattcacctccaggagaaggaagcggaagagcccgagaaaccaactaaggagaaggaagaggaggacatggaactgacggccatgctgggaagaaataacggtgagtcatccagaaaaaaagacgaagaggaggtgcagtccaaacacagactgatacctcttggccgtaagatctacgaattctataacgcacccattgttaaattttggttctacaccctggcttacattgggtacttgatgctttttaattatatcgtgttggtcaagatggagagatggccctctacacaggaatggattgtaattagctatatcttcacactcggcatcgagaagatgagagaaattctcatgtcagaacccggcaagctactccagaaggttaaggtgtggctccaggagtattggaatgtcaccgatctcattgccatcctgcttttttctgtgggcatgatcctgcgcctacaggaccaaccctttcgctccgatggcagggttatttattgtgttaatataatttactggtatatccgtcttctggacatttttggcgtgaataagtatctgggaccatacgtgatgatgattggcaagatgatgatagatatgatgtacttcgtgatcatcatgttggttgtcctgatgagctttggcgtcgctcgacaggccatcctgttccccaatgaagaacctagctggaaacttgcaaaaaatatcttctatatgccctattggatgatctatggcgaggtgtttgctgatcagatcgatccgccttgcggccagaatgaaactagggaggatggtaagattatacaactgcctccttgtaaaacgggcgcatggatcgttccagccatcatggcctgctatttactagtggctaacatcctcctcgtgaatctactaatcgccgtcttcaataataccttcttcgaggtcaagtccattagcaaccaggtgtggaaatttcagaggtaccagctcatcatgacattccatgagcgacctgtgcttccccctccgctgatcatattctcccacatgaccatgatcttccagcacctctgctgtcgatggcgcaagcacgagtccgacccagacgagagggattacggtttaaagctcttcatcactgatgatgagctaaaaaaagtacatgattttgaggaacagtgtattgaggaatactttagagaaaaggacgacaggtttaatagcagcaacgacgaaagaatacgggtcacgtcggagagggtggagaacatgagtatgaggcttgaggaggttaacgaaagggagcatagcatgaaagcatccctccagactgtggacattagattggcacagcttgaagatttgattggacgaatggcaaccgccctcgaaaggctcacaggcctagagagagccgaatctaataaaatcaggtctcgcacgtcttccgattgcactgatgccgcttacatcgtcagacagtcctctttcaactcacaggagggcaatacctttaaactgcaggagtccatcgaccctgccggagaggagaccatgtcacccactagccccacactgatgcctcggatgcggtctcactccttctactcagtaaatatgaaagacaaaggaggcatagaaaagctggagtcaatatttaaagagagatcactgtccttgcaccgcgccacaagcagtcattcagtggcaaaggaacccaaggcgcctgctgcccctgccaataccctggccatagtccccgactctcgtaggcccagcagctgcattgacatttacgtcagcgcaatggacgaactccattgtgacatcgacccactagacaattctgtgaacattctgggactgggcgaaccctccttcagcacacccgtgcctagtacagccccttccagcagtgcctacgcaaccttggcgcccactgaccgacctccctctagatcaatcgactttgaagatatcacctctatggatactcgatctttctcctcagattatacccatttacctgagtgtcagaatccatgggacagcgagccccctatgtatcatacaatcgagcgtagcaagtcctctcgctatctggccacgacgccttttctcctcgaggaggcccctatcgtgaaatctcacagctttatgttttctccaagtcgctcatactacgctaattttggggtaccagtcaagacggcggagtatacgtcaattaccgattgtatagacacccgctgcgtcaacgcacctcaggctatcgcagacagggccgcttttcccggaggtttgggtgacaaagtggaggacctgacttgttgtcaccctgagcgcgaggccgagctgtctcaccccagttctgattccgaagagaacgaggctaaaggtaggcgggccaccattgcaataagctcacaggagggcgacaacagcgagaggactctatctaacaacattaccgttccaaagatcgaaagggccaattcttattctgctgaggagccctctgccccctacgctcacacccgaaaatccttttccatttcggacaagctcgaccgccagcgcaacaccgctagcctgcgcaacccctttcaaaggtcaaaatcctctaagccagagggcagaggggattcactttctatgcgaagactgtcccgtactagcgcgttccagagcttcgaaagcaagcacaattag

SEQ ID NO: 311051 - DNA, 4701 bp, Artificial Sequence
  derived and/or modified sequence
atgtacgtgcgggtgagcttcgacaccaagcccgacctgctgctgcacctgatgactaaggaatggcagctggagctgccaaaactgcttatttccgtccatgggggactacagaattttgaacttcagcccaagctgaaacaagtcttcgggaagggcctgatcaaggccgcaatgaccacgggggcctggatcttcacagggggcgtaaacacaggggtcatccggcacgtcggagatgcactcaaagatcacgctagtaagtcaaggggcaaaatctgcacaatcggaatcgccccttggggtatcgtagagaaccaggaagatctgatcgggagggacgttgtcagaccttatcagacaatgtccaatcccatgtccaaactcactgtgctgaattcgatgcacagccacttcatcctggcagataacggcacaaccggcaagtacggcgccgaggtgaagctccgacggcagttagaaaagcatatttctttacaaaagattaacactcggatcggtcagggcgtgcccgtggtggctctgattgtcgagggcgggcccaatgtcattagtattgtgctggagtatctgagggacacgccccccgtcccggttgtggtgtgcgatgggtccggtcgggccagcgacatattggcttttggacacaagtatagtgaggaagggggattgatcaatgaaagtttgcgggatcaactgttggtcacaatccagaagacattcacctatacccggacccaggcacaacacctgttcattatcctgatggagtgcatgaagaagaaggagcttataacagtattccgaatgggcagcgaaggacaccaggatatcgaccttgcaattctgacagccctcttaaagggagctaacgcttccgctccagaccagctgtcgctagctctagcctggaatcgggtggatatcgcccggtcccaaatattcatttacggtcagcaatggccagtgggatcgcttgagcaggcgatgctggacgccctcgtcctcgatagggtcgatttcgtgaaactgctaatcgagaacggagtctccatgcacaggtttctgacaatttctcgcctcgaggagctctacaatactagacatggtccgagcaataccctctatcacctggtgagggacgtaaagaaaagagaataccccggattcggctggatttactttaaggggaatttgcctccagattaccgcatctcacttattgatattgggttagtgattgaatacctcatggggggtgcctatcggtgtaattatacgagaaagagattccggacactgtaccacaacctctttggccctaagagacccaaagccttgaagttgctgggaatggaagatgacattccactcaggcggggacgcaagacgacaaagaagcgggaggaggaagtggacattgacctggacgatcctgaaattaatcactttccttttccatttcatgaattgatggtgtgggccgtgctgatgaagagacagaagatggcactctttttctggcagcacggggaggaggctatggcgaaggccttggtggcttgtaagctgtgcaaagctatggctcacgaagcttctgagaacgacatggtagacgatatatctcaggaacttaatcacaattcacgggactttggccagttggccgtggaactgctggatcagtcgtataagcaggacgaacagcttgctatgaagctgttgacctacgaactgaaaaattggtctaacgccacctgccttcagctggctgtcgcggccaagcatcgcgatttcatcgcgcacacatgctcccagatgcttcttacagacatgtggatgggccggctccgtatgagaaagaacagcggtctgaaggtgattctgggaattctcctgcccccctctattctcagccttgaatttaaaaacaaagacgatatgccctatatgtcacaagcacaggagatccatttgcaagagaaggaagctgaagagcccgagaagcccaccaaggagaaggaagaagaggatatggagctcaccgcaatgctcggacggaacaacggagaatccagtcggaaaaaagacgaggaggaggtacaatcgaaacatagactaattccactaggacgaaagatctacgagttttataacgctcccatcgtcaagttttggttctacaccttggcctatatcggctaccttatgctgtttaattatatcgttcttgtgaagatggaaagatggccctctactcaagagtggattgtgatatcctacatatttactctcggtatcgagaagatgcgagagatcttgatgtccgagccgggcaaactgctgcagaaggtcaaggtgtggctccaggagtactggaacgtgacagacctgatcgctatcctcctgtttagcgtgggtatgattctccgtctgcaggaccagccttttagaagcgatgggagggtaatctactgcgtcaacatcatctattggtatattcgtcttctagacattttcggagtgaacaaatatctggggccctacgttatgatgatcggcaaaatgatgattgacatgatgtatttcgtgatcattatgctggtagtcttaatgtccttcggcgtggctcgacaggccatattgtttccaaatgaggaaccatcctggaaacttgcaaaaaacatcttctatatgccttactggatgatctatggtgaggtctttgcagaccagatcgacccgccctgcggacaaaatgagactcgagaagatggcaagatcatccagttgcctccatgtaagactggcgcctggattgtccccgccataatggcttgctatctgttggttgcaaatattttactggtgaatctgctaatcgctgtgttcaacaacacctttttcgaggtcaagagtatttcaaatcaagtttggaagttccaaagataccagcttatcatgacgttccacgaacgccccgtgctcccaccgccgttaatcatcttctcacatatgaccatgatatttcagcacctttgttgcagatggcgaaagcacgagagtgatcctgacgaacgggattacggtttgaaactgttcataacagacgacgagttgaaaaaagtgcacgatttcgaggaacagtgcattgaagagtattttagagagaaggacgacaggtttaactcgtctaacgatgagaggattcgggtcacaagcgagcgagttgaaaatatgagcatgcgccttgaagaagtaaacgagagggaacactctatgaaggcctcgctgcagaccgtcgacattaggctggcccagctcgaagaccttatcggccgtatggccacggctctggaaagactcactggactggagcgcgctgaaagcaataagattcggtcccgcacctcaagcgactgcacggatgccgcgtacatagtcagacagtcaagcttcaatagtcaggaagggaacactttcaaattgcaggagtcaatcgacccagcaggtgaagaaaccatgtcccctacctcgccaacccttatgcctcggatgcggtcacattccttctatagcgtaaacatgaaggacaagggagggatcgaaaagttggagtccatctttaaggaacgaagcctttccctccaccgcgcgacatcttctcactctgtggcaaaggaaccaaaagcccccgccgccccagccaacactttggctatcgttccagacagccggaggccatcatcctgcatagacatttacgtgagcgccatggatgaacttcactgtgatattgatcctctcgacaactcagtgaacatccttgggctgggtgagccctcctttagtacccctgtcccttccacagccccttcttccagcgcatatgcaacgctagctcccaccgacagacctccaagccgatccatcgactttgaggatatcacatcaatggacacacgtagctttagttctgactacacacacctcccagagtgccagaacccttgggatagcgaaccacccatgtaccacactattgagcgctcaaagtcttcccgttatttggctacaacacccttcctgcttgaggaggcaccaattgtcaagtcccattcattcatgttttccccttctcgatcctattatgctaattttggggtgccagttaagactgccgaatatacttcaattacagactgtatcgatacacgctgtgtgaatgccccacaggcgatcgcagatagagcggcatttcctggcggactaggagacaaagtcgaggatctcacttgttgccacccggaaagagaagcagagctgagtcacccttcgagtgactcagaggagaatgaggctaaggggcgtcgggccacaattgctatttctagccaggagggggataatagcgagaggacattgtcgaacaatattactgttccaaaaatagaacgggcgaactcctactctgctgaggagccaagcgctccctacgcacatacacggaagagcttttcaatcagcgacaaactagaccgccagcgcaataccgcatccctccgcaaccccttccagcgcagtaagagctccaaacctgaaggacggggagacagcctcagcatgcgcaggctctccaggactagtgccttccagtcattcgagagcaagcataattag

SEQ ID NO: 311052 - DNA, 4701 bp, Artificial Sequence
  derived and/or modified sequence
atgtacgtccgcgtttctttcgataccaagcccgacttgctgcttcatctcatgaccaaggagtggcagctcgagcttccaaagctcctaatatccgtccacgggggtctccaaaatttcgaacttcagccaaaactcaagcaagtttttggtaaggggctgatcaaggccgcaatgaccacaggagcctggatattcaccggaggagtaaatacaggcgtgattcgccatgttggtgacgccctgaaagatcatgcctccaaaagtagaggcaagatctgtactattggaatcgcgccttggggcatcgtggagaatcaggaggacctgatcggcagggatgtcgtgcgcccttaccagactatgagcaatcccatgagcaagctgacagtgctgaactcaatgcacagccacttcatactcgctgacaacggaacaaccggcaaatacggagcagaggttaagttgcgcagacaactcgagaagcacatttctttgcagaaaatcaacacccgtattggacagggagttcctgtggtcgcgttaatcgttgaaggtggccctaacgtgatctcgattgtgcttgagtatctcagagatactccccctgtgcccgtcgtagtgtgtgacgggtctgggagggcatccgacatcttagcctttggacacaagtatagcgaggagggaggtttaatcaacgagagtctgagagaccaattgctggtcacaatccaaaaaacctttacatatacgcgtactcaagcacaacacctgtttatcatcctcatggagtgtatgaagaagaaagagctcataaccgtgttcagaatgggaagcgagggtcatcaggatatcgatctcgccattctcacagctctgctgaagggggcaaatgccagtgcacccgaccaactttctctagcactcgcatggaaccgcgtagacatcgccaggtcccagatatttatatatggacagcagtggcctgtagggtcactcgaacaagcaatgctggatgcactggttttggatcgggtggatttcgttaaacttctgatagaaaatggggtcagcatgcatagattcctcaccatctcccgccttgaagagctgtataacacccgtcatggcccttccaacactctgtaccacctagtccgtgacgtgaagaaacgggaatatccaggcttcggctggatctactttaaaggtaacttacctcccgattatagaatcagtcttattgacatcggacttgtgatagagtacctgatgggcggagcatacaggtgtaactacactagaaagcgctttcgcactctctaccacaacctgttcgggcctaaacgccctaaagccctgaagctcctcggtatggaggacgatatcccactgcggcgaggaagaaaaaccacgaaaaaacgtgaggaggaagtcgacattgacttggacgatccagagataaatcattttccttttcccttccacgagttgatggtgtgggctgtgcttatgaaacgtcagaaaatggctctgtttttctggcagcatggagaagaggcgatggccaaggctctggtcgcctgcaagctttgcaaagcaatggctcatgaggccagcgaaaacgacatggttgatgatatctcacaggagcttaaccacaatagtcgagatttcggccaactggccgttgagttactggatcagagctacaagcaggatgagcagcttgctatgaagctcctgacctacgaacttaagaattggagcaatgcaacttgcttgcagcttgcagttgctgcaaaacacagggacttcattgcacacacctgctcccaaatgctgctcactgatatgtggatgggtagactgagaatgcgcaagaattccggcctaaaggtcattttgggcatcctgctacctccaagtatcttaagcctcgagttcaagaataaagatgatatgccttatatgagtcaggcccaggaaatccatttgcaggagaaagaggccgaggaacctgagaaaccaacgaaggagaaggaagaggaggacatggaacttactgctatgctcggcaggaacaatggagagtcctcgaggaagaaagatgaggaggaggtgcagtctaaacatcgtctcatcccactggggcgaaaaatctacgagttctacaacgctccaatcgttaagttctggttctacacgctggcttatatcgggtatctgatgctgttcaactatattgttctggtaaagatggaaaggtggcctagtacccaggaatggatcgttatctcgtacatcttcacgctaggcattgaaaagatgcgcgagatcctgatgagcgaacccggtaagctgctgcagaaggtcaaggtgtggctgcaggagtattggaacgtgaccgatctgatagccattctcctgttctctgtaggaatgatactccggctgcaggatcagccattccgatcagatggcagagtaatttactgtgtcaatatcatttattggtatattcgcttgctggatatctttggtgtcaacaagtacctcggcccttatgtgatgatgataggaaagatgatgatcgacatgatgtatttcgtgattatcatgctggtagtcctgatgagctttggagtcgcacgacaggcaatcctgtttcctaatgaggaaccctcgtggaagctggccaagaacatcttctacatgccctattggatgatatatggtgaggtgtttgccgatcaaatcgaccctccttgtggacagaatgagacgcgtgaggatggcaagataatacagttgccgccatgtaaaaccggtgcgtggatagtcccagctatcatggcctgctacctactcgttgccaatatacttctcgttaacctgttgatagctgtgttcaataataccttttttgaggttaaatctatctccaaccaggtgtggaaatttcagcgttaccaactcataatgactttccatgaacgcccagtgctgccccctccactaattatcttctctcatatgacgatgatcttccaacacctgtgctgtcgttggaggaagcacgagtctgacccagatgagagagactacggcctgaagctttttataaccgacgacgaactgaaaaaagtccatgacttcgaagaacagtgtatcgaagaatacttcagggagaaggatgaccgctttaacagtagcaatgacgaaaggattcgagtgacgtccgagagagttgagaacatgtcaatgcgcctggaagaggtcaacgagcgagagcacagcatgaaggctagcctccagacggtcgacatacgtttggctcaactcgaggatttgattggccgtatggctacagcgctagagcgtttgaccggtctggagagagccgagtctaataagatacgctctcgcaccagttcggattgcaccgacgccgcttacatcgtgcgtcagagctcatttaattcacaggagggcaatacctttaaactgcaagagtcgatcgaccccgctggagaggagaccatgtcacccacaagccccacccttatgcctcgcatgcgcagccacagcttttactctgttaatatgaaagacaagggtgggatcgaaaagctcgagtctatttttaaggagcgatcattgtccctgcatagggccacaagctctcattctgtggcaaaagaacccaaagctcctgctgccccagcaaatactcttgccattgtgccagacagccgcagaccatcttcctgtatcgatatttacgtgtccgccatggacgaactgcactgtgacattgacccactggataatagcgtcaatattctgggcctgggagagccaagtttctcaacccctgtaccgtcgactgcaccgtcctccagcgcatacgcgacactggcgcctactgatcgcccaccaagcaggtctatcgattttgaagatattacgagcatggatactaggtccttcagttctgactacacccatttgcctgaatgccaaaacccttgggacagcgagcctccaatgtaccacaccattgaaaggagtaaaagttcacgatatctggccacaaccccatttttgctcgaagaggctccaattgttaagtcacactcattcatgttttcaccgtctaggtcctactatgctaattttggcgtgccagtaaagaccgccgaatatacttccattacagactgtatcgatacccgatgcgtaaatgcacctcaggccatcgccgaccgcgctgctttccctggagggctcggtgacaaggtcgaggatcttacttgctgccatccagagagagaagccgagctgtcccacccttcatcagattcagaggaaaacgaagcaaaagggcgacgggcaaccattgcaatatccagtcaagaaggcgacaattcggaaagaaccttgtccaataatattacggttcccaagattgaacgggcaaattcttacagcgcggaagagccttcggccccttacgcacatacgagaaaaagctttagcatctcggataaactcgacaggcagagaaatacagcctccctcaggaatccattccagcgcagcaaatcatcgaagcccgaaggccgtggggacagcttaagtatgcgcaggctctcccggacgtccgccttccaatcgtttgagagcaagcataattag

SEQ ID NO: 311053 - DNA, 4701 bp, Artificial Sequence
  derived and/or modified sequence
atgtacgtccgagtatccttcgacacaaagccggatcttcttctgcatctcatgaccaaggaatggcagctggagttgccgaagctgcttataagcgtgcacgggggtctgcagaatttcgagctgcagccaaagctcaagcaggttttcgggaagggtctcattaaggccgctatgacaaccggggcatggatttttaccggtggcgtcaacactggtgtaattcgccatgttggggatgcactgaaggaccatgcctccaaaagtagaggtaaaatttgcactatagggattgcaccctggggcatcgtagagaatcaggaggatctgatcggtcgggacgtggttcgtccctaccagactatgtcaaacccaatgagcaaactcaccgtactgaactctatgcattcccacttcattttggcagataatggcaccacaggcaagtacggcgctgaggtgaaactgcgccgacagctagagaaacacatctcccttcagaagattaacacccggattggacagggggttccagtggtggctcttatcgtagaagggggtcccaacgtaatctcaatcgttcttgagtaccttcgagacacaccccctgttcctgtggtggtctgtgacggttctggcagagcaagcgacattttagcatttgggcacaagtattctgaggaagggggattgattaatgaatcgctgcgggaccagctattggtaacaatccagaaaacatttacatacacccgcacacaggcccagcatctcttcataatcctgatggaatgtatgaaaaagaaggaactcatcaccgtgttccgaatgggatctgaagggcatcaagacattgacctggctatcctcacggccctgctgaagggtgcaaacgcctccgccccagatcagctttctctcgctctcgcgtggaatagggtcgacatcgccagatcccagatctttatttacggacagcaatggccggtaggtagccttgagcaggctatgcttgatgccctggtgttggaccgggttgacttcgtaaagctactgatagagaacggagtatccatgcacaggttccttaccatctcccgtttagaggagctgtataacacgaggcacggacccagcaatacgctgtatcacctagtccgtgacgtgaagaaaagagagtacccaggcttcggctggatttattttaaaggcaatctaccccctgactacagaatctctcttattgatattggccttgtgatcgagtacctaatgggcggagcctaccggtgtaactatacccgtaaacggtttcgaaccctctatcacaatctttttggacccaagcggccaaaagccctgaagctgctgggtatggaagatgatattccactcagaaggggtcgaaaaaccacgaagaaaagagaggaggaagtggatattgacctggacgaccccgagataaaccactttccattcccattccacgaattgatggtgtgggccgtgctgatgaaacgtcagaagatggcgctgttcttctggcaacatggggaggaggccatggcaaaagctctggtcgcgtgtaagctttgcaaggccatggcccatgaggcttctgagaacgatatggtcgacgacataagccaggagctaaatcacaattcccgggattttgggcagctggccgttgagctcctcgaccaaagctataagcaagatgagcagctggctatgaagcttttgacctatgagctcaaaaattggagtaacgctacttgtctgcagttggctgtggccgcaaagcatcgcgacttcatcgcccacacctgtagtcagatgctgctgacagatatgtggatgggcagattgcggatgagaaaaaattctggtctgaaagtgatcttgggaatactcctgccaccctcaatcttgtctcttgagttcaagaacaaggacgacatgccatacatgtcacaagctcaggaaatccacctacaggaaaaagaagctgaagagccggaaaaacccaccaaggaaaaggaagaagaggatatggaacttacggccatgcttggccgtaataatggggagagctcgcgaaagaaggatgaggaggaggtgcagagtaaacatcggctgatcccactgggtaggaagatatatgaattttacaacgccccaatcgttaagttttggttttacacactagcgtacataggatacctgatgttatttaattacatcgtgttagtgaagatggagaggtggcccagtactcaggaatggatcgtgatcagctacatcttcactcttggcattgagaaaatgcgcgaaatcctgatgagcgaaccaggaaagctcctccaaaaagttaaagtctggctgcaggagtactggaacgtgaccgacctcatcgctatattattattctccgtgggaatgatcctgcggttgcaggatcaacccttcaggagtgatggacgtgtcatttactgcgtaaacataatttactggtatattcgtttgcttgacatctttggtgtaaataagtacctcgggccatacgtcatgatgatcggtaagatgatgatcgatatgatgtatttcgtcatcatcatgctggttgtgctgatgtccttcggtgttgctcggcaggcaatcctgttcccaaatgaggagccaagctggaagctcgcaaagaacatattttacatgccttactggatgatctacggcgaggttttcgcggaccagattgaccccccatgcggtcaaaacgagacacgtgaggatgggaagattatccaactgccgccttgcaagactggtgcttggatcgtgccagccatcatggcatgctacctcctggtggccaatattctacttgtcaaccttcttattgctgtcttcaataacactttctttgaggtaaagtccatttctaaccaagtgtggaagttccagcgttaccaactgatcatgacatttcacgagaggcctgttctcccacctccccttataatcttctcccatatgacaatgattttccaacacctttgctgtcgctggcggaagcacgagtctgatcccgatgaacgtgattacgggctcaaattgttcataacggatgacgagcttaaaaaggtacatgatttcgaggagcagtgcatcgaggaatatttcagagagaaggacgaccggtttaattcttccaatgatgagcgaatcagggtgacgtccgagcgagtggagaacatgtccatgaggctggaagaggtaaacgaaagagaacatagtatgaaagctagcctgcagaccgttgacattcggctggcacagctggaggacctcattggaagaatggcgactgcattggagaggctcacggggcttgagagagcggagtcaaacaagatccgaagcagaacaagcagcgactgcacagacgccgcttatattgtacggcagtcctcctttaacagccaggagggaaataccttcaagctccaagaaagtattgaccctgcaggagaggaaaccatgagccccacgtctccaacattgatgcccaggatgcgttcccatagcttttatagtgtaaatatgaaggataagggcggaattgaaaagctggaatcaatctttaaagaacgctctctctcattgcaccgggctacctcatctcatagcgttgctaaagagcctaaggccccagcagcacctgccaacaccttagccattgtgcctgacagccggcgaccaagttcttgcatcgatatttatgtgtcagccatggatgaactgcactgtgacatcgacccgctggataatagtgttaatattctaggtcttggagaacctagtttctccacccctgtccctagcacagcccctagctcctcagcttacgccactcttgcccctacagaccggcctccaagccgaagtattgacttcgaagatattacatccatggatacaaggtccttctcaagtgattatacacatttacccgaatgccagaacccctgggattccgaaccccctatgtaccacacaattgagcgctccaagtcgtctaggtacctcgccaccactccttttctgctcgaggaggcacccatagtaaaatctcattcctttatgttctccccaagcaggtcctattacgcaaacttcggtgtgcccgtgaagacagccgaatacacgagtattaccgactgcatcgatacccgctgcgtgaatgcccctcaagctattgcagacagagctgctttcccaggtggtctgggagataaggtcgaggacctgacctgctgtcatcctgagcgtgaggctgagctgagccacccttcctctgattccgaggaaaacgaggcaaagggcagacgagccactatcgcaatttcctcacaagagggtgacaattccgagcggactcttagcaataatatcacagtgcctaagatagagcgcgctaacagctattctgctgaggagcctagtgctccttacgcacacactagaaagtcctttagcattagcgataaactcgataggcagaggaacaccgccagcttgagaaacccgttccagcggagcaagtctagtaaaccagagggcaggggggactccctgagtatgcgaaggctgagtaggacctcggcttttcagagcttcgagtcgaagcacaactag

SEQ ID NO: 311054 - DNA, 5957 bp, Artificial Sequence
  derived and/or modified sequence
agctgcagcaaaatgaaagcaacaggagctgctccggggactgcttttgccagtacccagaatcagtgctcaggctcagaaatcctggatagaaagagcattttataaaagagaatgtgtccacatcatacccagcaccaaagacccccataggtgttgctgtgggcgtctgataggccagcatgttggcctcacccccagtatctccgtgcttcagaatgagaaaaatgaaagtcgcctctcccgaaatgacatccagtctgaaaagtggtccatcagcaaacacactcaactcagccctacggatgcttttgggaccattgagttccaaggaggtggccattccaacaaagccatgtatgtgcgagtatcttttgatacaaaacctgatctcctcttacacctgatgaccaaggaatggcagttggagcttcccaagcttctcatctctgtccatgggggcctgcagaactttgaactccagccaaaactcaagcaagtctttgggaaagggctcatcaaagcagcaatgacaactggagcgtggatattcactggaggggttaacacaggtgttattcgtcatgttggcgatgccttgaaggatcatgcctctaagtctcgaggaaagatatgcaccataggtattgccccctggggaattgtggaaaaccaggaggacctcattggaagagatgttgtccggccataccagaccatgtccaatcccatgagcaagctcactgttctcaacagcatgcattcccacttcattctggctgacaacgggaccactggaaaatatggagcagaggtgaaacttcgaagacaactggaaaagcatatttcactccagaagataaacacaagaatcggtcaaggtgttcctgtggtggcactcatagtggaaggaggacccaatgtgatctcgattgttttggagtaccttcgagacacccctcccgtgccagtggttgtctgtgatgggagtggacgggcatcggacatcctggcctttgggcataaatactcagaagaaggcggactgataaatgaatctttgagggaccagctgttggtgactatacagaagactttcacatacactcgaacccaagctcagcatctgttcatcatcctcatggagtgcatgaagaagaaggaattgattacggtatttcggatgggatcagaaggacaccaggacattgatttggctatcctgacagctttactcaaaggagccaatgcctcggccccagaccaactgagcttagctttagcctggaacagagtcgacatcgctcgcagccagatctttatttacgggcaacagtggccggtgggatctctggagcaagccatgttggatgccttagttctggacagagtggattttgtgaaattactcatagagaatggagtaagcatgcaccgttttctcaccatctccagactagaggaattgtacaatacgagacatgggccctcaaatacattgtaccacttggtcagggatgtcaaaaagcgagagtatccaggtttcggttggatctattttaaggggaacctgcccccagactacagaatcagcctgattgacatcggcctggtgatcgagtacctgatgggcggggcttatcgctgcaactacacgcgcaagcgcttccggaccctctaccacaacctcttcggccccaagaggcccaaagccttgaaactgctgggaatggaggatgatattcccttgaggcgaggaagaaagacaaccaagaaacgtgaagaagaggtggacattgacttggatgatcctgagatcaaccacttccccttccctttccatgagctcatggtgtgggctgttctcatgaagcggcagaagatggccctgttcttctggcagcacggtgaggaggccatggccaaggccctggtggcctgcaagctctgcaaagccatggctcatgaggcctctgagaacgacatggttgacgacatttcccaggagctgaatcacaattccagagactttggccagctggctgtggagctcctggaccagtcctacaagcaggacgaacagctggccatgaaactgctgacgtatgagctgaagaactggagcaacgccacgtgcctgcagcttgccgtggctgccaaacaccgcgacttcatcgcgcacacgtgcagccagatgctgctcaccgacatgtggatgggccggctccgcatgcgcaagaactcaggcctcaaggtaattctgggaattctacttcctccttcaattctcagcttggagttcaagaacaaagacgacatgccctatatgtctcaggcccaggaaatccacctccaagagaaggaggcagaagaaccagagaagcccacaaaggaaaaagaggaagaggacatggagctcacagcaatgttgggacgaaacaacggggagtcctccaggaagaaggatgaagaggaagttcagagcaagcaccggttaatccccctcggcagaaaaatctatgaattctacaatgcacccatcgtgaagttctggttctacacactggcgtatatcggatacctgatgctcttcaactatatcgtgttagtgaagatggaacgctggccgtccacccaggaatggatcgtaatctcctatattttcaccctgggaatagaaaagatgagagagattctgatgtcagagccagggaagttgctacagaaagtgaaggtatggctgcaggagtactggaatgtcacggacctcatcgccatccttctgttttctgtcggaatgatccttcgtctccaagaccagcccttcaggagtgacgggagggtcatctactgcgtgaacatcatttactggtatatccgtctcctagacatcttcggcgtgaacaagtatttgggcccgtatgtaatgatgattggaaaaatgatgatagacatgatgtactttgtcatcattatgctggtggttctgatgagctttggggtcgccaggcaagccatcctttttcccaatgaggagccatcatggaaactggccaagaacatcttctacatgccctattggatgatttatggggaagtgtttgcggaccagatagaccctccctgtggacagaatgagacccgagaggatggtaaaataatccagctgcctccctgcaagacaggagcttggatcgtgccggccatcatggcctgctacctcttagtggcaaacatcttgctggtcaacctcctcattgctgtctttaacaatacattttttgaagtaaaatcgatatccaaccaagtctggaagtttcagaggtatcagctcatcatgactttccatgaaaggccagttctgcccccaccactgatcatcttcagccacatgaccatgatattccagcacctgtgctgccgatggaggaaacacgagagcgacccggatgaaagggactacggcctgaaactcttcataaccgatgatgagctcaagaaagtacatgactttgaagagcaatgcatagaagaatacttcagagaaaaggatgatcggttcaactcatctaatgatgagaggatacgggtgacttcagaaagggtggagaacatgtctatgcggctggaggaagtcaacgagagagagcactccatgaaggcttcactccagaccgtggacatccggctggcgcagctggaagaccttatcgggcgcatggccacggccctggagcgcctgacaggtctggagcgggccgagtccaacaaaatccgctcgaggacctcgtcagactgcacggacgccgcctacattgtccgtcagagcagcttcaacagccaggaagggaacaccttcaagctccaagagagtatagaccctgcaggtgaggagaccatgtccccaacttctccaaccttaatgccccgtatgcgaagccattctttctattcggtcaatatgaaagacaaaggtggtatagaaaagttggaaagtatttttaaagaaaggtccctgagcctacaccgggctactagttcccactctgtagcaaaagaacccaaagctcctgcagcccctgccaacaccttggccattgttcctgattccagaagaccatcatcgtgtatagacatctatgtctctgctatggatgagctccactgtgatatagaccctctggacaattccgtgaacatccttgggctgggcgagccaagcttttcaactccagtaccttccacagccccttcaagtagtgcctatgcaacacttgcacccacagacagacctccaagccggagcattgattttgaggacatcacctccatggacactagatctttttcttcagactacacccacctcccagaatgccaaaacccctgggactcagagcctccgatgtaccacaccattgagcgttccaaaagtagccgctacctagccaccacaccctttcttctagaagaggctcccattgtgaaatctcatagctttatgttttccccctcaaggagctattatgccaactttggggtgcctgtaaaaacagcagaatacacaagtattacagactgtattgacacaaggtgtgtcaatgcccctcaagcaattgcggacagagctgccttccctggaggtcttggagacaaagtggaggacttaacttgctgccatccagagcgagaagcagaactgagtcaccccagctctgacagtgaggagaatgaggccaaaggccgcagagccaccattgcaatatcctcccaggagggtgataactcagagagaaccctgtccaacaacatcactgttcccaagatagagcgcgccaacagctactcggcagaggagccaagtgcgccatatgcacacaccaggaagagcttctccatcagtgacaaactcgacaggcagcggaacacagcaagcctgcgaaatcccttccagagaagcaagtcctccaagccggagggccgaggggacagcctgtccatgaggagactgtccagaacatcggctttccaaagctttgaaagcaagcacaactaaaccttcttaatatccgccacagaaggctcaagaatccagccctaaaattctctccaactccagtttttcccctttccttgaatcatacctgctttattcttagctgagcaaaacaagcaatgctttgggaggtgttaactcaaaggtgacttctgggccacagatcaagaaagcatttgatctgacccagtgccagacacaggggatttaaggcatgttcacacttgctgggcagggagggggaagagagggagaaggaagggttagagatgaatgtgtatccgcagtcacagcagaaagccatgagagcaggggaaacaaggggcttcgagcacgctccatgccaggaggcatctgttgatttctgaccattatcaagagttgtaggatgcagggctaaattgcaaaataaaataaaatagccagcgtacacaatgagatattctaaacttccattctgttttcttttcacattggctccatcactggtgactgatgaagagcatcctctttattcagtataagccggcagcaagcagttctacctaacgtcccacatccttctcatgccaacacttctgtaattgatcattataaagaaaaaacaaggtaacagtcatagttcacctgtctcttatctattcacttctggtgccacaactgtttatccttttttgaagaaaataagggaacagaaatgcctttttgtattgcaatcgaaatgaaagaagagttgatgttaaaaaaacaaaagtcaagtgatttattatatacagtgggcgttcaagtctagtcgagcaagctcaggagaatgtaattaaataattttatattttttaatttattttgtatctcacctgtcatggatgaattcattcactgaatatgtaatattgaactt

SEQ ID NO: 311055 - DNA, 4701 bp, Artificial Sequence
  derived and/or modified sequence
atgtatgtgcgagtatcttttgatacaaaacctgatctcctcttacacctgatgaccaaggaatggcagttggagcttcccaagcttctcatctctgtccatgggggcctgcagaactttgaactccagccaaaactcaagcaagtctttgggaaagggctcatcaaagcagcaatgacaactggagcgtggatattcactggaggggttaacacaggtgttattcgtcatgttggcgatgccttgaaggatcatgcctctaagtctcgaggaaagatatgcaccataggtattgccccctggggaattgtggaaaaccaggaggacctcattggaagagatgttgtccggccataccagaccatgtccaatcccatgagcaagctcactgttctcaacagcatgcattcccacttcattctggctgacaacgggaccactggaaaatatggagcagaggtgaaacttcgaagacaactggaaaagcatatttcactccagaagataaacacaagaatcggtcaaggtgttcctgtggtggcactcatagtggaaggaggacccaatgtgatctcgattgttttggagtaccttcgagacacccctcccgtgccagtggttgtctgtgatgggagtggacgggcatcggacatcctggcctttgggcataaatactcagaagaaggcggactgataaatgaatctttgagggaccagctgttggtgactatacagaagactttcacatacactcgaacccaagctcagcatctgttcatcatcctcatggagtgcatgaagaagaaggaattgattacggtatttcggatgggatcagaaggacaccaggacattgatttggctatcctgacagctttactcaaaggagccaatgcctcggccccagaccaactgagcttagctttagcctggaacagagtcgacatcgctcgcagccagatctttatttacgggcaacagtggccggtgggatctctggagcaagccatgttggatgccttagttctggacagagtggattttgtgaaattactcatagagaatggagtaagcatgcaccgttttctcaccatctccagactagaggaattgtacaatacgagacatgggccctcaaatacattgtaccacttggtcagggatgtcaaaaagcgagagtatccaggtttcggttggatctattttaaggggaacctgcccccagactacagaatcagcctgattgacatcggcctggtgatcgagtacctgatgggcggggcttatcgctgcaactacacgcgcaagcgcttccggaccctctaccacaacctcttcggccccaagaggcccaaagccttgaaactgctgggaatggaggatgatattcccttgaggcgaggaagaaagacaaccaagaaacgtgaagaagaggtggacattgacttggatgatcctgagatcaaccacttccccttccctttccatgagctcatggtgtgggctgttctcatgaagcggcagaagatggccctgttcttctggcagcacggtgaggaggccatggccaaggccctggtggcctgcaagctctgcaaagccatggctcatgaggcctctgagaacgacatggttgacgacatttcccaggagctgaatcacaattccagagactttggccagctggctgtggagctcctggaccagtcctacaagcaggacgaacagctggccatgaaactgctgacgtatgagctgaagaactggagcaacgccacgtgcctgcagcttgccgtggctgccaaacaccgcgacttcatcgcgcacacgtgcagccagatgctgctcaccgacatgtggatgggccggctccgcatgcgcaagaactcaggcctcaaggtaattctgggaattctacttcctccttcaattctcagcttggagttcaagaacaaagacgacatgccctatatgtctcaggcccaggaaatccacctccaagagaaggaggcagaagaaccagagaagcccacaaaggaaaaagaggaagaggacatggagctcacagcaatgttgggacgaaacaacggggagtcctccaggaagaaggatgaagaggaagttcagagcaagcaccggttaatccccctcggcagaaaaatctatgaattctacaatgcacccatcgtgaagttctggttctacacactggcgtatatcggatacctgatgctcttcaactatatcgtgttagtgaagatggaacgctggccgtccacccaggaatggatcgtaatctcctatattttcaccctgggaatagaaaagatgagagagattctgatgtcagagccagggaagttgctacagaaagtgaaggtatggctgcaggagtactggaatgtcacggacctcatcgccatccttctgttttctgtcggaatgatccttcgtctccaagaccagcccttcaggagtgacgggagggtcatctactgcgtgaacatcatttactggtatatccgtctcctagacatcttcggcgtgaacaagtatttgggcccgtatgtaatgatgattggaaaaatgatgatagacatgatgtactttgtcatcattatgctggtggttctgatgagctttggggtcgccaggcaagccatcctttttcccaatgaggagccatcatggaaactggccaagaacatcttctacatgccctattggatgatttatggggaagtgtttgcggaccagatagaccctccctgtggacagaatgagacccgagaggatggtaaaataatccagctgcctccctgcaagacaggagcttggatcgtgccggccatcatggcctgctacctcttagtggcaaacatcttgctggtcaacctcctcattgctgtctttaacaatacattttttgaagtaaaatcgatatccaaccaagtctggaagtttcagaggtatcagctcatcatgactttccatgaaaggccagttctgcccccaccactgatcatcttcagccacatgaccatgatattccagcacctgtgctgccgatggaggaaacacgagagcgacccggatgaaagggactacggcctgaaactcttcataaccgatgatgagctcaagaaagtacatgactttgaagagcaatgcatagaagaatacttcagagaaaaggatgatcggttcaactcatctaatgatgagaggatacgggtgacttcagaaagggtggagaacatgtctatgcggctggaggaagtcaacgagagagagcactccatgaaggcttcactccagaccgtggacatccggctggcgcagctggaagaccttatcgggcgcatggccacggccctggagcgcctgacaggtctggagcgggccgagtccaacaaaatccgctcgaggacctcgtcagactgcacggacgccgcctacattgtccgtcagagcagcttcaacagccaggaagggaacaccttcaagctccaagagagtatagaccctgcaggtgaggagaccatgtccccaacttctccaaccttaatgccccgtatgcgaagccattctttctattcggtcaatatgaaagacaaaggtggtatagaaaagttggaaagtatttttaaagaaaggtccctgagcctacaccgggctactagttcccactctgtagcaaaagaacccaaagctcctgcagcccctgccaacaccttggccattgttcctgattccagaagaccatcatcgtgtatagacatctatgtctctgctatggatgagctccactgtgatatagaccctctggacaattccgtgaacatccttgggctgggcgagccaagcttttcaactccagtaccttccacagccccttcaagtagtgcctatgcaacacttgcacccacagacagacctccaagccggagcattgattttgaggacatcacctccatggacactagatctttttcttcagactacacccacctcccagaatgccaaaacccctgggactcagagcctccgatgtaccacaccattgagcgttccaaaagtagccgctacctagccaccacaccctttcttctagaagaggctcccattgtgaaatctcatagctttatgttttccccctcaaggagctattatgccaactttggggtgcctgtaaaaacagcagaatacacaagtattacagactgtattgacacaaggtgtgtcaatgcccctcaagcaattgcggacagagctgccttccctggaggtcttggagacaaagtggaggacttaacttgctgccatccagagcgagaagcagaactgagtcaccccagctctgacagtgaggagaatgaggccaaaggccgcagagccaccattgcaatatcctcccaggagggtgataactcagagagaaccctgtccaacaacatcactgttcccaagatagagcgcgccaacagctactcggcagaggagccaagtgcgccatatgcacacaccaggaagagcttctccatcagtgacaaactcgacaggcagcggaacacagcaagcctgcgaaatcccttccagagaagcaagtcctccaagccggagggccgaggggacagcctgtccatgaggagactgtccagaacatcggctttccaaagctttgaaagcaagcacaactaa

SEQ ID NO: 311056 - protein, 1711 aa, Artificial Sequence
  derived and/or modified sequence
MGKKWRDAAEMERGCSDREDNAESRRRSRSASRGRFAESWKRLSSKQGSTKRSGLPSQQTPAQKSWIERAFYKRECVHIIPSTKDPHRCCCGRLIGQHVGLTPSISVLQNEKNESRLSRNDIQSEKWSISKHTQLSPTDAFGTIEFQGGGHSNKAMYVRVSFDTKPDLLLHLMTKEWQLELPKLLISVHGGLQNFELQPKLKQVFGKGLIKAAMTTGAWIFTGGVNTGVIRHVGDALKDHASKSRGKICTIGIAPWGIVENQEDLIGRDVVRPYQTMSNPMSKLTVLNSMHSHFILADNGTTGKYGAEVKLRRQLEKHISLQKINTRIGQGVPVVALIVEGGPNVISIVLEYLRDTPPVPVVVCDGSGRASDILAFGHKYSEEGGLINESLRDQLLVTIQKTFTYTRTQAQHLFIILMECMKKKELITVFRMGSEGHQDIDLAILTALLKGANASAPDQLSLALAWNRVDIARSQIFIYGQQWPVGSLEQAMLDALVLDRVDFVKLLIENGVSMHRFLTISRLEELYNTRHGPSNTLYHLVRDVKKREYPGFGWIYFKGNLPPDYRISLIDIGLVIEYLMGGAYRCNYTRKRFRTLYHNLFGPKRDDIPLRRGRKTTKKREEEVDIDLDDPEINHFPFPFHELMVWAVLMKRQKMALFFWQHGEEAMAKALVACKLCKAMAHEASENDMVDDISQELNHNSRDFGQLAVELLDQSYKQDEQLAMKLLTYELKNWSNATCLQLAVAAKHRDFIAHTCSQMLLTDMWMGRLRMRKNSGLKVILGILLPPSILSLEFKNKDDMPYMSQAQEIHLQEKEAEEPEKPTKEKEEEDMELTAMLGRNNGESSRKKDEEEVQSKHRLIPLGRKIYEFYNAPIVKFWFYTLAYIGYLMLFNYIVLVKMERWPSTQEWIVISYIFTLGIEKMREILMSEPGKLLQKVKVWLQEYWNVTDLIAILLFSVGMILRLQDQPFRSDGRVIYCVNIIYWYIRLLDIFGVNKYLGPYVMMIGKMMIDMMYFVIIMLVVLMSFGVARQAILFPNEEPSWKLAKNIFYMPYWMIYGEVFADQIDPPCGQNETREDGKIIQLPPCKTGAWIVPAIMACYLLVANILLVNLLIAVFNNTFFEVKSISNQVWKFQRYQLIMTFHERPVLPPPLIIFSHMTMIFQHLCCRWRKHESDPDERDYGLKLFITDDELKKVHDFEEQCIEEYFREKDDRFNSSNDERIRVTSERVENMSMRLEEVNEREHSMKASLQTVDIRLAQLEDLIGRMATALERLTGLERAESNKIRSRTSSDCTDAAYIVRQSSFNSQEGNTFKLQESIDPAGEETMSPTSPTLMPRMRSHSFYSVNMKDKGGIEKLESIFKERSLSLHRATSSHSVAKEPKAPAAPANTLAIVPDSRRPSSCIDIYVSAMDELHCDIDPLDNSVNILGLGEPSFSTPVPSTAPSSSAYATLAPTDRPPSRSIDFEDITSMDTRSFSSDYTHLPECQNPWDSEPPMYHTIERSKSSRYLATTPFLLEEAPIVKSHSFMFSPSRSYYANFGVPVKTAEYTSITDCIDTRCVNAPQAIADRAAFPGGLGDKVEDLTCCHPEREAELSHPSSDSEENEAKGRRATIAISSQEGDNSERTLSNNITVPKIERANSYSAEEPSAPYAHTRKSFSISDKLDRQRNTASLRNPFQRSKSSKPEGRGDSLSMRRLSRTSAFQSFESKHN

SEQ ID NO: 311057 - DNA, 5136 bp, Artificial Sequence
  derived and/or modified sequence
atgggcaagaagtggagagacgccgccgagatggagagaggctgcagcgacagagaggacaacgccgagagcagaagaagaagcagaagcgccagcagaggcagattcgccgagagctggaagagactgagcagcaagcagggcagcaccaagagaagcggcctgcccagccagcagacccccgcccagaagagctggatcgagagagccttctacaagagagagtgcgtgcacatcatccccagcaccaaggacccccacagatgctgctgcggcagactgatcggccagcacgtgggcctgacccccagcatcagcgtgctgcagaacgagaagaacgagagcagactgagcagaaacgacatccagagcgagaagtggagcatcagcaagcacacccagctgagccccaccgacgccttcggcaccatcgagttccagggcggcggccacagcaacaaggccatgtacgtgagagtgagcttcgacaccaagcccgacctgctgctgcacctgatgaccaaggagtggcagctggagctgcccaagctgctgatcagcgtgcacggcggcctgcagaacttcgagctgcagcccaagctgaagcaggtgttcggcaagggcctgatcaaggccgccatgaccaccggcgcctggatcttcaccggcggcgtgaacaccggcgtgatcagacacgtgggcgacgccctgaaggaccacgccagcaagagcagaggcaagatctgcaccatcggcatcgccccctggggcatcgtggagaaccaggaggacctgatcggcagagacgtggtgagaccctaccagaccatgagcaaccccatgagcaagctgaccgtgctgaacagcatgcacagccacttcatcctggccgacaacggcaccaccggcaagtacggcgccgaggtgaagctgagaagacagctggagaagcacatcagcctgcagaagatcaacaccagaatcggccagggcgtgcccgtggtggccctgatcgtggagggcggccccaacgtgatcagcatcgtgctggagtacctgagagacaccccccccgtgcccgtggtggtgtgcgacggcagcggcagagccagcgacatcctggccttcggccacaagtacagcgaggagggcggcctgatcaacgagagcctgagagaccagctgctggtgaccatccagaagaccttcacctacaccagaacccaggcccagcacctgttcatcatcctgatggagtgcatgaagaagaaggagctgatcaccgtgttcagaatgggcagcgagggccaccaggacatcgacctggccatcctgaccgccctgctgaagggcgccaacgccagcgcccccgaccagctgagcctggccctggcctggaacagagtggacatcgccagaagccagatcttcatctacggccagcagtggcccgtgggcagcctggagcaggccatgctggacgccctggtgctggacagagtggacttcgtgaagctgctgatcgagaacggcgtgagcatgcacagattcctgaccatcagcagactggaggagctgtacaacaccagacacggccccagcaacaccctgtaccacctggtgagagacgtgaagaagagagagtaccccggcttcggctggatctacttcaagggcaacctgccccccgactacagaatcagcctgatcgacatcggcctggtgatcgagtacctgatgggcggcgcctacagatgcaactacaccagaaagagattcagaaccctgtaccacaacctgttcggccccaagagagacgacatccccctgagaagaggcagaaagaccaccaagaagagagaggaggaggtggacatcgacctggacgaccccgagatcaaccacttccccttccccttccacgagctgatggtgtgggccgtgctgatgaagagacagaagatggccctgttcttctggcagcacggcgaggaggccatggccaaggccctggtggcctgcaagctgtgcaaggccatggcccacgaggccagcgagaacgacatggtggacgacatcagccaggagctgaaccacaacagcagagacttcggccagctggccgtggagctgctggaccagagctacaagcaggacgagcagctggccatgaagctgctgacctacgagctgaagaactggagcaacgccacctgcctgcagctggccgtggccgccaagcacagagacttcatcgcccacacctgcagccagatgctgctgaccgacatgtggatgggcagactgagaatgagaaagaacagcggcctgaaggtgatcctgggcatcctgctgccccccagcatcctgagcctggagttcaagaacaaggacgacatgccctacatgagccaggcccaggagatccacctgcaggagaaggaggccgaggagcccgagaagcccaccaaggagaaggaggaggaggacatggagctgaccgccatgctgggcagaaacaacggcgagagcagcagaaagaaggacgaggaggaggtgcagagcaagcacagactgatccccctgggcagaaagatctacgagttctacaacgcccccatcgtgaagttctggttctacaccctggcctacatcggctacctgatgctgttcaactacatcgtgctggtgaagatggagagatggcccagcacccaggagtggatcgtgatcagctacatcttcaccctgggcatcgagaagatgagagagatcctgatgagcgagcccggcaagctgctgcagaaggtgaaggtgtggctgcaggagtactggaacgtgaccgacctgatcgccatcctgctgttcagcgtgggcatgatcctgagactgcaggaccagcccttcagaagcgacggcagagtgatctactgcgtgaacatcatctactggtacatcagactgctggacatcttcggcgtgaacaagtacctgggcccctacgtgatgatgatcggcaagatgatgatcgacatgatgtacttcgtgatcatcatgctggtggtgctgatgagcttcggcgtggccagacaggccatcctgttccccaacgaggagcccagctggaagctggccaagaacatcttctacatgccctactggatgatctacggcgaggtgttcgccgaccagatcgaccccccctgcggccagaacgagaccagagaggacggcaagatcatccagctgcccccctgcaagaccggcgcctggatcgtgcccgccatcatggcctgctacctgctggtggccaacatcctgctggtgaacctgctgatcgccgtgttcaacaacaccttcttcgaggtgaagagcatcagcaaccaggtgtggaagttccagagataccagctgatcatgaccttccacgagagacccgtgctgcccccccccctgatcatcttcagccacatgaccatgatcttccagcacctgtgctgcagatggagaaagcacgagagcgaccccgacgagagagactacggcctgaagctgttcatcaccgacgacgagctgaagaaggtgcacgacttcgaggagcagtgcatcgaggagtacttcagagagaaggacgacagattcaacagcagcaacgacgagagaatcagagtgaccagcgagagagtggagaacatgagcatgagactggaggaggtgaacgagagagagcacagcatgaaggccagcctgcagaccgtggacatcagactggcccagctggaggacctgatcggcagaatggccaccgccctggagagactgaccggcctggagagagccgagagcaacaagatcagaagcagaaccagcagcgactgcaccgacgccgcctacatcgtgagacagagcagcttcaacagccaggagggcaacaccttcaagctgcaggagagcatcgaccccgccggcgaggagaccatgagccccaccagccccaccctgatgcccagaatgagaagccacagcttctacagcgtgaacatgaaggacaagggcggcatcgagaagctggagagcatcttcaaggagagaagcctgagcctgcacagagccaccagcagccacagcgtggccaaggagcccaaggcccccgccgcccccgccaacaccctggccatcgtgcccgacagcagaagacccagcagctgcatcgacatctacgtgagcgccatggacgagctgcactgcgacatcgaccccctggacaacagcgtgaacatcctgggcctgggcgagcccagcttcagcacccccgtgcccagcaccgcccccagcagcagcgcctacgccaccctggcccccaccgacagaccccccagcagaagcatcgacttcgaggacatcaccagcatggacaccagaagcttcagcagcgactacacccacctgcccgagtgccagaacccctgggacagcgagccccccatgtaccacaccatcgagagaagcaagagcagcagatacctggccaccacccccttcctgctggaggaggcccccatcgtgaagagccacagcttcatgttcagccccagcagaagctactacgccaacttcggcgtgcccgtgaagaccgccgagtacaccagcatcaccgactgcatcgacaccagatgcgtgaacgccccccaggccatcgccgacagagccgccttccccggcggcctgggcgacaaggtggaggacctgacctgctgccaccccgagagagaggccgagctgagccaccccagcagcgacagcgaggagaacgaggccaagggcagaagagccaccatcgccatcagcagccaggagggcgacaacagcgagagaaccctgagcaacaacatcaccgtgcccaagatcgagagagccaacagctacagcgccgaggagcccagcgccccctacgcccacaccagaaagagcttcagcatcagcgacaagctggacagacagagaaacaccgccagcctgagaaaccccttccagagaagcaagagcagcaagcccgagggcagaggcgacagcctgagcatgagaagactgagcagaaccagcgccttccagagcttcgagagcaagcacaactag

SEQ ID NO: 311058 - DNA, 5136 bp, Artificial Sequence
  derived and/or modified sequence
atgggaaagaagtggcgcgacgccgctgaaatggagcgagggtgcagtgatcgggaggataatgccgagtcaaggcggagatctcggtctgcttcccgtggacgtttcgctgagagttggaagcgcctgagctcaaagcaaggcagtactaaacggtcaggtctgccttctcagcaaactcctgcccagaagtcctggatagagcgggcattctacaagcgtgaatgcgtccacattattccctccacaaaggacccgcatagatgctgttgcggacgccttataggccaacatgtgggcctgacaccctccattagcgttcttcagaacgagaagaacgagtccagactgtcaagaaatgatattcagtctgaaaagtggtctatttccaaacacacacaactctctccaactgatgccttcggaactatcgaattccagggcggtggccactcaaacaaagccatgtacgtccgcgtgtcgtttgacacaaagcccgatctgctgcttcatcttatgaccaaagagtggcagctggagctcccaaaattgttgatcagcgttcacggcgggctacagaattttgaactccaacctaaacttaagcaggtatttgggaaggggctcatcaaggccgctatgacaacgggcgcctggatcttcacaggtggggtgaatacgggtgtgatcagacatgtcggcgatgcactgaaagaccatgcttcgaaaagcaggggaaaaatctgtactataggtatcgccccctggggaatcgtcgaaaaccaggaagatctcatagggagggacgtggttaggccataccagaccatgagcaatccaatgtctaaactgacagtccttaacagtatgcatagtcattttatcttagctgacaacggtacaaccggaaaatacggagctgaggtaaagctgaggagacagttggaaaaacacatctctttgcaaaaaattaatacgcgtatcggtcagggagtccccgtggtggctctgatagtcgaggggggccccaatgtgatctctatagtgcttgagtatttaagagatacacctcccgttcccgtggtggtttgcgacgggtctgggagagcatcggatattttagcatttggacacaaatattccgaggagggcggtctcatcaacgagtctctcagagatcagctgctagtcacaattcagaagactttcacatataccaggacccaggcacaacacctgtttatcattttgatggagtgcatgaaaaagaaggagctgattaccgtgtttagaatgggaagcgaggggcaccaggacatagacctggctattctgaccgccctcctgaagggcgctaatgccagtgccccagatcaactgtcacttgccctcgcgtggaatagagtcgatatcgccaggtcacagatctttatctacgggcagcagtggcctgtcggttcgcttgaacaggccatgcttgacgctctggttttggaccgcgtggacttcgtaaagcttctgatagagaacggtgtcagcatgcaccgttttctgacaatttctcgcttagaggagttatacaacactcggcacgggcccagcaacactctgtaccatcttgttagggacgtgaaaaaaagggaatatcctggattcgggtggatctacttcaagggcaatttgccacccgattaccgtatttctctcatcgatatcggattagtcattgaatatctgatgggtggcgcatataggtgcaactatacacgcaaaagattccggaccctataccacaacctatttgggcccaagagagatgacatccccctgagaagagggcgaaagaccactaagaaaagagaagaggaggttgacattgacctggacgatccggagataaatcatttcccgtttccattccacgaattgatggtgtgggctgtgctgatgaaacgccagaagatggctcttttcttttggcaacatggggaagaggctatggcaaaggctctcgtagcatgtaagctgtgtaaagcaatggctcacgaagcctccgaaaacgacatggtggacgatatttcacaggagcttaatcacaattcgcgggactttggccagcttgccgtggaactgttggatcagtcctacaaacaggatgagcagttagccatgaagctgcttacttatgagctgaaaaactggtctaatgctacctgtttgcagctggcagttgctgccaaacacagggactttatcgcccacacctgttcccagatgctgctgacagatatgtggatgggtcgactaagaatgcgaaagaattccgggttaaaggtgattctgggtatcctgctccccccttccattctgtcattagagttcaagaataaagatgacatgccttatatgagtcaggcccaggagattcatctgcaggagaaagaggccgaggaacctgagaaacccaccaaagaaaaggaggaagaggacatggaactgacagccatgctcggccgcaacaacggcgaatctagccggaagaaagacgaggaggaggtgcagtccaagcaccgcctgatcccacttggcaggaagatctatgagttttataatgcccccattgtaaaattctggttctatacgttggcttacatcggatacctcatgttattcaactatatcgtgttggttaaaatggagcggtggccgagtactcaggaatggatcgtgattagctacatattcactctgggcattgaaaagatgagagagatcctcatgagtgaacccggcaaactgttgcagaaggtgaaggtgtggctccaggagtactggaatgtcacagacctgattgctatcttgctgttctctgtgggtatgattttacggcttcaggaccagccatttaggtccgacggccgcgttatttactgtgttaacatcatctattggtacatccgattactcgatatttttggcgtcaacaagtatttgggtccatatgtcatgatgatagggaagatgatgattgacatgatgtatttcgtgattatcatgttagtagtgctgatgtcttttggggtggctcgacaggcaatcttgttccccaacgaagaaccttcttggaaactggccaaaaatattttctacatgccgtattggatgatctacggggaagtgtttgcagaccaaatcgatcctccttgtggccaaaatgagacacgggaagacgggaagattatccaactgcctccctgtaagactggagcttggattgtgccagccatcatggcctgctaccttctggtagccaatatacttttggtaaacttactgattgctgtatttaataatacgttcttcgaagttaagagtatcagtaaccaggtatggaagttccagcggtatcaacttatcatgaccttccatgaacgccccgtgttgccccctccgcttatcatcttctctcatatgacaatgatttttcaacacctctgttgccgatggagaaaacacgagtcagaccccgatgaaagagattatggactaaaactctttatcactgacgacgagcttaaaaaagtacacgatttcgaagagcagtgcatcgaggaatatttccgggaaaaggatgatcggttcaacagcagcaacgatgaacgaattcgtgtgacatctgagagagtggagaacatgtccatgagattagaggaagtcaacgaacgcgaacactcaatgaaggcctccctgcagaccgtagatatcagactagcacagctggaggacttgatcgggagaatggccaccgcactcgaaaggttaacgggcctggagcgggctgagtctaacaagatccgttctcgcacatcgagcgactgtacggacgctgcctacattgtcaggcagtctagttttaattcacaggaaggaaacacatttaaactgcaagaatcaattgaccccgctggagaggagactatgtccccgacttctccgacactcatgcctcgcatgagaagccacagcttttacagcgttaatatgaaggacaaaggaggaatcgagaaacttgagtccatttttaaagagcgttcattgtcacttcatcgagcgactagctctcattctgtcgccaaagagcctaaagccccggctgcgcccgccaacactctcgcgatcgtacccgatagtaggcgtcccagctcctgtatagatatttacgtttccgctatggacgaactccattgtgacatcgatcccctcgataattccgttaacatactgggactcggcgagccttctttttctacccccgtgcccagcacggcgccttccagtagtgcctacgcaacactggctcccacagatcgtccccctagtagatccatagactttgaagacattacctccatggatactcgaagtttttcatctgattacacccacctccccgagtgccagaatccctgggatagcgagcccccaatgtatcacacaatcgagaggtccaagagcagtaggtaccttgctactaccccgtttcttcttgaggaggcaccaatagtcaaaagtcacagcttcatgttttctccatccaggtcctattacgctaatttcggcgttccagtcaagacggccgaatacacaagcatcaccgactgcatagacacccggtgcgtgaatgctccacaggccatcgccgaccgcgcagcctttccaggcggtttgggcgataaagtggaagacctcacctgctgccacccggaaagggaagcagaactcagccatccctcatcagatagtgaggagaacgaagccaagggtcgtcgggcaactattgctatttcgagtcaggagggcgataactcggagcgcaccctctctaacaatattaccgtccccaagatcgaacgggcaaatagctattccgccgaagaaccctccgctccttacgctcatactagaaaaagcttctccatttcagacaagttggatcgtcagcgtaataccgcgagtcttagaaacccctttcagaggtccaaatccagtaagcccgaagggagaggcgacagcctctccatgaggagactctctagaacatccgctttccagtcattcgaatccaagcacaactag

SEQ ID NO: 311059 - DNA, 5136 bp, Artificial Sequence
  derived and/or modified sequence
atgggcaagaagtggagagatgctgctgagatggagcggggctgcagcgacagagaagataatgctgagagcagaagaagaagccgcagcgccagccggggccgctttgctgagagctggaagaggctgagcagcaagcagggcagcaccaagaggagcggcctgcccagccagcagaccccagcccagaagtcctggattgagcgggccttctacaagagagaatgtgtgcacatcatccccagcaccaaggacccccaccgctgctgctgcggccgcctgattggccagcacgtgggcctgacccccagcatctctgtgctgcagaatgagaagaatgaaagccggctgagcagaaatgacatccagagcgagaagtggagcatcagcaagcacacccagctgagccccacagatgccttcggcaccatcgagttccagggcggcggccacagcaacaaggccatgtatgtgcgggtgtcctttgacaccaagccagacctgctgctgcacctgatgaccaaggagtggcagctggagctgcccaagctgctgatctctgtgcatggaggcctgcagaactttgagctgcagcccaagctgaagcaggtgtttgggaagggcctcatcaaggccgccatgaccaccggggcctggatcttcaccggcggcgtgaacacaggagtcatccgccacgtgggagatgccctgaaggaccacgccagcaagagccggggcaagatctgcaccatcggcatcgccccctggggcatcgtggagaaccaggaggacctgattggaagagatgtggtgcggccctaccagaccatgagcaaccccatgagcaagctgactgtgctgaacagcatgcacagccacttcatcctggccgacaatggcaccaccgggaagtatggagctgaggtgaagctgcggcggcagctggagaagcacatcagcctgcagaagatcaacacccgcatcggccagggcgtgcctgtggtggccctgattgtggagggcggccccaacgtcatcagcatcgtgctggagtacctgcgggacaccccacctgtgcctgtggtggtgtgtgatggcagcggccgggccagtgacatcctggccttcggccacaagtacagcgaggagggcggcctcatcaatgaaagcctgcgggaccagctgctggtgaccatccagaagaccttcacctacaccaggacccaggcccagcacctgttcatcatcctgatggagtgcatgaagaagaaggagctgatcaccgtcttcaggatgggcagcgagggccaccaggacatcgacctggccatcctgacagccctgctgaagggggccaatgccagcgccccagaccagctgagcctggccctggcctggaacagagtggacatcgcccggagccagatcttcatctacggccagcagtggcctgtgggcagcctggagcaggccatgctggatgccctggtgctggacagagtggactttgtgaagctgctgattgaaaatggagtgtccatgcaccgcttcctgaccatcagccggctggaggagctgtacaacaccaggcatggccccagcaacaccctgtaccacctggtgagagatgtgaagaagcgggagtacccaggcttcggctggatctacttcaagggcaacctgcccccagactaccgcatcagcctgattgacatcggcctggtgattgagtacctgatgggcggggcctaccgctgcaactacaccaggaagcgcttccgcaccctgtaccacaacctgtttggccccaagagagatgacatccccctgcggcggggcaggaagaccaccaagaagcgggaggaggaggtggacatcgacctggatgatcctgagatcaaccacttccccttccccttccacgagctgatggtgtgggccgtgctgatgaagaggcagaagatggccctcttcttctggcagcacggggaggaggccatggccaaggccctggtggcctgcaagctgtgcaaggccatggcccacgaggcctctgaaaatgacatggtggatgacatcagccaggagctgaaccacaacagccgggactttggccagctggccgtggagctgctggaccagagctacaagcaggatgagcagctggccatgaagctgctgacctatgagctgaagaactggagcaatgccacctgcctgcagctggccgtggccgccaagcaccgggacttcatcgcccacacctgcagccagatgctgctgacagacatgtggatgggccgcctgaggatgaggaagaacagcggcctgaaggtgatcctgggcatcctgctgccccccagcatcctgagcctggagttcaagaacaaggatgacatgccctacatgagccaggcccaggagatccacctgcaggagaaggaggccgaggagcctgagaagcccaccaaggagaaggaggaggaggacatggagctgacagccatgctgggcagaaataatggagagagcagcaggaagaaggatgaggaggaggtgcagagcaagcacaggctcatccccctgggcaggaagatctatgagttctacaatgcccccatcgtgaagttctggttctacaccctggcctacatcggctacctgatgctgttcaactacatcgtgctggtgaagatggagcgctggcccagcacccaggagtggatcgtcatctcctacatcttcaccctgggcatcgagaagatgagggagatcctgatgtctgagcccgggaagctgctgcagaaggtgaaggtgtggctgcaggagtactggaatgtgacagacctgattgccatcctgctcttctctgtgggcatgatcctgcggctgcaggaccagcccttcagaagtgatggccgggtcatctactgtgtgaacatcatctactggtacatccggctgctggacatcttcggcgtgaacaagtacctgggcccctacgtgatgatgattggcaagatgatgattgacatgatgtactttgtgatcatcatgctggtggtgctgatgagctttggagtggcccggcaggccatcctcttccccaatgaggagcccagctggaagctggccaagaacatcttctacatgccctactggatgatctatggagaggtgtttgctgaccagattgatcctccctgtggccagaatgagacccgggaggatggcaagatcatccagctgcccccctgcaagacaggagcctggatcgtgcctgccatcatggcctgctacctgctggtggccaacatcctgctggtgaacctgctgattgctgtgttcaacaacaccttctttgaggtgaagagcatcagcaaccaggtgtggaagttccagcgctaccagctgatcatgaccttccacgagaggcctgtgctgcccccacccctcatcatcttcagccacatgaccatgatcttccagcacctgtgctgccgctggaggaagcatgaaagtgaccctgatgagcgggactatggcctgaagctgttcatcacagatgatgagctgaagaaggtgcatgactttgaggagcagtgcatcgaggagtacttccgggagaaggatgaccgcttcaacagcagcaatgatgagcgcatccgggtgaccagcgagcgggtggagaacatgtccatgaggctggaggaggtgaatgaaagagagcacagcatgaaggccagcctgcagacagtggacatccggctggcccagctggaggacctgattggccgcatggccacagccctggagcggctgaccggcctggagcgggcagagagcaacaagatccgcagcaggaccagcagtgactgcacagatgctgcctacatcgtgcggcagagcagcttcaacagccaggagggcaacaccttcaagctgcaggagagcattgatcctgctggggaggagaccatgagccccaccagccccaccctgatgcccaggatgaggagccacagcttctacagcgtgaacatgaaggacaagggcggcatcgagaagctggagagcatcttcaaggagaggagcctgagcctgcaccgggccaccagcagccacagcgtggccaaggagcccaaggccccagctgccccagccaacaccctggccatcgtgcctgacagccggcggcccagcagctgcatcgacatctacgtgtctgccatggatgagctgcactgtgacatcgaccccctggacaacagcgtgaacatcctgggcctgggggagcccagcttcagcacccctgtgcccagcacagcccccagcagcagcgcctatgccaccctggcccccacagaccggccccccagccgcagcattgactttgaggacatcacctccatggacaccaggagcttcagcagtgactacacccacctgcctgagtgccagaacccctgggacagcgagccccccatgtaccacaccatcgagaggagcaagagcagccgctacctggccaccacccccttcctgctggaggaggcccccatcgtgaagagccacagcttcatgttcagccccagccgcagctactatgccaactttggagtgcctgtgaagacagctgagtacaccagcatcacagactgcatcgacacccgctgtgtgaatgccccccaggccatcgctgaccgggccgccttccctgggggcctgggggacaaggtggaggacctgacctgctgccaccctgagcgggaggccgagctgagccaccccagcagtgacagtgaagaaaatgaggccaagggcagaagagccaccatcgccatcagcagccaggagggggacaacagcgagaggaccctgagcaacaacatcaccgtgcccaagattgaaagagccaacagctacagcgctgaggagcccagcgccccctatgcccacaccaggaagagcttcagcatcagtgacaagctggaccggcagaggaacacagccagcctgaggaaccccttccagaggagcaagagcagcaagccagagggccgcggggacagcctgtccatgaggcggctgagcaggaccagcgccttccagagctttgagagcaagcacaactag

SEQ ID NO: 311060 - DNA, 5136 bp, Artificial Sequence
  derived and/or modified sequence
atgggcaagaagtggcgggacgccgccgagatggagcggggctgctccgatcgggaggataatgccgaatcccgccggcgcagtcgctcggcatcccgggggagatttgccgagagctggaagaggttgtcgagtaagcaagggagtactaagagatccggactccctagtcagcagacccccgctcagaagagttggatcgagagggccttttataagcgagaatgcgtgcacatcattccatccaccaaggacccacatcgctgttgttgcggacggctgatcggacagcacgttggattgacgccaagtataagtgtactgcagaacgagaagaatgagagccggctgtcaaggaacgatattcagtccgaaaagtggtctatctcaaagcatacccagctaagcccaaccgatgcttttggaacaatagagttccagggcggcggccacagcaacaaggctatgtacgtacgcgtaagctttgacacaaaacccgacctgctactgcacctcatgacaaaagaatggcagctggagctgcccaaactactgattagcgtgcatggcggtctgcagaacttcgaactccagcctaagttaaaacaagtctttggcaaaggtctgattaaggcggcaatgaccactggcgcctggatcttcacgggaggagttaacactggagtcatcaggcacgtgggggacgccctgaaagatcatgcatcaaagtcccgtggcaagatctgcacaattggcatagctccttggggcatcgtggagaatcaagaggatctcatcggcagggatgttgtacgaccctatcaaacaatgagcaatccaatgtccaaactaactgtgctgaattctatgcatagtcattttatcctagctgacaatggcaccacaggaaagtacggggcagaagttaaactaagacgacagcttgagaaacatatctccctgcaaaagatcaatactcggatcggccaaggagttccggttgtggcactgatcgtagagggcggaccaaacgtcatcagcattgtattagagtatctccgggatactccacctgtgccagtcgtggtttgcgacggcagcggccgtgctagcgacatactggctttcggccacaagtactccgaggaaggaggactcatcaacgagtctcttcgggaccagctgttggtcaccatacaaaagacctttacatacaccagaacccaagctcagcacctgtttataatcctaatggagtgtatgaaaaaaaaggagctgattacggtgttcagaatggggtcagagggacatcaggatatcgacctagccatcttgaccgccctccttaagggagcaaacgcttccgctcccgaccagctctcattggccctggcttggaaccgtgtggacatagctcggagccagatttttatatacggtcaacaatggcccgtgggtagcctcgagcaggcgatgctcgatgcgctggtccttgaccgggttgactttgttaagttgctgatagagaatggagtcagcatgcacagatttctgaccatctcacgtctcgaggaattatataacacaaggcacgggccctcaaacactctttaccaccttgtgagggacgtgaaaaagcgagagtatcccggatttgggtggatctattttaaagggaatctccccccagactatcgaatctccctgattgatattggactagtcatcgagtacctcatgggcggagcataccggtgtaactatacccgcaaacgcttcaggaccctttaccacaacctattcggccccaagagggacgacatacctctgcgtcgcggacgcaagactactaagaaacgtgaggaagaggttgatattgacctcgatgatcctgaaatcaatcatttcccttttcctttccatgaactcatggtctgggcagtactcatgaagaggcaaaagatggcactgttcttctggcaacatggcgaggaggcaatggccaaggcccttgtggcgtgtaagctatgtaaggcaatggctcacgaggcgagcgagaatgacatggtagacgacattagtcaggagttgaaccacaactcccgggatttcggccagctcgctgtggagctgctggaccagtcatataaacaggacgaacagctggctatgaaactgctcacttatgagctcaagaattggtccaatgcaacttgtctgcagctcgccgtggctgctaaacacagagatttcatagcacatacctgcagccaaatgttgctaaccgacatgtggatggggcggctccgtatgagaaaaaatagcggcctgaaagttatcctgggcatcctgctgccaccttcaattttgtccttagagtttaaaaacaaagatgacatgccttatatgagccaggctcaagagattcaccttcaggagaaggaggcagaggagccagagaagccgactaaagaaaaggaagaggaggacatggagctgacagctatgctgggacggaataacggggagtcctcacgaaagaaggatgaagaggaagttcaatccaagcaccgcctgatccctctcggacgcaaaatctatgaattctataacgcacctatcgttaagttttggttctacacactggcatatattgggtatctcatgctgtttaactacattgtcctggtcaagatggagcggtggccctcaactcaggaatggatcgtcatctcatacatcttcaccttgggaattgagaaaatgagggagatactgatgtctgaaccgggtaaattgttacagaaggtaaaagtgtggctccaggaatactggaacgtgacagatctcattgccatactactctttagcgtcggaatgatcctgcggctgcaggaccaacccttccggtctgatgggcgcgtgatttattgtgtcaacatcatctactggtacatccgactgcttgacatcttcggcgtaaacaaatatttaggaccatatgtgatgatgattggaaagatgatgatcgatatgatgtacttcgttataataatgcttgttgtgctgatgtccttcggggtcgctagacaggcaatcctttttccgaatgaagagccttcctggaagcttgcaaagaacatcttttacatgccttactggatgatttacggcgaggtgtttgcggaccagatcgacccgccttgtggacagaacgagaccagagaggacggcaagatcattcagcttcctccatgcaaaaccggcgcctggatcgtacctgcgattatggcatgctatctgctcgttgcaaacatccttctggttaacctgttaatcgctgtgtttaataacacatttttcgaggtcaagagcatttctaatcaagtctggaagtttcagcgctaccaactgattatgacctttcatgagcggcccgtattacccccaccgctgatcatattctcccacatgacaatgatcttccagcacctgtgttgccgctggcgcaaacatgagtccgatcccgacgagcgggattacggtttgaaactcttcatcacagatgacgagctgaagaaggtccatgactttgaagagcaatgcatcgaggagtactttcgcgaaaaggacgaccgatttaactcctccaacgatgagaggattcgggtgacctcagagcgcgtagaaaacatgtcaatgagactggaggaggtcaacgagagagagcactccatgaaagcaagcctgcagaccgtagacatccgtctcgcccagctggaagacctgatcgggagaatggccaccgccctggaaagactcactggactcgaaagagctgaaagtaataagattcggtcaagaacgtccagcgactgtacagacgctgcgtacatcgtgcgacagtcctcctttaattcccaggagggcaacacatttaaactgcaggagagtatagatcccgccggggaagagaccatgagcccgacgagcccaactctcatgccacgcatgagatcgcactctttttattccgtcaacatgaaagataaagggggaatcgaaaaactggagagtatcttcaaggaaagatcactaagtctgcatagggctacctcttctcattctgtggcaaaagaacccaaagcgcctgctgctcccgcaaataccctagctattgtgccggactctcgcaggccgtcttcgtgtattgacatttacgtgtctgcaatggatgagctgcattgcgacattgatcccctagacaatagtgtgaatatcctagggctgggagagccatccttcagtacccctgtaccgtccacggctcctagttcctccgcctacgctacgctcgctccaactgatcgaccaccctcccgaagtatagactttgaggatattacgtccatggatacgcgctcttttagcagcgattatacacacctacccgaatgtcagaatccgtgggacagcgaacctcctatgtaccacactattgagagatccaagtcctcacgctatctagctacaacgcccttcctgctggaagaggcccctatagttaagtcccattccttcatgttcagcccgtctcggtcgtactacgcgaactttggggtgcccgtgaagactgctgagtataccagcatcacagactgtattgacacaaggtgcgtgaatgccccgcaggcgatcgcagatcgcgctgccttcccgggcggtctcggtgacaaagtcgaggacctaacgtgctgccatccggaaagagaggctgagctgtctcacccgtcgagcgacagtgaagagaacgaggcgaaaggtcggcgggctacaattgccatcagttctcaggagggggacaattctgagcgaacattgtctaataatattacagtgccaaaaatagagagagcaaactcttattccgctgaagaacctagcgccccctatgcacacactagaaaatcattcagtatcagtgacaagttggatcggcagcgaaataccgcgtcactgcgcaatccattccagagaagcaagtcttccaagcccgaagggcgaggcgactctctgtccatgaggcgtctgtcccggaccagtgcctttcaatctttcgaaagcaaacataattag

SEQ ID NO: 311061 - DNA, 5136 bp, Artificial Sequence
  derived and/or modified sequence
atgggaaaaaaatggagggacgcagctgagatggagagaggatgttccgatagagaagataacgcagagagccgcagacggtctagatctgccagcagggggaggtttgcggaaagttggaaaagactctcatctaagcaggggagcactaaaaggtctggcctgccctcgcagcaaactcctgcccagaagtcctggatcgaacgcgcattttacaaaagagagtgtgtgcatattattcctagtactaaggaccctcacaggtgctgctgcggtcgcctgattggacaacatgtcggtctgacgccaagtatctctgttctgcagaacgagaaaaacgagagtaggctatctcgcaacgatatacagagtgagaagtggtccatctcaaagcacacacaactgtcacccacagatgcatttggcacaattgaattccagggtgggggacactccaataaagcaatgtatgtgagagtgtcctttgatacaaagcccgacctgcttctgcatcttatgaccaaggagtggcagcttgaattgccaaaactgcttatcagcgtgcatgggggactgcagaatttcgagctgcaaccaaagttaaagcaagtcttcgggaaaggccttatcaaggccgctatgacgaccggggcatggatctttacaggcggtgttaataccggggtgatacggcacgtcggagatgccctgaaagaccacgcttcaaagagccggggaaagatctgcaccatcgggatagccccatggggaatcgttgagaaccaggaggatttgatcggtagagatgtcgtccgaccttatcagacgatgagtaaccccatgtctaagctaacagtgttgaattcgatgcatagccactttattctcgctgacaatggtactaccggtaagtatggagctgaggtgaagctgagaagacagctggagaagcacatcagtctccagaagattaatactagaatcggacagggcgtgccagtggtggccttgatcgttgaaggcggaccgaatgtgattagcatcgtgctggaatatctgcgagacactccacccgtgcctgtggtcgtgtgcgatggtagtggcagagccagtgatatactcgcttttgggcacaaatattctgaagagggcggtctgattaacgagtctctaagggaccaacttttggtgactattcagaagacattcacatatacaagaactcaagcccagcacctgttcatcatcttgatggagtgtatgaaaaaaaaggagttgattactgtgtttcggatgggctccgaagggcatcaggacatagatttggctattctgacagccctgcttaaaggcgcaaacgcgagcgcaccggatcagctgagcctggccctggcatggaacagagtcgatattgcccgatctcagatattcatctacggccaacagtggcccgtgggctccttggagcaagctatgttagacgccctcgtcttggatagggtggatttcgttaaacttttgatcgaaaatggcgtgtccatgcaccgttttttgacaatctccagactggaggaactctataatacccgacacggaccttctaacacgttgtaccatttggtcagggatgtgaaaaaaagggagtatccaggcttcggctggatctattttaagggtaacctcccccctgactaccggataagtctgatagatattggcctggtgatagagtatctgatggggggtgcttataggtgtaactacacccgcaaaaggtttcggactttatatcacaacctgtttggaccgaagcgggatgatatcccccttaggcgcggacggaaaaccaccaagaagcgtgaggaggaagtcgacatagatttggacgaccctgagatcaaccatttcccattccccttccatgaactgatggtgtgggcagtgctcatgaagcggcaaaaaatggccctgttcttctggcaacacggagaagaagcaatggctaaagcccttgtggcgtgcaaactctgcaaggcaatggctcatgaggcctctgaaaatgatatggtggacgacattagtcaggagctgaaccataacagtcgcgatttcggacagctggccgtcgagctgctcgaccagtcatataagcaggatgaacagctggccatgaagttgctgacttacgaacttaaaaattggtctaatgccacctgtctgcaactcgctgttgctgctaaacaccgggactttatcgcacacacttgctcacaaatgctgctgactgacatgtggatgggacgactgcggatgagaaaaaactccggactgaaagtgatcctgggtatactcctccccccaagtattctttccttagagttcaaaaataaagacgatatgccttatatgagccaggcccaggagattcacctccaggagaaagaagccgaagaacctgagaaaccaacaaaagaaaaagaggaagaagacatggagctcacagctatgctgggtagaaataatggagaatcttcgcgtaagaaggatgaggaggaggtgcaatctaaacacagactgatcccactgggcaggaaaatttacgagttttacaacgcgcctattgtgaagttttggttttacaccttggcatatataggttatctgatgctctttaactacattgtactagtcaaaatggaaaggtggccttccacccaggagtggattgtaatcagctatatcttcaccctagggatagaaaaaatgagggagatactcatgagcgaaccaggcaaactcctccaaaaagtgaaggtgtggttacaggagtactggaacgtgacggacctgatcgcaatccttcttttcagcgtcggcatgattctaaggttgcaagatcagccgtttcgctccgacgggagagtgatttactgcgtcaacattatctactggtatattagactgttggacatatttggcgtgaataagtaccttgggccatatgtaatgatgattgggaaaatgatgatcgatatgatgtactttgttatcattatgctcgtggtgctgatgagcttcggtgtggcaaggcaggctattctgtttcccaatgaagaaccttcatggaagttagccaagaacatattctacatgccctattggatgatttatggtgaggtcttcgcagaccagatcgaccccccttgtggtcagaatgaaacccgcgaggacggcaaaatcatacagttgccaccctgtaagacgggtgcgtggatcgttcctgccataatggcctgctacctgctggtggcaaatattctcttggtcaacttgctcattgcggtcttcaacaatacattcttcgaggtcaagtccatatccaaccaagtctggaagtttcagcgatatcagctcataatgactttccatgaaaggccagtgctcccgccacccctgatcatcttcagccatatgacaatgatttttcaacatctttgttgtcgctggcgtaagcacgagagcgacccagatgagcgcgattacggattgaagctgttcattaccgatgacgaactgaaaaaggtgcatgattttgaggaacagtgcattgaagaatatttcagagagaaggacgaccggtttaacagctccaacgacgagcggatccgggtaacttcagaaagggtagaaaacatgtccatgaggcttgaagaagtgaatgagagggagcactctatgaaggcctcgctgcagaccgtggatataagactcgcgcagctcgaagatctgattggcaggatggcgaccgctctagaaaggcttaccggcctggagagagccgaatccaataaaatcaggtcaaggaccagcagcgactgcactgatgctgcctatatcgttaggcagtctagttttaattcacaagaggggaataccttcaagctgcaagaatccatagatccagctggtgaggaaacaatgtccccaacatcacccaccctcatgcctcgtatgcgatcccacagcttctacagcgtcaatatgaaggacaagggtggaatcgaaaagttagaaagcatcttcaaggagcggagcctctctctgcacagggcaacctcctcccatagtgtagccaaggagcctaaagcgcctgctgcccctgcgaatacactggcgattgtgccagatagtcgacgtcccagtagctgcatagacatctacgttagtgcgatggatgagcttcactgtgacatagatccactcgataactccgtaaacatactgggacttggagaaccatcgtttagtaccccagtaccttctacagccccaagcagctcggcctatgccactctggcacccaccgacagaccaccatcacggagcatagatttcgaggacataactagcatggacaccaggtcgttctcaagtgactacacacacttgcccgagtgccagaatccttgggactcagagcctcctatgtaccatacgattgagcgtagcaaaagttcccgataccttgctaccacgccctttcttctcgaggaagcaccaatcgtcaagtcacattcctttatgttttccccatcaagatcttattacgccaacttcggagtcccggttaagacggcagaatatacgagtatcactgactgtattgacacacgttgtgtgaacgcccctcaagcaatcgccgaccgcgcagcattccccggaggtctcggagataaagtggaagatctcacatgctgtcaccctgagcgcgaagccgaactgagccacccctcatccgactccgaggagaatgaagccaagggtcgacgggctactattgcgatctctagccaggaaggtgataacagcgagcgaactctgtccaacaatattacagtcccaaaaattgaaagagctaatagttattccgcggaggaacccagtgccccatacgcacacactagaaaatccttttctattagcgataagcttgatagacagcgaaataccgcgagcctgcggaatccattccagcggagtaagtcctccaaaccggaaggtcgaggagactcactaagcatgaggagactaagtagaacatccgctttccagtcttttgagtccaagcacaattag

SEQ ID NO: 311062 - DNA, 5145 bp, Artificial Sequence
  derived and/or modified sequence
atggggaagaagtggagggatgcggcggaaatggagcggggctgctccgaccgcgaggacaacgcggagagccgcagacgcagccggagcgccagccggggcaggtttgccgagtcgtggaaaaggttaagttccaagcaggggtccaccaaacgctcgggactcccgtcgcagcagacgccggctcagaaatcctggatagaaagagcattttataaaagagaatgtgtccacatcatacccagcaccaaagacccccataggtgttgctgtgggcgtctgataggccagcatgttggcctcacccccagtatctccgtgcttcagaatgagaaaaatgaaagtcgcctctcccgaaatgacatccagtctgaaaagtggtccatcagcaaacacactcaactcagccctacggatgcttttgggaccattgagttccaaggaggtggccattccaacaaagccatgtatgtgcgagtatcttttgatacaaaacctgatctcctcttacacctgatgaccaaggaatggcagttggagcttcccaagcttctcatctctgtccatgggggcctgcagaactttgaactccagccaaaactcaagcaagtctttgggaaagggctcatcaaagcagcaatgacaactggagcgtggatattcactggaggggttaacacaggtgttattcgtcatgttggcgatgccttgaaggatcatgcctctaagtctcgaggaaagatatgcaccataggtattgccccctggggaattgtggaaaaccaggaggacctcattggaagagatgttgtccggccataccagaccatgtccaatcccatgagcaagctcactgttctcaacagcatgcattcccacttcattctggctgacaacgggaccactggaaaatatggagcagaggtgaaacttcgaagacaactggaaaagcatatttcactccagaagataaacacaagaatcggtcaaggtgttcctgtggtggcactcatagtggaaggaggacccaatgtgatctcgattgttttggagtaccttcgagacacccctcccgtgccagtggttgtctgtgatgggagtggacgggcatcggacatcctggcctttgggcataaatactcagaagaaggcggactgataaatgaatctttgagggaccagctgttggtgactatacagaagactttcacatacactcgaacccaagctcagcatctgttcatcatcctcatggagtgcatgaagaagaaggaattgattacggtatttcggatgggatcagaaggacaccaggacattgatttggctatcctgacagctttactcaaaggagccaatgcctcggccccagaccaactgagcttagctttagcctggaacagagtcgacatcgctcgcagccagatctttatttacgggcaacagtggccggtgggatctctggagcaagccatgttggatgccttagttctggacagagtggattttgtgaaattactcatagagaatggagtaagcatgcaccgttttctcaccatctccagactagaggaattgtacaatacgagacatgggccctcaaatacattgtaccacttggtcagggatgtcaaaaagcgagagtatccaggtttcggttggatctattttaaggggaacctgcccccagactacagaatcagcctgattgacatcggcctggtgatcgagtacctgatgggcggggcttatcgctgcaactacacgcgcaagcgcttccggaccctctaccacaacctcttcggccccaagagggatgatattcccttgaggcgaggaagaaagacaaccaagaaacgtgaagaagaggtggacattgacttggatgatcctgagatcaaccacttccccttccctttccatgagctcatggtgtgggctgttctcatgaagcggcagaagatggccctgttcttctggcagcacggtgaggaggccatggccaaggccctggtggcctgcaagctctgcaaagccatggctcatgaggcctctgagaacgacatggttgacgacatttcccaggagctgaatcacaattccagagactttggccagctggctgtggagctcctggaccagtcctacaagcaggacgaacagctggccatgaaactgctgacgtatgagctgaagaactggagcaacgccacgtgcctgcagcttgccgtggctgccaaacaccgcgacttcatcgcgcacacgtgcagccagatgctgctcaccgacatgtggatgggccggctccgcatgcgcaagaactcaggcctcaaggtaattctgggaattctacttcctccttcaattctcagcttggagttcaagaacaaagacgacatgccctatatgtctcaggcccaggaaatccacctccaagagaaggaggcagaagaaccagagaagcccacaaaggaaaaagaggaagaggacatggagctcacagcaatgttgggacgaaacaacggggagtcctccaggaagaaggatgaagaggaagttcagagcaagcaccggttaatccccctcggcagaaaaatctatgaattctacaatgcacccatcgtgaagttctggttctacacactggcgtatatcggatacctgatgctcttcaactatatcgtgttagtgaagatggaacgctggccgtccacccaggaatggatcgtaatctcctatattttcaccctgggaatagaaaagatgagagagattctgatgtcagagccagggaagttgctacagaaagtgaaggtatggctgcaggagtactggaatgtcacggacctcatcgccatccttctgttttctgtcggaatgatccttcgtctccaagaccagcccttcaggagtgacgggagggtcatctactgcgtgaacatcatttactggtatatccgtctcctagacatcttcggcgtgaacaagtatttgggcccgtatgtaatgatgattggaaaaatgatgatagacatgatgtactttgtcatcattatgctggtggttctgatgagctttggggtcgccaggcaagccatcctttttcccaatgaggagccatcatggaaactggccaagaacatcttctacatgccctattggatgatttatggggaagtgtttgcggaccagatagaccctccctgtggacagaatgagacccgagaggatggtaaaataatccagctgcctccctgcaagacaggagcttggatcgtgccggccatcatggcctgctacctcttagtggcaaacatcttgctggtcaacctcctcattgctgtctttaacaatacattttttgaagtaaaatcgatatccaaccaagtctggaagtttcagaggtatcagctcatcatgactttccatgaaaggccagttctgcccccaccactgatcatcttcagccacatgaccatgatattccagcacctgtgctgccgatggaggaaacacgagagcgacccggatgaaagggactacggcctgaaactcttcataaccgatgatgagctcaagaaagtacatgactttgaagagcaatgcatagaagaatacttcagagaaaaggatgatcggttcaactcatctaatgatgagaggatacgggtgacttcagaaagggtggagaacatgtctatgcggctggaggaagtcaacgagagagagcactccatgaaggcttcactccagaccgtggacatccggctggcgcagctggaagaccttatcgggcgcatggccacggccctggagcgcctgacaggtctggagcgggccgagtccaacaaaatccgctcgaggacctcgtcagactgcacggacgccgcctacattgtccgtcagagcagcttcaacagccaggaagggaacaccttcaagctccaagagagtatagaccctgcaggtgaggagaccatgtccccaacttctccaaccttaatgccccgtatgcgaagccattctttctattcggtcaatatgaaagacaaaggtggtatagaaaagttggaaagtatttttaaagaaaggtccctgagcctacaccgggctactagttcccactctgtagcaaaagaacccaaagctcctgcagcccctgccaacaccttggccattgttcctgattccagaagaccatcatcgtgtatagacatctatgtctctgctatggatgagctccactgtgatatagaccctctggacaattccgtgaacatccttgggctgggcgagccaagcttttcaactccagtaccttccacagccccttcaagtagtgcctatgcaacacttgcacccacagacagacctccaagccggagcattgattttgaggacatcacctccatggacactagatctttttcttcagactacacccacctcccagaatgccaaaacccctgggactcagagcctccgatgtaccacaccattgagcgttccaaaagtagccgctacctagccaccacaccctttcttctagaagaggctcccattgtgaaatctcatagctttatgttttccccctcaaggagctattatgccaactttggggtgcctgtaaaaacagcagaatacacaagtattacagactgtattgacacaaggtgtgtcaatgcccctcaagcaattgcggacagagctgccttccctggaggtcttggagacaaagtggaggacttaacttgctgccatccagagcgagaagcagaactgagtcaccccagctctgacagtgaggagaatgaggccaaaggccgcagagccaccattgcaatatcctcccaggagggtgataactcagagagaaccctgtccaacaacatcactgttcccaagatagagcgcgccaacagctactcggcagaggagccaagtgcgccatatgcacacaccaggaagagcttctccatcagtgacaaactcgacaggcagcggaacacagcaagcctgcgaaatcccttccagagaagcaagtcctccaagccggagggccgaggggacagcctgtccatgaggagactgtccagaacatcggctttccaaagctttgaaagcaagcacaactaaaccttctta

SEQ ID NO: 311063 - DNA, 4701 bp, Artificial Sequence
  derived and/or modified sequence
atgtacgtgagagtgagcttcgacaccaagcccgacctgctgctgcacctgatgaccaaggagtggcagctggagctgcccaagctgctgatcagcgtgcacggcggcctgcagaacttcgagctgcagcccaagctgaagcaggtgttcggcaagggcctgatcaaggccgccatgaccaccggcgcctggatcttcaccggcggcgtgaacaccggcgtgatcagacacgtgggcgacgccctgaaggaccacgccagcaagagcagaggcaagatctgcaccatcggcatcgccccctggggcatcgtggagaaccaggaggacctgatcggcagagacgtggtgagaccctaccagaccatgagcaaccccatgagcaagctgaccgtgctgaacagcatgcacagccacttcatcctggccgacaacggcaccaccggcaagtacggcgccgaggtgaagctgagaagacagctggagaagcacatcagcctgcagaagatcaacaccagaatcggccagggcgtgcccgtggtggccctgatcgtggagggcggccccaacgtgatcagcatcgtgctggagtacctgagagacaccccccccgtgcccgtggtggtgtgcgacggcagcggcagagccagcgacatcctggccttcggccacaagtacagcgaggagggcggcctgatcaacgagagcctgagagaccagctgctggtgaccatccagaagaccttcacctacaccagaacccaggcccagcacctgttcatcatcctgatggagtgcatgaagaagaaggagctgatcaccgtgttcagaatgggcagcgagggccaccaggacatcgacctggccatcctgaccgccctgctgaagggcgccaacgccagcgcccccgaccagctgagcctggccctggcctggaacagagtggacatcgccagaagccagatcttcatctacggccagcagtggcccgtgggcagcctggagcaggccatgctggacgccctggtgctggacagagtggacttcgtgaagctgctgatcgagaacggcgtgagcatgcacagattcctgaccatcagcagactggaggagctgtacaacaccagacacggccccagcaacaccctgtaccacctggtgagagacgtgaagaagggcaacctgccccccgactacagaatcagcctgatcgacatcggcctggtgatcgagtacctgatgggcggcgcctacagatgcaactacaccagaaagagattcagaaccctgtaccacaacctgttcggccccaagagacccaaggccctgaagctgctgggcatggaggacgacatccccctgagaagaggcagaaagaccaccaagaagagagaggaggaggtggacatcgacctggacgaccccgagatcaaccacttccccttccccttccacgagctgatggtgtgggccgtgctgatgaagagacagaagatggccctgttcttctggcagcacggcgaggaggccatggccaaggccctggtggcctgcaagctgtgcaaggccatggcccacgaggccagcgagaacgacatggtggacgacatcagccaggagctgaaccacaacagcagagacttcggccagctggccgtggagctgctggaccagagctacaagcaggacgagcagctggccatgaagctgctgacctacgagctgaagaactggagcaacgccacctgcctgcagctggccgtggccgccaagcacagagacttcatcgcccacacctgcagccagatgctgctgaccgacatgtggatgggcagactgagaatgagaaagaacagcggcctgaaggtgatcctgggcatcctgctgccccccagcatcctgagcctggagttcaagaacaaggacgacatgccctacatgagccaggcccaggagatccacctgcaggagaaggaggccgaggagcccgagaagcccaccaaggagaaggaggaggaggacatggagctgaccgccatgctgggcagaaacaacggcgagagcagcagaaagaaggacgaggaggaggtgcagagcaagcacagactgatccccctgggcagaaagatctacgagttctacaacgcccccatcgtgaagttctggttctacaccctggcctacatcggctacctgatgctgttcaactacatcgtgctggtgaagatggagagatggcccagcacccaggagtggatcgtgatcagctacatcttcaccctgggcatcgagaagatgagagagatcctgatgagcgagcccggcaagctgctgcagaaggtgaaggtgtggctgcaggagtactggaacgtgaccgacctgatcgccatcctgctgttcagcgtgggcatgatcctgagactgcaggaccagcccttcagaagcgacggcagagtgatctactgcgtgaacatcatctactggtacatcagactgctggacatcttcggcgtgaacaagtacctgggcccctacgtgatgatgatcggcaagatgatgatcgacatgatgtacttcgtgatcatcatgctggtggtgctgatgagcttcggcgtggccagacaggccatcctgttccccaacgaggagcccagctggaagctggccaagaacatcttctacatgccctactggatgatctacggcgaggtgttcgccgaccagatcgacagaaagcaggtgtacgacagccacacccccaagagcgccccctgcggccagaacgagaccagagaggacggcaagatcatccagctgcccccctgcaagaccggcgcctggatcgtgcccgccatcatggcctgctacctgctggtggccaacatcctgctggtgaacctgctgatcgccgtgttcaacaacaccttcttcgaggtgaagagcatcagcaaccaggtgtggaagttccagagataccagctgatcatgaccttccacgagagacccgtgctgcccccccccctgatcatcttcagccacatgaccatgatcttccagcacctgtgctgcagatggagaaagcacgagagcgaccccgacgagagagactacggcctgaagctgttcatcaccgacgacgagctgaagaaggtgcacgacttcgaggagcagtgcatcgaggagtacttcagagagaaggacgacagattcaacagcagcaacgacgagagaatcagagtgaccagcgagagagtggagaacatgagcatgagactggaggaggtgaacgagagagagcacagcatgaaggccagcctgcagaccgtggacatcagactggcccagctggaggacctgatcggcagaatggccaccgccctggagagactgaccggcctggagagagccgagagcaacaagatcagaagcagaaccagcagcgactgcaccgacgccgcctacatcgtgagacagagcagcttcaacagccaggagggcaacaccttcaagctgcaggagagcatcgaccccgccggcgaggagaccatgagccccaccagccccaccctgatgcccagaatgagaagccacagcttctacagcgtgaacatgaaggacaagggcggcatcgagaagctggagagcatcttcaaggagagaagcctgagcctgcacagagccaccagcagccacagcgtggccaaggagcccaaggcccccgccgcccccgccaacaccctggccatcgtgcccgacagcagaagacccagcagctgcatcgacatctacgtgagcgccatggacgagctgcactgcgacatcgaccccctggacaacagcgtgaacatcctgggcctgggcgagcccagcttcagcacccccgtgcccagcaccgcccccagcagcagcgcctacgccaccctggcccccaccgacagaccccccagcagaagcatcgacttcgaggacatcaccagcatggacaccagaagcttcagcagcgactacacccacctgcccgagtgccagaacccctgggacagcgagccccccatgtaccacaccatcgagagaagcaagagcagcagatacctggccaccacccccttcctgctggaggaggcccccatcgtgaagagccacagcttcatgttcagccccagcagaagctactacgccaacttcggcgtgcccgtgaagaccgccgagtacaccagcatcaccgactgcatcgacaccagatgcgtgaacgccccccaggccatcgccgacagagccgccttccccggcggcctgggcgacaaggtggaggacctgacctgctgccaccccgagagagaggccgagctgagccaccccagcagcgacagcgaggagaacgaggccaagggcagaagagccaccatcgccatcagcagccaggagggcgacaacagcgagagaaccctgagcaacaacatcaccgtgcccaagatcgagagagccaacagctacagcgccgaggagcccagcgccccctacgcccacaccagaaagagcttcagcatcagcgacaagctggacagacagagaaacaccgccagcctgagaaaccccttccagagaagcaagagcagcaagcccgagggcagaggcgacagcctgagcatgagaagactgagcagaaccagcgccttccagagcttcgagagcaagcacaactag

SEQ ID NO: 311064 - DNA, 4701 bp, Artificial Sequence
  derived and/or modified sequence
atgtatgttagagtctctttcgacacgaagccggaccttttactccatcttatgactaaagaatggcaactggagctcccaaagcttctgatcagcgtccacgggggcctgcagaattttgagctgcaaccaaagctgaagcaggtgtttgggaaaggactgataaaagctgctatgactaccggcgcgtggatcttcacaggaggcgtgaatactggtgtcatacggcacgtcggagatgcactgaaagaccatgcctctaaatcccgcgggaaaatttgcaccatcggaatcgccccatggggcatagttgagaaccaagaagatcttatcggcagggatgttgtcaggccctaccaaactatgagcaatcccatgagcaagctaacagtgctgaatagtatgcattctcactttatcctcgccgacaatgggaccactgggaagtacggcgccgaggtcaaactgagacgccagttggagaagcatataagccttcagaagatcaatacacgaattggacagggggtgcccgtggttgcgctgatcgtagaagggggccccaatgtgattagcatcgtgttagaatatttgcgcgacactccaccagtcccagtagtggtctgtgatgggagcggtagagcctctgatattttggctttcggccataaatacagtgaagaaggtggtctgataaacgagagtctcagagatcagttgctcgttactattcaaaagacattcacttacacacggactcaggctcaacacctgtttattatcctcatggagtgtatgaagaagaaagaactcattacagtcttccggatgggctcagagggccaccaggatatagatctggctatcttgactgccctactgaagggagctaacgcttccgcacccgaccagctgtccctggcgctggcttggaatcgcgttgacatagcaagaagtcaaatcttcatatacgggcaacaatggcctgtcggttcactcgagcaggccatgctcgatgctctggtcttagatagggtagatttcgttaagctgttgatcgagaatggcgtctcaatgcatcgattcctaacaattagtaggctcgaggagctgtataacacccgccatggcccatccaatactctgtaccaccttgtccgagatgtgaagaagggtaacctgccgcccgactaccggattagtctgattgacattgggctagtaatcgaatacctgatgggtggggcctacaggtgtaactatacgaggaaaagatttaggacactgtaccacaatctgttcggtcccaaaaggcctaaagcactcaagttgctcggtatggaggatgacatacctctgagaaggggcagaaaaaccacaaaaaagcgagaagaggaggttgacatagatctagacgaccccgagatcaaccacttcccgttcccttttcacgagctcatggtctgggctgtcctcatgaagagacagaaaatggctctgtttttttggcagcatggcgaagaggccatggctaaggcacttgtggcttgtaaactctgtaaagccatggcccatgaggcctctgaaaatgacatggtcgacgatatcagccaggaactgaaccacaattctcgggactttgggcaactcgctgtggagctgttggaccagagctacaaacaggacgaacaactcgcaatgaagctactcacttatgaactcaagaactggagcaatgccacatgtttacagctcgctgtagccgctaagcatagggacttcatagctcatacctgcagccagatgctgctgacagatatgtggatgggcaggctgcggatgagaaaaaactccggcctcaaggttatactcggtatattgctgcccccctcaatattatcactggaatttaagaataaggatgacatgccctacatgtcccaagcccaggagattcatttacaagagaaagaggcagaagagccagaaaagcccacaaaggaaaaggaagaggaagatatggagctgactgccatgttagggagaaataatggcgagagttcacggaaaaaagatgaggaagaggtccaatcaaaacacagactgattcctctggggaggaagatttacgagttttataacgcaccaatcgtaaaattttggttttacactctagcttatattgggtatctaatgctgtttaactacatcgtgctggtgaagatggagcgatggccctctacacaggagtggattgtgatttcttacatttttacgctgggcattgaaaagatgagagaaatactgatgtcagaacccgggaaacttctgcagaaagttaaagtctggctccaagaatattggaacgtgaccgacctgatagcaattttgctgttttccgtcggtatgatcctccgccttcaggaccagccatttcggtccgacggacgcgtaatttactgtgttaatatcatctactggtatatacggctcctggatattttcggcgtaaataagtacctggggccgtatgtcatgatgatcggtaaaatgatgattgatatgatgtacttcgtcatcattatgcttgtggttctgatgagcttcggcgttgcacgtcaggctattctgtttccaaatgaggaacctagttggaagcttgccaaaaatattttttatatgccctactggatgatttatggagaggtctttgctgaccagatcgataggaagcaagtctatgacagccacacacctaagagtgcaccttgcgggcagaacgagaccagagaggacgggaagatcattcagcttcccccttgtaagaccggagcctggattgtgcccgctatcatggcctgctacttgctagtcgcgaatatactgctggtcaacttgctgatagccgtgttcaataataccttcttcgaggtgaagtccatctcgaatcaggtatggaaatttcaacgctaccagctaattatgacctttcacgaaaggccggtgctgccgcccccacttattattttttcacacatgaccatgatattccagcacctgtgttgccgatggcgtaaacatgagtctgaccctgatgaacgcgactatggcttaaagctctttatcaccgacgatgaattgaagaaagtgcacgattttgaggagcaatgcatcgaggagtactttagggaaaaggacgatcggtttaacagtagcaatgatgagaggatccgcgtgactagcgaacgcgtagagaatatgtctatgcggctggaagaagtgaacgaaagggagcactctatgaaagccagcctgcaaaccgtggacataagactcgcgcaactcgaggatctgattgggaggatggcaacagcccttgaaagactgaccgggttggaaagggccgaaagtaacaagatccgctctcggacttcctctgactgtaccgatgctgcctatatcgttagacagtcaagcttcaactctcaagagggcaatacatttaaacttcaggagagcatcgaccctgccggggaggaaaccatgagtcccactagcccaaccctaatgcccagaatgaggtcccattctttttattcggtgaatatgaaagataaggggggtatcgagaaactcgagagcatctttaaggaaaggtccctgtctctgcaccgggcaacgtctagccacagcgtggctaaggaacccaaagcccccgctgctcccgcaaatactctggcaatcgtcccagacagccggcgcccgagcagctgtattgacatatacgtgagcgcaatggacgaactccattgtgacattgatcctcttgacaatagtgtcaacattctggggctgggtgagccatctttctccactccagtaccgtcaaccgctccatcttcctctgcttacgccaccctggccccaacagaccggcctccatccagatctatcgactttgaggacattacttctatggacacgaggtcgtttagtagcgattacacacacctccccgagtgtcagaatccctgggattctgagccgccgatgtaccatacaatcgagcgtagtaagagctcccggtatttagctaccaccccatttctactcgaagaggcccctattgtcaaatcccacagcttcatgttctcaccttcgcggagctattacgcgaacttcggcgtccctgtgaaaacagccgaatatacctccattacagattgcatcgatactcgctgcgtaaatgcaccacaggccatcgcggatcgagctgccttccctggggggctgggggacaaggttgaggatctcacttgctgccaccccgaaagagaagcagagcttagccatccttccagcgactccgaagagaatgaggccaaaggaagaagagcaaccatcgcaatctctagccaggaaggtgacaactctgagaggacgctgtcgaataatatcacagtacccaaaattgagcgcgctaattcttattcggccgaggaaccctctgcgccctacgcccacacacgaaagagcttttcaatctccgacaagctcgataggcaacggaatacggcatcactaaggaatccgttccaacggtccaagtcatccaaacctgaagggaggggggattccctatccatgagacgtctcagtcgcacctccgcctttcagtcattcgagagcaagcacaactag

SEQ ID NO: 311065 - DNA, 4701 bp, Artificial Sequence
  derived and/or modified sequence
atgtatgtgcgggtgtcctttgacaccaagccagacctgctgctgcacctgatgaccaaggagtggcagctggagctgcccaagctgctgatctctgtgcacggcggcctgcagaactttgagctgcagcccaagctgaagcaggtgtttgggaagggcctcatcaaggccgccatgaccactggagcctggatcttcaccggaggagtgaacacaggagtcatcagacatgtgggagatgccctgaaggaccacgccagcaagagccggggcaagatctgcaccatcggcatcgccccctggggcatcgtggagaaccaggaggacctgattggaagagatgtggtgcggccctaccagaccatgagcaaccccatgagcaagctgactgtgctgaacagcatgcacagccacttcatcctggccgacaatggcaccaccgggaagtacggggctgaggtgaagctgcggcggcagctggagaagcacatcagcctgcagaagatcaacaccagaattggccagggcgtgcctgtggtggccctgattgtggagggcggccccaacgtcatcagcatcgtgctggagtacctgcgggacaccccacctgtgcctgtggtggtgtgtgatggcagcggccgggccagtgacatcctggccttcggccacaagtacagcgaggagggcggcctcatcaatgaaagcctgcgggaccagctgctggtgaccatccagaagaccttcacctacaccaggacccaggcccagcacctgttcatcatcctgatggagtgcatgaagaagaaggagctgatcaccgtcttcaggatgggcagcgagggccaccaggacatcgacctggccatcctgacagccctgctgaagggggccaatgccagcgccccagaccagctgagcctggccctggcctggaacagagtggacatcgcccggagccagatcttcatctacggccagcagtggcctgtgggcagcctggagcaggccatgctggatgccctggtgctggacagagtggactttgtgaagctgctgattgaaaatggagtgtccatgcaccgcttcctgaccatcagccggctggaggagctgtacaacaccaggcatggccccagcaacaccctgtaccacctggtgagagatgtgaagaagggcaacctgcccccagactaccgcatcagcctgattgatattggcctggtgattgagtacctgatgggcggggcctaccgctgcaactacaccaggaagcgcttccgcaccctgtaccacaacctgtttggccccaagaggcccaaggccctgaagctgctgggcatggaggatgacatccccctgcggcggggcaggaagaccaccaagaagcgggaggaggaggtggacatcgacctggatgatcctgagatcaaccacttccccttccccttccacgagctgatggtgtgggccgtgctgatgaagaggcagaagatggccctcttcttctggcagcacggggaggaggccatggccaaggccctggtggcctgcaagctgtgcaaggccatggcccacgaggcctctgaaaatgacatggtggatgacatcagccaggagctgaaccacaacagccgggactttggccagctggccgtggagctgctggaccagagctacaagcaggatgagcagctggccatgaagctgctgacctatgagctgaagaactggagcaatgccacctgcctgcagctggccgtggccgccaagcaccgggacttcatcgcccacacctgcagccagatgctgctgacagacatgtggatgggccgcctgaggatgaggaagaacagcggcctgaaggtgatcctgggcatcctgctgcccccatccatcctgagcctggagttcaagaacaaggatgacatgccctacatgagccaggcccaggagatccacctgcaggagaaggaggccgaggagcctgagaagcccaccaaggagaaggaggaggaggacatggagctgacagccatgctgggcaggaacaacggggagagcagcaggaagaaggatgaggaggaggtgcagagcaagcacaggctcatccccctgggcaggaagatctatgagttctacaatgcccccatcgtgaagttctggttctacaccctggcctacatcggctacctgatgctgttcaactacatcgtgctggtgaagatggagcgctggcccagcacccaggagtggatcgtcatctcctacatcttcaccctgggcatcgagaagatgagggagatcctgatgtctgagcccgggaagctgctgcagaaggtgaaggtgtggctgcaggagtactggaatgtgacagacctgattgccatcctgctcttctctgtgggcatgatcctgcggctgcaggaccagcccttcagaagtgatggccgggtcatctactgtgtgaacatcatctactggtacatccggctgctggacatctttggagtgaacaagtacctgggcccctacgtgatgatgattggcaagatgatgattgacatgatgtacttcgtcatcatcatgctggtggtgctgatgagctttggagtggcccggcaggccatcctcttccccaatgaggagcccagctggaagctggccaagaacatcttctacatgccctactggatgatctacggggaggtgtttgctgaccagattgacaggaagcaggtgtatgacagccacacccccaagagcgccccctgtggccagaatgagaccagagaagatggcaagatcatccagctgcccccctgcaagacaggagcctggatcgtgcctgccatcatggcctgctacctgctggtggccaacatcctgctggtgaacctgctgattgctgtgttcaacaacaccttctttgaggtgaagagcatcagcaaccaggtgtggaagttccagcgctaccagctgatcatgaccttccacgagaggcctgtgctgcccccacccctcatcatcttcagccacatgaccatgatcttccagcacctgtgctgccgctggaggaagcatgaaagtgaccctgatgagcgggactatggcctgaagctgttcatcacagatgatgagctgaagaaggtgcatgactttgaggagcagtgcatcgaggagtacttccgggagaaggatgaccgcttcaacagcagcaatgatgagcgcatccgggtgaccagcgagcgggtggagaacatgtccatgaggctggaggaggtgaatgaaagagagcacagcatgaaggccagcctgcagacagtggacatccggctggcccagctggaggacctgattggaaggatggccacagccctggagcggctgaccggcctggagagagctgagagcaacaagatccgcagcaggaccagcagtgactgcacagatgctgcctacatcgtgcggcagagcagcttcaacagccaggagggcaacaccttcaagctgcaggagagcattgatcctgctggggaggagaccatgagccccaccagccccaccctgatgcccaggatgaggagccacagcttctacagcgtgaacatgaaggacaagggcggcatcgagaagctggagagcatcttcaaggagaggagcctgagcctgcaccgggccaccagcagccacagcgtggccaaggagcccaaggccccagctgccccagccaacaccctggccatcgtgcctgacagcagaagacccagcagctgcatcgacatctacgtgtctgccatggatgagctgcactgtgacatcgaccccctggacaacagcgtgaacatcctgggcctgggggagcccagcttcagcacccctgtgcccagcacagcccccagcagcagcgcctatgccaccctggcccccacagacaggcctcccagccgcagcattgactttgaggacatcacctccatggacaccaggagcttcagcagtgactacacccacctgcctgagtgccagaacccctgggacagcgagccccccatgtaccacaccatcgagaggagcaagagcagccgctacctggccaccacccccttcctgctggaggaggcccccatcgtgaagagccacagcttcatgttcagccccagccgcagctactatgccaactttggagtgcctgtgaagacagctgagtacaccagcatcacagactgcatcgacacccgctgtgtgaatgccccccaggccatcgctgacagagctgccttccctgggggcctgggggacaaggtggaggacctgacctgctgccaccctgagcgggaggccgagctgagccaccccagcagtgacagcgaggagaatgaggccaagggccggcgggccaccatcgccatcagcagccaggagggggacaacagcgagaggaccctgagcaacaacatcaccgtgcccaagattgagcgggccaacagctacagcgctgaggagcccagcgccccctatgcccacaccaggaagagcttcagcatcagtgacaagctggaccggcagaggaacacagccagcctgaggaaccccttccagaggagcaagagcagcaagccagagggccgcggggacagcctgtccatgaggcggctgagcaggaccagcgccttccagagctttgagagcaagcacaactag

SEQ ID NO: 311066 - DNA, 4701 bp, Artificial Sequence
  derived and/or modified sequence
atgtacgtgcgggtgagcttcgacaccaagcccgacctgctgctgcacttgatgacgaaggagtggcagttagaactccccaagctccttatttccgtgcatggaggcctccaaaatttcgaactgcaacccaagctcaaacaggttttcggaaagggactcatcaaggccgctatgaccactggcgcatggatttttacgggaggcgtgaacaccggggttatcaggcacgtcggtgatgctcttaaggatcacgcgtccaaatcacgaggtaagatttgtacaattggcatcgccccttggggaattgtggagaaccaggaagatttgatcggtagggacgtggttcgcccctatcagaccatgagtaacccgatgagtaaactgacagtcctcaactctatgcatagccacttcatcctcgctgataacggtactactggtaagtacggagcagaggttaaactgagaagacagcttgagaaacacatttctctgcagaagatcaacacacgcattggacaaggcgtgcctgtcgtcgcccttatcgttgagggaggaccaaacgtcatatctatagtcttggagtatttgagagacacaccccccgtccccgtggtggtgtgcgacggtagcgggcgggcatccgacattcttgcattcggccacaagtattctgaagaaggcggccttatcaacgaatcattgcgggaccagctgttggtcaccatacagaaaaccttcacatacacccggacccaggctcaacatctgttcattattctaatggaatgtatgaagaagaaagagctgataacagtttttcggatgggtagtgaaggccatcaggacatagatctcgcgattctgactgcactgttgaagggcgctaacgcttctgcgccagaccagttaagccttgctctcgcatggaatagagtggacatagcaaggtcccagatcttcatctatggtcagcagtggcccgtcggctctctggaacaggcaatgctggacgcgctagtgcttgacagggtagacttcgtgaagcttttgatagaaaacggcgtctctatgcacagatttcttacgattagtagactggaagaactgtataatactcggcatggcccttccaacacactttatcacttggttagagacgtgaagaaggggaatttgccaccggattacagaatttcgcttattgatatcggcttagtgatcgagtatctgatgggtggggcctataggtgtaactatactcggaaaagattccggactctgtatcataaccttttcggccctaagaggccaaaggcattgaagctcctggggatggaggacgacattcctcttagaaggggaagaaagaccacgaagaaaagagaggaagaggtcgatatcgatctggatgacccagaaatcaaccactttccgttccccttccacgaacttatggtgtgggccgtcctgatgaaacgacagaaaatggccttgttcttctggcaacatggcgaggaggcaatggccaaagcacttgtagcgtgtaagttgtgtaaagcgatggcccatgaagcgtccgaaaatgatatggtcgacgatatctcccaggagttgaaccataattcgagggacttcggccagctcgctgttgagctcctggaccaatcatataaacaggatgagcaacttgctatgaagctgctaacatacgagttgaagaactggtcaaacgctacctgcctgcaactcgcagtcgccgccaagcacagagatttcatcgctcacacctgttcccaaatgcttctgaccgacatgtggatgggccgactccgcatgcgcaaaaatagcggactcaaggttatccttggaatactgttgccccccagtatactaagtctggaattcaaaaataaggatgacatgccctatatgagccaggcccaagagatacacttacaggaaaaggaggcagaagagccggaaaagcccactaaagagaaggaagaagaggacatggagctgaccgccatgctggggcggaacaacggtgagagcagcaggaagaaggatgaagaggaggtgcagtccaagcatcgtctcattcctttggggcgcaagatttacgagttttacaatgctcccattgtcaaattttggttctatacactcgcatacattggctacctaatgctgttcaattatattgtcctggtaaagatggaaaggtggccgagcacacaggagtggatcgttatttcctatatttttactctgggcattgagaaaatgagagagatcctcatgtccgaaccgggcaaactactccagaaagtgaaggtgtggctgcaggaatattggaacgttaccgacctgatcgccatccttctcttttcagttggcatgatacttagactgcaggaccagccctttcgctcagatgggagagtaatatattgcgttaatatcatttattggtacatccggctcttagatatttttggtgtgaataagtacctgggcccttatgtaatgatgataggaaagatgatgatcgacatgatgtactttgtgatcataatgttggtcgttttaatgagcttcggagttgctcgacaagctatcctttttcccaacgaagagcccagctggaagctagctaagaacatcttttatatgccatactggatgatttatggtgaggtattcgccgaccagatagatagaaagcaggtctatgactcacacaccccgaaaagcgccccctgtgggcaaaacgaaacccgcgaagacggaaagattattcagctacccccctgcaaaacaggagcctggattgtacctgctatcatggcgtgttatctgcttgtggccaacatccttctcgtgaacctcctaatagcagtcttcaacaacacgttcttcgaagtgaagagtatatctaaccaggtctggaaatttcagcgctaccagctcatcatgacattccatgaaaggcctgttttgcctcctccgttgatcatcttctcccatatgacaatgattttccagcacttatgttgcaggtggcgtaagcatgaaagtgaccctgacgagcgcgattatgggctaaaactgtttataaccgacgacgagcttaagaaagtccacgactttgaggaacaatgcattgaggagtattttcgtgaaaaggacgatcgcttcaacagctcgaacgatgagcgaattcgggtaacatctgagcgggtggagaacatgtcaatgcgcctcgaggaggtgaatgaacgagagcattccatgaaagccagtttacagacagttgatatacgattggcacaacttgaggatttgattgggaggatggccaccgctctcgaaagactcacgggactcgaaagagccgagtctaacaagataaggtctaggacaagcagcgattgcaccgatgcggcctacatcgtgcgccagtcgagctttaactctcaggaaggtaacactttcaagttgcaggaaagtatagaccccgccggcgaagagacaatgagtcccacctcaccaactttgatgccccgtatgaggtcacatagcttctattctgtcaacatgaaagacaaaggcggcatagagaaattggaatcaattttcaaggaaaggtctctttccctgcaccgagccacgagcagtcacagtgtggccaaagaaccaaaggcgccagccgctcctgcgaatactttagctatcgtccctgatagcagacgcccatcgtcttgcattgatatctatgtgtctgccatggatgagctgcactgcgatattgaccctctggataactccgtaaacatcttgggactaggcgagccgtcttttagcacgcccgtgccaagcaccgctccttcctccagcgcttacgctacactggccccgaccgaccgtccaccgtcaagatccattgattttgaggacattacctctatggatactcgctctttctcttcagactatacccatcttcccgagtgtcagaatccctgggacagcgagccccctatgtatcatactattgagcgaagcaagtctagcagatacctagccacgaccccgtttcttctagaagaggcccctatcgtgaaaagtcactccttcatgttctcaccatcgagatcgtattacgccaattttggagtcccggtcaagacagccgagtatactagtataaccgattgcatcgatactcgatgcgtcaatgccccacaggcgatcgctgatcgtgccgcatttcctggggggcttggcgacaaagttgaggatctgacctgttgtcaccccgaaagagaagcagaactcagccatccttcgagcgactctgaggaaaatgaggccaaaggaagaagagcgaccattgccatttctagccaggaaggagacaacagtgaacgcacactgagcaataatattaccgtccccaagatcgagagggctaatagttacagcgccgaagagccctcagcgccttatgcccatactagaaaaagtttttccatctccgataagctcgatagacaaagaaatactgcaagtcttagaaaccccttccagagaagtaaatcctctaagcccgaggggaggggcgatagcctgtctatgcgcaggctttcgcgtacatccgcctttcagagtttcgagtccaaacacaactag

SEQ ID NO: 311067 - DNA, 4701 bp, Artificial Sequence
  derived and/or modified sequence
atgtacgtgagggtgagctttgacaccaagcccgatctcttactgcacctcatgaccaaagaatggcagctggagcttcctaagttgctgatatctgttcacggaggtctgcagaacttcgagctccagcccaagcttaagcaggttttcggtaaaggcctcattaaagccgcaatgaccactggtgcctggatctttaccggtggcgtcaacaccggggtgattcgacacgtaggagacgccctcaaagaccacgcctcgaagtcccggggaaaaatatgtaccattggtatcgctccttggggcattgttgaaaatcaggaggatctcataggaagggacgtggtccggccttaccagacaatgagcaaccctatgagtaagctcacggtgctgaactctatgcactcacactttatcttggccgacaacggcacaacaggcaagtatggtgccgaggttaagcttagacgacagctcgaaaagcatatttctcttcaaaagattaatacacgaattggtcagggcgtgcccgtcgtggctttaattgtggaagggggacccaatgttattagtatagtgctcgagtatttgcgagacacacctccagttcctgtggtggtgtgcgacggttccggtcgggcttctgacattttagcttttgggcataaatacagtgaggaaggaggactcatcaacgaaagccttagggaccaattactggtcaccattcagaaaacgttcacttataccaggacacaggcccaacatttattcattattcttatggagtgcatgaagaaaaaggaactgatcaccgtgttccgcatgggctctgagggacaccaggacatcgacctggccatcttaaccgcgctgctgaagggggcaaatgccagtgcccctgaccagctgtctctcgctttggcctggaaccgcgtcgatatagctcgttctcagatttttatttatggccagcagtggccagtcggttccctggaacaggctatgctggatgctctcgtgttggaccgtgttgacttcgtgaaactcctgattgagaacggcgtctcaatgcatcggtttctgaccatatcaaggctggaagagctttataatacacgccacggtccaagtaacaccttgtaccatttggtccgcgacgtaaagaaaggaaatctgccacctgactaccgtatcagtcttattgacatcgggctggtgattgagtatctgatggggggtgcctacagatgtaactacaccagaaaaaggtttaggacgctttatcacaacctttttggcccaaagaggccaaaggccctcaagttgctcgggatggaagatgatatccctctgagaagaggaaggaagaccaccaaaaagagagaggaggaagtcgatattgatttagacgatcccgagattaatcacttcccttttcccttccacgagctgatggtctgggcagtgcttatgaaacgacagaaaatggctctgtttttctggcagcacggtgaagaagctatggcaaaggctttggtagcctgtaagctgtgcaaagcaatggcacacgaggcttcagagaatgatatggtggacgacatttctcaagagctcaaccacaattcacgagactttggacagctggccgtggagctcttagaccagtcttataaacaggacgaacagctggccatgaagctgttgacgtatgagctaaaaaattggagcaacgccacatgcctgcagcttgccgtagccgctaagcaccgagactttatagcccatacttgcagccagatgctattgactgatatgtggatggggaggcttaggatgcgcaagaattcaggcctcaaggtgatactcgggattcttctcccaccgtccatcctgagtctcgaatttaagaacaaagacgatatgccctatatgagtcaagcacaggaaatacacctgcaggaaaaggaggcagaagagccagagaaacctacgaaagaaaaggaggaagaggacatggaactaaccgcaatgctggggcgtaataatggcgaaagttccaggaagaaggatgaagaggaagtacagagtaaacacagactgatccctctagggagaaagatctatgagttctataacgcaccaatcgttaagttctggttctacaccctggcttacattgggtacctaatgcttttcaactacatcgtgttggtgaagatggagaggtggccctccacccaggaatggatagtcattagttacatctttacgctcggaatcgagaaaatgcgagagattctgatgtcagagcccggtaaactgttacagaaagtcaaagtgtggctccaggaatattggaatgtcactgatttgattgccatacttctattcagcgtagggatgatcctccggctccaggaccagccattcagatctgatggaagggtcatatactgtgtgaatataatctattggtacatccggctgcttgacatctttggggtcaataagtatctcggcccatacgtgatgatgatcggcaagatgatgattgacatgatgtactttgtgatcattatgttggtagtgttgatgtcatttggagtggctcgccaagctattctctttccaaacgaggagccaagctggaagctcgctaagaacatcttttacatgccatattggatgatatatggcgaggtcttcgccgaccaaatcgaccggaaacaggtttacgactcccatacacctaagagcgctccctgcggacagaacgaaactcgagaggatggaaagataattcaactgcctccgtgcaagaccggggcatggatagtgccagccattatggcgtgctacctgcttgtcgccaatatactgttggttaatcttttgatagccgttttcaataacactttcttcgaggtaaagtcaatttccaaccaggtgtggaaatttcagcggtatcaactgataatgacattccacgagagacctgtattaccccctccccttatcatttttagccacatgacgatgatcttccaacacctctgctgtcggtggcgaaagcacgaatccgaccccgacgaacgggactatggtctcaagctgttcattaccgacgatgagctgaaaaaggtccatgactttgaggagcagtgtatcgaagagtacttcagggagaaagacgaccgctttaacagtagcaatgacgaacggatacgggtcacatcggaaagagtggagaacatgagtatgaggctggaggaagtaaatgaaagggagcattcaatgaaagcaagtctacaaacagtagatatccggctcgcccagctggaggacctgatcgggcgaatggctaccgccctcgagagacttaccgggctggaacgggctgaaagtaacaaaatccgctctagaacatcctctgactgtacagatgcagcatatatcgtgcgccagagtagctttaattcacaggaaggcaatacttttaagctccaggaaagcatcgacccagctggagaggaaaccatgtcacccacttcaccgaccctcatgcctaggatgcgctcccattcattttattccgtcaatatgaaagataagggcggaatcgagaagctggaatcaatcttcaaggaaagatccctcagcctccatagagctacaagttctcactccgtcgcaaaagagcctaaagcaccggcagctccggcaaataccctggcaatagtcccagactccagacgacccagctcttgtatagacatttacgtgtccgctatggacgaattacattgtgacatcgatccgcttgacaacagtgtcaacatacttgggctgggcgagccttcgttctctacacccgtcccttcgacagcccctagttccagcgcttacgccaccttagcaccgaccgacaggccccctagcaggtcgatcgactttgaagacataacttctatggacacccgttctttttccagcgattacacccacctgccagagtgtcaaaacccttgggatagcgagccaccaatgtatcacacaatagaacgatccaaatccagtcgatacctcgccactacaccatttctgctggaggaagctcccatcgtcaaaagtcattcctttatgttctctcccagcaggtcctactatgcaaactttggagttcccgttaaaaccgcagagtatacctctatcaccgactgcatagatacaagatgtgtgaatgcacctcaagctattgctgacagggccgctttccctggcggactaggagacaaggtagaggacctgacatgttgccaccctgaacgcgaggctgagctctcccacccatcgtcggatagcgaagagaacgaagctaaggggaggcgtgccacaatagccatctcctctcaagagggcgacaacagcgaaagaacattatccaacaacataactgtcccaaagatcgagagggctaacagctatagcgccgaggagccttcagcgccatacgcacatacacgcaagtctttcagtatcagcgataagctcgacaggcaaagaaataccgcctccctgcgcaatcccttccagcggtctaagtcgagcaagcctgaaggtcggggagactctctctctatgcgcaggctgtcgcgcaccagcgcttttcagtcgttcgagtccaagcacaactag

SEQ ID NO: 311068 - DNA, 4701 bp, Artificial Sequence
  derived and/or modified sequence
atgtatgtgcgagtatcttttgatacaaaacctgatctcctcttacacctgatgaccaaggaatggcagttggagcttcccaagcttctcatctctgtccatgggggcctgcagaactttgaactccagccaaaactcaagcaagtctttgggaaagggctcatcaaagcagcaatgacaactggagcgtggatattcactggaggggttaacacaggtgttattcgtcatgttggcgatgccttgaaggatcatgcctctaagtctcgaggaaagatatgcaccataggtattgccccctggggaattgtggaaaaccaggaggacctcattggaagagatgttgtccggccataccagaccatgtccaatcccatgagcaagctcactgttctcaacagcatgcattcccacttcattctggctgacaacgggaccactggaaaatatggagcagaggtgaaacttcgaagacaactggaaaagcatatttcactccagaagataaacacaagaatcggtcaaggtgttcctgtggtggcactcatagtggaaggaggacccaatgtgatctcgattgttttggagtaccttcgagacacccctcccgtgccagtggttgtctgtgatgggagtggacgggcatcggacatcctggcctttgggcataaatactcagaagaaggcggactgataaatgaatctttgagggaccagctgttggtgactatacagaagactttcacatacactcgaacccaagctcagcatctgttcatcatcctcatggagtgcatgaagaagaaggaattgattacggtatttcggatgggatcagaaggacaccaggacattgatttggctatcctgacagctttactcaaaggagccaatgcctcggccccagaccaactgagcttagctttagcctggaacagagtcgacatcgctcgcagccagatctttatttacgggcaacagtggccggtgggatctctggagcaagccatgttggatgccttagttctggacagagtggattttgtgaaattactcatagagaatggagtaagcatgcaccgttttctcaccatctccagactagaggaattgtacaatacgagacatgggccctcaaatacattgtaccacttggtcagggatgtcaaaaaggggaacctgcccccagactacagaatcagcctgattgacatcggcctggtgatcgagtacctgatgggcggggcttatcgctgcaactacacgcgcaagcgcttccggaccctctaccacaacctcttcggccccaagaggcccaaagccttgaaactgctgggaatggaggatgatattcccttgaggcgaggaagaaagacaaccaagaaacgtgaagaagaggtggacattgacttggatgatcctgagatcaaccacttccccttccctttccatgagctcatggtgtgggctgttctcatgaagcggcagaagatggccctgttcttctggcagcacggtgaggaggccatggccaaggccctggtggcctgcaagctctgcaaagccatggctcatgaggcctctgagaacgacatggttgacgacatttcccaggagctgaatcacaattccagagactttggccagctggctgtggagctcctggaccagtcctacaagcaggacgaacagctggccatgaaactgctgacgtatgagctgaagaactggagcaacgccacgtgcctgcagcttgccgtggctgccaaacaccgcgacttcatcgcgcacacgtgcagccagatgctgctcaccgacatgtggatgggccggctccgcatgcgcaagaactcaggcctcaaggtaattctgggaattctacttcctccttcaattctcagcttggagttcaagaacaaagacgacatgccctatatgtctcaggcccaggaaatccacctccaagagaaggaggcagaagaaccagagaagcccacaaaggaaaaagaggaagaggacatggagctcacagcaatgttgggacgaaacaacggggagtcctccaggaagaaggatgaagaggaagttcagagcaagcaccggttaatccccctcggcagaaaaatctatgaattctacaatgcacccatcgtgaagttctggttctacacactggcgtatatcggatacctgatgctcttcaactatatcgtgttagtgaagatggaacgctggccgtccacccaggaatggatcgtaatctcctatattttcaccctgggaatagaaaagatgagagagattctgatgtcagagccagggaagttgctacagaaagtgaaggtatggctgcaggagtactggaatgtcacggacctcatcgccatccttctgttttctgtcggaatgatccttcgtctccaagaccagcccttcaggagtgacgggagggtcatctactgcgtgaacatcatttactggtatatccgtctcctagacatcttcggcgtgaacaagtatttgggcccgtatgtaatgatgattggaaaaatgatgatagacatgatgtactttgtcatcattatgctggtggttctgatgagctttggggtcgccaggcaagccatcctttttcccaatgaggagccatcatggaaactggccaagaacatcttctacatgccctattggatgatttatggggaagtgtttgcggaccagatagaccgtaagcaagtttatgattctcatacaccaaagtcagctccctgtggacagaatgagacccgagaggatggtaaaataatccagctgcctccctgcaagacaggagcttggatcgtgccggccatcatggcctgctacctcttagtggcaaacatcttgctggtcaacctcctcattgctgtctttaacaatacattttttgaagtaaaatcgatatccaaccaagtctggaagtttcagaggtatcagctcatcatgactttccatgaaaggccagttctgcccccaccactgatcatcttcagccacatgaccatgatattccagcacctgtgctgccgatggaggaaacacgagagcgacccggatgaaagggactacggcctgaaactcttcataaccgatgatgagctcaagaaagtacatgactttgaagagcaatgcatagaagaatacttcagagaaaaggatgatcggttcaactcatctaatgatgagaggatacgggtgacttcagaaagggtggagaacatgtctatgcggctggaggaagtcaacgagagagagcactccatgaaggcttcactccagaccgtggacatccggctggcgcagctggaagaccttatcgggcgcatggccacggccctggagcgcctgacaggtctggagcgggccgagtccaacaaaatccgctcgaggacctcgtcagactgcacggacgccgcctacattgtccgtcagagcagcttcaacagccaggaagggaacaccttcaagctccaagagagtatagaccctgcaggtgaggagaccatgtccccaacttctccaaccttaatgccccgtatgcgaagccattctttctattcggtcaatatgaaagacaaaggtggtatagaaaagttggaaagtatttttaaagaaaggtccctgagcctacaccgggctactagttcccactctgtagcaaaagaacccaaagctcctgcagcccctgccaacaccttggccattgttcctgattccagaagaccatcatcgtgtatagacatctatgtctctgctatggatgagctccactgtgatatagaccctctggacaattccgtgaacatccttgggctgggcgagccaagcttttcaactccagtaccttccacagccccttcaagtagtgcctatgcaacacttgcacccacagacagacctccaagccggagcattgattttgaggacatcacctccatggacactagatctttttcttcagactacacccacctcccagaatgccaaaacccctgggactcagagcctccgatgtaccacaccattgagcgttccaaaagtagccgctacctagccaccacaccctttcttctagaagaggctcccattgtgaaatctcatagctttatgttttccccctcaaggagctattatgccaactttggggtgcctgtaaaaacagcagaatacacaagtattacagactgtattgacacaaggtgtgtcaatgcccctcaagcaattgcggacagagctgccttccctggaggtcttggagacaaagtggaggacttaacttgctgccatccagagcgagaagcagaactgagtcaccccagctctgacagtgaggagaatgaggccaaaggccgcagagccaccattgcaatatcctcccaggagggtgataactcagagagaaccctgtccaacaacatcactgttcccaagatagagcgcgccaacagctactcggcagaggagccaagtgcgccatatgcacacaccaggaagagcttctccatcagtgacaaactcgacaggcagcggaacacagcaagcctgcgaaatcccttccagagaagcaagtcctccaagccggagggccgaggggacagcctgtccatgaggagactgtccagaacatcggctttccaaagctttgaaagcaagcacaactaa

SEQ ID NO: 311069 - DNA, 4671 bp, Artificial Sequence
  derived and/or modified sequence
tgatacgtgagagtgagcttcgacaccaagcccgacctgctgctgcacctgatgaccaaggagtggcagctggagctgcccaagctgctgatcagcgtgcacggcggcctgcagaacttcgagctgcagcccaagctgaagcaggtgttcggcaagggcctgatcaaggccgccatgaccaccggcgcctggatcttcaccggcggcgtgaacaccggcgtgatcagacacgtgggcgacgccctgaaggaccacgccagcaagagcagaggcaagatctgcaccatcggcatcgccccctggggcatcgtggagaaccaggaggacctgatcggcagagacgtggtgagaccctaccagaccatgagcaaccccatgagcaagctgaccgtgctgaacagcatgcacagccacttcatcctggccgacaacggcaccaccggcaagtacggcgccgaggtgaagctgagaagacagctggagaagcacatcagcctgcagaagatcaacaccagaatcggccagggcgtgcccgtggtggccctgatcgtggagggcggccccaacgtgatcagcatcgtgctggagtacctgagagacaccccccccgtgcccgtggtggtgtgcgacggcagcggcagagccagcgacatcctggccttcggccacaagtacagcgaggagggcggcctgatcaacgagagcctgagagaccagctgctggtgaccatccagaagaccttcacctacaccagaacccaggcccagcacctgttcatcatcctgatggagtgcatgaagaagaaggagctgatcaccgtgttcagaatgggcagcgagggccaccaggacatcgacctggccatcctgaccgccctgctgaagggcgccaacgccagcgcccccgaccagctgagcctggccctggcctggaacagagtggacatcgccagaagccagatcttcatctacggccagcagtggcccgtgggcagcctggagcaggccatgctggacgccctggtgctggacagagtggacttcgtgaagctgctgatcgagaacggcgtgagcatgcacagattcctgaccatcagcagactggaggagctgtacaacaccagacacggccccagcaacaccctgtaccacctggtgagagacgtgaagaagagagagtaccccggcttcggctggatctacttcaagggcaacctgccccccgactacagaatcagcctgatcgacatcggcctggtgatcgagtacctgatgggcggcgcctacagatgcaactacaccagaaagagattcagaaccctgtaccacaacctgttcggccccaagagagacgacatccccctgagaagaggcagaaagaccaccaagaagagagaggaggaggtggacatcgacctggacgaccccgagatcaaccacttccccttccccttccacgagctgatggtgtgggccgtgctgatgaagagacagaagatggccctgttcttctggcagcacggcgaggaggccatggccaaggccctggtggcctgcaagctgtgcaaggccatggcccacgaggccagcgagaacgacatggtggacgacatcagccaggagctgaaccacaacagcagagacttcggccagctggccgtggagctgctggaccagagctacaagcaggacgagcagctggccatgaagctgctgacctacgagctgaagaactggagcaacgccacctgcctgcagctggccgtggccgccaagcacagagacttcatcgcccacacctgcagccagatgctgctgaccgacatgtggatgggcagactgagaatgagaaagaacagcggcctgaaggtgatcctgggcatcctgctgccccccagcatcctgagcctggagttcaagaacaaggacgacatgccctacatgagccaggcccaggagatccacctgcaggagaaggaggccgaggagcccgagaagcccaccaaggagaaggaggaggaggacatggagctgaccgccatgctgggcagaaacaacggcgagagcagcagaaagaaggacgaggaggaggtgcagagcaagcacagactgatccccctgggcagaaagatctacgagttctacaacgcccccatcgtgaagttctggttctacaccctggcctacatcggctacctgatgctgttcaactacatcgtgctggtgaagatggagagatggcccagcacccaggagtggatcgtgatcagctacatcttcaccctgggcatcgagaagatgagagagatcctgatgagcgagcccggcaagctgctgcagaaggtgaaggtgtggctgcaggagtactggaacgtgaccgacctgatcgccatcctgctgttcagcgtgggcatgatcctgagactgcaggaccagcccttcagaagcgacggcagagtgatctactgcgtgaacatcatctactggtacatcagactgctggacatcttcggcgtgaacaagtacctgggcccctacgtgatgatgatcggcaagatgatgatcgacatgatgtacttcgtgatcatcatgctggtggtgctgatgagcttcggcgtggccagacaggccatcctgttccccaacgaggagcccagctggaagctggccaagaacatcttctacatgccctactggatgatctacggcgaggtgttcgccgaccagatcgaccccccctgcggccagaacgagaccagagaggacggcaagatcatccagctgcccccctgcaagaccggcgcctggatcgtgcccgccatcatggcctgctacctgctggtggccaacatcctgctggtgaacctgctgatcgccgtgttcaacaacaccttcttcgaggtgaagagcatcagcaaccaggtgtggaagttccagagataccagctgatcatgaccttccacgagagacccgtgctgcccccccccctgatcatcttcagccacatgaccatgatcttccagcacctgtgctgcagatggagaaagcacgagagcgaccccgacgagagagactacggcctgaagctgttcatcaccgacgacgagctgaagaaggtgcacgacttcgaggagcagtgcatcgaggagtacttcagagagaaggacgacagattcaacagcagcaacgacgagagaatcagagtgaccagcgagagagtggagaacatgagcatgagactggaggaggtgaacgagagagagcacagcatgaaggccagcctgcagaccgtggacatcagactggcccagctggaggacctgatcggcagaatggccaccgccctggagagactgaccggcctggagagagccgagagcaacaagatcagaagcagaaccagcagcgactgcaccgacgccgcctacatcgtgagacagagcagcttcaacagccaggagggcaacaccttcaagctgcaggagagcatcgaccccgccggcgaggagaccatgagccccaccagccccaccctgatgcccagaatgagaagccacagcttctacagcgtgaacatgaaggacaagggcggcatcgagaagctggagagcatcttcaaggagagaagcctgagcctgcacagagccaccagcagccacagcgtggccaaggagcccaaggcccccgccgcccccgccaacaccctggccatcgtgcccgacagcagaagacccagcagctgcatcgacatctacgtgagcgccatggacgagctgcactgcgacatcgaccccctggacaacagcgtgaacatcctgggcctgggcgagcccagcttcagcacccccgtgcccagcaccgcccccagcagcagcgcctacgccaccctggcccccaccgacagaccccccagcagaagcatcgacttcgaggacatcaccagcatggacaccagaagcttcagcagcgactacacccacctgcccgagtgccagaacccctgggacagcgagccccccatgtaccacaccatcgagagaagcaagagcagcagatacctggccaccacccccttcctgctggaggaggcccccatcgtgaagagccacagcttcatgttcagccccagcagaagctactacgccaacttcggcgtgcccgtgaagaccgccgagtacaccagcatcaccgactgcatcgacaccagatgcgtgaacgccccccaggccatcgccgacagagccgccttccccggcggcctgggcgacaaggtggaggacctgacctgctgccaccccgagagagaggccgagctgagccaccccagcagcgacagcgaggagaacgaggccaagggcagaagagccaccatcgccatcagcagccaggagggcgacaacagcgagagaaccctgagcaacaacatcaccgtgcccaagatcgagagagccaacagctacagcgccgaggagcccagcgccccctacgcccacaccagaaagagcttcagcatcagcgacaagctggacagacagagaaacaccgccagcctgagaaaccccttccagagaagcaagagcagcaagcccgagggcagaggcgacagcctgagcatgagaagactgagcagaaccagcgccttccagagcttcgagagcaagcacaactag

SEQ ID NO: 311070 - DNA, 4671 bp, Artificial Sequence
  derived and/or modified sequence
taatacgtgcgcgtcagctttgacactaaacccgatcttctcctccacctgatgaccaaggagtggcaactggagctgcctaagttgctgatctctgtgcacggcggactacagaacttcgagctgcagccaaagctgaaacaggtgttcggaaaggggttaatcaaggcagccatgactacaggagcttggatatttacaggcggcgtcaacacaggcgtcattcgacatgttggcgatgctctaaaggaccacgcctccaagtctagagggaagatttgcacaattggaattgccccctggggtattgtcgaaaaccaggaagaccttatcggcagggatgtagtgcggccttatcaaaccatgtcaaatccaatgtctaagctgactgtgctcaattcaatgcactctcactttatcctggctgataatgggaccaccgggaagtacggggccgaagttaagctgcggcgacagttagaaaagcacatcagtttacagaagattaacactcgtataggccagggggtccccgtggttgccctgatcgttgagggcgggcctaatgtgataagcattgttttggagtacctcagagatacacctcctgtccccgtagtggtttgtgatggatctggacgagcctccgacatccttgctttcggacacaaatactccgaagagggcggattgataaatgaatctctgcgggaccagttactggtgaccattcaaaagacatttacatatacccgaacacaagcgcagcacttgttcatcattctgatggaatgtatgaagaaaaaggagctgatcactgtgtttagaatgggttcggaaggacatcaggacatcgacctcgcaattctgaccgcgttgcttaaaggagccaacgccagtgcccccgaccaactgagcctcgctctcgcctggaatcgcgtcgatattgctcggtcccagatcttcatatacggtcagcagtggcccgtgggctccctcgagcaagcgatgctggacgctctggtcctcgaccgagtggactttgtaaagttgctgatcgagaatggcgtttctatgcaccgtttccttaccatttcaaggttggaggagctgtataatactcggcacggccctagtaacaccctgtaccacctggtccgcgacgtgaaaaaaagggaatatccagggtttggatggatctacttcaaagggaacctcccccctgactacaggatttcgctgattgatataggattagtgatcgaatacttaatgggcggcgcataccgttgtaactacacaagaaaacggttccgcactctctaccacaacctgttcggtcctaagcgggatgacatccccttgcgaagaggaaggaagaccaccaagaaacgggaagaggaggtggacatcgacctggacgatcctgaaataaaccattttcctttcccgttccacgagttgatggtgtgggccgtgctgatgaagcgacagaaaatggcactgttcttctggcaacatggagaggaggcaatggccaaggcccttgtggcttgcaaattatgcaaggccatggcacatgaagcttctgaaaatgatatggttgacgacatttcgcaggagcttaatcacaattctcgagattttggacaactcgctgtggagctcctggatcagtcctataagcaggacgagcagctcgccatgaagttgctgacatatgaattgaagaactggagcaatgctacttgcctgcagctcgccgtggccgctaagcatagagactttatcgcacatacatgttctcagatgctgttaacagatatgtggatgggccggttgcgcatgaggaagaacagcgggctgaaagtcatcttaggcatcctgctacctcctagcatcctcagcttggaattcaagaacaaagacgatatgccttatatgtcgcaggcacaggagatccatcttcaggagaaagaggcggaagagcctgaaaagccaaccaaagaaaaggaagaggaagacatggaactgaccgcaatgctcggacggaataatggggagagtagtagaaaaaaagacgaggaagaggttcagagtaagcatcgactgattccactcggtagaaagatctacgagttttataacgcccctatcgttaaattctggttctataccctggcctatattgggtatcttatgctgttcaattacatcgtgctggtgaaaatggaacgctggccctccactcaagagtggatcgtgatcagctacatcttcacgctgggcattgaaaaaatgagggagatactgatgagtgagcccggcaagttgctgcagaaggtgaaagtgtggcttcaggagtactggaatgtgaccgacctgatagctattttactcttcagcgtggggatgatcctccggttgcaggatcagccattcaggtcagacggacgcgtgatttactgtgtcaatataatttattggtacattaggctgttagacatctttggagtgaataaatacctcggcccttacgttatgatgattggcaagatgatgattgacatgatgtattttgtgattatcatgcttgtcgttttgatgagctttggcgtcgctagacaagccatcctcttccccaacgaggagccatcctggaagttagcaaagaacattttttacatgccttactggatgatatatggggaagtcttcgcagatcagatcgaccccccttgtgggcaaaatgaaacaagggaagacggaaaaattattcagttacccccctgtaagactggcgcctggatagttcctgccattatggcttgctacctacttgtggccaacattctgttggttaacctccttattgctgtgttcaacaatacctttttcgaggttaaatcaatatcgaatcaggtttggaagtttcaaaggtatcagcttattatgacattccatgagcgccccgtactgccccccccactgatcattttctctcatatgactatgatttttcagcatctgtgttgtagatggcgcaagcatgagtccgaccccgacgagagggactatgggctgaagttgttcattacagacgatgaattgaagaaggtccatgacttcgaagagcagtgcatcgaggaatattttcgagagaaagacgataggtttaatagctctaatgacgagcgcattcgagtaacgagcgagcgggtcgaaaatatgagcatgagattagaggaggtgaatgagagagagcactctatgaaggccagcctacagaccgtggacatacgcttagctcaactggaggacctcattggtcgaatggccactgcgctggagagactgacaggattggaaagagccgagtctaataaaatcagaagcagaacaagcagcgactgcaccgatgctgcttatattgtgcgccagtcctctttcaattcccaggaagggaacacatttaagctccaggaatccatcgaccccgcgggcgaggagaccatgtctccaaccagtccgactctgatgccaaggatgagatctcactctttctacagcgttaacatgaaggacaaaggcggtatcgagaaactcgaaagcattttcaaagagcgatcactctctttacaccgtgccacaagtagccacagcgtggccaaagagccaaaagcccctgccgccccggccaatacactggccattgttcccgattctcggcgaccaagcagttgtattgatatctacgtgagcgcaatggacgagctccactgtgacatagacccactggataattcagtgaatatcctaggtctgggcgagcccagcttctcaactccggtgccttccactgctccaagctcatcagcgtatgccaccctcgccccaactgataggcctccatctcgcagcatcgacttcgaagatattacgtcaatggacacccgcagtttttcgtctgactacacccatcttcccgaatgtcagaacccatgggatagtgagccaccaatgtatcacacaattgaaagaagcaaaagttcccgatacctagccacaacgcctttcttactcgaagaagcgcccatcgtcaagtcccattccttcatgtttagcccctcccggagctactacgccaactttggagtaccagtgaagaccgcggaatacacgtcaataacagattgtatcgatacccggtgcgtgaacgcaccgcaagctatagccgacagagccgccttcccagggggtttaggcgacaaggtcgaggacctgacatgctgtcaccctgagagagaggcagagctgtctcacccctccagtgacagcgaagaaaatgaggcaaaggggagacgagctacaattgccatctcctctcaggaaggcgataactcagagcggacactgtcaaacaacataactgtgcctaagattgagcgggccaattcatatagcgctgaggagcccagcgcaccatatgcacatacccgcaaaagtttctccattagtgacaagctggacaggcaaagaaacacagcctcccttagaaatccttttcaacgcagcaagtcttctaagcctgagggacgcggagactcactctccatgagacgcctgtccagaaccagtgcttttcagtcctttgaatccaagcataactag

SEQ ID NO: 311071 - DNA, 4671 bp, Artificial Sequence
  derived and/or modified sequence
tgatatgtgcgggtgtcctttgacaccaagccagacctgctgctgcacctgatgaccaaggagtggcagctggagctgcccaagctgctgatctctgtgcacggcggcctgcagaactttgagctgcagcccaagctgaagcaggtgtttgggaagggcctcatcaaggccgccatgaccactggagcctggatcttcaccggaggagtgaacacaggagtcatcagacatgtgggagatgccctgaaggaccacgccagcaagagccggggcaagatctgcaccatcggcatcgccccctggggcatcgtggagaaccaggaggacctgattggaagagatgtggtgcggccctaccagaccatgagcaaccccatgagcaagctgactgtgctgaacagcatgcacagccacttcatcctggccgacaatggcaccaccgggaagtacggggctgaggtgaagctgcggcggcagctggagaagcacatcagcctgcagaagatcaacaccagaattggccagggcgtgcctgtggtggccctgattgtggagggcggccccaacgtcatcagcatcgtgctggagtacctgcgggacaccccacctgtgcctgtggtggtgtgtgatggcagcggccgggccagtgacatcctggccttcggccacaagtacagcgaggagggcggcctcatcaatgaaagcctgcgggaccagctgctggtgaccatccagaagaccttcacctacaccaggacccaggcccagcacctgttcatcatcctgatggagtgcatgaagaagaaggagctgatcaccgtcttcaggatgggcagcgagggccaccaggacatcgacctggccatcctgacagccctgctgaagggggccaatgccagcgccccagaccagctgagcctggccctggcctggaacagagtggacatcgcccggagccagatcttcatctacggccagcagtggcctgtgggcagcctggagcaggccatgctggatgccctggtgctggacagagtggactttgtgaagctgctgattgaaaatggagtgtccatgcaccgcttcctgaccatcagccggctggaggagctgtacaacaccaggcatggccccagcaacaccctgtaccacctggtgagagatgtgaagaagcgggagtacccaggcttcggctggatctacttcaagggcaacctgcccccagactaccgcatcagcctgattgatattggcctggtgattgagtacctgatgggcggggcctaccgctgcaactacaccaggaagcgcttccgcaccctgtaccacaacctgtttggccccaagagagatgacatccccctgcggcggggcaggaagaccaccaagaagcgggaggaggaggtggacatcgacctggatgatcctgagatcaaccacttccccttccccttccacgagctgatggtgtgggccgtgctgatgaagaggcagaagatggccctcttcttctggcagcacggggaggaggccatggccaaggccctggtggcctgcaagctgtgcaaggccatggcccacgaggcctctgaaaatgacatggtggatgacatcagccaggagctgaaccacaacagccgggactttggccagctggccgtggagctgctggaccagagctacaagcaggatgagcagctggccatgaagctgctgacctatgagctgaagaactggagcaatgccacctgcctgcagctggccgtggccgccaagcaccgggacttcatcgcccacacctgcagccagatgctgctgacagacatgtggatgggccgcctgaggatgaggaagaacagcggcctgaaggtgatcctgggcatcctgctgcccccatccatcctgagcctggagttcaagaacaaggatgacatgccctacatgagccaggcccaggagatccacctgcaggagaaggaggccgaggagcctgagaagcccaccaaggagaaggaggaggaggacatggagctgacagccatgctgggcaggaacaacggggagagcagcaggaagaaggatgaggaggaggtgcagagcaagcacaggctcatccccctgggcaggaagatctatgagttctacaatgcccccatcgtgaagttctggttctacaccctggcctacatcggctacctgatgctgttcaactacatcgtgctggtgaagatggagcgctggcccagcacccaggagtggatcgtcatctcctacatcttcaccctgggcatcgagaagatgagggagatcctgatgtctgagcccgggaagctgctgcagaaggtgaaggtgtggctgcaggagtactggaatgtgacagacctgattgccatcctgctcttctctgtgggcatgatcctgcggctgcaggaccagcccttcagaagtgatggccgggtcatctactgtgtgaacatcatctactggtacatccggctgctggacatctttggagtgaacaagtacctgggcccctacgtgatgatgattggcaagatgatgattgacatgatgtacttcgtcatcatcatgctggtggtgctgatgagctttggagtggcccggcaggccatcctcttccccaatgaggagcccagctggaagctggccaagaacatcttctacatgccctactggatgatctacggggaggtgtttgctgaccagattgaccccccctgtggccagaatgagaccagagaagatggcaagatcatccagctgcccccctgcaagacaggagcctggatcgtgcctgccatcatggcctgctacctgctggtggccaacatcctgctggtgaacctgctgattgctgtgttcaacaacaccttctttgaggtgaagagcatcagcaaccaggtgtggaagttccagcgctaccagctgatcatgaccttccacgagaggcctgtgctgcccccacccctcatcatcttcagccacatgaccatgatcttccagcacctgtgctgccgctggaggaagcatgaaagtgaccctgatgagcgggactatggcctgaagctgttcatcacagatgatgagctgaagaaggtgcatgactttgaggagcagtgcatcgaggagtacttccgggagaaggatgaccgcttcaacagcagcaatgatgagcgcatccgggtgaccagcgagcgggtggagaacatgtccatgaggctggaggaggtgaatgaaagagagcacagcatgaaggccagcctgcagacagtggacatccggctggcccagctggaggacctgattggaaggatggccacagccctggagcggctgaccggcctggagagagctgagagcaacaagatccgcagcaggaccagcagtgactgcacagatgctgcctacatcgtgcggcagagcagcttcaacagccaggagggcaacaccttcaagctgcaggagagcattgatcctgctggggaggagaccatgagccccaccagccccaccctgatgcccaggatgaggagccacagcttctacagcgtgaacatgaaggacaagggcggcatcgagaagctggagagcatcttcaaggagaggagcctgagcctgcaccgggccaccagcagccacagcgtggccaaggagcccaaggccccagctgccccagccaacaccctggccatcgtgcctgacagcagaagacccagcagctgcatcgacatctacgtgtctgccatggatgagctgcactgtgacatcgaccccctggacaacagcgtgaacatcctgggcctgggggagcccagcttcagcacccctgtgcccagcacagcccccagcagcagcgcctatgccaccctggcccccacagacaggcctcccagccgcagcattgactttgaggacatcacctccatggacaccaggagcttcagcagtgactacacccacctgcctgagtgccagaacccctgggacagcgagccccccatgtaccacaccatcgagaggagcaagagcagccgctacctggccaccacccccttcctgctggaggaggcccccatcgtgaagagccacagcttcatgttcagccccagccgcagctactatgccaactttggagtgcctgtgaagacagctgagtacaccagcatcacagactgcatcgacacccgctgtgtgaatgccccccaggccatcgctgacagagctgccttccctgggggcctgggggacaaggtggaggacctgacctgctgccaccctgagcgggaggccgagctgagccaccccagcagtgacagcgaggagaatgaggccaagggccggcgggccaccatcgccatcagcagccaggagggggacaacagcgagaggaccctgagcaacaacatcaccgtgcccaagattgagcgggccaacagctacagcgctgaggagcccagcgccccctatgcccacaccaggaagagcttcagcatcagtgacaagctggaccggcagaggaacacagccagcctgaggaaccccttccagaggagcaagagcagcaagccagagggccgcggggacagcctgtccatgaggcggctgagcaggaccagcgccttccagagctttgagagcaagcacaactag

SEQ ID NO: 311072 - DNA, 4671 bp, Artificial Sequence
  derived and/or modified sequence
tgatacgtgcgggtgagcttcgacaccaagcccgacctgctgctgcacctgatgaccaaggaatggcagttagaacttcctaaactgctcatttctgtgcacggcggtttacaaaactttgagctgcagcccaaactcaagcaggtcttcgggaaaggtttgatcaaggccgccatgaccactggcgcctggattttcacaggcggagtgaatactggggtgattagacatgtgggagacgcgctaaaagatcacgcgagcaaatctagaggcaaaatctgtactatcggcatcgccccttggggaatcgtggaaaaccaggaggatctgataggacgcgatgttgttagaccatatcagaccatgagtaaccctatgagtaagcttacagtgctgaactcaatgcattctcatttcatcttagctgataatggcacaacgggcaagtatggagccgaagttaagttacgccggcagctggaaaagcacatctccttgcagaaaattaatacgcgcataggccagggggtgccagttgtggcactgattgtggaaggcggccctaatgttataagtattgttcttgagtatctacgggacactcctcccgtccccgttgtagtgtgcgacggctctgggcgtgccagcgacatcttggccttcgggcataagtatagcgaagaaggaggtctgataaacgaatctctgcgggatcagttgctcgtaactatccagaagacatttacctatacccggacacaggcccagcatctgttcatcattttgatggagtgcatgaaaaaaaaggaacttattactgttttccggatggggtcagagggacaccaagatattgatctggcaatccttaccgctctcctcaaaggagccaacgcgtcagctccagatcagctgagccttgccctcgcatggaaccgggtggacattgctcggagccagatcttcatctatggacagcagtggcctgttggtagcttggagcaggccatgctggacgctttggtactggatcgtgtggattttgtaaagttactgatcgaaaacggcgtgagtatgcatcggtttctgacaatatcgcggttagaggaattgtataacactaggcacgggccctccaacacgctgtatcacctcgtcagggacgtgaaaaaacgcgagtaccccggcttcggctggatatactttaaggggaacctccccccagactatcgcatttcattaatcgacatcggactggtcattgaatacctgatggggggggcctatcggtgtaattacactcgaaaacgtttccgaaccttataccataatctctttggcccaaagagggatgacattccactgagacgaggccgaaagacgacaaagaagagagaggaagaggtggacatagacttagacgacccagagatcaatcacttccctttcccgttccacgaacttatggtgtgggccgtgctgatgaaaagacaaaagatggccctcttcttctggcagcacggggaggaggcaatggcaaaagctctagttgcctgcaaattgtgtaaagccatggcacacgaggcttcagaaaatgacatggtagacgacattagccaggagctaaaccataacagcagggatttcggccaacttgctgtggaattgctggaccaatcctataagcaggacgaacaactggccatgaagctgcttacttacgaactaaaaaactggtcaaatgctacctgccttcagctcgctgtggctgccaagcaccgggattttattgctcacacatgtagccagatgttactgacagacatgtggatggggcggcttaggatgcgtaagaatagcggactgaaggtcatcctggggatcctgcttcctccaagtattcttagcctggagttcaagaataaggatgatatgccttacatgtcccaagcgcaagaaatccacctgcaggaaaaagaagctgaggagccagaaaagcccactaaggagaaggaagaggaagatatggagcttacagccatgctgggtcgaaacaatggggagtccagccggaaaaaggacgaggaggaggtgcagtctaagcatcgactcattccattagggcggaaaatctatgaattctacaacgccccgatcgtcaaattctggttctacaccttagcctatattggatatcttatgctgttcaattacattgttttggtcaaaatggagaggtggccaagtacacaggagtggatcgtgatcagctacatcttcactcttggcatcgagaagatgcgtgaaattttgatgagcgaacctgggaagctgctccagaaagtgaaggtgtggctccaagagtactggaacgtgacagatctcatcgccatccttctcttctcggtaggtatgattttgcgcctgcaggaccaaccattccggtccgatggaagggtgatctactgcgtcaatatcatctactggtacattcggctgctcgacatcttcggcgtcaacaaatatctgggcccctacgttatgatgattggcaaaatgatgatcgacatgatgtacttcgttattataatgcttgttgtgcttatgtcatttggtgtggccaggcaggctatccttttccccaatgaagaacctagttggaagctcgctaaaaacattttctatatgccctactggatgatctatggagaagtatttgccgatcagattgacccgccttgtggccagaacgaaactagagaggacgggaagattattcaactgcccccttgtaagaccggtgcctggattgtgcccgcaattatggcttgttatctgctggtggccaacatcctgcttgtgaatctgttgatcgctgtgttcaataacaccttcttcgaagtcaagtcgatctctaatcaagtgtggaaatttcagcgctatcaactgattatgactttccacgagcgaccggtgctgcccccgccactgatcattttttcacacatgacgatgattttccagcacctctgttgtcgctggagaaaacatgaatctgaccctgacgagagagattacggacttaaactgtttatcaccgatgacgagctgaagaaggtccacgacttcgaggaacaatgcatcgaagaatattttagggagaaggacgaccgctttaacagttccaatgatgaaaggattagggtcacatcagagcgggtggagaatatgtctatgaggctcgaggaggtcaacgagcgggagcacagcatgaaggcttctcttcagacagtggatattcgcctggcccagctggaggacctgatcggtcggatggccactgccctcgagcgattaaccgggttggagcgggccgagagtaacaaaattagatctcgcacatcctcagactgtaccgacgccgcctatatcgttagacaatcatctttcaactcccaggaagggaatacctttaaattgcaggagtctattgatcccgcaggagaagagactatgtctcctaccagcccaacactgatgcccaggatgaggtcccactccttctactccgtgaacatgaaggacaagggcgggattgaaaaactcgagagtatcttcaaggagcggtccctatctctgcaccgcgcgacaagtagccattccgtcgcaaaagaacctaaggctcctgcagctccagccaatactctggcaattgtccccgattctcgtcggcccagctcttgcatcgacatatacgtgtcagccatggatgaattgcattgcgatattgatccgctcgacaatagcgtaaacattctgggattgggtgagccttctttttcaacaccggttccgagcactgcccccagctcaagcgcctacgcaaccctcgctccaacagaccgcccgccttctcggtccatcgatttcgaagacatcacaagcatggatacccggtccttcagctccgattacacgcaccttccagagtgtcaaaacccctgggacagcgaaccaccaatgtaccacactatagaaaggagtaaatctagtaggtacctcgctactacccctttcctgctggaggaggctccgattgtcaaaagccacagttttatgttttctccgagcagatcgtattacgccaattttggcgtgccagtgaagacagccgagtatacaagcatcactgattgcatagacactaggtgcgtgaacgcaccccaagccatagccgatagggccgcatttcccggaggcctgggcgataaggtggaggatctgacctgctgtcatcccgaaagagaagcggagctgtcccaccccagctctgattccgaggaaaacgaggcaaaggggcgacgcgccacaatcgcaatcagtagccaggagggcgataattcagagagaactctcagtaacaatatcacagtccccaagatcgagagggcaaattcgtactcagccgaggaacccagtgccccgtacgcccacacccgaaaatcatttagcatatctgacaagctagacaggcaaaggaacactgcatcgctgcgcaacccgttccagagatcaaagtcctccaagcctgaaggtcggggcgatagcttatctatgaggcgtctaagcaggacatctgcttttcagagtttcgaatccaagcacaactag

SEQ ID NO: 311073 - DNA, 4671 bp, Artificial Sequence
  derived and/or modified sequence
tgatacgtgcgagtgtcttttgatactaaacccgatcttctcttgcatttgatgacgaaagagtggcagctggagctcccaaaactgctgattagcgttcacggcggacttcagaatttcgagttgcagcctaagctcaagcaggtctttgggaagggcctcattaaggccgctatgacaactggggcatggatcttcaccggcggagttaatacaggggtcattcgccatgtgggggatgccctgaaggaccatgcgagtaaaagccgagggaagatttgcaccattggcatcgcaccatggggcatcgtggagaaccaagaagatctgataggacgggacgtcgtgcgcccatatcagacgatgtctaatcccatgagcaaattaacagtgctaaattccatgcacagccacttcattctggctgataacggcaccactgggaaatacggagctgaggtgaagctcaggagacagttagaaaagcatatctccctgcagaagattaatactcgtataggacaaggagtccctgtggtcgcactgatcgtcgaggggggtcccaatgtgatatcaattgttctagaataccttcgcgacacccctcccgttcctgtggtggtgtgcgatgggtctggacgggcttccgatattctggcattcgggcacaaatactcagaggaagggggactcattaacgagagtctccgagaccagttgctggtgaccattcagaagaccttcacttacaccagaacacaagcccagcacctctttattatcctcatggaatgcatgaaaaaaaaggagctgatcactgtctttagaatgggttccgaaggccatcaggatatcgatctggctattcttaccgcgctgctgaaaggagccaatgcaagcgcaccagaccagctgagcctggctttggcgtggaaccgggttgacattgctcgtagtcagatctttatttacggacaacaatggcccgtgggatctctggagcaagctatgctggacgcacttgtgctggatcgcgtggacttcgttaaactgctgatcgagaatggagtttcaatgcatagattcctaaccatttcaagattagaggagttgtacaataccagacacggtccatcaaataccctctatcacctggtccgggatgttaaaaagagggagtatcctggctttggctggatatattttaaaggcaatctgcctcccgattatcggatcagtctgatcgatataggactcgtcattgagtacctgatgggaggggcttaccggtgtaattacactcggaagagatttcgaaccctatatcacaacctttttggaccaaagcgggatgacattcccctgagacgcggtcgtaagaccacaaagaaacgcgaggaggaagtggatatcgatctggatgaccccgagataaaccatttcccttttcctttccatgaactaatggtttgggccgttcttatgaagcgccagaagatggcactgtttttctggcaacacggtgaggaggccatggctaaagccctagtggcctgcaaactgtgtaaggcaatggcacacgaagcctctgagaatgacatggttgatgacatttcccaagaattaaatcataattcgcgcgattttgggcagctggccgtcgagctactagaccagagctacaagcaggacgagcagctcgccatgaagctgctcacctatgagctcaagaattggtcaaacgccacctgcctacagttagccgtcgcagcaaagcacagggatttcatcgcccatacttgcagccagatgctgctgacagacatgtggatgggtagactgaggatgaggaaaaacagtggtctcaaagtcattctgggtatattgttgccaccaagcattctgtcattagagtttaagaataaggatgacatgccatatatgtcgcaggcccaggaaattcacttgcaggaaaaagaagcagaggagccggaaaagcctacaaaggagaaagaggaggaagacatggagcttacggccatgttggggcgaaacaacggggagtcatcaaggaagaaggacgaagaggaggtgcagtcaaagcatagacttatcccactgggccgtaagatctacgagttctacaatgctcctatagtgaaattttggttttacactctcgcttatatcggatacttaatgctttttaactacattgtcctggtgaagatggaacgctggccctcaacccaggagtggatcgtgataagttacatatttactttgggcatcgaaaagatgagggagattctgatgtcagaaccaggcaagcttctccagaaggtcaaggtatggctacaggaatattggaatgttaccgacctgatagcaattctgctcttctctgttggcatgatcctccgcctccaggatcagccattccggtcagacggccgagtcatctactgcgtaaatattatatattggtacattcggctgctggacatcttcggggtgaacaaatatctcggtccgtatgtcatgatgatcgggaaaatgatgatcgatatgatgtactttgtcatcatcatgctggtagtcctgatgtcctttggggtagccagacaggccatactgtttcccaatgaggagccatcttggaagctggctaaaaacatcttttatatgccttactggatgatctacggcgaggtcttcgcagaccaaatagaccctccttgcggccagaatgaaacacgggaggacgggaagattatccagcttccaccttgtaaaaccggagcgtggatcgtcccagcgatcatggcctgttacttgctggtggccaacattttgctggtgaacctgctcatagccgtgtttaacaacactttttttgaggtgaagagcatttccaaccaggtctggaagttccagcgataccagctgattatgacttttcatgagcgcccagtactgcctcctcctctgatcatcttttctcacatgaccatgatctttcagcatctctgttgtaggtggcgcaagcacgagtcagatcctgatgagagggattatggtctgaaactgttcatcacagatgatgaattaaaaaaagtccacgatttcgaggaacagtgcattgaggagtacttccgggaaaaggacgacagattcaactccagtaacgatgaaagaatacgtgtcacttccgagcgggtggaaaacatgtcgatgagactggaagaggtcaatgagcgggaacactcaatgaaagccagcttgcagactgtggacataagactggcacaactggaggacctgataggacggatggcgacagcactcgaacgcctgactggcttggagcgggctgaatctaacaagatccggtcccggacctcttctgactgtacagatgcagcatatatcgtgagacaatctagcttcaacagccaggagggtaacacatttaagctccaggagagcatcgaccctgctggagaggagactatgagtcccaccagtcctaccttgatgccccgtatgcgctcacacagtttctactctgtgaacatgaaggacaagggagggatcgagaagttggagtccatcttcaaggaaagatcactttcgttacaccgagccacgtccagtcactctgtggcgaaggaacctaaagccccagctgctccagcaaatacgttagccatcgtgccagattctaggcgcccttcatcatgtatcgatatctacgtgtcagccatggacgagctgcattgtgacatagaccctttagataactctgtaaacatcctgggcctgggagagccttcattcagtacacccgtgccttccacagcaccgtccagcagtgcctatgccacactggcgccaactgatcggccaccgtccaggtccatcgatttcgaagacattacctccatggacaccaggagcttctcatctgactacacacacttgccagaatgtcagaacccatgggatagtgagccccctatgtatcacaccattgagaggagcaagtccagccgttatctggcgacgaccccctttctgctcgaggaagcaccaattgtgaaatcacacagctttatgttttctccgagccggagctattatgcaaactttggtgtgcccgtaaagactgcggagtacacgagcatcacagactgcatcgatacccgctgcgtgaatgccccacaggctatagcagaccgcgcagcttttccaggcggtttgggcgataaggtggaggatcttacatgctgccatcctgagagggaggccgaactgagccacccttcctccgacagtgaagaaaacgaagctaaaggccgacgagccacaattgcaattagcagccaagagggggataattcggagagaacgctctctaacaacatcacagtgcccaagattgagcgagccaactcgtacagtgctgaagagcctagcgctccatacgcccatacccgcaaatccttttctatatctgataaactagaccgacaaaggaacaccgcctcactgcgcaaccctttccagcgatctaagagctccaagccagaaggtcggggtgactccctatccatgcgtcggctgtctcggacaagtgccttccagagcttcgaaagtaagcataactag

SEQ ID NO: 311074 - DNA, 4669 bp, Artificial Sequence
  derived and/or modified sequence
gtatgtgcgagtatcttttgatacaaaacctgatctcctcttacacctgatgaccaaggaatggcagttggagcttcccaagcttctcatctctgtccatgggggcctgcagaactttgaactccagccaaaactcaagcaagtctttgggaaagggctcatcaaagcagcaatgacaactggagcgtggatattcactggaggggttaacacaggtgttattcgtcatgttggcgatgccttgaaggatcatgcctctaagtctcgaggaaagatatgcaccataggtattgccccctggggaattgtggaaaaccaggaggacctcattggaagagatgttgtccggccataccagaccatgtccaatcccatgagcaagctcactgttctcaacagcatgcattcccacttcattctggctgacaacgggaccactggaaaatatggagcagaggtgaaacttcgaagacaactggaaaagcatatttcactccagaagataaacacaagaatcggtcaaggtgttcctgtggtggcactcatagtggaaggaggacccaatgtgatctcgattgttttggagtaccttcgagacacccctcccgtgccagtggttgtctgtgatgggagtggacgggcatcggacatcctggcctttgggcataaatactcagaagaaggcggactgataaatgaatctttgagggaccagctgttggtgactatacagaagactttcacatacactcgaacccaagctcagcatctgttcatcatcctcatggagtgcatgaagaagaaggaattgattacggtatttcggatgggatcagaaggacaccaggacattgatttggctatcctgacagctttactcaaaggagccaatgcctcggccccagaccaactgagcttagctttagcctggaacagagtcgacatcgctcgcagccagatctttatttacgggcaacagtggccggtgggatctctggagcaagccatgttggatgccttagttctggacagagtggattttgtgaaattactcatagagaatggagtaagcatgcaccgttttctcaccatctccagactagaggaattgtacaatacgagacatgggccctcaaatacattgtaccacttggtcagggatgtcaaaaagcgagagtatccaggtttcggttggatctattttaaggggaacctgcccccagactacagaatcagcctgattgacatcggcctggtgatcgagtacctgatgggcggggcttatcgctgcaactacacgcgcaagcgcttccggaccctctaccacaacctcttcggccccaagagggatgatattcccttgaggcgaggaagaaagacaaccaagaaacgtgaagaagaggtggacattgacttggatgatcctgagatcaaccacttccccttccctttccatgagctcatggtgtgggctgttctcatgaagcggcagaagatggccctgttcttctggcagcacggtgaggaggccatggccaaggccctggtggcctgcaagctctgcaaagccatggctcatgaggcctctgagaacgacatggttgacgacatttcccaggagctgaatcacaattccagagactttggccagctggctgtggagctcctggaccagtcctacaagcaggacgaacagctggccatgaaactgctgacgtatgagctgaagaactggagcaacgccacgtgcctgcagcttgccgtggctgccaaacaccgcgacttcatcgcgcacacgtgcagccagatgctgctcaccgacatgtggatgggccggctccgcatgcgcaagaactcaggcctcaaggtaattctgggaattctacttcctccttcaattctcagcttggagttcaagaacaaagacgacatgccctatatgtctcaggcccaggaaatccacctccaagagaaggaggcagaagaaccagagaagcccacaaaggaaaaagaggaagaggacatggagctcacagcaatgttgggacgaaacaacggggagtcctccaggaagaaggatgaagaggaagttcagagcaagcaccggttaatccccctcggcagaaaaatctatgaattctacaatgcacccatcgtgaagttctggttctacacactggcgtatatcggatacctgatgctcttcaactatatcgtgttagtgaagatggaacgctggccgtccacccaggaatggatcgtaatctcctatattttcaccctgggaatagaaaagatgagagagattctgatgtcagagccagggaagttgctacagaaagtgaaggtatggctgcaggagtactggaatgtcacggacctcatcgccatccttctgttttctgtcggaatgatccttcgtctccaagaccagcccttcaggagtgacgggagggtcatctactgcgtgaacatcatttactggtatatccgtctcctagacatcttcggcgtgaacaagtatttgggcccgtatgtaatgatgattggaaaaatgatgatagacatgatgtactttgtcatcattatgctggtggttctgatgagctttggggtcgccaggcaagccatcctttttcccaatgaggagccatcatggaaactggccaagaacatcttctacatgccctattggatgatttatggggaagtgtttgcggaccagatagaccctccctgtggacagaatgagacccgagaggatggtaaaataatccagctgcctccctgcaagacaggagcttggatcgtgccggccatcatggcctgctacctcttagtggcaaacatcttgctggtcaacctcctcattgctgtctttaacaatacattttttgaagtaaaatcgatatccaaccaagtctggaagtttcagaggtatcagctcatcatgactttccatgaaaggccagttctgcccccaccactgatcatcttcagccacatgaccatgatattccagcacctgtgctgccgatggaggaaacacgagagcgacccggatgaaagggactacggcctgaaactcttcataaccgatgatgagctcaagaaagtacatgactttgaagagcaatgcatagaagaatacttcagagaaaaggatgatcggttcaactcatctaatgatgagaggatacgggtgacttcagaaagggtggagaacatgtctatgcggctggaggaagtcaacgagagagagcactccatgaaggcttcactccagaccgtggacatccggctggcgcagctggaagaccttatcgggcgcatggccacggccctggagcgcctgacaggtctggagcgggccgagtccaacaaaatccgctcgaggacctcgtcagactgcacggacgccgcctacattgtccgtcagagcagcttcaacagccaggaagggaacaccttcaagctccaagagagtatagaccctgcaggtgaggagaccatgtccccaacttctccaaccttaatgccccgtatgcgaagccattctttctattcggtcaatatgaaagacaaaggtggtatagaaaagttggaaagtatttttaaagaaaggtccctgagcctacaccgggctactagttcccactctgtagcaaaagaacccaaagctcctgcagcccctgccaacaccttggccattgttcctgattccagaagaccatcatcgtgtatagacatctatgtctctgctatggatgagctccactgtgatatagaccctctggacaattccgtgaacatccttgggctgggcgagccaagcttttcaactccagtaccttccacagccccttcaagtagtgcctatgcaacacttgcacccacagacagacctccaagccggagcattgattttgaggacatcacctccatggacactagatctttttcttcagactacacccacctcccagaatgccaaaacccctgggactcagagcctccgatgtaccacaccattgagcgttccaaaagtagccgctacctagccaccacaccctttcttctagaagaggctcccattgtgaaatctcatagctttatgttttccccctcaaggagctattatgccaactttggggtgcctgtaaaaacagcagaatacacaagtattacagactgtattgacacaaggtgtgtcaatgcccctcaagcaattgcggacagagctgccttccctggaggtcttggagacaaagtggaggacttaacttgctgccatccagagcgagaagcagaactgagtcaccccagctctgacagtgaggagaatgaggccaaaggccgcagagccaccattgcaatatcctcccaggagggtgataactcagagagaaccctgtccaacaacatcactgttcccaagatagagcgcgccaacagctactcggcagaggagccaagtgcgccatatgcacacaccaggaagagcttctccatcagtgacaaactcgacaggcagcggaacacagcaagcctgcgaaatcccttccagagaagcaagtcctccaagccggagggccgaggggacagcctgtccatgaggagactgtccagaacatcggctttccaaagctttgaaagcaagcacaactaa

SEQ ID NO: 311075 - protein, 1325 aa, Artificial Sequence
  derived and/or modified sequence
MPEPWGTVYFLGIAQVFSFLFSWWNLEGVMNQADAPRPLNWTIRKLCHAAFLPSVRLLKAQKSWIERAFYKRECVHIIPSTKDPHRCCCGRLIGQHVGLTPSISVLQNEKNESRLSRNDIQSEKWSISKHTQLSPTDAFGTIEFQGGGHSNKAMYVRVSFDTKPDLLLHLMTKEWQLELPKLLISVHGGLQNFELQPKLKQVFGKGLIKAAMTTGAWIFTGGVNTGVIRHVGDALKDHASKSRGKICTIGIAPWGIVENQEDLIGRDVVRPYQTMSNPMSKLTVLNSMHSHFILADNGTTGKYGAEVKLRRQLEKHISLQKINTRIGQGVPVVALIVEGGPNVISIVLEYLRDTPPVPVVVCDGSGRASDILAFGHKYSEEGGLINESLRDQLLVTIQKTFTYTRTQAQHLFIILMECMKKKELITVFRMGSEGHQDIDLAILTALLKGANASAPDQLSLALAWNRVDIARSQIFIYGQQWPVGSLEQAMLDALVLDRVDFVKLLIENGVSMHRFLTISRLEELYNTRHGPSNTLYHLVRDVKKGNLPPDYRISLIDIGLVIEYLMGGAYRCNYTRKRFRTLYHNLFGPKRPKALKLLGMEDDIPLRRGRKTTKKREEEVDIDLDDPEINHFPFPFHELMVWAVLMKRQKMALFFWQHGEEAMAKALVACKLCKAMAHEASENDMVDDISQELNHNSRDFGQLAVELLDQSYKQDEQLAMKLLTYELKNWSNATCLQLAVAAKHRDFIAHTCSQMLLTDMWMGRLRMRKNSGLKVILGILLPPSILSLEFKNKDDMPYMSQAQEIHLQEKEAEEPEKPTKEKEEEDMELTAMLGRNNGESSRKKDEEEVQSKHRLIPLGRKIYEFYNAPIVKFWFYTLAYIGYLMLFNYIVLVKMERWPSTQEWIVISYIFTLGIEKMREILMSEPGKLLQKVKVWLQEYWNVTDLIAILLFSVGMILRLQDQPFRSDGRVIYCVNIIYWYIRLLDIFGVNKYLGPYVMMIGKMMIDMMYFVIIMLVVLMSFGVARQAILFPNEEPSWKLAKNIFYMPYWMIYGEVFADQIDPPCGQNETREDGKIIQLPPCKTGAWIVPAIMACYLLVANILLVNLLIAVFNNTFFEVKSISNQVWKFQRYQLIMTFHERPVLPPPLIIFSHMTMIFQHLCCRWRKHESDPDERDYGLKLFITDDELKKVHDFEEQCIEEYFREKDDRFNSSNDERIRVTSERVENMSMRLEEVNEREHSMKASLQTVDIRLAQLEDLIGRMATALERLTGLERAESNKIRSRTSSDCTDAAYIVRQSSFNSQEGNTFKLQESIDPAEHPLYSV

SEQ ID NO: 311076 - DNA, 3978 bp, Artificial Sequence
  derived and/or modified sequence
atgcccgagccctggggcaccgtgtacttcctgggcatcgcccaggtgttcagcttcctgttcagctggtggaacctggagggcgtgatgaaccaggccgacgcccccagacccctgaactggaccatcagaaagctgtgccacgccgccttcctgcccagcgtgagactgctgaaggcccagaagagctggatcgagagagccttctacaagagagagtgcgtgcacatcatccccagcaccaaggacccccacagatgctgctgcggcagactgatcggccagcacgtgggcctgacccccagcatcagcgtgctgcagaacgagaagaacgagagcagactgagcagaaacgacatccagagcgagaagtggagcatcagcaagcacacccagctgagccccaccgacgccttcggcaccatcgagttccagggcggcggccacagcaacaaggccatgtacgtgagagtgagcttcgacaccaagcccgacctgctgctgcacctgatgaccaaggagtggcagctggagctgcccaagctgctgatcagcgtgcacggcggcctgcagaacttcgagctgcagcccaagctgaagcaggtgttcggcaagggcctgatcaaggccgccatgaccaccggcgcctggatcttcaccggcggcgtgaacaccggcgtgatcagacacgtgggcgacgccctgaaggaccacgccagcaagagcagaggcaagatctgcaccatcggcatcgccccctggggcatcgtggagaaccaggaggacctgatcggcagagacgtggtgagaccctaccagaccatgagcaaccccatgagcaagctgaccgtgctgaacagcatgcacagccacttcatcctggccgacaacggcaccaccggcaagtacggcgccgaggtgaagctgagaagacagctggagaagcacatcagcctgcagaagatcaacaccagaatcggccagggcgtgcccgtggtggccctgatcgtggagggcggccccaacgtgatcagcatcgtgctggagtacctgagagacaccccccccgtgcccgtggtggtgtgcgacggcagcggcagagccagcgacatcctggccttcggccacaagtacagcgaggagggcggcctgatcaacgagagcctgagagaccagctgctggtgaccatccagaagaccttcacctacaccagaacccaggcccagcacctgttcatcatcctgatggagtgcatgaagaagaaggagctgatcaccgtgttcagaatgggcagcgagggccaccaggacatcgacctggccatcctgaccgccctgctgaagggcgccaacgccagcgcccccgaccagctgagcctggccctggcctggaacagagtggacatcgccagaagccagatcttcatctacggccagcagtggcccgtgggcagcctggagcaggccatgctggacgccctggtgctggacagagtggacttcgtgaagctgctgatcgagaacggcgtgagcatgcacagattcctgaccatcagcagactggaggagctgtacaacaccagacacggccccagcaacaccctgtaccacctggtgagagacgtgaagaagggcaacctgccccccgactacagaatcagcctgatcgacatcggcctggtgatcgagtacctgatgggcggcgcctacagatgcaactacaccagaaagagattcagaaccctgtaccacaacctgttcggccccaagagacccaaggccctgaagctgctgggcatggaggacgacatccccctgagaagaggcagaaagaccaccaagaagagagaggaggaggtggacatcgacctggacgaccccgagatcaaccacttccccttccccttccacgagctgatggtgtgggccgtgctgatgaagagacagaagatggccctgttcttctggcagcacggcgaggaggccatggccaaggccctggtggcctgcaagctgtgcaaggccatggcccacgaggccagcgagaacgacatggtggacgacatcagccaggagctgaaccacaacagcagagacttcggccagctggccgtggagctgctggaccagagctacaagcaggacgagcagctggccatgaagctgctgacctacgagctgaagaactggagcaacgccacctgcctgcagctggccgtggccgccaagcacagagacttcatcgcccacacctgcagccagatgctgctgaccgacatgtggatgggcagactgagaatgagaaagaacagcggcctgaaggtgatcctgggcatcctgctgccccccagcatcctgagcctggagttcaagaacaaggacgacatgccctacatgagccaggcccaggagatccacctgcaggagaaggaggccgaggagcccgagaagcccaccaaggagaaggaggaggaggacatggagctgaccgccatgctgggcagaaacaacggcgagagcagcagaaagaaggacgaggaggaggtgcagagcaagcacagactgatccccctgggcagaaagatctacgagttctacaacgcccccatcgtgaagttctggttctacaccctggcctacatcggctacctgatgctgttcaactacatcgtgctggtgaagatggagagatggcccagcacccaggagtggatcgtgatcagctacatcttcaccctgggcatcgagaagatgagagagatcctgatgagcgagcccggcaagctgctgcagaaggtgaaggtgtggctgcaggagtactggaacgtgaccgacctgatcgccatcctgctgttcagcgtgggcatgatcctgagactgcaggaccagcccttcagaagcgacggcagagtgatctactgcgtgaacatcatctactggtacatcagactgctggacatcttcggcgtgaacaagtacctgggcccctacgtgatgatgatcggcaagatgatgatcgacatgatgtacttcgtgatcatcatgctggtggtgctgatgagcttcggcgtggccagacaggccatcctgttccccaacgaggagcccagctggaagctggccaagaacatcttctacatgccctactggatgatctacggcgaggtgttcgccgaccagatcgaccccccctgcggccagaacgagaccagagaggacggcaagatcatccagctgcccccctgcaagaccggcgcctggatcgtgcccgccatcatggcctgctacctgctggtggccaacatcctgctggtgaacctgctgatcgccgtgttcaacaacaccttcttcgaggtgaagagcatcagcaaccaggtgtggaagttccagagataccagctgatcatgaccttccacgagagacccgtgctgcccccccccctgatcatcttcagccacatgaccatgatcttccagcacctgtgctgcagatggagaaagcacgagagcgaccccgacgagagagactacggcctgaagctgttcatcaccgacgacgagctgaagaaggtgcacgacttcgaggagcagtgcatcgaggagtacttcagagagaaggacgacagattcaacagcagcaacgacgagagaatcagagtgaccagcgagagagtggagaacatgagcatgagactggaggaggtgaacgagagagagcacagcatgaaggccagcctgcagaccgtggacatcagactggcccagctggaggacctgatcggcagaatggccaccgccctggagagactgaccggcctggagagagccgagagcaacaagatcagaagcagaaccagcagcgactgcaccgacgccgcctacatcgtgagacagagcagcttcaacagccaggagggcaacaccttcaagctgcaggagagcatcgaccccgccgagcaccccctgtacagcgtgtag

SEQ ID NO: 311077 - DNA, 3978 bp, Artificial Sequence
  derived and/or modified sequence
atgcccgagccctgggggaccgtttacttcttgggaattgctcaggttttttccttcttgttcagctggtggaacctggagggagttatgaatcaggccgatgcgcctagacctttgaactggaccattcgcaagctgtgtcacgcggcctttttgcccagcgtgcgtctattgaaagctcaaaaaagttggatagaacgggctttttacaagagagagtgcgtccacattatccccagcacgaaggacccccaccgttgctgctgcggacggctgattggccagcatgtcggcctcacccccagcattagcgtactccagaacgagaaaaacgagagcagactctcccggaatgacattcagagtgaaaagtggagtatctctaagcacacccaactgtctcccacagatgccttcggcacaattgaatttcaaggcgggggacatagtaacaaggcaatgtatgtgagagtgtctttcgacacaaaaccagatttacttctccatctaatgacaaaggagtggcaacttgagttgcctaaactgctgatttctgtgcatggaggtcttcagaatttcgagctccagcccaaactcaaacaggtcttcggcaagggtctgatcaaggcggctatgaccaccggagcttggattttcactggaggagtcaataccggcgtcatcaggcacgtcggggacgcactcaaggatcacgcaagcaagagtcggggaaaaatttgtacaattgggattgccccctggggcatagtagagaaccaggaagatctcattggtcgggatgtggtgaggccctaccagaccatgtccaacccaatgagtaagctgactgttttaaattccatgcactcacattttatcctggccgacaacggcactacggggaaatatggtgcggaggtcaaattgcgacggcagctcgagaaacacatttcactccaaaagattaacacgaggatcgggcaaggcgtgccagttgtggcccttattgtcgaggggggaccaaacgtgatatccatcgtgctcgagtatctgcgggatacacccccagtcccagtggttgtgtgcgatggctccggtagagcctccgatatcctggcttttggacacaaatacagcgaggaggggggtcttataaacgaaagtctccgggaccagctcctagtcacgattcaaaagaccttcacatacacacggacccaagcccagcatctgttcattatccttatggagtgcatgaagaaaaaggaactcatcacagtgtttcgtatgggctccgaaggacaccaggatatagatctggccattctgactgcccttctcaaaggcgctaacgcgtccgcccctgatcaactgtcgctggcattggcttggaatcgcgttgatatagcgagaagccagatctttatttatggccagcaatggcccgtgggcagcctcgagcaggcgatgctcgatgctttagttctggatcgtgtggacttcgtgaagttgctaatagagaatggtgtttccatgcaccgattcctaacgatcagccggttggaggagctctacaacacgcggcacggaccctctaacaccttgtatcatctggtgcgggatgtgaagaagggcaatctgccacctgattaccgcatttcactgattgatatcgggctggtgattgaatatctgatgggcggtgcctatagatgtaattacactcggaagcggtttcgcacactttaccacaatttattcggacctaaaaggccaaaagctttaaagctgctcgggatggaggacgacattcccctgcggcgagggcggaaaactacaaagaaaagagaggaggaagtcgatatcgacctcgatgaccccgagatcaaccacttccccttcccctttcacgagctgatggtgtgggccgtactgatgaaacgacagaagatggcactcttcttctggcaacatggagaggaggctatggctaaagccctggttgcctgcaagctctgcaaggccatggcccacgaggcatccgagaacgatatggtcgatgatatctctcaggagcttaatcataacagcagagattttggacagctggctgtggaattattagaccaatcgtacaaacaggatgagcagctggccatgaagctactgacatatgagctgaagaattggtcaaatgccacatgtctccagctagccgtggctgcgaaacatcgagatttcatagcccacacgtgcagtcaaatgctgctgacagacatgtggatgggacgactgaggatgagaaaaaactctggcctgaaggtgattctcggcattttactgccccccagcatcctctcacttgagtttaagaataaagacgatatgccttacatgagccaagcccaggagatccacctccaggagaaggaggcggaggagcccgagaagccaactaaggagaaagaggaggaggacatggagctgactgctatgctgggcaggaacaatggcgagagctcccgcaagaaggacgaggaagaagtccagtccaaacatagactcataccactggggagaaagatctatgagttctacaatgcccctatagtcaagttctggttctacactctggcatatattggttatctcatgctcttcaactatatagtcctggttaagatggaacgctggccttccactcaggagtggatagtcatttcctacatctttaccctggggatagaaaagatgcgtgagatcctgatgagcgagcctggcaagctcctccagaaggttaaagtttggctgcaggagtactggaacgtgacagacctgatcgccattctgctgttctcggtgggcatgatcctccggctgcaagaccagccctttcggtccgacggaagggtgatttattgcgtaaacatcatatactggtacattaggttacttgatatttttggcgtgaacaagtatctggggccgtacgtgatgatgatcgggaagatgatgatagacatgatgtacttcgtgatcataatgcttgtggtactcatgtcgttcggcgtggctaggcaggccatactgtttcccaatgaggagcccagttggaaattagcaaaaaatattttttacatgccatattggatgatttatggagaagtgttcgctgaccagatcgatcctccttgtggacagaacgagactcgagaagacggtaagatcattcaactccccccttgtaagacaggcgcatggatcgtgccagccataatggcatgctaccttttggtcgcaaacatcttgctggttaacctcctcattgctgtgttcaacaatactttttttgaagtgaagtccatcagtaaccaggtgtggaaatttcagcggtatcagctgattatgacctttcatgagcgcccagtgctacccccccctctgatcatcttcagccacatgactatgatcttccaacatctttgctgccgctggcgaaagcatgagtccgaccccgacgagagggattatggactaaaattattcatcacggacgacgagcttaaaaaggtgcacgattttgaggaacagtgcatcgaggaatacttcagggaaaaggatgataggtttaatagcagtaacgatgagcgcattcgagtaactagcgagcgcgtagagaacatgtccatgcggctcgaggaggtgaacgaaagagagcatagcatgaaagcatcactgcaaacggtggacattcgcctcgcccagctcgaagacctcattggccggatggcaactgcgctcgaaagactgaccggcctcgaaagagctgaatcaaataagattcgctctcgcaccagctccgactgcacggatgccgcctatatcgtcaggcagagcagctttaacagtcaggagggcaataccttcaagctccaggaaagcattgatcctgccgaacaccccttatactcagtatag

SEQ ID NO: 311078 - DNA, 3978 bp, Artificial Sequence
  derived and/or modified sequence
atgcctgagccctggggcaccgtgtacttcctgggcatcgcccaggtgttctccttcctgttctcctggtggaacctggagggcgtgatgaaccaggctgatgccccccggcccctgaactggaccatcaggaagctgtgccacgccgccttcctgcccagcgtgcggctgctgaaggcccagaagtcctggattgagcgggccttctacaagagagaatgtgtgcacatcatccccagcaccaaggacccccaccgctgctgctgcggccgcctgattggccagcacgtgggcctgacccccagcatctctgtgctgcagaatgagaagaatgaaagccggctgagcagaaatgacatccagagcgagaagtggagcatcagcaagcacacccagctgagccccacagatgccttcggcaccatcgagttccagggcggcggccacagcaacaaggccatgtatgtgcgggtgtcctttgacaccaagccagacctgctgctgcacctgatgaccaaggagtggcagctggagctgcccaagctgctgatctctgtgcatggaggcctgcagaactttgagctgcagcccaagctgaagcaggtgtttgggaagggcctcatcaaggccgccatgaccaccggggcctggatcttcaccggcggcgtgaacacaggagtcatccgccacgtgggagatgccctgaaggaccacgccagcaagagccggggcaagatctgcaccatcggcatcgccccctggggcatcgtggagaaccaggaggacctgattggaagagatgtggtgcggccctaccagaccatgagcaaccccatgagcaagctgactgtgctgaacagcatgcacagccacttcatcctggccgacaatggcaccaccgggaagtatggagctgaggtgaagctgcggcggcagctggagaagcacatcagcctgcagaagatcaacacccgcatcggccagggcgtgcctgtggtggccctgattgtggagggcggccccaacgtcatcagcatcgtgctggagtacctgcgggacaccccacctgtgcctgtggtggtgtgtgatggcagcggccgggccagtgacatcctggccttcggccacaagtacagcgaggagggcggcctcatcaatgaaagcctgcgggaccagctgctggtgaccatccagaagaccttcacctacaccaggacccaggcccagcacctgttcatcatcctgatggagtgcatgaagaagaaggagctgatcaccgtcttcaggatgggcagcgagggccaccaggacatcgacctggccatcctgacagccctgctgaagggggccaatgccagcgccccagaccagctgagcctggccctggcctggaacagagtggacatcgcccggagccagatcttcatctacggccagcagtggcctgtgggcagcctggagcaggccatgctggatgccctggtgctggacagagtggactttgtgaagctgctgattgaaaatggagtgtccatgcaccgcttcctgaccatcagccggctggaggagctgtacaacaccaggcatggccccagcaacaccctgtaccacctggtgagagatgtgaagaagggcaacctgcccccagactaccgcatcagcctgattgacatcggcctggtgattgagtacctgatgggcggggcctaccgctgcaactacaccaggaagcgcttccgcaccctgtaccacaacctgtttggccccaagaggcccaaggccctgaagctgctgggcatggaggatgacatccccctgcggcggggcaggaagaccaccaagaagcgggaggaggaggtggacatcgacctggatgatcctgagatcaaccacttccccttccccttccacgagctgatggtgtgggccgtgctgatgaagaggcagaagatggccctcttcttctggcagcacggggaggaggccatggccaaggccctggtggcctgcaagctgtgcaaggccatggcccacgaggcctctgaaaatgacatggtggatgacatcagccaggagctgaaccacaacagccgggactttggccagctggccgtggagctgctggaccagagctacaagcaggatgagcagctggccatgaagctgctgacctatgagctgaagaactggagcaatgccacctgcctgcagctggccgtggccgccaagcaccgggacttcatcgcccacacctgcagccagatgctgctgacagacatgtggatgggccgcctgaggatgaggaagaacagcggcctgaaggtgatcctgggcatcctgctgccccccagcatcctgagcctggagttcaagaacaaggatgacatgccctacatgagccaggcccaggagatccacctgcaggagaaggaggccgaggagcctgagaagcccaccaaggagaaggaggaggaggacatggagctgacagccatgctgggcagaaataatggagagagcagcaggaagaaggatgaggaggaggtgcagagcaagcacaggctcatccccctgggcaggaagatctatgagttctacaatgcccccatcgtgaagttctggttctacaccctggcctacatcggctacctgatgctgttcaactacatcgtgctggtgaagatggagcgctggcccagcacccaggagtggatcgtcatctcctacatcttcaccctgggcatcgagaagatgagggagatcctgatgtctgagcccgggaagctgctgcagaaggtgaaggtgtggctgcaggagtactggaatgtgacagacctgattgccatcctgctcttctctgtgggcatgatcctgcggctgcaggaccagcccttcagaagtgatggccgggtcatctactgtgtgaacatcatctactggtacatccggctgctggacatcttcggcgtgaacaagtacctgggcccctacgtgatgatgattggcaagatgatgattgacatgatgtactttgtgatcatcatgctggtggtgctgatgagctttggagtggcccggcaggccatcctcttccccaatgaggagcccagctggaagctggccaagaacatcttctacatgccctactggatgatctatggagaggtgtttgctgaccagattgatcctccctgtggccagaatgagacccgggaggatggcaagatcatccagctgcccccctgcaagacaggagcctggatcgtgcctgccatcatggcctgctacctgctggtggccaacatcctgctggtgaacctgctgattgctgtgttcaacaacaccttctttgaggtgaagagcatcagcaaccaggtgtggaagttccagcgctaccagctgatcatgaccttccacgagaggcctgtgctgcccccacccctcatcatcttcagccacatgaccatgatcttccagcacctgtgctgccgctggaggaagcatgaaagtgaccctgatgagcgggactatggcctgaagctgttcatcacagatgatgagctgaagaaggtgcatgactttgaggagcagtgcatcgaggagtacttccgggagaaggatgaccgcttcaacagcagcaatgatgagcgcatccgggtgaccagcgagcgggtggagaacatgtccatgaggctggaggaggtgaatgaaagagagcacagcatgaaggccagcctgcagacagtggacatccggctggcccagctggaggacctgattggccgcatggccacagccctggagcggctgaccggcctggagcgggcagagagcaacaagatccgcagcaggaccagcagtgactgcacagatgctgcctacatcgtgcggcagagcagcttcaacagccaggagggcaacaccttcaagctgcaggagagcattgatcctgctgagcaccccctgtacagcgtgtag

SEQ ID NO: 311079 - DNA, 3978 bp, Artificial Sequence
  derived and/or modified sequence
atgcccgagccctggggcaccgtgtacttcctgggcatcgcccaggtatttagcttcctcttctcatggtggaatttggagggagtcatgaatcaggccgacgcacctaggcccctcaactggacaattcgcaagctctgccatgctgcatttctcccttccgtacgtctgctgaaggcccaaaaatcctggattgagcgggccttctacaaacgcgagtgcgtgcatatcatccctagtacaaaggaccctcaccgttgctgctgtggcaggttaattgggcagcacgtgggtttgacaccgtctatcagcgtcctgcagaatgaaaagaatgagtctcggctctccagaaatgacattcagtctgaaaaatggtccatatctaagcacactcagctgtcaccaacagacgcttttgggacaattgagtttcaagggggcggccatagtaacaaagctatgtacgtgcgggtctcattcgacactaagcccgacttgctgctgcatctgatgacgaaggaatggcagctggagctcccaaagttgctaatttctgtgcacggagggttacaaaatttcgaactgcaaccgaagctgaaacaggtgttcggcaagggtttaattaaagccgcaatgactactggtgcatggatctttaccgggggtgtcaacactggcgttatacgacatgtgggcgacgctctgaaggatcacgcttccaagtctcgtgggaagatctgcaccattggcatcgctccttggggcattgtggagaaccaggaagatctaatcggacgcgatgtcgtccgtccctatcagacaatgtccaatcccatgagtaagttaacagtgctcaattcgatgcactcacactttattttagctgacaacggcaccacaggtaaatacggtgccgaagtcaaactgaggaggcagctcgaaaaacacatatccctccaaaagattaacacacgaattgggcaaggcgttcccgtcgtggccctgatcgtagaaggaggccccaacgttattagtatagtgctcgagtatctgcgtgacaccccgcctgttccagtggtagtgtgtgacggatcaggcagggctagcgatatcctggcatttgggcacaagtattctgaggaaggaggcctcatcaatgaaagcctccgcgaccagctgctcgttaccatccagaaaacattcacttacaccagaacacaggctcagcaccttttcatcattctcatggagtgcatgaagaagaaggaactgattaccgtcttcaggatggggtccgaagggcatcaggatattgacctcgcgatacttacagctctgctgaagggtgctaacgcgtctgcacctgaccagctctccttagcccttgcgtggaatcgcgtagacatcgcccgatcccaaatttttatttacggacagcagtggccagttggctcgcttgagcaggcaatgctggacgctctggtattggatagagtggatttcgtgaaactgctaatagaaaacggtgtctctatgcatcggtttctcacgatcagccgtctggaggaactctacaatacccgacacggcccttccaacacattatatcacttggtcagagacgtgaagaaaggcaacctgcctcctgactacaggatctcccttattgacattggcctggtcatagagtacctgatggggggagcatatagatgtaactacacaagaaagcgcttccgaacgctgtaccataacctttttggccccaagaggcctaaggccctgaaactgctcggtatggaggatgacatcccccttcggcgcgggagaaaaacaacaaagaaacgtgaagaggaggtcgacatagaccttgatgaccctgagatcaaccactttccattcccttttcatgagctaatggtatgggctgtgctgatgaaacgacaaaaaatggccctgtttttttggcagcacggcgaggaggccatggctaaagctctcgtcgcatgcaagctgtgcaaggccatggcccacgaggccagcgaaaacgacatggtcgacgacattagccaggagctgaatcacaattcccgcgatttcggtcaattagctgtcgagctcctagatcagtcttataagcaggatgaacagctggcaatgaagctccttacctacgaactgaaaaactggagcaatgctacttgccttcagttggctgtggccgctaaacatagagactttatagcccatacttgttctcagatgctgctgaccgacatgtggatgggacgactgagaatgcgcaagaattcggggctgaaagtcatactgggcatcttattaccaccttctattctcagtctggaattcaagaacaaggatgatatgccctacatgagccaggctcaggagatccatctgcaggaaaaagaggccgaagagccggagaaacctaccaaagagaaggaggaggaggacatggagctgactgctatgttaggtcgaaacaacggcgagagctctcggaaaaaagatgaggaggaagtccaatctaaacaccggcttattcccctgggacggaagatctacgagttctataacgctcctatcgttaaattctggttttatacactggcctatatcggctatctgatgctttttaactacattgtgttagttaaaatggagaggtggccgagcacacaggaatggattgtaatcagttatatctttaccctcgggattgaaaagatgcgagagatactcatgtctgagccgggaaagttgctgcaaaaagtgaaagtctggctacaggaatattggaatgttactgaccttattgccatcctgcttttttctgtgggcatgatcttgagactccaggatcagccttttagatcagatggaagagtgatatattgcgtcaatattatttattggtatattcgattactcgacatctttggcgtgaacaagtacctgggcccatacgtgatgatgattggcaaaatgatgatagatatgatgtattttgtcatcatcatgctggtggtgttgatgagcttcggcgtggcgcggcaagcaatactctttcccaacgaagagcctagttggaaactcgcgaagaatattttctacatgccgtactggatgatctacggcgaagtcttcgccgaccaaatagatcctccttgcggacagaacgagacacgggaagacggtaagatcatacagctcccgccctgtaagactggcgcttggatcgtcccggcaatcatggcctgctacctcctggttgcgaatattttactcgtgaacctgctcatcgctgtcttcaataacaccttcttcgaagtaaagagcatctccaatcaagtctggaagtttcagcgctaccagctgattatgactttccacgagcggccagtactgccaccacctttgataatattctcacacatgacaatgatcttccaacatctatgctgccggtggagaaaacatgagtctgacccagacgaacgtgactacggcctgaaactcttcatcacggatgacgaattaaaaaaagttcacgactttgaggagcagtgtattgaagagtacttccgggagaaggatgatcgttttaattcctctaatgatgagcggatcagggtgacgtctgagcgcgtggagaatatgagcatgcggctagaggaggtgaacgagcgcgaacactccatgaaggccagccttcaaactgtggacatccgattagcccagctcgaggatcttattggacgcatggctactgctctggaacgacttaccggtcttgaacgggctgagtctaacaaaatccggagccggacctcatctgactgtacggatgcagcctatattgtacgccagtctagctttaatagccaggagggcaatacctttaagctgcaggagtccattgaccctgcagagcaccctctctattccgtgtag

SEQ ID NO: 311080 - DNA, 3978 bp, Artificial Sequence
  derived and/or modified sequence
atgcctgaaccatgggggaccgtttattttctgggaatcgcacaggtgttcagttttctcttctcttggtggaacctggagggggtgatgaaccaggctgacgcccctaggccgcttaactggactataaggaagctttgtcacgcagcgtttctacccagtgtcaggctgttaaaggcgcagaaatcttggatcgagcgggctttttacaaacgcgagtgtgtgcacataattcctagcaccaaggaccctcatagatgttgctgtggacggttgatcgggcagcatgtggggttgaccccatcaatcagtgttctccagaatgagaagaatgagagccgcctgtcccgaaatgatatccaatctgagaaatggtccatttctaagcatacacagctttcgcccaccgatgcctttggcaccatcgaattccagggaggaggtcattccaacaaggccatgtacgtgagagtgagtttcgacactaagcctgacttacttctgcatttgatgaccaaggaatggcagctggaactacccaagttgctcatctcggtgcatggaggccttcagaacttcgagcttcagcctaagttgaagcaggtttttggcaagggcttaattaaagcagccatgactactggggcatggatctttacagggggagtcaacacaggtgttatccgccacgttggtgatgcattaaaagaccatgcctctaagagtcgaggtaaaatctgtactattggaatcgcaccatgggggatagtggaaaaccaggaagatctgatcggtagagacgtggtccgtccataccagaccatgtccaatcccatgagtaagctaacagtgttaaactcaatgcacagccatttcattctggccgacaacggtaccaccgggaagtatggagccgaggtgaagttgcgtcgacagttagagaaacacatctccctccagaagatcaacacacgaatcggtcagggcgtgccagtggtggcgctcatagttgagggcggacctaacgtaattagtatcgttctggagtaccttcgggacactcctcccgtgccagtggtcgtttgcgacggctcaggcagagcctctgatattctggctttcggtcataagtatagcgaggaaggcggattgataaatgaaagccttagagaccagctgcttgtgacaatccagaaaaccttcacatatacaaggacacaggcacagcacctatttatcatcttaatggaatgcatgaagaaaaaggagctaataactgtattcagaatgggaagcgaaggccatcaggatattgatctggccatactgacagcattacttaagggtgctaacgctagcgcccctgaccagctgagccttgccttagcctggaaccgtgtggacatcgctcgctcgcaaatattcatctatgggcagcaatggccggtgggctctctcgagcaggctatgctcgacgccctggtgctggacagagtcgactttgtaaagctgctgattgagaacggggtgagcatgcacaggttcctgacaatttcacggctcgaagagctctacaacacaagacacgggccttctaatactttgtaccacctagtgcgggacgtaaaaaagggcaacttgcctcccgattatagaatttcactgatcgatattggcctggtcatagaatatttaatgggaggggcttatcgctgcaattatacacggaaacggttccgaaccctgtaccacaatctgttcgggccaaaacggcctaaagccttgaagctcttaggaatggaagatgacatcccactcagacgcggaagaaaaaccaccaaaaagcgcgaggaggaagtggatatcgatctcgatgaccctgaaatcaatcactttcccttccccttccacgagcttatggtttgggcggtgctcatgaaacgtcagaagatggccctcttcttctggcagcatggagaagaggcgatggccaaggcactggttgcttgtaagttatgtaaggcaatggcccacgaagcaagcgaaaatgacatggtggatgacatttcccaggagttgaaccataactctcgtgatttcggacaattagccgttgaactgctggaccagtcatacaagcaggacgagcagttggccatgaagcttctcacctatgagctgaagaattggagcaatgctacttgcctgcagctggctgtcgccgcaaagcacagggacttcatcgctcatacttgctctcagatgctcctaactgatatgtggatgggacgcctgaggatgaggaagaactcaggactgaaggtgattttgggcatattgttgcctccatcaatactcagtctcgaatttaagaataaggatgatatgccctacatgtcccaggcccaggagatccatctgcaggaaaaggaagcagaagaaccagagaagccaactaaagaaaaggaagaagaggacatggagctgaccgctatgctgggaagaaacaacggggaaagtagtcgtaagaaggatgaagaggaggtccagtccaagcatcgcttaattccgctaggcaggaagatctacgagttttataatgctcccatagtgaaattctggttctacacactggcctacatcgggtacctcatgttgtttaactatattgtgctggtgaagatggagcggtggccttctacccaggagtggatcgtgatatcttatatttttactctgggcattgagaaaatgagagaaattttaatgtctgagcccggaaaactattgcaaaaggtgaaagtctggttgcaggaatattggaacgtgactgacttgatcgcaatcttactgttttctgttgggatgattctgaggctgcaagaccagcccttcaggtctgatggtagagttatttactgtgtgaatattatttactggtacatcagactgctagatattttcggcgttaacaagtacctgggtccatacgtaatgatgatagggaaaatgatgatcgacatgatgtactttgtcatcattatgttggtcgtgctgatgagtttcggggtggcccgacaggccatcctctttccaaacgaagagccctcatggaagttagccaagaacattttttacatgccatattggatgatctatggggaagtcttcgctgatcagatcgatcccccatgcggccaaaatgaaactcgggaagatggcaaaatcatccaactgcctccgtgtaagacaggagcttggatcgtacctgccattatggcctgttatctgctcgtcgctaatattcttttggttaatttgttgatagcagtgttcaataataccttcttcgaagttaagagcatttcaaaccaggtctggaagttccagcgttaccagctcatcatgaccttccacgaaaggcctgttcttcctcccccacttataatcttctcacacatgaccatgattttccaacatttgtgctgccgctggcgcaagcacgaatctgaccctgatgagcgagattacggacttaagctgtttatcacagacgatgaactgaaaaaagtccacgatttcgaagaacagtgcatcgaggaatacttcagagagaaagatgataggttcaacagcagcaatgatgaacgcatcagagttacttctgagagggtcgaaaatatgagtatgaggctggaggaagtgaacgaaagggagcattcaatgaaagcctcactgcagaccgttgacatcaggctagcacaactagaggacctaatcgggcgaatggccacagccctggagcgtttgaccggtctggaaagagccgagagcaataagatcaggtccaggactagctcggattgtaccgacgctgcttatatcgttcgccagtcttctttcaacagccaggagggcaacacattcaagctgcaggagagcattgacccagcagagcaccccctgtactcagtgtag

SEQ ID NO: 311081 - DNA, 1263 bp, Artificial Sequence
  derived and/or modified sequence
tgctccggggactgcttttgccagtacccagaatcagtgctcaggctcagaaatcctggatagaaagagcattttataaaagagaatgtgtccacatcatacccagcaccaaagacccccataggtgttgctgtgggcgtctgataggccagcatgttggcctcacccccagtatctccgtgcttcagaatgagaaaaatgaaagtcgcctctcccgaaatgacatccagtctgaaaagtggtccatcagcaaacacactcaactcagccctacggatgcttttgggaccattgagttccaaggaggtggccattccaacaaagccatgtatgtgcgagtatcttttgatacaaaacctgatctcctcttacacctgatgaccaaggaatggcagttggagcttcccaagcttctcatctctgtccatgggggcctgcagaactttgaactccagccaaaactcaagcaagtctttgggaaagggctcatcaaagcagcaatgacaactggagcgtggatattcactggaggggttaacacaggtgttattcgtcatgttggcgatgccttgaaggatcatgcctctaagtctcgaggaaagatatgcaccataggtattgccccctggggaattgtggaaaaccaggaggacctcattggaagagatgttgtccggccataccagaccatgtccaatcccatgagcaagctcactgttctcaacagcatgcattcccacttcattctggctgacaacgggaccactggaaaatatggagcagaggtgaaacttcgaagacaactggaaaagcatatttcactccagaagataaacacaagaatcggtcaaggtgttcctgtggtggcactcatagtggaaggaggacccaatgtgatctcgattgttttggagtaccttcgagacacccctcccgtgccagtggttgtctgtgatgggagtggacgggcatcggacatcctggcctttgggcataaatactcagaagaaggcgggtaggtaactttccaggccccatggaagaaccctaaagcctgtttggaaacgagggtatgagtggattatgttttcagtagctcaaccaagacctcaaatcaaaacaagctatgaacaaattgtctaaaaaatgtctgtcatgggagggctgtggtgaagaacagagaaacatattctaaatgtcctgtgaagtgggaaattctatgaaagctacacggataataaaaagggtgaggaaaagagagga

SEQ ID NO: 311082 - DNA, 4618 bp, Artificial Sequence
  derived and/or modified sequence
tccgaccacaggctgttttgtgcaggctgtccctcttcttcaaaatcgtgcatcccctccccgaagcagcaggcagtgtgcctccattcagccacatttggtatgcatgagcacggctgcagagagaggggaggtggctgttttaagaaggttcaggggctcaggcaaggctacttgactagtcttccaagttccaggaagcctctgccctaatggaatttgcaggtgtggagatgaccatgggatgccagagccgtgggggaccgtttattttctaggcattgctcaggttttcagtttcttgttttcctggtggaatttggaaggggtcatgaatcaggctgatgctcctcgacccctaaactggaccatccggaagctgtgccacgcagcctttcttccatctgtcagacttctgaaggctcagaaatcctggatagaaagagcattttataaaagagaatgtgtccacatcatacccagcaccaaagacccccataggtgttgctgtgggcgtctgataggccagcatgttggcctcacccccagtatctccgtgcttcagaatgagaaaaatgaaagtcgcctctcccgaaatgacatccagtctgaaaagtggtccatcagcaaacacactcaactcagccctacggatgcttttgggaccattgagttccaaggaggtggccattccaacaaagccatgtatgtgcgagtatcttttgatacaaaacctgatctcctcttacacctgatgaccaaggaatggcagttggagcttcccaagcttctcatctctgtccatgggggcctgcagaactttgaactccagccaaaactcaagcaagtctttgggaaagggctcatcaaagcagcaatgacaactggagcgtggatattcactggaggggttaacacaggtgttattcgtcatgttggcgatgccttgaaggatcatgcctctaagtctcgaggaaagatatgcaccataggtattgccccctggggaattgtggaaaaccaggaggacctcattggaagagatgttgtccggccataccagaccatgtccaatcccatgagcaagctcactgttctcaacagcatgcattcccacttcattctggctgacaacgggaccactggaaaatatggagcagaggtgaaacttcgaagacaactggaaaagcatatttcactccagaagataaacacaagaatcggtcaaggtgttcctgtggtggcactcatagtggaaggaggacccaatgtgatctcgattgttttggagtaccttcgagacacccctcccgtgccagtggttgtctgtgatgggagtggacgggcatcggacatcctggcctttgggcataaatactcagaagaaggcggactgataaatgaatctttgagggaccagctgttggtgactatacagaagactttcacatacactcgaacccaagctcagcatctgttcatcatcctcatggagtgcatgaagaagaaggaattgattacggtatttcggatgggatcagaaggacaccaggacattgatttggctatcctgacagctttactcaaaggagccaatgcctcggccccagaccaactgagcttagctttagcctggaacagagtcgacatcgctcgcagccagatctttatttacgggcaacagtggccggtgggatctctggagcaagccatgttggatgccttagttctggacagagtggattttgtgaaattactcatagagaatggagtaagcatgcaccgttttctcaccatctccagactagaggaattgtacaatacgagacatgggccctcaaatacattgtaccacttggtcagggatgtcaaaaaggggaacctgcccccagactacagaatcagcctgattgacatcggcctggtgatcgagtacctgatgggcggggcttatcgctgcaactacacgcgcaagcgcttccggaccctctaccacaacctcttcggccccaagaggcccaaagccttgaaactgctgggaatggaggatgatattcccttgaggcgaggaagaaagacaaccaagaaacgtgaagaagaggtggacattgacttggatgatcctgagatcaaccacttccccttccctttccatgagctcatggtgtgggctgttctcatgaagcggcagaagatggccctgttcttctggcagcacggtgaggaggccatggccaaggccctggtggcctgcaagctctgcaaagccatggctcatgaggcctctgagaacgacatggttgacgacatttcccaggagctgaatcacaattccagagactttggccagctggctgtggagctcctggaccagtcctacaagcaggacgaacagctggccatgaaactgctgacgtatgagctgaagaactggagcaacgccacgtgcctgcagcttgccgtggctgccaaacaccgcgacttcatcgcgcacacgtgcagccagatgctgctcaccgacatgtggatgggccggctccgcatgcgcaagaactcaggcctcaaggtaattctgggaattctacttcctccttcaattctcagcttggagttcaagaacaaagacgacatgccctatatgtctcaggcccaggaaatccacctccaagagaaggaggcagaagaaccagagaagcccacaaaggaaaaagaggaagaggacatggagctcacagcaatgttgggacgaaacaacggggagtcctccaggaagaaggatgaagaggaagttcagagcaagcaccggttaatccccctcggcagaaaaatctatgaattctacaatgcacccatcgtgaagttctggttctacacactggcgtatatcggatacctgatgctcttcaactatatcgtgttagtgaagatggaacgctggccgtccacccaggaatggatcgtaatctcctatattttcaccctgggaatagaaaagatgagagagattctgatgtcagagccagggaagttgctacagaaagtgaaggtatggctgcaggagtactggaatgtcacggacctcatcgccatccttctgttttctgtcggaatgatccttcgtctccaagaccagcccttcaggagtgacgggagggtcatctactgcgtgaacatcatttactggtatatccgtctcctagacatcttcggcgtgaacaagtatttgggcccgtatgtaatgatgattggaaaaatgatgatagacatgatgtactttgtcatcattatgctggtggttctgatgagctttggggtcgccaggcaagccatcctttttcccaatgaggagccatcatggaaactggccaagaacatcttctacatgccctattggatgatttatggggaagtgtttgcggaccagatagaccctccctgtggacagaatgagacccgagaggatggtaaaataatccagctgcctccctgcaagacaggagcttggatcgtgccggccatcatggcctgctacctcttagtggcaaacatcttgctggtcaacctcctcattgctgtctttaacaatacattttttgaagtaaaatcgatatccaaccaagtctggaagtttcagaggtatcagctcatcatgactttccatgaaaggccagttctgcccccaccactgatcatcttcagccacatgaccatgatattccagcacctgtgctgccgatggaggaaacacgagagcgacccggatgaaagggactacggcctgaaactcttcataaccgatgatgagctcaagaaagtacatgactttgaagagcaatgcatagaagaatacttcagagaaaaggatgatcggttcaactcatctaatgatgagaggatacgggtgacttcagaaagggtggagaacatgtctatgcggctggaggaagtcaacgagagagagcactccatgaaggcttcactccagaccgtggacatccggctggcgcagctggaagaccttatcgggcgcatggccacggccctggagcgcctgacaggtctggagcgggccgagtccaacaaaatccgctcgaggacctcgtcagactgcacggacgccgcctacattgtccgtcagagcagcttcaacagccaggaagggaacaccttcaagctccaagagagtatagaccctgcagagcatcctctttattcagtataagccggcagcaagcagttctacctaacgtcccacatccttctcatgccaacacttctgtaattgatcattataaagaaaaaacaaggtaacagtcatagttcacctgtctcttatctattcacttctggtgccacaactgtttatccttttttgaagaaaataagggaacagaaatgcctttttgtattgcaatcgaaatgaaagaagagttgatgttaaaaaaacaaaagtcaagtgatttattatatacagtgggcgttcaagtctagtcgagcaagctcaggagaatgtaattaaataattttatattttttaatttattttgtatctcacctgtcatggatgaattcattcactgaatatgtaatattgaacttaaaaaaaaaaaaaaaaaaa

SEQ ID NO: 311083 - DNA, 2121 bp, Artificial Sequence
  derived and/or modified sequence
aaatgaaagcaacaggagctgctccggggactgcttttgccagtacccagaatcagtgctcaggctcagaaatcctggatagaaagagcattttataaaagagaatgtgtccacatcatacccagcaccaaagacccccataggtgttgctgtgggcgtctgataggccagcatgttggcctcacccccagtatctccgtgcttcagaatgagaaaaatgaaagtcgcctctcccgaaatgacatccagtctgaaaagtggtccatcagcaaacacactcaactcagccctacggatgcttttgggaccattgagttccaaggaggtggccattccaacaaagccatgtatgtgcgagtatcttttgatacaaaacctgatctcctcttacacctgatgaccaaggaatggcagttggagcttcccaagcttctcatctctgtccatgggggcctgcagaactttgaactccagccaaaactcaagcaagtctttgggaaagggctcatcaaagcagcaatgacaactggagcgtggatattcactggaggggttaacacaggtgttattcgtcatgttggcgatgccttgaaggatcatgcctctaagtctcgaggaaagatatgcaccataggtattgccccctggggaattgtggaaaaccaggaggacctcattggaagagatgttgtccggccataccagaccatgtccaatcccatgagcaagctcactgttctcaacagcatgcattcccacttcattctggctgacaacgggaccactggaaaatatggagcagaggtgaaacttcgaagacaactggaaaagcatatttcactccagaagataaacacaagttttcatagttacaaaacagctcatgtggaccttcaggataaaagacaggtgaagactgccttagagcaagcagagtggcagccgggaagaggaatgtttgatcatgataatctcatgcaaagtacataaaggggtatatatatgtatgtatatatgtatgtatgtttatatgtgtttatatgcatacatatacatatgtgttttatatatatatatatatatatatttttttttttttttgagacaaagcctcactctgtcactgaggctttggtgcaatggcaccctcagggctcactgcagcctcgacttcccaggctcaagtgattctcctacctcagggtcctgagtagctgggactacaggcacatgcatcaaaccccactaatttttaaaaatatttttgtagagacaggttcttgctatatttcccaggctgatcctgaattcctgggctcaaatgatcctcccgcctcggtctctcttttattctctctctctccctctttttccctctctttcatagattctttctcttttctctcccctctctctctccttcctcccccataccacttccttccctcttcctggggccatgtgatctctcccctccatggtaccctctgctcctttgttttctacctgcatatggcttttttgttcattggcttaccttcctcacatggttggtctggaggaccaccactaacagaggcttcattccccaagtatgcatgccctggaagcccatctcccagttactggccttgggctcaggatctccacttcaatcccaggaaagcaaatctggctcactgcaggtctgacatccatgtaagtccagccagctttgaaaaaagtcaagcagggctgcgccttctatgcagtggatgggtctgttctctgacaggggagaggggatagggcggacaccatgagagttttcagtacacatgccacagtgacctctttggccagcttaaaggatttcccattcaatctactcatccactgcccagcttctgtcctttgtcctccgattactagatagaaaagcaaagcaagaaggcaatgccccaaaagaaggccagtcgatgggcattaatacaggattgctgtgaaaatgcctcgagcactgagaatgcacaaaatagatttgtttagctgtattgaaaacaaacagaaaaaaatacagtttgccatattaatttaatatattctgcattctcagtccctaggaaaagatacactatgcac

SEQ ID NO: 311084 - DNA, 561 bp, Artificial Sequence
  derived and/or modified sequence
atgaaggctgtaaacgagcagggaaaggaagtgactgaatttggcaataagtactggttgatgttaaacgaaaaagaagctcagcaggtctatggcggcaaggaagcccggaccgaggagatgaagtggcggcaatgggctgatgactggctggtgcacctaatctctcctaatgtttatcgcactcctacggaagcgctggcttcctttgactacatcgttagggaggggaagtttggtgccgtggaaggagccgtggcaaagtatatgggagctgctgccatgtatctcatctctaagcgtctcaaatcccgccatcgcttgcaggataacgtgcgcgaggatctttacgaggccgcggacaaatgggtcgcggctgtggggaaagaccgcccatttatgggtggacagaaacctaatttggccgatctggccgtctacggcgtcttacgcgttatggagggtctggacgccttcgatgacctcatgcagcacacacatatccaaccatggtacttaagggtagagagagccatcaccgaagcgtctcctgcacattag

SEQ ID NO: 311085 - DNA, 561 bp, Artificial Sequence
  derived and/or modified sequence
atgaaggctgtgaatgagcagggcaaggaggtgacagaatttggaaacaagtactggctgatgctgaatgagaaggaggcccagcaggtgtatggaggcaaggaggccaggacagaggagatgaagtggaggcagtgggcagatgactggctggtgcacctgatcagccccaacgtgtaccgcacccccacagaggccctggccagctttgactacatcgtgcgggagggcaagtttggagctgtggagggcgctgtggccaagtacatgggcgctgctgccatgtacctgatcagcaagaggctgaagagccgccaccggctgcaggacaacgtgcgggaggacctgtatgaagctgctgacaagtgggtggccgctgtgggcaaggaccggcccttcatgggcggccagaagcccaacctggccgacctggccgtgtatggagtgctgcgggtgatggagggcctggatgcctttgatgacctgatgcagcacacccacatccagccctggtacctgcgggtggagcgggccatcacagaggccagccctgcccactag

SEQ ID NO: 311086 - DNA, 561 bp, Artificial Sequence
  derived and/or modified sequence
atgaaggccgtgaacgagcagggcaaggaggtgaccgagttcggcaataagtactggctgatgttaaatgagaaagaggctcagcaagtatatgggggaaaggaggctagaaccgaggaaatgaagtggcgacagtgggccgatgactggctggtccatctgattagtcctaatgtgtatcggaccccaacagaggctctggcttctttcgattacatcgtgcgggaaggcaaatttggagccgtggagggcgctgtcgcgaagtatatgggggccgccgccatgtacttgatcagtaaaaggctcaagtctagacatcgcttgcaagacaatgtgagggaggatctgtatgaggctgctgacaagtgggtggctgctgtaggtaaggatcgtcctttcatgggcggacaaaaacctaacctggcagatctagcggtgtacggtgtattgcgtgtgatggaagggcttgacgccttcgatgacttaatgcagcacacccatatccagccatggtatcttcgggtcgagcgggcaattaccgaggctagtcctgcccattag

SEQ ID NO: 311087 - DNA, 561 bp, Artificial Sequence
  derived and/or modified sequence
atgaaagccgtgaatgaacagggaaaggaggtaaccgaattcggaaacaaatattggctcatgctaaacgaaaaggaggcacagcaagtttacgggggaaaggaggcaaggactgaggagatgaagtggcgtcagtgggcggatgactggctcgtgcacttgattagccccaatgtctacaggacccctaccgaagccctggcaagctttgactatattgtccgggaaggtaagttcggtgcagtggaaggagctgtggccaaatacatgggagcagctgccatgtacctgatctcaaagcgccttaaaagcagacatcgcctgcaagacaatgtgcgggaggatctgtacgaggccgctgataagtgggttgccgctgtgggtaaagacaggcctttcatggggggacagaagcccaacctggctgacctcgccgtttatggggtgctgcgggtgatggaaggtctggacgcttttgacgatctgatgcaacatacacacattcagccgtggtacctgcgggtggaacgggctatcaccgaggcttctccagcacattag

SEQ ID NO: 311088 - DNA, 561 bp, Artificial Sequence
  derived and/or modified sequence
atgaaggccgtgaacgagcagggcaaggaggtgaccgagttcggcaacaagtactggctgatgctgaacgagaaggaggcccagcaggtgtacggcggcaaggaggccagaaccgaggagatgaagtggagacagtgggccgacgactggctggtgcacctgatcagccccaacgtgtacagaacccccaccgaggccctggccagcttcgactacatcgtgagagagggcaagttcggcgccgtggagggcgccgtggccaagtacatgggcgccgccgccatgtacctgatcagcaagagactgaagagcagacacagactgcaggacaacgtgagagaggacctgtacgaggccgccgacaagtgggtggccgccgtgggcaaggacagacccttcatgggcggccagaagcccaacctggccgacctggccgtgtacggcgtgctgagagtgatggagggcctggacgccttcgacgacctgatgcagcacacccacatccagccctggtacctgagagtggagagagccatcaccgaggccagccccgcccactag

SEQ ID NO: 311089 - DNA, 7538 bp, Artificial Sequence
  derived and/or modified sequence
gaggtcaactgcgcgccgctggcgctgaggggaggaagtttgctgtcgagcggcctgggttccgtgggcaaggccgtgggaggcagcgttggctgcttcgacacactgagggcggcgcgatgggagacgagatggatgccatgattcccgagcgggagatgaaggattttcagtttagagcgctaaagaaggtgagaatctttgactcccctgaggaattgcccaaggaacgctcgagtctgcttgctgtgtccaacaaatatggtctggtcttcgctggtggagccagtggcttgcagatttttcctactaaaaatcttcttattcaaaataaacccggagatgatcccaacaaaatagttgataaagtccaaggcttgctagttcctatgaaattcccaatccatcacctggccttgagctgtgataacctcacactctctgcgtgcatgatgtccagtgaatatggttccattattgctttttttgatgttcgcacattctcaaatgaggctaaacagcaaaaacgcccatttgcctatcataagcttttgaaagatgcaggaggcatggtgattgatatgaagtggaaccccactgtcccctccatggtggcagtttgtctggctgatggtagtattgctgtcctgcaagtcacggaaacagtgaaagtatgtgcaactcttccttccacggtagcagtaacctctgtgtgctggagccccaaaggaaagcagctggcagtgggaaaacagaatggaactgtggtccagtatcttcctactttgcaggaaaaaaaagtcattccttgtcctccgttttatgagtcagatcatcctgtcagagttctggatgtgctgtggattggtacctacgtcttcgccatagtgtatgctgctgcagatgggaccctggaaacgtctccagatgtggtgatggctctactaccgaaaaaagaagaaaagcacccagagatatttgtgaactttatggagccctgttatggcagctgcacggagagacagcatcattactacctcagttacattgaggaatgggatttagtgctggcagcatctgcggcttcaacagaagttagtatccttgctcgacaaagtgatcagattaattgggaatcttggctactggaggattctagtcgagctgaattgcctgtgacagacaagagtgatgactccttgcccatgggagttgtcgtagactatacaaaccaagtggaaatcaccatcagtgatgaaaagactcttcctcctgctccagttctcatgttactttcaacagatggtgtgctttgtccattttatatgattaatcaaaatcctggggttaagtctctcatcaaaacaccagagcgactttcattagaaggagagcgacagcccaagtcaccaggaagtactcccactaccccaacctcctctcaagccccacagaaactggatgcttctgcagctgcagcccctgcctctctgccaccttcatcacctgctgctcccattgccactttttctttgcttcctgctggtggagcccccactgtgttctcctttggttcttcatctttgaagtcatctgctacggtcactggggagcccccttcatattccagtggctccgacagctccaaagcagccccaggccctggcccatcaaccttctcttttgttcccccttctaaagcctccctagcccccacccctgcagcgtctcctgtggctccatcagctgcttcattctcctttggatcatctggttttaagcctaccctggaaagcacaccagtgccaagtgtgtctgctccaaatatagcaatgaagccctccttcccaccctcaacctctgctgtcaaagtcaaccttagtgaaaatagctcccagagcgcacccccgatgtcgccattctcttctgcctccaagccagctgcttctggaccactcagccaccccacacctctctcagcaccacctagttccgtgccattgaagtcctcagtcttgccctcaccatcagcaggacgatctgctcagggcagttcaagcccagtgccctcaatggtacagaaatcacccaggataacccctccagcggcaaagccaggctctccccaggcaaagtcacttcagcctgctgttgcagaaaagcagggacatcagtggaaagattcagatcctgtaatggctggaattggggaggagattgcacactttcagaaggagttggaagagttaaaagcccgaacttccaaagcctgtttccaagtgggcacttctgaggagatgaagatgctgcgaacagaatcagatgacttgcatacctttcttttggagattaaagagaccacagagtcgcttcatggagatataagtagcctgaaaacaactttacttgagggctttgctggtgttgaggaagccagagaacaaaatgaaagaaatcgtgactctggttatctgcatttgctttataaaagaccactggatcccaagagtgaagctcagcttcaggaaattcggcgccttcatcagtatgtgaaatttgctgtccaagatgtgaatgatgttctagacttggagtgggatcagcatctggaacaaaagaaaaaacaaaggcacctgcttgtgccagagcgagagacactgtttaacaccctagccaacaatcgggaaatcatcaaccaacagaggaagaggctgaatcacctggtggatagtcttcagcagctccgcctttacaaacagacttccctgtggagcctgtcctcggctgttccttcccagagcagcattcacagttttgacagtgacctggaaagcctgtgcaatgctttgttgaaaaccaccatagaatctcacaccaaatccttgcccaaagtaccagccaaactgtcccccatgaaacaggcacaactgagaaacttcttggccaagaggaagaccccaccagtgagatccactgctccagccagcctgtctcgatcagcctttctgtctcagagatattatgaagacttggatgaagtcagctcaacgtcatctgtctcccagtctctggagagtgaagatgcacggacgtcctgtaaagatgacgaggcagtggttcaggcccctcggcacgcccccgtggttcgcactccttccatccagcccagtctcttgccccatgcagcaccttttgctaaatctcacctggttcatggttcttcacctggtgtgatgggaacttcagtggctacatctgctagcaaaattattcctcaaggggccgatagcacaatgcttgccacgaaaaccgtgaaacatggtgcacctagtccttcccaccccatctcagccccgcaggcagctgccgcagcagcactcaggcggcagatggccagtcaggcaccagctgtaaacactttgactgaatcaacgttgaagaatgtccctcaagtggtaaatgtgcaggaattgaagaataaccctgcaaccccttctacagccatgggttcttcagtgccctactccacagccaaaacacctcacccagtgttgaccccagtggctgctaaccaagccaagcaggggtctctaataaattcccttaagccatctgggcctacaccagcatccggtcagttatcatctggtgacaaagcttcagggacagccaagatagaaacagctgtgacttcaaccccatctgcttctgggcagttcagcaagcctttctcattttctccatcagggactggctttaattttgggataatcacaccaacaccgtcttctaatttcactgctgcacaaggggcaacaccctccactaaagagtcaagccagccggacgcattctcatctggtgggggaagcaaaccttcttatgaggccattcctgaaagctcacctccctcaggaatcacatccgcatcaaacaccaccccaggagaacctgccgcatctagcagcagacctgtggcaccttctggaactgctctttccaccacctctagtaagctggaaaccccaccgtccaagctgggagagcttctgtttccaagttctttggctggagagactctgggaagtttttcaggactgcgggttggccaagcagatgattctacaaaaccaaccaataaggcttcatccacaagcctaactagtacccagccaaccaagacgtcaggcgtgccctcagggtttaattttactgcccccccggtgttagggaagcacacggagccccctgtgacatcctctgcaaccaccacctcagtagcaccaccagcagccaccagcacttcctcaactgccgtttttggcagtctgccagtcaccagtgcaggatcctctggggtcatcagttttggtgggacatctctaagtgctggcaagactagtttttcatttggaagccaacagaccaatagcacagtgcccccatctgccccaccaccaactacagctgccactccccttccaacatcattccccacattgtcatttggtagcctcctgagttcagcaactaccccctccctgcctatgtccgctggcagaagcacagaagaggccacttcatcagctttgcctgagaagccaggtgacagtgaggtctcagcatcagcagcctcacttctagaggagcaacagtcagcccagcttccccaggctcctccgcaaacttctgactctgttaaaaaagaacctgttcttgcccagcctgcagtcagcaactctggcactgcagcatctagtactagtcttgtagcactttctgcagaggctaccccagccaccacgggggtccctgatgccaggacggaggcagtaccacctgcttcctccttttctgtgcctgggcagactgctgtcacagcagctgctatctcaagtgcaggccctgtggccgtcgaaacatcaagtacccccatagcctccagcaccacgtccattgttgctcccggcccatctgcagaggcagcagcatttggtaccgtcacttctggctcatccgtctttgctcagcctcctgctgccagttctagctcagctttcaaccagctcaccaacaacacagccactgccccctctgccacgcccgtgtttgggcaagtggcagccagcaccgcaccaagtctgtttgggcagcagactggtagcacagccagcacagcagctgccacaccacaggtcagcagctcagggtttagcagcccagcttttggtaccacagccccaggggtctttggacagacaaccttcgggcaggcctcagtctttgggcagtcggcgagcagtgctgcaagtgtcttttccttcagtcagcctgggttcagttccgtgcctgccttcggtcagcctgcttcctccactcccacatccaccagtggaagtgtctttggtgccgcctcaagtaccagtagctccagttccttctcatttggacagtcttctcccaacacaggaggggggctgtttggccaaagcaacgctcctgcttttgggcagagtcctggctttggacagggaggctctgtctttggtggtacctcagctgccaccacaacagcagcaacctctgggttcagcttttgccaagcttcaggttttgggtctagtaatactggttctgtgtttggtcaagcagccagtactggtggaatagtctttggccagcaatcatcctcttccagtggtagcgtgtttgggtctggaaacactggaagagggggaggtttcttcagtggccttggaggaaaacccagtcaggatgcagccaacaaaaacccattcagctcggccagtgggggctttggatccacagctacctcaaatacctctaacctatttggaaacagtggggccaagacatttggtggatttgccagctcgtcgtttggagagcagaaacccactggcactttcagctctggaggaggaagtgtggcatcccaaggctttgggttttcctctccaaacaaaacaggtggcttcggtgctgctccagtgtttggcagccctcctacttttgggggatcccctgggtttggaggggtgccagcattcggttcagccccagcctttacaagccctctgggctcgacgggaggcaaagtgttcggagagggcactgcagctgccagcgcaggaggattcgggtttgggagcagcagcaacaccacatccttcggcacgctcgcgagtcagaatgcccccactttcggatcactgtcccaacagacttctggttttgggacccagagtagcggattctctggttttggatcaggcacaggagggttcagctttgggtcaaataactcgtctgtccagggttttggtggctggcgaagctgagggcgtgtcagcaggcctttcgatccctgggaccaaccgcatcctcagcttcttccccgagaaatgctggagcaggctgttcagaccgacgttgccatcaaaacacatacacccagaaagaaacaacagaaaccaaaactcacaaggcgcatgattacttgttttatatttcatgttgggttttccctcccactattaaacagtctgtttccgtacagaacgtatgtgggttttttcagatcacagccaagaagattgccccgtttctgtggctctgagaagccagcagagcctccatcagccagaacactgtgtcttcaaggatggcatcagaagtcaccagcgtcgggtgttgataaacagcatcgaatgtgccgtggtctcacttggacctagcgccctccacatagggaagaggttgaatgctggtgggtcatctttttgaggctgaaacttggttatctcctctccttgttcttttagccattgtgtatcaggaccatccaaggacgcactctgcgattgagtggaggcagaggaagccactcatgccagcagcagttgagtttcagaagcagccatagcgcttttcagtacagtacaatagtagccagcgtgaggcaggacagtgctgcgccttagccggccttggctctcatctccatgtggctcttgggtgccatgtgtcctactccagagaggagggggccggtcacttgagaagacagcctttatattctgtatgtggcagtgacattggtagccacacctacccagtgtctactaaccacagtgcagatagcccttgggtagacccaggaagtgtgaagacagacactgctgttgccagacaacactagcagaacgatgctggatttgacaacagtgtttgctaggacggcccagagctcatcactgcagttttattagagtgcttctttatctttaatgcagtatctttgaggcctgtaacatcctagatagttgccatcaaacaaggaccgtctcgcattgaaaacagatgtaagaatttctctttcaggcccagaatctgacagtgctttggcttgggtcatgagcagcggggagttgggaagagatttttttttttagagttttacatattggcaggttgtatttttttaatgttttaataaaagtttgacatgacattaa

SEQ ID NO: 311090 - DNA, 5038 bp, Artificial Sequence
  derived and/or modified sequence
gtgatgaggaaatggaagccagagagttgaagtgacttagggtaagttacaaggtgggtgcagagctggtatatgctaagaagtgaatggcctgtctttccagaggctgaagcagaggatgtggacagcccagcaagttcccatgagcctcttgcctggctcccccagcagggccgtcagctggacatgactgaagaggagccagatgggaccctcggaagtctggaggttgaggaggctggagagagctcctcaaggttggggtatgaggctggtctcagcttggaaggccatggaaacaccagccccatggctcttgggcatggtcaggccaggggctgggtggcttctggcgaacaagccagtggggacaaactttctgaacattccgaggtcaacccatccgttgaactcagcccggcaaggtcctggagcagtgggacagtgagcctcgaccaccctagtgacagccttgattctacctgggaaggagagaccgatggcccccagcccactgccctggcagaaaccttgccagagggccccagccaccacctcctaagcccagatggcagaactggaggcagtgttgctcgggcaacccccatggaattccaggactcctcagctcccccagcccagagtccgcagcatgccacagatagatggaggagagaaacgaccagattcttctgccctcagcccaaggaacacatctggaagcagacaaagacgtcacctaagccactcccttcccgattcattggctccatcagccccctgaatccccagcccaggccaacgcggcagggcaggccgctgcccagacagggagccactctggctggccgctcctcttctaatgcccccaagtatggccgggggcagttgaactacccactccctgatttctccaaggtagggccccgggtgagattccccaaagatgagagctaccgtccccccaagtccagaagccacaacaggaagcctcaggcccctgccaggcccctcatcttcaagtctccagctgagattgtgcaggaggtgctgttgagcagtggagaagcagccctggcaaaggacacgcctcctgcccaccctatcaccagggtaccccaagaatttcagacgcctgagcaagccactgagctggtccatcagctccaggaagactaccacaggctcctcaccaagtacgctgaggccgagaacaccattgaccagctacgcctcggggccaaggtgaacctgttctctgacccaccccagcccaaccacagcatccacacgggaatggtgccccaggggaccaaggtcttgtccttcaccatcccacagccccgctctgcagagtggtggccgggcccggccgaggacccccaggcctctgcggcctcagggtggccatcagctcgaggagacttgagcccctcctcgcttaccagcatgcccaccctggggtggcttccggagaaccgggacatctctgaggaccagtcctcagcagagcagacccaggcactggcttctcaggccagccagttcctggccaaggtggagtcctttgaaagactgatacaggcaggacgtctcatgccccaggaccaagtcaagggcttccagcggctgaaggctgcccacgcggccctagaggaggagtacctgaaggcttgtcgggagcaacaccctgcccagccgcttgccggctccaaggggacgcctggaagatttgatcctcgcagggagctggaggcagagatataccgtctgggaagctgcctggaagagctgaaggaacacatagaccagacccagcaagagcctgagccgcccgggtcagactcagctctggacagcaccccagccctgccctgcctccatcagccaacgcacctgcctgctccttctggacaagcccccatgccagccatcaagacctcctgccctgagcctgctaccaccactgccgccgccagcactggcccctgcccattgcacgtaaatgtggaggtgagctctggcaacagtgaggtggaggacaggccacaggaccccctggcccgactcaggcacaaggagctgcagatggagcaagtttaccatggcctcatggagcggtacctcagtgtgaagtctctcccagaagccatgagaatggaggaggaggaagaaggagaggaggaggaggaggaagaggggggaggtgactccctggaagttgatggggtggctgcaactccagggaaagcagaggccaccagggtcctcccaaggcagtgcccggtgcaggctgagaaaagtcatggggctcccctggaggaggccacggagaagatggtatctatgaagccaccaggtttccaggcatccctggctagagacgggcacatgtcaggcctgggcaaggctgaggcagcccctccaggccctggcgtgccaccccaccctccaggcaccaagtccgcagcatcccaccaaagtagtatgaccagcctggagggaagcggcatctctgagcgccttccacagaagcctttgcaccgaggcggtgggccccacctggaggagacctggatggcgtccccagagacagacagtggctttgtgggctcagaaacaagcagagtttcacccctcacccagactccagagcaccggctctcccacatcagcacagcaggaacattagcccagccctttgctgcatctgtgcccagggatggagcttcctaccccaaggccaggggttctctgattcccagaagagccacagagcccagcacaccccggagccaagcacagaggtacctctccagcccaagtgggcctctccggcagagggcacccaacttcagcctggagcggacactggcagccgagatggcggttcctggctcagagtttgaggggcacaaacggatttctgaacagccccttcccaacaagacaatcagcccacccccagcccccgcccctgccgctgcgcctctaccctgtggaccaacagagaccatccccagcttcctgctcaccagggcagggcgagaccaggccatctgtgagctgcaagaagaggtgtcccggcttcgtctgcggctggaagacagcctgcaccagccactccagggcagcccgacacgcccagcatctgcctttgaccgccccgcccggacccgcggccggccagcagactccccagccacctggggctcccattatggcagtaaatccacagagagattgcctggtgagcctagaggtgaagagcagattgtccctccaggaaggcagcgagccaggtcttcctcagtgcctcgggaggtgctccgactgtccctgagttcagaatctgagctgccctccctaccactgttctctgagaagagcaagaccaccaaggacagtccacaggcagctcgggatggaaagagaggggtgggcagtgctggatggccagacagggtcaccttccggggccaatacacaggccacgaataccatgttctgtcccctaaggcggtcccaaaaggcaatggcacagtctcctgtccccactgccggcccattaggacccaggatgcgggtggtgctgtcacaggggacccactgggaccgcctcccgctgatacccttcagtgtcccctgtgtggtcaagttgggtctcccccagaggcagatggtccaggctcagccacctctggggcagagaaggccaccacgaggagaaaagcatcttcaactcccagccccaagcagaggagcaagcaggcggggtcgtcgccacgcccaccccccggactgtggtatctggcaacagcgcccccagcaccagcccctccagcctttgcctacatctcctcggttcccatcatgccttatccacctgccgctgtgtactatgcgcctgcaggacctacctcagcccaaccagctgccaagtggccgcccacagcctctcccccaccagcccggagacaccggcactccatccagctcgacctgggcgacctagaggagctcaacaaggccctgagccgggccgtgcaggctgccgagagcgtccgctctaccaccaggcagatgagaagctcgctgtcagccgacctgcgccaggctcacagcctgcggggctcctgcctcttctgacttcactgggggcccagaggcagatgggtgggtgggtgggcaggtggcctgccaggccaggagtgggctggagctgctgaggcccagaaggcccgcatagttcctcaccaggagggtctccctccagcacaggtcccgcctgctcagtccctgtgctttccaagtggagggggtgtcagctcggtcaccaagagaagtgacttcccaggagcaccagtcccctcacagaggtgctgtgagcgaggcctccttcggtccaggcagaacctcaggcagtctctcctggtcctgcatgtgtgcaactccagctaataataggtattttatatacagatggacagatatttttttaaactggggagttttcctgatcttgggtcctctttagggggccagacaagaaaggcctacggtttctggagcaaacctgtcccccacctgtgaccagtcactctggggcaagcatcactgggaagggcatagccggagacctttctcctagtgactggtagtcagtggggcattttaggatgtcagggccccagggtgacatgtgtccagcttttctatggcagcagaggcctttccctcagacaagctacaaagtgcccaggatgccatccaccatggtccccttcagtacctcacgcatggtccccagcttctcctaggatcccagtggcgtttatcagtggccagctacctgccaggcccgggctggggcacggtctgcggccatgaggccaggccgcctcccgcacccctaccccgtggcagcagcatacctctgcatttctggaatgtgtgtgcatcaatgatgtttgtatatttgaggcatttaaaaatctattttcgttacgagggcaaatgaagaatgaatattgatctt

SEQ ID NO: 311091 - protein, 899 aa, Artificial Sequence
  derived and/or modified sequence
MPTLGWLPENRDISEDQSSAEQTQALASQASQFLAKVESFERLIQAGRLMPQDQVKGFQRLKAAHAALEEEYLKACREQHPAQPLAGSKGTPGRFDPRRELEAEIYRLGSCLEELKEHIDQTQQEPEPPGSDSALDSTPALPCLHQPTHLPAPSGQAPMPAIKTSCPEPATTTAAASTGPCPLHVNVEVSSGNSEVEDRPQDPLARLRHKELQMEQVYHGLMERYLSVKSLPEAMRMEEEEEGEEEEEEEGGGDSLEVDGVAATPGKAEATRVLPRQCPVQAEKSHGAPLEEATEKMVSMKPPGFQASLARDGHMSGLGKAEAAPPGPGVPPHPPGTKSAASHQSSMTSLEGSGISERLPQKPLHRGGGPHLEETWMASPETDSGFVGSETSRVSPLTQTPEHRLSHISTAGTLAQPFAASVPRDGASYPKARGSLIPRRATEPSTPRSQAQRYLSSPSGPLRQRAPNFSLERTLAAEMAVPGSEFEGHKRISEQPLPNKTISPPPAPAPAAAPLPCGPTETIPSFLLTRAGRDQAICELQEEVSRLRLRLEDSLHQPLQGSPTRPASAFDRPARTRGRPADSPATWGSHYGSKSTERLPGEPRGEEQIVPPGRQRARSSSVPREVLRLSLSSESELPSLPLFSEKSKTTKDSPQAARDGKRGVGSAGWPDRVTFRGQYTGHEYHVLSPKAVPKGNGTVSCPHCRPIRTQDAGGAVTGDPLGPPPADTLQCPLCGQVGSPPEADGPGSATSGAEKATTRRKASSTPSPKQRSKQAGSSPRPPPGLWYLATAPPAPAPPAFAYISSVPIMPYPPAAVYYAPAGPTSAQPAAKWPPTASPPPARRHRHSIQLDLGDLEELNKALSRAVQAAESVRSTTRQMRSSLSADLRQAHSLRGSCLF

SEQ ID NO: 311092 - DNA, 4077 bp, Artificial Sequence
  derived and/or modified sequence
atgctgaggtcagaatggcctgtgttccccgaagctgaagccgaagatgtcgattcccccgcaagcagccacgagcccctagcctggcttccccaacagggcaggcagctggacatgaccgaagaagagcctgacggcacactgggatctctggaagtcgaagaggctggtgaaagctctagccgcctaggctacgaggctggactgtctctcgaggggcatgggaatacgagtccgatggcccttggacacggccaagccagaggatgggtggccagtggcgagcaggccagcggagacaaactttctgagcattcagaagtgaatccatctgtcgagctctcccccgctcgcagttggtcgagcggaactgtcagcctggaccaccctagcgattcgcttgacagcacctgggaaggggagactgacggtcctcaaccgaccgcactggctgagactcttcccgagggtccttcccatcatctgctgagccctgacggaagaacggggggatccgtggcccgcgccaccccaatggagttccaggacagctccgccccaccagcacagtcgcctcaacatgcaacggaccggtggcgcagagagaccactagatttttctgcccccagcctaaggaacacatctggaaacagactaagactagccctaaacccctgccgagccgatttataggaagcatttctcctctgaacccacagcctcgtcctaccagacaggggagaccccttccccggcagggagctacgctggctggcaggtcaagctccaacgctccgaagtatggccgggggcagctaaattaccctctccccgacttttctaaagtgggaccgcgggttcgctttccaaaggatgagtcgtaccgcccacccaaatcacgtagccataacaggaagccacaggcacctgcacgccctttgatattcaaaagcccggccgagatagtacaagaggtgttactgagtagtggggaggccgctctagccaaagacactccgccagcacaccccatcactagggtcccccaagagtttcagactccagaacaggccaccgaactggtacaccagctgcaggaggactatcaccgattgctcaccaagtacgccgaggctgagaatacgatcgatcagcttaggctcggcgccaaggtgaatctgttttcagatcctccacagccgaaccacagtatccatacggggatggtgcctcaggggacgaaagtgctgtcattcacaataccacagccccgttctgcggaatggtggccgggtcctgctgaggatcctcaggcgagtgctgcatccgggtggccatcagctaggggcgacctctccccctcctccctgacatccatgccgacactcggctggctgccagagaatcgcgatatcagcgaggaccagtcttccgccgagcagacacaggcactggccagccaagcaagtcaatttttagccaaagtagaaagcttcgagagattaatacaggctggccggctgatgcctcaggatcaggtgaagggctttcagaggcttaaggccgcccatgcggccctggaagaagagtacctgaaggcgtgtcgggaacaacatcctgcccaaccccttgcggggagcaaaggaacacccggccggtttgacccgaggcgggaacttgaggccgagatttaccgcttagggagctgcctggaagagttaaaggagcatatcgaccagacccaacaggagccagaaccacctggcagtgattctgcactagactcaacacccgccctgccctgtctgcatcagccgacacacctccctgccccgtcgggacaggcccctatgccggccatcaagaccagctgtccagaaccagcaaccacaacagccgccgcatcaaccgggccatgccctctgcacgtgaacgtggaggttagcagcgggaattcagaggtggaggacagaccacaggatcctttggctcgattgcgtcataaggagctccaaatggagcaggtgtaccacggattgatggagcggtacctatcagtgaagagtcttcccgaggcaatgcgcatggaggaagaagaagagggagaagaggaagaggaagaagagggaggaggagatagcctggaagtggacggagtggctgccactcctggtaaggcagaggccacaagagtcctgcctagacagtgccctgttcaagcagagaagtcacacggtgcacctttagaagaggccaccgaaaaaatggtgtctatgaaacctcccggatttcaagcttcactggctagggacggtcatatgtccggcctaggcaaagctgaagccgccccgcccggacctggagtcccacctcacccccccggtactaaatcagccgcatctcaccagtcctcaatgacctcactggaaggtagcgggataagcgagcgactgcctcagaagcctctgcacagagggggcggacctcatctggaggagacctggatggcctcccccgagacagatagcggattcgtgggttctgaaacgtctcgcgtgtcacccctgacgcagacacctgagcatcgtctgtcacacatctccactgccggcaccctcgctcagccttttgcagcctccgtgccccgcgacggtgcttcctaccctaaggccaggggctccctgatcccgcgtcgtgctaccgagccatccacaccgaggagccaggctcagaggtatctgtcgagtccctccggacctctgagacagcgcgccccaaatttttcactggagcgaaccttggccgctgagatggccgtgcccgggagcgaatttgagggtcataagcgaattagcgagcagccattacctaataaaacaatatcacccccacccgcccccgcacccgcggctgcccccttgccgtgtggacccacagaaaccatcccgtcatttttgctcacccgagctggtcgggatcaggccatctgtgagctccaggaggaggtcagcaggctgcgacttagactggaggatagtcttcatcagccactccagggcagcccaacacgacctgcttctgctttcgacaggcccgctagaactcgtggccggcctgccgattctccagccacttggggatctcactatgggtccaaatccacggaacggcttcctggagagccccgaggtgaggaacagatcgtgccacctggaaggcagcgcgcccggtcctcttctgtgcctcgggaagtgctgcgcctctctctatcctccgagtcagaactgccctccctgccgctgttcagcgagaagagcaaaacaacgaaagattcaccccaggccgccagggacggaaaaagaggtgtgggaagcgccggttggccggaccgggttacgttccggggacagtacacaggtcatgagtatcacgtgctgagcccaaaagccgtgccgaaaggcaacggaactgtgtcttgcccccactgtcggccaattcgtacacaggacgcaggtggagccgtcaccggggacccactcggccctccgcctgcagatacattgcagtgccctctctgcggacaagttggctctcctccagaggctgacgggccaggtagtgcgacatccggggctgaaaaagcaaccaccaggaggaaagcctcttccactcctagccccaagcagagaagcaaacaggctggatcctccccccggcctcccccgggactgtggtatctggctaccgctccccctgcccccgcccctcctgccttcgcctatatctctagcgtccccattatgccctatcccccagccgcggtctattacgcaccagctggaccgaccagcgcacaacccgctgccaagtggcctccaactgcctctccaccccctgcgcgtaggcacaggcacagcattcaactggatcttggggatcttgaggagctgaataaagccctgagccgggccgttcaagcagctgaaagcgtgagatcaacgaccagacagatgcgctcttccctgtcagctgatctccgccaggctcacagcctgcgcgggtcttgtcttttctag

SEQ ID NO: 311093 - DNA, 4077 bp, Artificial Sequence
  derived and/or modified sequence
atgctgcggtctgagtggcctgtgtttcctgaggccgaggctgaagatgtggacagccctgccagcagccatgagcccctggcctggctgccccagcagggccggcagctggacatgacagaggaggagccagatggcaccctgggcagcctggaggtggaggaggccggggagagcagcagccggctgggctatgaagctggcctgagcctggagggccacggcaacaccagccccatggccctgggccacggccaggcccggggctgggtggccagcggggagcaggccagcggggacaagctgtctgagcacagcgaggtgaaccccagcgtggagctgagccctgcccgctcctggagcagcggcaccgtgtccctggaccaccccagcgacagcctggacagcacctgggagggggagacagatggcccccagcccacagccctggccgagaccctgcctgagggccccagccaccacctgctgagcccagatggccgcactggaggctctgtggcccgggccacccccatggagttccaggacagcagcgcccccccagcccagagcccccagcacgccacagaccgctggaggcgggagaccacccgcttcttctgcccccagcccaaggagcacatctggaagcagaccaagaccagccccaagcccctgcccagccgcttcatcggcagcatcagccccctgaacccccagccccggcccacccggcagggccggcccctgccccggcagggcgccaccctggccggccgcagcagcagcaatgcccccaagtatggccggggccagctgaactaccccctgcctgacttcagcaaggtgggcccccgggtgcgcttccccaaggatgagagctacagaccacccaagagccgcagccacaacaggaagccccaggccccagcccggcccctcatcttcaagagccctgctgagatcgtgcaggaggtgctgctgagcagcggggaggccgccctggccaaggacaccccaccagcccaccccatcaccagggtgccccaggagttccagaccccagagcaggccacagagctggtgcaccagctgcaggaggactaccaccggctgctgaccaagtatgcagaggccgagaacaccatcgaccagctgcggctgggcgccaaggtgaacctcttcagtgaccccccccagcccaaccacagcatccacacaggcatggtgccccagggcaccaaggtgctgtccttcaccatcccccagcccaggtctgctgagtggtggccaggccctgctgaggacccccaggccagcgctgccagcggctggcccagcgcccggggggacctgagccccagcagcctgacctccatgcccaccctgggctggctgcctgagaacagagacatcagcgaggaccagagcagcgctgagcagacccaggccctggccagccaggccagccagttcctggccaaggtggagagctttgagcggctcatccaggccggccgcctgatgccccaggaccaggtgaagggcttccagaggctgaaggccgcccatgctgccctggaggaggagtacctgaaggcctgccgggagcagcacccagcccagcccctggccggcagcaagggcaccccaggccgctttgacccccggcgggagctggaggccgagatctaccgcctgggcagctgcctggaggagctgaaggagcacatcgaccagacccagcaggagcctgagcccccaggcagtgacagcgccctggacagcaccccagccctgccctgcctgcaccagcccacccacctgcctgcccccagcggccaggcccccatgcctgccatcaagaccagctgcccagagcccgccaccaccacagctgctgccagcacaggcccctgccccctgcacgtgaatgtggaggtgagcagcggcaacagcgaggtggaggaccggccccaggaccccctggcccggctgcggcacaaggagctgcagatggagcaggtgtaccacggcctgatggagcgctacctgtctgtgaagagcctgcctgaggccatgaggatggaggaggaggaggagggggaggaggaggaggaggaggagggcggcggggacagcctggaggtggatggagtggccgccacccctgggaaggccgaggccaccagggtgctgccccggcagtgccctgtgcaggccgagaagagccatggagcccccctggaggaggccacagagaagatggtgtccatgaagcccccaggcttccaggccagcctggccagagatggccacatgagcggcctgggcaaggccgaggccgcccctcctggccctggggtgcccccccaccccccaggcaccaagtctgctgccagccaccagagctccatgaccagcctggagggcagcggcatcagcgagcggctgccccagaagcccctgcaccggggcggcggcccccacctggaggagacctggatggccagccctgagacagattctggctttgtgggcagcgagaccagccgggtgagccccctgacccagaccccagagcaccggctgagccacatcagcacagctggcaccctggcccagccctttgctgcctctgtgcccagagatggagccagctaccccaaggcccggggcagcctcatcccccggcgggccacagagcccagcacccccaggagccaggcccagcgctacctgagcagccccagcggccccctgcggcagagggcccccaacttcagcctggagaggaccctggccgctgagatggctgtgcccggcagcgagtttgagggccacaagaggatcagcgagcagcccctgcccaacaagaccatcagccccccaccagccccagccccagctgctgcccccctgccctgtggccccacagagaccatccccagcttcctgctgacccgggccggccgggaccaggccatctgtgagctgcaggaggaggtgtcccggctgcggctgcggctggaggacagcctgcaccagcccctgcagggcagccccaccaggcctgccagcgcctttgacaggcctgcccggacccggggccggcctgctgacagccctgccacctggggcagccactacggcagcaagagcacagagcggctgcctggagagcccagaggagaggagcagatcgtgcccccaggccggcagagggcccggagcagctctgtgccccgggaggtgctgcggctgagcctgagcagcgagagcgagctgcccagcctgcccctcttcagcgagaagagcaagaccaccaaggacagcccccaggccgccagagatggcaagaggggcgtgggcagcgctggctggccagacagagtgaccttccggggccagtacacaggccacgagtaccacgtgctgagccccaaggctgtgcccaagggaaatggaacagtgtcctgcccccactgccggcccatccgcacccaggatgctggaggagctgtgactggagaccccctgggccccccacctgctgacaccctgcagtgccccctgtgtggccaggtgggcagccccccagaggctgatggccctggcagcgccaccagcggggctgagaaggccaccaccaggaggaaggccagcagcacccccagccccaagcagaggagcaagcaggccggcagcagcccccggcccccacctggcctgtggtacctggccacagcccccccagccccagcccccccagcctttgcctacatcagctctgtgcccatcatgccctacccacctgctgctgtgtactatgccccagctggccccaccagcgcccagcctgctgccaagtggccacccacagccagccccccaccagcccggcggcaccgccacagcatccagctggacctgggggacctggaggagctgaacaaggccctgagcagagctgtgcaggccgctgagagcgtgcgcagcaccacccggcagatgaggagcagcctgtctgctgacctgcggcaggcccacagcctgcggggcagctgcctcttctag

SEQ ID NO: 311094 - DNA, 4077 bp, Artificial Sequence
  derived and/or modified sequence
atgctgcggagcgagtggcccgtgttccccgaggccgaggccgaggatgtcgactctccagcttcttcacacgaaccattggcctggctgccccagcagggtcgtcagctggacatgactgaggaggagcctgatggtacgctcggctctctcgaagtggaggaggccggagagtctagctctcgacttggctacgaggccgggctgagcctggaagggcacggaaatacatcccccatggccctggggcacgggcaggctcgaggttgggtggcgtccggagaacaggcgagcggggataagttatcggaacatagcgaggtgaacccctctgtggagctgtcccctgcaagatcctggtcatctggcacagtttcgctagatcacccttctgatagcctggacagcacctgggaaggagagacagatggacctcagcccaccgctttggcagaaactctaccagagggaccttcccaccatctgttgagtcctgatggtcgaaccggggggagtgtcgctagggcaacccctatggagtttcaggattcttcggctccccccgcacagagcccgcagcatgccactgatcgctggagaagagagactactagatttttttgcccacagcctaaagagcatatctggaagcagaccaaaacatctcccaaacccctgccttcaaggtttattggctcaataagccctctgaacccacaaccccggccgacccgccaggggcgacccctgcccagacagggagccactctagcaggacggagctcgagtaacgctcctaaatatggcagaggccagctgaactacccactcccagatttctccaaagtcggtcccagggttcgcttccctaaagatgaatcataccggccacccaagagtcgatcccataaccgtaagccccaggcaccggcgagaccactcattttcaagtcacccgcagagattgtccaagaggtgctcctcagtagcggtgaagccgccctcgcaaaggatactccccctgcccacccaatcacaagggtgcctcaggagttccagacacccgagcaagcaactgaactggttcatcaactccaggaagactaccaccgcctactgaccaagtacgccgaagctgagaacactattgatcagctgcgactcggagcaaaggtcaatctcttctctgatccccctcagcctaaccacagcattcataccgggatggtgccacaaggcacaaaggtgctgagctttaccattccacagcctcgttccgctgagtggtggccaggacccgccgaagatccccaggcgagtgccgcctccggctggccctccgcacgaggtgatcttagcccttccagcttgacctccatgcccacactgggttggcttcctgaaaacagggacatcagcgaggaccagtccagtgccgagcaaacccaggccttagcctcacaggccagtcaattcctcgcgaaggttgagtccttcgagagattgattcaggccggtcggctgatgccacaggatcaggtcaaagggtttcagcgcctgaaggccgcacacgctgcactggaagaggaatatctgaaagcatgtagggaacagcatccggctcaacccctcgctggaagcaaaggaacccctggaaggtttgatcctaggagggaattagaagctgagatctaccggttgggaagttgcctggaagaactgaaggagcatattgatcagacccaacaggaaccggagccgccagggtcagatagcgcgttggatagcactcctgccttgccttgtctccatcagcccacccaccttccggcaccatcgggacaagccccgatgccagcaatcaaaacttcctgtccggagccagctaccacaacagccgccgctagcaccggaccatgcccactgcatgttaacgtggaagtttctagcggcaattccgaggttgaagatagacctcaggaccccctagcgagacttcgccataaggagcttcagatggagcaagtgtatcatgggttgatggagcggtacctttctgtcaaatcactgccagaagccatgaggatggaggaggaggaagaaggggaagaggaagaggaagaagagggcggaggcgattccctcgaggtggatggcgtggccgccacccctggcaaggctgaagccactagggtcctcccccgtcagtgtccagtccaggcggaaaagagccacggagctcctctggaagaggccaccgagaaaatggtctccatgaagcccccggggtttcaagcatcgctcgcccgggatggtcacatgtccggcctggggaaggctgaggccgcccccccgggaccaggcgttccaccgcatcccccgggaaccaagtccgccgcctcccaccagtcctccatgacctccctggaggggagcggtatctctgagagactgccacagaagccccttcacaggggaggcggcccgcacttagaagagacatggatggcctcacccgagacagacagcggtttcgtcgggtctgagacgtctcgggtgtctcccttaacccagacaccagagcaccgcttatcgcacatatccactgctggaacgctcgctcagccttttgctgcctccgtcccccgtgatggcgcttcatacccgaaagctcgcggttccttgattcctcgtcgggcgactgaaccaagcacacctcgatcacaggcccaacgctatctgagttctccctctggacctttgcggcagcgggccccaaattttagcttggagcggaccctggcagcagagatggccgtgcctggatccgagttcgaagggcacaaaaggatatcggaacagccactgcctaacaaaacaataagccctcctccagccccagccccagctgctgccccacttccttgtggaccaacggagacaattccctctttcttgttgacgagggctggtcgggatcaggcaatctgcgaactgcaggaagaagtgagtaggcttaggttgcgacttgaagactcattgcaccaacctctgcaggggtcccccacacgccccgccagtgcgttcgatcgaccggcacgaactaggggacgtccggcagacagtcccgccacatggggaagtcactacggtagcaagagtaccgagagactccccggcgagcccaggggcgaagaacagattgtcccccccggacgacagcgcgcacggtcatcctcagtcccgcgcgaagtcctgaggttatcattatcatccgagtctgagttaccctccttgcccttattcagtgagaaaagtaagaccactaaagactcaccccaagccgcccgagatggcaagaggggcgtgggaagcgctgggtggccagaccgggtcacatttcgcggccagtataccgggcacgagtaccacgtcctgagcccaaaagccgttcccaaaggaaacggtactgtttcttgtcctcattgcaggcccattcggactcaggatgcaggtggagccgtaacaggggatccattaggtccacctccggctgataccctgcagtgcccgctgtgcggacaggtgggatctccgcccgaggctgacggaccggggagcgccacaagcggagctgagaaagcgacaaccaggaggaaggcgtcatccaccccaagcccaaaacagcgcagcaagcaagccggatcatcccctcggccacctcccggcctctggtatttggcgacggcccctcccgcaccagccccgccggccttcgcctatatcagttcagtgccaatcatgccctaccctccggccgccgtgtattacgcaccagccggaccaacatccgcacagccagcagctaaatggccccccacagccagcccccctcctgcccgcaggcacagacactcaatccagcttgacctgggagatctcgaggaactgaataaagcactgagtagagctgtacaagcagccgaaagcgtgagatccaccactcgccaaatgaggtcctctttgtcagctgacctcagacaggcacatagtttaaggggctcatgcttattttag

SEQ ID NO: 311095 - DNA, 4077 bp, Artificial Sequence
  derived and/or modified sequence
atgcttaggtccgagtggccagtgtttcctgaggcggaggcagaggacgtggactccccagcttcttcgcacgaacctcttgcatggctccctcagcaaggacggcagctggatatgacagaagaggagccagatggcaccttaggttccttggaggtcgaggaagccggtgaatccagcagtcgactgggctacgaagctggcctgtcactggaaggacatggcaacaccagtccaatggcactcggacatggacaagctcgtggctgggttgcgtcgggggagcaggccagtggtgacaagttatctgagcactctgaagtcaaccccagtgtggaactatctccagctagaagttggtcttcagggacagtcagcctcgatcacccgtcagactcgttggattcgacatgggagggcgagacagacggtccacaaccaacggcactcgcagaaacacttccggaaggaccatcacaccaccttctgtctccggacgggaggacgggaggtagcgttgcaagggcgactcccatggagtttcaggactcttccgcacctcccgctcaatctccgcagcacgcaaccgacagatggcgacgggaaacaactcggtttttttgccctcaacctaaggaacacatatggaaacagaccaagacatcccctaaaccactgccctcccgatttatcgggagcatctcacctctgaacccacagccacggcctacccggcaggggagaccactgccgcgacagggtgcaaccctggccggaaggtcatcgtctaatgcgcctaaatacggtagaggtcagctgaattaccccctgccggatttctcaaaggttggccctcgggttcgctttcctaaggacgagtcctacaggcctcccaaatcccgtagtcacaatagaaaaccccaggccccagctcggccactcatcttcaagtctcccgcagaaattgtgcaggaagtcttacttagctcgggtgaggcagctcttgccaaagatacgccacctgctcatcccataacacgtgtcccccaggagtttcagacgccagagcaggccactgaactggtccatcagctccaagaggattatcaccgcctgctgacaaaatatgccgaggccgaaaatacaatcgaccagttacgattaggtgcgaaagttaatcttttcagcgacccacctcagcccaatcattcaatccacactggtatggtgccacagggcacgaaggtcctcagcttcactataccccagcctagaagcgccgagtggtggccgggtcctgccgaggacccgcaggccagcgctgcctctggctggccttccgcacgtggcgatttgtccccgtcttctctgaccagtatgcccactctgggctggctgccggagaatagagacattagcgaggaccagtcctccgctgagcagacccaggccctcgctagccaggcctcacagtttctggcaaaggtagagagcttcgagaggctgatccaggccggaagattaatgcctcaggaccaagtaaagggcttccagcggcttaaggctgcccacgcggctctggaggaagagtacctcaaggcttgtagggaacagcaccccgctcaacctttggccggaagcaaaggcacccccggtcgatttgaccctcgccgagagctcgaagcagagatataccgccttggatcctgccttgaggagctgaaggagcacatagaccaaacgcagcaggagccggagcctcccggaagcgacagcgctttagattctaccccagcacttccttgtctgcatcagcctacgcatctgcctgccccaagtggacaggcccctatgcccgcaatcaagacctcatgccccgagccagccactaccacggcggcagcaagcacagggccatgcccacttcacgtcaacgtggaagttagttcggggaattctgaagtggaggaccgccctcaggaccccctagcgagattgcgccacaaagaattacaaatggaacaagtgtaccacgggctgatggaacgttacctgtctgtcaaatccctgccggaagctatgcgtatggaagaagaggaagaaggagaagaagaggaggaggaagagggaggaggggacagcttggaagtagacggagtagctgcaacccctggcaaggctgaggctactcgggtcctgcctcgccagtgccctgtgcaggccgagaaaagtcacggggctcctcttgaggaggctaccgagaagatggtgtctatgaagccgccaggcttccaggcctctctcgccagagatggccatatgagcggcctgggcaaagccgaggcagccccacctgggccaggcgtcccaccgcatcccccagggaccaagtcagcagccagtcaccagagctccatgacctccttggagggttctggcatctcagagagactgcctcagaagcccctccatcgcggaggcggaccacatctggaggaaacttggatggcctcccccgagaccgactctggcttcgtggggagtgagactagtagggtctctcctctgacccagacgcccgaacatagactctcacacatttctaccgccggaacgctcgctcagcctttcgccgcttctgttccgcgtgatggagccagctatcccaaggcgaggggcagtctcatcccaaggcgggctacggaaccctccaccccgaggagtcaggcccaacgctacctgtccagcccctccggacccctgagacagagagcacccaatttcagtctggaaaggactttggctgccgaaatggccgtcccagggtcagaatttgagggtcacaagcgaatctcagagcagccgctgccgaacaagacaatttccccacccccagctccagcccctgccgcagccccactgccctgtggccctaccgaaaccattcccagctttctcttgacccgcgcaggcagagaccaagccatttgcgagctgcaggaggaagttagtcgacttcggctgagattggaggatagcctccatcagcccctccaaggttctccaacaagacctgcctctgcctttgacaggcctgccaggaccaggggacgcccagcagacagcccggctacatgggggtcccactacgggtccaagtccacagagagactgcctggcgagccacggggtgaagaacagatcgtgccccctggtagacagagggcacgctcctcatccgttcccagggaggtgttacggctgagcctgagtagcgagtcggagctgccatccctacccctgtttagcgagaaaagcaaaactaccaaagactcacctcaggccgcaagggacgggaaaagaggtgtgggatctgccggatggcctgacagagtgacgtttcgaggacagtatactggccatgagtaccacgttctgagccctaaggccgtaccaaaaggcaatggaactgtctcctgtccacactgccggccaatccggacccaggatgctggtggtgccgtcacgggcgatccactagggcctcctcccgctgacactctgcaatgtcccttgtgtgggcaggtgggttccccgcctgaagctgacggacccggttctgccacctctggtgccgagaaagcgacaacgcggagaaaagcatcctccacaccttctcccaaacaacggtctaagcaggcgggtagctcaccacgaccaccaccgggactgtggtatctggcaacggcccctcccgctcctgccccacctgccttcgcctacatttcatctgtgcctattatgccataccctcccgcagctgtgtactacgctcctgccggacctactagtgcgcaacctgccgctaagtggccacccacggcaagcccgcctccggctagaaggcatcggcactctatccaacttgatctgggcgatctggaggagctgaacaaagccttgtcacgcgctgtgcaagcagccgagtcagtgcgaagcacaacacgccagatgaggagctccctgtccgctgacctgagacaagcacactccctgagaggaagttgtctgttctag

SEQ ID NO: 311096 - DNA, 4077 bp, Artificial Sequence
  derived and/or modified sequence
atgctgagaagcgagtggcccgtgttccccgaggccgaggccgaggacgtggacagccccgccagcagccacgagcccctggcctggctgccccagcagggcagacagctggacatgaccgaggaggagcccgacggcaccctgggcagcctggaggtggaggaggccggcgagagcagcagcagactgggctacgaggccggcctgagcctggagggccacggcaacaccagccccatggccctgggccacggccaggccagaggctgggtggccagcggcgagcaggccagcggcgacaagctgagcgagcacagcgaggtgaaccccagcgtggagctgagccccgccagaagctggagcagcggcaccgtgagcctggaccaccccagcgacagcctggacagcacctgggagggcgagaccgacggcccccagcccaccgccctggccgagaccctgcccgagggccccagccaccacctgctgagccccgacggcagaaccggcggcagcgtggccagagccacccccatggagttccaggacagcagcgccccccccgcccagagcccccagcacgccaccgacagatggagaagagagaccaccagattcttctgcccccagcccaaggagcacatctggaagcagaccaagaccagccccaagcccctgcccagcagattcatcggcagcatcagccccctgaacccccagcccagacccaccagacagggcagacccctgcccagacagggcgccaccctggccggcagaagcagcagcaacgcccccaagtacggcagaggccagctgaactaccccctgcccgacttcagcaaggtgggccccagagtgagattccccaaggacgagagctacagaccccccaagagcagaagccacaacagaaagccccaggcccccgccagacccctgatcttcaagagccccgccgagatcgtgcaggaggtgctgctgagcagcggcgaggccgccctggccaaggacaccccccccgcccaccccatcaccagagtgccccaggagttccagacccccgagcaggccaccgagctggtgcaccagctgcaggaggactaccacagactgctgaccaagtacgccgaggccgagaacaccatcgaccagctgagactgggcgccaaggtgaacctgttcagcgaccccccccagcccaaccacagcatccacaccggcatggtgccccagggcaccaaggtgctgagcttcaccatcccccagcccagaagcgccgagtggtggcccggccccgccgaggacccccaggccagcgccgccagcggctggcccagcgccagaggcgacctgagccccagcagcctgaccagcatgcccaccctgggctggctgcccgagaacagagacatcagcgaggaccagagcagcgccgagcagacccaggccctggccagccaggccagccagttcctggccaaggtggagagcttcgagagactgatccaggccggcagactgatgccccaggaccaggtgaagggcttccagagactgaaggccgcccacgccgccctggaggaggagtacctgaaggcctgcagagagcagcaccccgcccagcccctggccggcagcaagggcacccccggcagattcgaccccagaagagagctggaggccgagatctacagactgggcagctgcctggaggagctgaaggagcacatcgaccagacccagcaggagcccgagccccccggcagcgacagcgccctggacagcacccccgccctgccctgcctgcaccagcccacccacctgcccgcccccagcggccaggcccccatgcccgccatcaagaccagctgccccgagcccgccaccaccaccgccgccgccagcaccggcccctgccccctgcacgtgaacgtggaggtgagcagcggcaacagcgaggtggaggacagaccccaggaccccctggccagactgagacacaaggagctgcagatggagcaggtgtaccacggcctgatggagagatacctgagcgtgaagagcctgcccgaggccatgagaatggaggaggaggaggagggcgaggaggaggaggaggaggagggcggcggcgacagcctggaggtggacggcgtggccgccacccccggcaaggccgaggccaccagagtgctgcccagacagtgccccgtgcaggccgagaagagccacggcgcccccctggaggaggccaccgagaagatggtgagcatgaagccccccggcttccaggccagcctggccagagacggccacatgagcggcctgggcaaggccgaggccgccccccccggccccggcgtgcccccccacccccccggcaccaagagcgccgccagccaccagagcagcatgaccagcctggagggcagcggcatcagcgagagactgccccagaagcccctgcacagaggcggcggcccccacctggaggagacctggatggccagccccgagaccgacagcggcttcgtgggcagcgagaccagcagagtgagccccctgacccagacccccgagcacagactgagccacatcagcaccgccggcaccctggcccagcccttcgccgccagcgtgcccagagacggcgccagctaccccaaggccagaggcagcctgatccccagaagagccaccgagcccagcacccccagaagccaggcccagagatacctgagcagccccagcggccccctgagacagagagcccccaacttcagcctggagagaaccctggccgccgagatggccgtgcccggcagcgagttcgagggccacaagagaatcagcgagcagcccctgcccaacaagaccatcagccccccccccgcccccgcccccgccgccgcccccctgccctgcggccccaccgagaccatccccagcttcctgctgaccagagccggcagagaccaggccatctgcgagctgcaggaggaggtgagcagactgagactgagactggaggacagcctgcaccagcccctgcagggcagccccaccagacccgccagcgccttcgacagacccgccagaaccagaggcagacccgccgacagccccgccacctggggcagccactacggcagcaagagcaccgagagactgcccggcgagcccagaggcgaggagcagatcgtgccccccggcagacagagagccagaagcagcagcgtgcccagagaggtgctgagactgagcctgagcagcgagagcgagctgcccagcctgcccctgttcagcgagaagagcaagaccaccaaggacagcccccaggccgccagagacggcaagagaggcgtgggcagcgccggctggcccgacagagtgaccttcagaggccagtacaccggccacgagtaccacgtgctgagccccaaggccgtgcccaagggcaacggcaccgtgagctgcccccactgcagacccatcagaacccaggacgccggcggcgccgtgaccggcgaccccctgggccccccccccgccgacaccctgcagtgccccctgtgcggccaggtgggcagcccccccgaggccgacggccccggcagcgccaccagcggcgccgagaaggccaccaccagaagaaaggccagcagcacccccagccccaagcagagaagcaagcaggccggcagcagccccagacccccccccggcctgtggtacctggccaccgccccccccgcccccgccccccccgccttcgcctacatcagcagcgtgcccatcatgccctacccccccgccgccgtgtactacgcccccgccggccccaccagcgcccagcccgccgccaagtggccccccaccgccagccccccccccgccagaagacacagacacagcatccagctggacctgggcgacctggaggagctgaacaaggccctgagcagagccgtgcaggccgccgagagcgtgagaagcaccaccagacagatgagaagcagcctgagcgccgacctgagacaggcccacagcctgagaggcagctgcctgttctag

SEQ ID NO: 311097 - protein, 405 aa, Artificial Sequence
  derived and/or modified sequence
LNLCLSIFLTPACYHHCRRQHWPLPIARKCGAVPGSEFEGHKRISEQPLPNKTISPPPAPAPAAAPLPCGPTETIPSFLLTRAGRDQAICELQEEVSRLRLRLEDSLHQPLQGSPTRPASAFDRPARTRGRPADSPATWGSHYGSKSTERLPGEPRGEEQIVPPGRQRARSSSVPREVLRLSLSSESELPSLPLFSEKSKTTKDSPQAARDGKRGVGSAGWPDRVTFRGQYTGHEYHVLLRRSQKAMAQSPVPTAGPLGPRMRVVLSQGTHWDRLPLIPFSVPCVVKLGLPQRQMVQAQPPLGQRRPPRGEKHLQLPAPSRGASRRGRRHAHPPDCGIWQQRPQHQPLQPLPTSPRFPSCLIHLPLCTMRLQDLPQPNQLPSGRPQPLPHQPGDTGTPSSSTWAT

SEQ ID NO: 311098 - protein, 1358 aa, Artificial Sequence
  derived and/or modified sequence
MLRSEWPVFPEAEAEDVDSPASSHEPLAWLPQQGRQLDMTEEEPDGTLGSLEVEEAGESSSRLGYEAGLSLEGHGNTSPMALGHGQARGWVASGEQASGDKLSEHSEVNPSVELSPARSWSSGTVSLDHPSDSLDSTWEGETDGPQPTALAETLPEGPSHHLLSPDGRTGGSVARATPMEFQDSSAPPAQSPQHATDRWRRETTRFFCPQPKEHIWKQTKTSPKPLPSRFIGSISPLNPQPRPTRQGRPLPRQGATLAGRSSSNAPKYGRGQLNYPLPDFSKVGPRVRFPKDESYRPPKSRSHNRKPQAPARPLIFKSPAEIVQEVLLSSGEAALAKDTPPAHPITRVPQEFQTPEQATELVHQLQEDYHRLLTKYAEAENTIDQLRLGAKVNLFSDPPQPNHSIHTGMVPQGTKVLSFTIPQPRSAEWWPGPAEDPQASAASGWPSARGDLSPSSLTSMPTLGWLPENRDISEDQSSAEQTQALASQASQFLAKVESFERLIQAGRLMPQDQVKGFQRLKAAHAALEEEYLKACREQHPAQPLAGSKGTPGRFDPRRELEAEIYRLGSCLEELKEHIDQTQQEPEPPGSDSALDSTPALPCLHQPTHLPAPSGQAPMPAIKTSCPEPATTTAAASTGPCPLHVNVEVSSGNSEVEDRPQDPLARLRHKELQMEQVYHGLMERYLSVKSLPEAMRMEEEEEGEEEEEEEGGGDSLEVDGVAATPGKAEATRVLPRQCPVQAEKSHGAPLEEATEKMVSMKPPGFQASLARDGHMSGLGKAEAAPPGPGVPPHPPGTKSAASHQSSMTSLEGSGISERLPQKPLHRGGGPHLEETWMASPETDSGFVGSETSRVSPLTQTPEHRLSHISTAGTLAQPFAASVPRDGASYPKARGSLIPRRATEPSTPRSQAQRYLSSPSGPLRQRAPNFSLERTLAAEMAVPGSEFEGHKRISEQPLPNKTISPPPAPAPAAAPLPCGPTETIPSFLLTRAGRDQAICELQEEVSRLRLRLEDSLHQPLQGSPTRPASAFDRPARTRGRPADSPATWGSHYGSKSTERLPGEPRGEEQIVPPGRQRARSSSVPREVLRLSLSSESELPSLPLFSEKSKTTKDSPQAARDGKRGVGSAGWPDRVTFRGQYTGHEYHVLSPKAVPKGNGTVSCPHCRPIRTQDAGGAVTGDPLGPPPADTLQCPLCGQVGSPPEADGPGSATSGAEKATTRRKASSTPSPKQRSKQAGSSPRPPPGLWYLATAPPAPAPPAFAYISSVPIMPYPPAAVYYAPAGPTSAQPAAKWPPTASPPPARRHRHSIQLDLGDLEELNKALSRAVQAAESVRSTTRQMRSSLSADLRQAHSLRGSCLF

SEQ ID NO: 311099 - DNA, 7623 bp, Artificial Sequence
  derived and/or modified sequence
gcaaccgcggcgtgactacggcgcgcgcggtctgggcgcggacgggtggggccgggcggtgccggtgcgggctggggcagtgcagtgagtagcggtcttggggtgtgcgatctcgctgagcctcctcacacggttcgtcgtctcgggttcgagcccagtgggcttagccactcgccatggactcccagaaagaagctctacagaggatcatttcaactctggcaaataaaaatgatgaaattcagaactttattgatacactacatcatacactaaaaggagttcaggaaaattcgtccaacatactctcagagttagatgaagaatttgatagtttatactctatactggatgaagtaaaagaaagtatgattaactgtatcaagcaggaacaagctcgtaaatcccaagagttacagagtcagattagtcaatgtaataatgccctggagaactctgaagaactattagaatttgcaacaaggtcattagatataaaggaacctgaagaattttcaaaggctgccagacagatcaaggatagagtcacaatggcttcagcctttcgcctttctttgaaaccaaaggtcagtgacaacatgactcatttaatggtggatttctcacaggaaagacagatgctgcaaactttgaagtttttgccagtccccaaagctccagagatagatccagtagagtgtttggtggcagataactctgtaacagtggcttggagaatgccagaagaagataataagattgaccattttatactggaacataggaagactaattttgatggacttccacgtgtaaaggatgagcgatgctgggagataattgataatattaagggtactgaatatacactatcaggcttaaaatttgattcaaagtatatgaatttcagagtgcgagcttgtaacaaggctgtggctggagagtattctgatccagtgactctagagaccaaagcacttaacttcaatttggataactcctcatcccatttgaacctgaaagttgaagatacatgtgtagagtgggatcctactggaggaaaaggtcaagaaagtaaaattaaaggaaaagagaacaagggcagaagtggtacaccatccccaaaacgaacatctgtaggctccaggccaccagcagtaagaggcagtagagatcgttttactggagaatcatacacagtgctgggagacactgctattgaaagtggacaacattattgggaggtcaaggcccagaaggattgtaaatcctacagtgtgggagtagcatacaaaacgttggggaaatttgaccaattgggaaagacaaacactagttggtgtatccatgtcaacaactggctacaaaacacatttgcagcaaagcataataataaagtcaaagctttggatgttactgttcctgaaaaaataggtgtattttgtgattttgatgggggtcaactttcattctatgatgcaaattctaaacagttgctatattcctttaagacaaaatttactcagccagtactacctggtttcatggtatggtgtggtggactttctttgagtactgggatgcaggttccaagtgctgtgagaacacttcagaaaagtgaaaatggaatgactggttcagctagcagcctgaacaatgttgttactcaatagtgtctactcagaatacgtttaccctccgtcttgattaggtggccttttctgtgcagttactaatcacaggaatttggtagtagtgaaaatcaggtttgctgtgttctgctttgaggcctggaatcttttatcattaaacacctagtacgaagcatttgcaggaacctactgtgcagtatcatagaagcaagcagataccaagcaaaaaactgatgattgaagagtaaatgggggaaaaggcagtgtttaattaacataaaaactcatttttgtatttcttggattactttgactattctaatgtttaattacatatggtaaccctaaggcctggggagaaaagcttttaaatcttgccttctttcttctgtactttgtctttttaaaatctcattactatctattatttagttctaacacagaagctttaaaaatacatagtcatccaaggttttctaaaaattgaaatcatatgttgggaatggtaaaaaggttttcaaatggtttatttttcctcttttataaataagttttacaaaattttcctcttttgtttattgactagattgtatataattttcttttttccaaaatattgtgataagaaatttctagacacaacagcttaaaatcacccaaatttcagttctttacctactgcactaacaatggcaaggggggtattctttatatgttgccttgtttaactacagttcttttcattccatcactttaggtgatgggtaagatttttgaaagccttatattttttgattttgttgtctagtttaatcctacctttaatagttgtgtttggtaaaattcccacttgaatgtgacactgataataattatgctgatttttagcatctcttataggaatcaaagtttattaaagttacatagaggattgaaaaatgtatatcactcaatttttatctaagaaggataggttataaagggaggtacctaaatactcaaataatgtatatattctttttcataacatatggaatgctttaagcaattgttttgaaaaaaatctgcgtatctttgacttaattggcacatgactttttcaagcagccattcattcagaggtttgttttctctcagtccttttgctacattcactttcttttcaaagaaatgttaattattacaaaaattgacatagatatctttcccaaacttggggtaaaacccatggttatgtggaacataactgttcttaaaaagtcaattataatttgtaactcacatcctttgagctaaactaaattaaaattacagtatttaataattctttgggcatttttaagaggtctgaatttgtatttttcttcatttttgaaactttacatttgttgactttttttcattctcatttaaaatatattgtgctatgataaccaaccttcttccaaggagtgaccattactgcctacatttgcgttgctttctacatagagacttgtataatagtattaatagtagctcattctctctaaaaatttactgcccactgataggatgttttgtttccttgataaaacaaatgtaaatgaggaattttatttgaattggaatattgtttttctagaggacattcatatctgcactattatctgatgacatgttggtaattttaaagactgcaaggcagtttagagaatgaagtaaaccaatagatactcttttgattctccaaagaaatataattttggtttttgttcctcagagagagtttgaaagaaattttcagatgttctgttccctatagagggcctattccaggatctaaatgaatgggaatttataattcctttcatagactcaaacctgaaagcagaaatttttagtagttgagttgctttaagtgaattttaacaaatatgacacagaaaaggtcagatgctgttgtataaaattttttactagtgtgtcttatataattctttcttctcattaattcagtgcctttttcctctaagcatactcttggtccatgccccatgcagtgtcaactgatgtttaagctacagagcattgttgtagtggtgagggccctctgttgcaggggcatggggaaatgcatatattaatcaggggctggaggagtatacatgattcttgtgttcatgttgtcatttgaaactcttcacataaaattttctaatattcatttggaaaacctctccactggagaggtttcatctctgagaggttttgtaataatagtgtaagttcagtaaatccagtccaaattctcatcacatgtattatttgatactaaattttcaattattacttcaaaataagagtctgaggatttcttcttactggcgttcttaaaggtctctaaaattaaagaacaagatgtggttttttgtttaagacgtttttagtttatttgttgttaagttaaactggagaaagtttgtcatcctcattttcaaactgaaaactaatcaaatatagtgcctatttagtctcaaaataaggtaactattaacttgattatactatataatattctcaattacatttgaatttaaaaatattgagctcttgattacaatttaatacattgtaaaaagtattaaatcctttgaaacatcttttgttgcttatttagtttttgtttctacaggtcaaacatgattgctttctataaaagaaatgcttgagaggttgactataatggatatgtcacaggtataaaacagttgttttctaaaaacatgcatttagtatggcattctcttttagcaactgaattcccaacgagttttattaagctggatatcgaaatgaaggagctgccttaagcactttagaaaaagaatttttttacaattcattttgactctcatggctgaccatgtcattatgtctttaaattttggtaaatatgtagataccaagcattaataactaatgcacacagaaatttaatatacagcaattctttgaatgttccaggtgtacgtaaactaactgaaagtattaaggacatgcctgtctatacatgggtttcattgatggtatctgtatcatcttgacaaatcgtgaactgctgctgtatggctagactttgcctatttactctgttatgcaaacagtaatttttccctatgttatgaagagagacatattggcttgctttaatttacttatttatgaaattaaagcatgaataatatgtataatttgaattttttgtgactgatccttggcagtataaatgataaaagtaaatgtaatggaatcttttaattaggctaagatatgctatttcataacttatgtagaatgatttttatctatatactttgtccataaaattataattgtttatgtaattttattgtttcttatggaaacaattggaaaagtatatggaaaatgattatttcaaagaatatttatttaaagagggaagtgtagacttcttactgtaaaatatgtgattccaggcttaagaaattgattatattttaaaataattatttttttaaaaacgtaatttgtttttaaaagatgagtctccattcattggctaatccatacagcaaatatttgagtgtttgtgatatggcagtaaaaatgtgattactttgtatgtacattaaccaaaaccagtgaagtttgatggactgtgcatagagttttgcagcttttgagtagtgtgacagagtttgcctcttaaaattgttttgctaataagtcagaagtttaaaatgtgttatagtttgctaaaaaaaaatcaaattaactgcatataaaatggttcacttttatatagtcacatgtaatgggcctgaaaaagtttcttctttgattatgtagttactctagatacattcttttagggaagtgtatggtcaacatatatttactcagtatacagataaccacaaagttgttatttttaaccaaaatatacatttcataatgttggcactggagtattataagagatcatgaatgtttccttaattatcatggcaagattacctcacgttcagtatagtttagttttgtgtgtatcttacagtatgcatgttctgaaattatttgtgatcctgatatgtcacatataatagctttgttacctggagtatttgattaacctaaacagtttaagcattttgaattagttggagtttaaatggattacatttggtgtatattgtcttcattgaaaagatattgttggatatgccacatcagagttagcattgacttataaataaataccagaatttaccagagtacacttttctcttcagatgactcaattattaaataaaagaatatttcttatttctgggtcaatataaggtactgacttctgatgcataatcacttaagctatgtgagtttaaactggtatcttttcttagtggtacccattcaatgtaagctggtccatgggaatggacatgaagaggatttcacagtatgtagagcagaaggcacgtgaatgtgtttgctttggcttggagcttattaagttttgactacggttaaaataagtcaaatagtaagtggtaaaacacatttttgttagtattggaactttctggagaacataagggctatgagaatgcatatatatattttttaacatttcctatatatctaaggtaccaaagcactgagtctaatttacctattaagggagactctttaaaatcaactttataactaattcatactataagacagataatagctaaagttttggaataatttatattaaaagccgcaagtcttaaaaatccctggatatgacataaaaaggattttggcttcttttttgaagtatttaaaattaatcaccttagctctaccatatactagatctgtgaccgctacacaaattgtttatcatctttgggtctctattgccttctttataaaataagtgtaagttgttcagcctgcctcacagggctgttgtgaggaaataaaatgaaatggagtatgtgaaattgcttcagcaacagcaaagtgctacgtaaatgtaaagtgttgtttttagctaataatggatttaagtgtttggataattgtagatgcatttactttgataaagcgtgtgcttaaagtggtatcaccagtgatttctaacatgattttaaaaaaataaaaccccaattaaaatgttctttaatattcatttaatttgtgcatgacttgtggcctttttgtattttctcaagcctattactctagagctgtaaaagctcttgcacagcattgttgtgtcagtgtagaatagtggcataaataaatgaattaagctacatttccatgcaggcatttgcactttgaagttagggctgcccagtgccacatgcaaagagtgtatttggtctaaacagttctttccaaacaaccaaatggctgggcagcttgttgtcacggataaatgatataaaatgtaaccactgaacatttgacaactttgttgcattatcatttttaaaaaaagatgaagcatttcaaaatcttgttaacctggttatctcttggtatctctcctgacatatttgttttgctttaaattggattaaatggtttacaggttatctgaatctacagatttagtatgtctattatctggacatgattttgctatgcagttgtgataataaaaattctaattcctcaggtttggccttttaagttatggctgaagacctttaatgatacttatgatgcactcagtgccatacaatagtgttttaagaagcacatggcctcattttccttagaaacaagacaaagcctttttaaaatgtttttttttcactttaaaatagggtattcaaagtggagtaacgtgtattttgaaatgattttgtgttctatatagaatgtcccagttaagattttacagaagcacctggaatatctcattaaaaatttaaaaactctt

SEQ ID NO: 311100 - protein, 540 aa, Artificial Sequence
  derived and/or modified sequence
MSSAAENGEAAPGKQNEEKTYKKTASSAIKGAIQLGIGYTVGNLTSKPERDVLMQDFYVVESVFLPSEGSNLTPAHHYPDFRFKTYAPLAFRYFRELFGIKPDDYLYSICSEPLIELSNPGASGSLFFVTSDDEFIIKTVQHKEAEFLQKLLPGYYMNLNQNPRTLLPKFYGLYCMQSGGINIRIVVMNNVLPRSMRMHFTYDLKGSTYKRRASRKEREKSNPTFKDLDFLQDMHEGLYFDTETYNALMKTLQRDCRVLESFKIMDYSLLLGIHFLDHSLKEKEEETPQNVPDAKRTGMQKVLYSTAMESIQGPGKSGDGIITENPDTMGGIPAKSHRGEKLLLFMGIIDILQSYRLMKKLEHSWKALVYDGDTVSVHRPSFYADRFLKFMNSRVFKKIQALKASPSKKRCNSIAALKATSQEIVSSISQEWKDEKRDLLTEGQSFSSLDEEALGSRHRPDLVPSTPSLFEAASLATTISSSSLYVNEHYPHDRPTLYSNSKGLPSSSTFTLEEGTIYLTAEPNTLEVQDDNASVLDVYL

SEQ ID NO: 311101 - protein, 103 aa, Artificial Sequence
  derived and/or modified sequence
MSSAAENGEAAPGKQNEEKTYKKTASSAIKGAIQLGIGYTVGNLTSKPERDVLMQDFYVVESVFLPSEGSNLTPAHHYPDFRFKTYAPLAFRYFRELFGIKPD

SEQ ID NO: 311102 - protein, 449 aa, Artificial Sequence
  derived and/or modified sequence
MQDFYVVESVFLPSEGSNLTPAHHYPDFRFKTYAPLAFRYFRELFGIKPDDYLYSICSEPLIELSNPGASGSLFFVTSDDEFIIKTVQHKEAEFLQKLLPGYYMNLNQNPRTLLPKFYGLYCMQSGGINIRIVVMNNVLPRSMRMHFTYDLKGSTYKRRASRKEREKSNPTFKDLDFLQDMHEGLYFDTETYNALMKTLQRDCRVLESFKIMDYSLLLGIHFLDHSLKEKEEETPQNVPDAKRTGMQKVLYSTAMESIQGPGKSGDGIITENPDTMGGIPAKSHRGEKLLLFMGIIDILQSYRLMKKLEHSWKALVYDGDTVSVHRPSFYADRFLKFMNSRVFKKIQALKASPSKKRCNSIAALKATSQEIVSSISQEWKDEKRDLLTEGQSFSSLDEEALGSRHRPDLVPSTPSLFEAASLATTISSSSLYVNEHYPHDRPTLYSNSK

SEQ ID NO: 311103 - protein, 502 aa, Artificial Sequence
  derived and/or modified sequence
MSSAAENGEAAPGKQNEEKTYKKTASSAIKGAIQLGIGYTVGNLTSKPERDVLMQDFYVVESVFLPSEGSNLTPAHHYPDFRFKTYAPLAFRYFRELFGIKPDDYLYSICSEPLIELSNPGASGSLFFVTSDDEFIIKTVQHKEAEFLQKLLPGYYMNLNQNPRTLLPKFYGLYCMQSGGINIRIVVMNNVLPRSMRMHFTYDLKGSTYKRRASRKEREKSNPTFKDLDFLQDMHEGLYFDTETYNALMKTLQRDCRVLESFKIMDYSLLLGIHFLDHSLKEKEEETPQNVPDAKRTGMQKVLYSTAMESIQGPGKSGDGIITENPDTMGGIPAKSHRGEKLLLFMGIIDILQSYRLMKKLEHSWKALVYDGDTVSVHRPSFYADRFLKFMNSRVFKKIQALKASPSKKRCNSIAALKATSQEIVSSISQEWKDEKRDLLTEGQSFSSLDEEALGSRHRPDLVPSTPSLFEAASLATTISSSSLYVNEHYPHDRPTLYSNSK

SEQ ID NO: 311104 - DNA, 1623 bp, Artificial Sequence
  derived and/or modified sequence
atgagttccgctgcagagaacggcgaggcggctcctggaaagcagaacgaggaaaaaacttataaaaaaactgcttcatctgccatcaaaggggcaattcaactcggcatcggctacacggtaggaaacttaactagtaagcccgagagggacgttctgatgcaagatttctacgttgtcgagtccgtgttcctgccatcggagggctccaatctaacgcccgcccatcactacccggattttaggtttaaaacctacgcccctctcgcgttcaggtattttcgagaactctttgggatcaaaccagacgactatctctattctatctgttcagagcctctaattgagctgtcgaatcctggtgccagtggctcactgtttttcgtgacaagcgacgacgagtttatcattaagacagttcagcataaagaagctgagtttctgcaaaaactgttgcccggttactacatgaatctaaaccaaaatcctaggaccctgctgccaaaattctacggcctgtattgtatgcagtcagggggcattaacatcaggatcgttgttatgaataatgttcttcccaggtcaatgcggatgcactttacctacgacctgaagggctcaacatataaaagacgcgctagcaggaaggaacgggagaagtccaaccccacattcaaggacttagatttcctacaggatatgcatgaggggctttacttcgacaccgaaacatataatgccctcatgaaaacgctccagagggactgcagagtgcttgagtcctttaaaatcatggattacagtctgctgttaggcatccacttcctggatcacagcttaaaagagaaggaggaagagactccgcagaatgtccccgacgcaaaacgaaccggaatgcagaaggttctgtactcaacagcaatggaatcgatccaagggcctggtaaatctggggacggaatcatcaccgaaaatcccgataccatgggaggcatccctgctaagtcacaccgcggagagaaactattgctgttcatgggcatcatcgacattttacagtcctaccgcctcatgaaaaagctggaacacagctggaaggccctggtgtacgacggagacacggtgagcgttcaccggccgagcttctacgctgataggtttctgaagtttatgaacagtcgtgtcttcaagaaaattcaggccctcaaagccagtccctccaagaagcgctgcaattctatcgcggctctgaaggcaacgtcacaagagatcgtctcttctatcagccaggagtggaaggacgagaaaagagacctcctaacagaaggtcaatcgttttcatccctggatgaggaggccctgggctcccgccacaggccggatctggtgcccagcacccctagcctgttcgaagcagccagccttgctacgaccattagcagctcatccctttacgtcaatgaacactacccccacgaccggcctactttgtactctaattcaaaggggctgcccagtagttcaacattcaccctcgaggagggaacgatctacctaaccgccgagcccaatacgttagaggttcaggacgataacgcctctgtgttggatgtctatctgtag

SEQ ID NO: 311105 - DNA, 1623 bp, Artificial Sequence
  derived and/or modified sequence
atgtcttccgcggcggagaacggcgaggccgcccctggcaaacaaaacgaggaaaaaacttacaaaaagacggcatcgtccgctattaagggggctattcaacttggtattggctacacggtcgggaacctcacctccaaacctgagcgtgatgttctgatgcaggacttttatgtagtggaaagtgtgttcctgccctctgaagggtcaaatttgacccctgcacatcactaccccgatttccggttcaaaacatatgcacccctggccttcagatatttccgggagctattcggaattaagcccgatgactacctgtacagcatttgcagtgagcccctgattgaactcagcaacccaggtgcctctgggtccctcttctttgtgactagcgatgacgaattcattattaagactgtgcaacacaaagaggccgagtttcttcagaaactgctgccagggtattacatgaatctgaatcagaacccccgaaccctgcttcccaagttttacgggctctactgtatgcagagcggcggtattaatatacggattgtggtgatgaataacgtacttccaagaagcatgcgcatgcactttacatacgacctgaagggaagcacgtataagcggcgggcctctcggaaggagagggaaaagagcaatcccacctttaaagaccttgatttcctccaggacatgcatgagggcctgtactttgacacagagacatacaatgcactaatgaagaccctccagcgagactgccgtgtccttgagtcctttaagatcatggattatagcttgctcctcggtattcatttcctggaccactcattgaaagagaaggaagaggagacccctcagaacgtgcccgacgcaaaacgtactggaatgcagaaggtgctgtattctacggctatggaatccattcagggccctggaaaatctggggacggcataatcaccgaaaacccagataccatgggcggcattccagctaagtcgcaccgcggcgagaaattgctactcttcatgggcattatcgatatccttcagagctatcggctgatgaagaaactcgagcatagttggaaggctcttgtgtacgacggggacactgtcagcgtgcataggccttctttctatgccgatagattcctcaagtttatgaattctagggtcttcaagaagatccaggcactcaaagcctccccatcaaaaaagaggtgtaacagcatcgcggctctgaaggccacttcacaggaaatagtaagttctatcagtcaggagtggaaggatgagaaaagggatctcctgacagaaggtcagtctttcagttcactggatgaggaggccctcggcagtcgccaccgcccggatctggttccgtcaactcccagcctcttcgaagcggcctccctcgccactacgataagcagttcctccctctacgtcaacgagcactatccccatgatcggccaaccctttacagcaactccaaaggtttgccaagcagttccaccttcacattggaggagggcacaatatatttaaccgccgaaccgaacaccctggaggtgcaggatgataacgcgagtgtcttggacgtctatctgtag

SEQ ID NO: 311106 - DNA, 1623 bp, Artificial Sequence
  derived and/or modified sequence
atgagcagcgctgctgaaaatggagaggccgcccctgggaagcagaatgaggagaagacctacaagaagacagccagcagcgccatcaagggggccatccagctgggcatcggctacacagtgggcaacctgaccagcaagccagagagagatgtgctgatgcaggacttctacgtggtggagagcgtcttcctgcccagcgagggcagcaacctgaccccagcccaccactacccagacttccgcttcaagacctacgcccccctggccttccgctacttccgggagctgtttggcatcaagccagatgactacctgtacagcatctgcagcgagcccctgattgagctgagcaaccctggggccagcggcagcctcttctttgtgaccagtgatgatgagttcatcatcaagacagtgcagcacaaggaggccgagttcctgcagaagctgctgcccggctactacatgaacctgaaccagaaccccaggaccctgctgcccaagttctacggcctgtactgcatgcagagcggcggcatcaacatcagaattgtggtgatgaacaacgtgctgcccaggtccatgaggatgcacttcacctatgacctgaagggcagcacctacaagagaagagccagcaggaaggagcgggagaagagcaaccccaccttcaaggacctggacttcctgcaggacatgcatgagggcctgtactttgacacagagacctacaatgccctgatgaagaccctgcagagggactgccgggtgctggagagcttcaagatcatggactacagcctgctgctgggcatccacttcctggaccacagcctgaaggagaaggaggaggagaccccccagaatgtgcctgatgccaagaggacaggcatgcagaaggtgctgtacagcacagccatggagagcatccagggccctgggaagtctggagatggcatcatcacagagaacccagacaccatgggcggcatcccagccaagagccacagaggagagaagctgctgctcttcatgggcatcatcgacatcctgcagagctaccgcctgatgaagaagctggagcacagctggaaggccctggtgtatgatggagacacagtgtctgtgcaccggcccagcttctacgccgaccgcttcctgaagttcatgaacagcagggtcttcaagaagatccaggccctgaaggccagccccagcaagaagcgctgcaacagcattgctgccctgaaggccaccagccaggagatcgtgagcagcatcagccaggagtggaaggatgagaagagggacctgctgacagagggccagagcttcagcagcctggatgaggaggccctgggcagccgccacaggccagacctggtgcccagcacccccagcctgtttgaggccgccagcctggccaccaccatcagcagcagcagcctgtatgtgaatgagcactacccccatgaccggcccaccctgtacagcaacagcaagggcctgcccagcagcagcaccttcaccctggaggagggcaccatctacctgacagctgagcccaacaccctggaggtgcaggatgacaatgcctctgtgctggatgtgtacctgtag

SEQ ID NO: 311107 - DNA, 1623 bp, Artificial Sequence
  derived and/or modified sequence
atgagcagcgccgccgagaacggcgaggccgcccccggcaagcagaacgaagagaagacctacaagaaaaccgccagcagcgcgattaaaggagcaatccagcttgggatcgggtataccgtgggaaatttgaccagtaaacctgagcgggatgtgcttatgcaggatttttacgtggtggaatcagtcttcctgccaagtgagggctccaatctaaccccagcgcaccattaccccgactttagattcaagacttatgctcccctagcctttaggtattttcgcgaactcttcggtatcaagccagacgactatctgtattccatctgtagcgaacccttgatcgagctgtccaaccccggggcaagcgggtccctcttctttgttacttccgacgatgaattcatcattaaaaccgttcagcacaaggaagccgagttccttcagaagctactgcccggatactatatgaacttgaatcagaatccaagaaccctgctgccaaaattttacggcctctactgtatgcagtctggcgggattaatatcagaatcgtagtcatgaacaacgtgctccccagaagcatgcgaatgcattttacttacgacttaaaaggatcaacttacaagcggcgcgccagccgaaaggagagagagaaatctaaccccaccttcaaggaccttgactttctgcaggacatgcatgaggggctgtattttgatactgagacttataatgccctcatgaagaccctccagagagattgcagagtgttagaatcattcaaaatcatggattattcacttctgctcggtatccacttcctcgaccattctctaaaagagaaggaggaagaaaccccacaaaacgttcccgatgccaaacgcacagggatgcagaaggttctgtacagcacggcaatggaaagcatccaggggccaggtaaatctggggacggaattatcacagaaaaccccgataccatgggtgggatccctgctaagagtcaccgcggcgagaaactcctgttgttcatgggtattattgacatcctccagagttataggttaatgaagaaactagaacattcttggaaggccctcgtttatgacggtgacaccgtgtctgtccacagaccaagtttttatgccgaccggttcctcaagttcatgaattcacgggtgttcaaaaagatacaggctctgaaggcaagccctagtaaaaaaaggtgtaatagcatcgccgccctgaaggccacgtctcaggaaatcgtgtcctccataagccaagaatggaaggatgagaaacgtgacctcctcaccgagggacagagttttagctccctcgacgaagaagctcttggatcccgccaccggcctgatctggtccctagcacaccttcactcttcgaggcagcttcactcgctacaaccattagctcatcctcgctgtacgtgaatgagcattatccacatgaccgccctacattgtatagtaactcaaaaggccttccatcttcatctactttcaccctggaggagggaaccatctatcttactgcagaaccaaataccttggaggtgcaggacgataacgcaagcgtgctcgatgtgtatctgtag

SEQ ID NO: 311108 - DNA, 1623 bp, Artificial Sequence
  derived and/or modified sequence
atgagcagcgccgccgagaacggcgaggccgcccccggcaagcagaacgaggagaaaacatataagaagacggctagcagtgccattaaaggagcgattcagctgggcatcggttatacagttggcaatctgacttccaaacccgaaagagatgtgctgatgcaggacttctatgtggtagagtccgtgttcctgccttcagagggtagtaacctcaccccagcccatcattaccccgattttagattcaaaacatacgcacctttagcctttaggtattttcgggaattattcggaatcaaacctgacgattacctctacagcatttgttctgaacctcttatcgagttaagcaacccgggggcctcaggtagtcttttcttcgtaacatcagatgacgaattcattattaagacagttcagcataaggaggccgaatttctgcaaaaattgctgcctggatactacatgaatctcaaccagaatcccagaacattgctgcctaagttctacggattatactgcatgcagtccggggggatcaacattaggattgtggtcatgaacaacgtcctacctcggtcaatgagaatgcattttacctacgacttgaaaggctccacatataagcgaagggccagcagaaaagagcgtgaaaaaagcaacccgaccttcaaagacttggacttcctccaggacatgcacgagggactctacttcgacacggaaacatataatgcactgatgaaaactttacagcgggactgcagagtcctcgaatctttcaaaattatggactatagtttactgctgggcattcactttctcgatcattctttgaaggagaaagaggaggagactcctcagaacgtccccgacgcaaaaagaacaggcatgcagaaagtcctctattctacagctatggaaagtatccagggtccgggaaagtcaggagacggcattatcacagaaaatcccgataccatgggaggaatccctgctaagtcgcaccgcggggagaagttgctcctatttatgggcattatcgacatactccagtcctaccgcctaatgaagaaactggagcatagttggaaggccttagtgtatgatggagacaccgtctctgtccaccgcccgtccttctacgccgatcgcttcctgaaatttatgaatagcagggtgttcaagaagatacaggcgctgaaagcgagcccgagcaagaaaagatgcaactcaatcgctgcgctgaaagccacgagccaggaaattgtatccagcatcagccaggaatggaaagacgaaaaaagggatctgctcacagaaggacagtcctttagcagcctggatgaagaagccctgggctcaaggcatcggcctgacctggtgccctccaccccaagcctcttcgaagccgcctcccttgccaccacaatctccagctcttctctctacgttaatgagcattacccacacgacaggcccacactatattcaaactccaaagggcttccttcttcatcgacatttaccctggaggagggtaccatctacctgacagctgaacccaataccttggaagttcaggatgacaacgcgagtgtgttggatgtatacctatag

SEQ ID NO: 311109 - DNA, 2654 bp, Artificial Sequence
  derived and/or modified sequence
aacttgcagactgtggcgcaactggtcttggtagcggaggcacccgaatgctgcccgggtgagatgaggaagccaaggcccagcagagctgagatgtgactgcagagccgtccaaccccagtcctgtgacctttctctggtgcctgatacctctcagcatttgagggccttttctcttcctgcttcatctctaaaggtccttctaggagagaggtgaaagaaacctggcaaagaaaacggtctcgacaatgagtaggccacccatcactactaactacagatgacttgccatttcatttacaaagatgtcttctgctgctgaaaatggagaggcagcacctggaaaacaaaatgaagaaaaaacctataaaaagactgcatcatctgctattaaaggtgctattcagctgggaataggatacacagtgggtaatctcacttccaagccagaacgagatgttcttatgcaagacttttatgtggtggaaagtgtgttcctacccagcgaagggagcaatctgaccccagcacatcactacccagactttagatttaagacatacgctccattagcattccgatatttcagagaactttttggtatcaagcctgatgattacttgtattccatctgcagtgaacctctaatagaactgtctaaccctggagccagtggatccttgttttttgtgaccagtgatgatgaatttatcatcaaaacagttcagcacaaagaagctgagtttcttcagaagctactgccaggctattacatgaatttaaaccagaatccaaggactcttttgccaaaattttacggactgtattgtatgcaatcaggaggcattaatatcaggattgtggtgatgaacaacgttttgccacgctccatgagaatgcactttacatatgacttgaaaggctcaacgtataagcgaagagcatcccgtaaagagagagagaaatccaaccccacatttaaggacttagatttcctgcaagacatgcacgaagggttgtattttgatacggaaacatacaacgcgcttatgaaaacacttcagagagactgccgggtgctagaaagcttcaagatcatggattatagccttctgttgggaattcatttcctggaccattccctcaaagagaaagaggaggagaccccacaaaatgtgcctgatgctaagcggactgggatgcagaaggttctctactcaacagccatggaatctatccagggtccagggaaatctggagatgggataatcacagagaacccagacacaatgggaggcattccagctaaaagccataggggagaaaaactacttttatttatgggcattattgacattctgcaatcatataggttaatgaagaagttagaacattcctggaaagctcttgtttatgatggggacactgtttctgttcatagaccaagcttttatgcagacagatttcttaagttcatgaattccagagttttcaagaaaattcaagctttgaaggcttcaccgtctaagaaacggtgcaattcaatcgccgccctaaaggccacttcacaggagattgtgtcctcaattagccaggaatggaaggatgagaagcgggatttgctgactgaaggacaaagttttagcagccttgatgaagaagccctgggatcccgacacaggccagacctggtccctagcactccatcactgtttgaagctgcttccttggcaaccacaatttcatcttcttccttatacgtcaatgagcactatccacacgacaggcctacactctattcaaacagcaaagggttaccttccagttcaacatttaccttggaagaggggaccatctacttgaccgctgagcccaacactctggaagtgcaggatgacaatgcttctgtgcttgacgtctatttataagtgaaaatggtgatcacctaagcacatggatgagacgtgagcacagttatggcagagaagtttctccgcaccagaattatccacagcaacttggctgagccccactacacacagagaaatcatcaacctgacttaagagttttcaagatgtcaacttcaggctgatcagcagatgggatgtgaaaaatactaccctattctatcatttgctgttgcttgctgaactgtgaagaactgcatgaactatatttaagctgctttctgtaccattgccaatcacctttttggagttggaagtgctattttcctatggacttttgcattatttcattgtgcatgcatccagtgattatacataagcaacatatgtaatctgcttatatatttttaaaaatccatccacacacatggtaaattaagtataaattcttttgcaaaattatagttcatgtcattgaaagtttaaattggtttcatttaaagatcaatatactaggtctgccttcactttatagaaaactagcttctataaagattttttcactgtttactagtgaaatgagaaaagcaaagctatttataaaaggccttatgtcgtgtacatacattgtctttgaaatatttgtgatctagtttattgcttgtaaaagagaaattatataatttatttagtaaatactactgtaaactatagttttgtgagagaaataaaatattttgttctca

SEQ ID NO: 311110 - DNA, 2654 bp, Artificial Sequence
  derived and/or modified sequence
aacttgcagactgtggcgcaactggtcttggtagcggaggcacccgaatgctgcccgggtgaggtaaggaagccaaggcccagcagagctgagatgtgactgcagagccgtccaaccccagtcctgtgacctttctctggtgcctgatacctctcagcatttgagggccttttctcttcctgcttcatctctaaaggtccttctaggagagaggtgaaagaaacctggcaaagaaaacggtctcgacaatgagtaggccacccatcactactaactacagatgacttgccatttcatttacaaagatgtcttctgctgctgaaaatggagaggcagcacctggaaaacaaaatgaagaaaaaacctataaaaagactgcatcatctgctattaaaggtgctattcagctgggaataggatacacagtgggtaatctcacttccaagccagaacgagatgttcttatgcaagacttttatgtggtggaaagtgtgttcctacccagcgaagggagcaatctgaccccagcacatcactacccagactttagatttaagacatacgctccattagcattccgatatttcagagaactttttggtatcaagcctgatgattacttgtattccatctgcagtgaacctctaatagaactgtctaaccctggagccagtggatccttgttttttgtgaccagtgatgatgaatttatcatcaaaacagttcagcacaaagaagctgagtttcttcagaagctactgccaggctattacatgaatttaaaccagaatccaaggactcttttgccaaaattttacggactgtattgtatgcaatcaggaggcattaatatcaggattgtggtgatgaacaacgttttgccacgctccatgagaatgcactttacatatgacttgaaaggctcaacgtataagcgaagagcatcccgtaaagagagagagaaatccaaccccacatttaaggacttagatttcctgcaagacatgcacgaagggttgtattttgatacggaaacatacaacgcgcttatgaaaacacttcagagagactgccgggtgctagaaagcttcaagatcatggattatagccttctgttgggaattcatttcctggaccattccctcaaagagaaagaggaggagaccccacaaaatgtgcctgatgctaagcggactgggatgcagaaggttctctactcaacagccatggaatctatccagggtccagggaaatctggagatgggataatcacagagaacccagacacaatgggaggcattccagctaaaagccataggggagaaaaactacttttatttatgggcattattgacattctgcaatcatataggttaatgaagaagttagaacattcctggaaagctcttgtttatgatggggacactgtttctgttcatagaccaagcttttatgcagacagatttcttaagttcatgaattccagagttttcaagaaaattcaagctttgaaggcttcaccgtctaagaaacggtgcaattcaatcgccgccctaaaggccacttcacaggagattgtgtcctcaattagccaggaatggaaggatgagaagcgggatttgctgactgaaggacaaagttttagcagccttgatgaagaagccctgggatcccgacacaggccagacctggtccctagcactccatcactgtttgaagctgcttccttggcaaccacaatttcatcttcttccttatacgtcaatgagcactatccacacgacaggcctacactctattcaaacagcaaagggttaccttccagttcaacatttaccttggaagaggggaccatctacttgaccgctgagcccaacactctggaagtgcaggatgacaatgcttctgtgcttgacgtctatttataagtgaaaatggtgatcacctaagcacatggatgagacgtgagcacagttatggcagagaagtttctccgcaccagaattatccacagcaacttggctgagccccactacacacagagaaatcatcaacctgacttaagagttttcaagatgtcaacttcaggctgatcagcagatgggatgtgaaaaatactaccctattctatcatttgctgttgcttgctgaactgtgaagaactgcatgaactatatttaagctgctttctgtaccattgccaatcacctttttggagttggaagtgctattttcctatggacttttgcattatttcattgtgcatgcatccagtgattatacataagcaacatatgtaatctgcttatatatttttaaaaatccatccacacacatggtaaattaagtataaattcttttgcaaaattatagttcatgtcattgaaagtttaaattggtttcatttaaagatcaatatactaggtctgccttcactttatagaaaactagcttctataaagattttttcactgtttactagtgaaatgagaaaagcaaagctatttataaaaggccttatgtcgtgtacatacattgtctttgaaatatttgtgatctagtttattgcttgtaaaagagaaattatataatttatttagtaaatactactgtaaactatagttttgtgagagaaataaaatattttgttctca

SEQ ID NO: 311111 - DNA, 1623 bp, Artificial Sequence
  derived and/or modified sequence
atgtcctcagccgcagaaaacggcgaagcagctcccggtaaacagaacgaagaaaagacctacaagaaaaccgcatcctctgcaataaaaggcgcaatccagctgggcatcggatacacagtgggtaacctaaccagcaagccggagagggacgtcctcatgcaggacttctatgtggtcgaatcggttttcttaccaagtgaagggagcaatctcaccccagcccatcactatcctgattttcgcttcaagacctatgcgccactcgcctttcggtactttcgagaactgttcgggataaaacccgacgattatctatattccatatgctctgagccattgattgagctgtctaacccgggagcctccggaagcttgttttttgtgactagtgatgacgagttcatcattaaaacagtgcagcacaaggaggccgaattcttgcagaaacttttacccggatattacatgaatttaaatcagaatccaaggaccttgctacctaaattctatggcctctattgtatgcagtcgggcggaatcaacataagaatcgtagtcatgaacaacgtgttgcctagatccatgcggatgcactttacgtacgacctcaagggttccacatacaaaagacgagcttcgcggaaggaacgcgaaaagtccaaccctacttttaaagatcttgattttttgcaggatatgcacgaaggactgtattttgacaccgagacatacaacgctctgatgaaaaccctccaacgggattgcagagtgctggaatcctttaagatcatggattattccctgctgctaggaattcattttctggaccatagcctgaaggaaaaggaagaagaaactccacagaacgtgcccgatgccaaacggacagggatgcaaaaagttctgtacagcactgcaatggagtcaattcagggacctgggaagagcggggatgggatcatcacagaaaatccggacactatggggggtattccagctaagtcacaccgcggagaaaaattgctgttgttcatgggcatcattgatatcctgcagagctaccgccttatgaagaaactggaacactcatggaaggccctcgtatacgatggggatacagttagtgtacaccgcccttccttctacgcagatcgctttctaaaattcatgaacagtcgggtctttaagaagatacaggccttaaaggcctcaccatcgaagaagcgatgcaacagtatcgccgctctcaaagcgacatcccaagaaatcgtgagcagtatcagccaggaatggaaggacgagaagagggacctgttaaccgaagggcagagcttttcatctctggacgaggaggccttgggcagtcgtcacaggcccgacttagtaccaagtaccccgagcctctttgaagctgccagcttggcaacgaccatttcttcttcatccctgtacgtaaatgaacattacccccacgacagaccaacgctttactccaactccaaggggctgccctcgtcatctacgttcactctggaggagggcactatatacctcacagccgagccaaatactcttgaggtgcaggatgacaacgcctccgtgctggacgtgtatctctag

SEQ ID NO: 311112 - DNA, 1623 bp, Artificial Sequence
  derived and/or modified sequence
atgtcctcagccgctgaaaacggagaagcagctcctggcaagcagaacgaggagaagacctacaaaaaaaccgcaagcagtgctattaaaggggctatacagctgggcataggctatacggttgggaacctgacctctaagcctgaaagagacgtccttatgcaggacttctatgtggtcgaatccgtgtttctgccgagtgaaggttcaaatctgacccccgcacaccactaccctgacttccgtttcaaaacatatgctccgctggcattcaggtacttccgggagctgttcgggattaagccagatgattacctttacagtatctgctccgagcctctgattgaactgagcaatcccggagcatctggttccttgttcttcgtcaccagcgatgatgagttcattatcaagacagtgcaacacaaggaggccgaatttctgcagaagctgctgcctgggtactacatgaacttgaaccaaaaccccagaaccctcttgccaaagttttatgggctctattgcatgcagagcggcggtatcaatattcgcatcgtggtgatgaacaacgtcttgcccaggtctatgagaatgcattttacgtacgacctcaagggttcaacctataagagacgtgcatcacgcaaagagagagaaaaaagtaaccctacttttaaagacttagacttcctgcaggatatgcatgagggactatacttcgacacagagacttacaatgccctgatgaaaaccctccagcgagactgtcgggtgctggaatcgtttaagattatggattatagcctactgttagggattcatttcctggaccactcgctgaaagagaaagaggaagagacacctcagaatgtgccagatgctaaaagaactggaatgcaaaaggtgctgtattcaactgccatggaaagtatccagggtcccggaaaatctggagatggcataattactgaaaaccctgacacaatgggcggtataccggcaaagtcacatcgcggtgaaaaactcctgctttttatggggatcatcgacattctgcagagctacagactgatgaaaaagctggaacactcatggaaagccctcgtttacgatggcgacaccgtgagcgtgcatagaccttcattctatgctgaccggtttctgaaatttatgaattcacgggtgttcaagaagatacaggccctgaaagcaagtccctcgaaaaaacgctgcaatagcatagcagctttgaaagcaacctctcaggagatcgtgtcttcaattagccaagagtggaaagacgagaaacgcgacctgctgacggaaggacagtcattttcatcccttgacgaggaggccctggggtcccgccatcgtcctgatttggtgccttccactcccagcctgtttgaagcggctagcctcgccaccaccattagttcttctagcttgtacgtgaacgagcattacccacacgacagaccaacactgtattcgaactccaagggcctgcccagttcctctacctttaccctggaagagggcacgatatatcttacagcagagcctaacactcttgaagtccaggatgataacgcttctgtcctggacgtttatctgtag

SEQ ID NO: 311113 - DNA, 1623 bp, Artificial Sequence
  derived and/or modified sequence
atgagcagcgccgccgagaacggcgaggccgcccccggcaagcagaacgaggagaagacctacaagaagaccgccagcagcgccatcaagggcgccatccagctgggcatcggctacaccgtgggcaacctgaccagcaagcccgagagagacgtgctgatgcaggacttctacgtggtggagagcgtgttcctgcccagcgagggcagcaacctgacccccgcccaccactaccccgacttcagattcaagacctacgcccccctggccttcagatacttcagagagctgttcggcatcaagcccgacgactacctgtacagcatctgcagcgagcccctgatcgagctgagcaaccccggcgccagcggcagcctgttcttcgtgaccagcgacgacgagttcatcatcaagaccgtgcagcacaaggaggccgagttcctgcagaagctgctgcccggctactacatgaacctgaaccagaaccccagaaccctgctgcccaagttctacggcctgtactgcatgcagagcggcggcatcaacatcagaatcgtggtgatgaacaacgtgctgcccagaagcatgagaatgcacttcacctacgacctgaagggcagcacctacaagagaagagccagcagaaaggagagagagaagagcaaccccaccttcaaggacctggacttcctgcaggacatgcacgagggcctgtacttcgacaccgagacctacaacgccctgatgaagaccctgcagagagactgcagagtgctggagagcttcaagatcatggactacagcctgctgctgggcatccacttcctggaccacagcctgaaggagaaggaggaggagaccccccagaacgtgcccgacgccaagagaaccggcatgcagaaggtgctgtacagcaccgccatggagagcatccagggccccggcaagagcggcgacggcatcatcaccgagaaccccgacaccatgggcggcatccccgccaagagccacagaggcgagaagctgctgctgttcatgggcatcatcgacatcctgcagagctacagactgatgaagaagctggagcacagctggaaggccctggtgtacgacggcgacaccgtgagcgtgcacagacccagcttctacgccgacagattcctgaagttcatgaacagcagagtgttcaagaagatccaggccctgaaggccagccccagcaagaagagatgcaacagcatcgccgccctgaaggccaccagccaggagatcgtgagcagcatcagccaggagtggaaggacgagaagagagacctgctgaccgagggccagagcttcagcagcctggacgaggaggccctgggcagcagacacagacccgacctggtgcccagcacccccagcctgttcgaggccgccagcctggccaccaccatcagcagcagcagcctgtacgtgaacgagcactacccccacgacagacccaccctgtacagcaacagcaagggcctgcccagcagcagcaccttcaccctggaggagggcaccatctacctgaccgccgagcccaacaccctggaggtgcaggacgacaacgccagcgtgctggacgtgtacctgtag

SEQ ID NO: 311114 - DNA, 807 bp, Artificial Sequence
  derived and/or modified sequence
atggaccccctgaccaaggtgccctgcggcagccagatcgcccagaccatcctgtggaaggccaagagcagcctgagcttcggcatccagcccctgcagacctggcccaccaaggaccccgagctggagagccaggtgaacctgagcgtgagcgaggacctgggctgcagaagaggcgacttcagcagaaagcactacggcagcgtggagctgctgatcagcagcgacgccgacggcgccatccagagagccggcagattcagagtggagaacggcagcagcgacgagaacgccaccgccctgcccggcacctggagaagaaccgacgtgcacctggagaaccccgagtaccacaccagatggtacttcaagtacttcctgggccaggtgcaccagaactacatcggcaacgacgccgagaagagccccttcttcctgagcgtgaccctgagcgaccagaacaaccagagagtgccccagtacagagccatcctgtggagaaagaccggcacccagaagatctgcctgccctacagccccaccaagaccctgagcgtgaagagcatcctgagcgccatgaacctggacaagttcgagaagggccccagagagatcttccaccccgagatccagaaggacctgctggtgctggaggagcaggagggcagcgtgaacttcaagttcggcgtgctgttcgccaaggacggccagctgaccgacgacgagatgttcagcaacgagatcggcagcgagcccttccagaagttcctgaacctgctgggcgacaccatcaccctgaagggctag

SEQ ID NO: 311115 - DNA, 807 bp, Artificial Sequence
  derived and/or modified sequence
atggatccccttacaaaggtcccctgcggtagtcaaattgctcagaccattctgtggaaagccaagtctagtctcagtttcggcatccagcctttacagacttggcccactaaggacccggaactggaaagccaggtgaatttatcagtatctgaggacttggggtgccggaggggggatttctcacgcaagcattatgggtctgttgaactgttgattagttccgacgcggacggggccatacagcgtgccggccgcttccgagtagaaaacggctcttctgacgagaacgccaccgccctcccagggacctggcgtagaacagatgtccacttagaaaacccagagtaccacactcgttggtatttcaagtacttcctgggccaggtccatcaaaattacattggaaacgacgcagagaaatcgccgttctttctgtcagtaacactgtcagaccaaaacaatcagcgggtgcctcaatacagggcgatcctttggcggaaaacagggacgcagaagatctgtctgccatactcgccaactaaaacactgtcagtgaaatctatcctgagcgcaatgaacttggataagtttgaaaaggggccgcgagaaatcttccaccccgagatccagaaggacctcctagtgctcgaggagcaagagggctccgtcaacttcaaattcggcgtgctgtttgccaaggacggacagctgactgacgacgagatgttttccaatgagattgggtctgagccgtttcagaaatttctgaatctgttaggagatacaattaccctgaagggctag

SEQ ID NO: 311116 - DNA, 807 bp, Artificial Sequence
  derived and/or modified sequence
atggatcctttgactaaggtgccgtgtgggagtcaaatcgcccagaccatactgtggaaggctaagagcagccttagtttcggtattcagccgttacagacctggccgacaaaggaccccgaactcgaaagccaggtgaacctgtccgtctccgaggacttagggtgcaggcggggagacttttcacggaaacactacggtagtgtggagttgctgatctcatctgatgccgacggggccatccaaagggctggaaggttcagagtggagaacggctccagcgacgagaatgccacagccctccctgggacttggcggcggacggacgtgcatctggagaacccagagtatcatacccggtggtactttaagtatttcctgggccaggtgcatcagaactatatcggaaacgacgcggaaaagtccccctttttcctgtctgtgaccctcagcgatcagaacaaccagagagtacctcaatacagggccatactatggcggaagacaggcacgcaaaagatctgtttaccttacagccctactaagaccctctccgtgaaaagcattttatcagcaatgaacctcgataagtttgaaaagggacctcgggagatcttccacccagaaatacagaaagacttactcgtcctcgaagaacaagagggtagtgttaatttcaaattcggcgtgcttttcgccaaggatggacagctgaccgacgatgagatgtttagcaatgagatcggcagtgagccatttcagaaattcctcaatctgctgggcgacaccattacgcttaaaggctag

SEQ ID NO: 311117 - DNA, 807 bp, Artificial Sequence
  derived and/or modified sequence
atggaccccctgaccaaggtgccctgtggcagccagatcgcccagaccatcctgtggaaggccaagagcagcctgagctttggcatccagcccctgcagacctggcccaccaaggaccctgagctggagagccaggtgaacctgtctgtgtctgaggacctgggctgcagaagaggagacttcagcaggaagcactacggctctgtggagctgctgatcagcagtgatgctgatggagccatccagagagctggccgcttccgggtggagaatggcagcagtgatgaaaatgccacagccctgcccggcacctggaggagaacagatgtgcacctggagaaccctgagtaccacacccgctggtacttcaagtacttcctgggccaggtgcaccagaactacatcggaaatgatgctgagaagagccccttcttcctgtctgtgaccctgagtgaccagaacaaccagagggtgccccagtaccgggccatcctgtggaggaagacaggcacccagaagatctgcctgccctacagccccaccaagaccctgtctgtgaagagcatcctgagcgccatgaacctggacaagtttgagaagggcccccgggagatcttccaccctgagatccagaaggacctgctggtgctggaggagcaggagggctctgtgaacttcaagtttggagtgctgtttgccaaggatggccagctgacagatgatgagatgttcagcaatgagatcggcagcgagcccttccagaagttcctgaacctgctgggggacaccatcaccctgaagggctag

SEQ ID NO: 311118 - DNA, 3404 bp, Artificial Sequence
  derived and/or modified sequence
atggacccgttaacgaaggtgccttgtgggagtcagatagcacaaaccattctatggaaagcaaagtcgtctctctccttcggcatccagccccttcagacatggccaacgaaagaccctgaactagagtcccaggtcaacctctctgtctcggaagacctaggctgtagacgtggggatttcagtaggaaacattatggatctgtggagctgcttatttccagtgatgctgatggagccatccaaagggctggaagattcagagtggaaaatggctcttcagatgagaatgcaactgccctgcctggtacttggcgaagaacagacgtgcacttagagaacccagaataccacaccagatggtatttcaaatattttttaggacaagtccatcagaactacattggaaacgatgccgagaagagccctttcttcttgtccgtgaccctttctgaccaaaacaatcaacgtgtccctcaataccgtgcaattctttggagaaaaacaggtacccagaaaatatgccttccctacagtcccacaaaaactctttctgtgaagtccatcttaagtgccatgaatctggacaaatttgagaaaggccccagggaaatttttcatcctgaaatacaaaaggacttgctggttcttgaagaacaagagggctctgtgaatttcaagtttggggttctttttgccaaagatgggcagctcactgatgatgagatgttcagcaatgaaattggaagcgagccttttcaaaaatttttaaatcttctgggtgacacaatcactctaaagggctggacgggctaccgtggcggtctggataccaaaaatgataccacagggatacattcagtttatactgtgtaccaagggcatgagatcatgtttcatgtttccaccatgttgccatattccaaagagaacaaacagcaggtggaaaggaaacgccacattggaaacgatatcgtcaccattgtgttccaagaaggagaggaatcttctcctgcctttaagccttccatgatccgctcccactttacacatatttttgccttagtgagatacaatcaacaaaatgacaattacaggctgaaaatattttcagaagagagcgtaccactctttggccctcccttgccaactccaccagtgtttacagaccaccaggaattcagggactttttgctagtgaaattaattaatggtgaaaaagccactttggaaaccccaacatttgcccagaaacgtcggcgtaccctggatatgttgattagatctttacaccaggatttgatgccagatttgcataagaacatgcttaatagacgatcttttagtgatgtcttaccagagtcacccaagtcagcgcggaagaaagaggaggcccgccaggcggagtttgttagaatagggcaggcactaaaactgaaatccattgtgagaggggatgctccatcaagcttggcagcttcagggatctgtaaaaaagagccgtgggagccccagtgtttctgcagtaatttccctcatgaagccgtgtgtgcagatccctggggccaggccttgctggtttccactgatgctggcgtcttgctagtggatgatgaccttccatcagtgcccgtgtttgacagaactctgccagtgaagcaaatgcatgtgcttgagaccctggaccttctggttctcagagcagacaaaggaaaagatgctcgcctctttgtcttcaggctaagtgctctgcaaaagggccttgaggggaagcaggctgggaagagcaggtctgactgcagagaaaacaagttggagaaaacaaaaggctgccacctgtatgctattaacactcaccacagcagagagctgaggattgtggttgcaattcggaataaactgcttctgatcacaagaaaacacaacaagccaagcggggtcaccagcacctcattgttatctcccctgtctgagtcacctgttgaagaattccagtacatcagggagatctgtctgtctgactctcccatggtgatgaccttagtggatgggccagctgaagagagtgacaatctcatctgtgtggcttatcgacaccaatttgatgtggtgaatgagagcacaggagaagccttcaggctgcaccacgtggaggccaacagggttaattttgttgcagctattgatgtgtacgaagatggagaagctggtttgctgttgtgttacaactacagttgcatctataaaaaggtttgcccctttaatggtggctcttttttggttcaaccttctgcgtcagatttccagttctgttggaaccaggctccctatgcaattgtctgtgctttcccgtatctcctggccttcaccaccgactccatggagatccgcctggtggtgaacgggaacctggtccacactgcagtcgtgccgcagctgcagctggtggcctccaggtcggatatatacttcacagcaactgcagctgtgaatgaggtctcatctggaggcagctccaagggggccagtgcccgaaattctcctcagacacccccgggccgagatactccagtatttccttcttccctgggggaaggtgaaattcaatcaaaaaatctgtacaagattccacttagaaacctcgtgggcagaagcatcgaacgacctctgaagtcacccttagtctccaaggtcatcaccccacccactcccatcagtgtgggccttgctgccattccagtcacgcactccttgtccctgtctcgcatggagatcaaagaaatagcaagcaggacccgcagggaactactgggcctctcggatgaaggtggacccaagtcagaaggagcgccaaaggccaaatcaaaaccccggaagcggttagaagaaagccaaggaggccccaagccaggggcagtgaggtcatctagcagtgacaggatcccatcaggctccttggaaagtgcttctacttccgaagccaaccctgaggggcactcagccagctctgaccaggaccctgtggcagacagagagggcagcccggtctccggcagcagccccttccagctcacggctttctccgatgaagacattatagacttgaagtaacagagttgaatctcatttgccatctttagttttcttatggaggtttatactctttaaacagttctgatgtaatttctcaacaaaatgtggcttttagcctgtcagtgatctattggaccaaaccttctgcacactcggccagttccctctccaatgtccggtgccatctttcctgacctttgtttctttctgttcaggaaccatcagtccccttgtaataaaggtggtagatttcattgaggttttagattgaaactttgaataaatcaaaaatactcattcttatttactgc

SEQ ID NO: 311119 - DNA, 807 bp, Artificial Sequence
  derived and/or modified sequence
atggaccccctgaccaaggtgccctgcggcagccagatcgcccagacaatactgtggaaggcaaagtcttcactcagtttcgggatacagccacttcagacatggcccacgaaagaccctgaacttgagagtcaggtaaacctctccgttagcgaagacctcggctgtcggcgcggtgatttttccagaaagcactacggtagcgtcgagctcctgattagtagtgacgccgacggtgcaatacaaagggctggccgattccgcgtcgagaacggctcaagtgatgagaatgcaacagcacttcccggaacatggcgcagaaccgatgtccacttagagaacccagagtatcataccaggtggtatttcaagtactttctggggcaagtgcaccagaattacatcggtaacgacgccgagaaatcccccttttttctgagcgtgacgctctcagatcagaataatcagcgggttccccagtacagagcgatcctgtggaggaagaccgggactcagaaaatctgtctcccttacagtccaacaaagactctatccgtaaaatctattctgagcgcgatgaacctagacaagtttgagaaaggccccagagagattttccatcccgaaatccagaaggatctgctggtgctcgaggaacaggagggcagtgtgaacttcaaatttggggtgctctttgccaaggacggacagctcaccgatgatgagatgttctcgaacgagatcgggtcagagcccttccagaagtttctcaacttgctgggtgacaccattactttaaagggatag

SEQ ID NO: 311120 - DNA, 807 bp, Artificial Sequence
  derived and/or modified sequence
atggaccccctgaccaaggtgccctgcggcagccagatcgcccagacaatcctgtggaaagccaaaagctctctgagctttggcattcagcccttgcagacatggcctactaaagaccccgaactggagagccaggtgaacctgagcgtttctgaagacctgggatgccggcggggggacttctcccgaaagcactatggaagcgtggaacttttgatttcaagcgatgccgatggtgccattcagagggcaggcagatttagagtcgaaaatggaagcagtgacgagaacgccacagccctacctggcacatggagacgcaccgatgttcatctggagaaccctgaatatcacacccgttggtactttaagtacttcctcggccaagtccatcagaattacatcgggaacgacgctgagaaaagtcctttcttcctctctgtgactctaagtgaccagaataatcagagggttccacagtaccgggccattctgtggcgcaaaacaggaacgcaaaagatttgtctcccttactctccaacaaagaccctgagcgttaagtcaatactttcagctatgaatttggacaagtttgagaaagggccccgtgagattttccatcccgagatccagaaagacctgctcgtgctggaagaacaggagggctccgtgaatttcaaattcggcgtcctgttcgccaaggatgggcagctgacagatgatgagatgtttagcaacgagattggttccgagccttttcagaaatttctgaatctgctgggcgacactattactctcaagggttag

SEQ ID NO: 311121 - DNA, 807 bp, Artificial Sequence
  derived and/or modified sequence
atggatcctttgaccaaggttccatgtgggtctcagatcgctcaaaccatactctggaaggcgaagtcttccttatcatttgggatccagccattgcaaacatggcctacgaaggatccagaacttgaatcccaagtaaatttgagcgtctctgaagatctgggatgtcgcaggggggacttttcgcgcaaacattacggcagcgtcgagctgctaataagctcagacgccgatggggcaatacagagagctggacgtttccgggtcgagaatggctccagcgacgagaatgcaactgcattgccgggtacatggagacgtacagatgtccacctcgagaacccggagtaccacacaagatggtatttcaagtattttctcggacaagtacatcagaattacatcgggaatgacgcagagaagagcccgttctttttgagcgtgacactttctgatcagaacaaccaaagagtgcctcaatatcgggcaatcctatggcgtaagacaggcacacagaagatttgccttccttacagccccactaaaacgctgtctgtaaaaagcatcctttcagccatgaacctggacaagtttgagaaaggacccagggagatcttccacccagagattcagaaggaccttttggtgctggaggaacaggagggtagcgtcaatttcaagtttggagtcctttttgccaaagacggtcagctgactgacgacgaaatgttcagtaatgagataggcagtgagccatttcagaaattcctaaaccttttgggcgatacaattactttaaaagggtag

SEQ ID NO: 311122 - DNA, 807 bp, Artificial Sequence
  derived and/or modified sequence
atggacccacttactaaggtcccatgtggctcgcaaattgcccaaaccatcctgtggaaggccaagtctagcctctctttcggcatccaaccccttcagacctggccgacgaaagatccggagctcgaatcccaggtcaatctttccgttagtgaggacctgggatgtcgcagaggcgacttttctcgaaaacactacggcagcgtggaattactgatcagctctgacgcagacggtgctatccagagggccggaaggttccgcgttgagaacggcagctctgatgagaacgctactgctctccctggaacttggaggcgcactgacgtccatttagagaacccagaatatcacacgcgatggtacttcaagtatttcttgggacaggttcatcagaactacatcggcaatgatgccgagaaatcaccctttttcctgtcggtgaccctgtctgaccagaataaccagcgggtcccacagtatagggcgatcctgtggcgcaagactggcacccagaagatctgtctgccttacagccctactaaaaccttgagtgtcaagtctattctcagcgcaatgaatctggacaaatttgagaaaggtccgagagaaatcttccaccctgagattcagaaagatctgcttgtgctcgaggagcaggagggaagcgtaaactttaagttcggcgtgcttttcgccaaagacggtcagcttacggacgacgagatgttttcaaacgagatcggcagcgaaccattccagaaattcctcaatctgctcggagatacaataactctgaagggatag

SEQ ID NO: 311123 - protein, 422 aa, Artificial Sequence
  derived and/or modified sequence
MLHLLALFLHCLPLASGDYDICKSWVTTDEGPTWEFYACQPKVMRLKDYVKVKVEPSGITCGDPPERFCSHENPYLCSNECDASNPDLAHPPRLMFDKEEEGLATYWQSITWSRYPSPLEANITLSWNKTVELTDDVVMTFEYGRPTVMVLEKSLDNGRTWQPYQFYAEDCMEAFGMSARRARDMSSSSAHRVLCTEEYSRWAGSKKEKHVRFEVRDRFAIFAGPDLRNMDNLYTRLESAKGLKEFFTLTDLRMRLLRPALGGTYVQRENLYKYFYAISNIEVIGRCKCNLHANLCSMREGSLQCECEHNTTGPDCGKCKKNFRTRSWRAGSYLPLPHGSPNACATAGSFGTLQTPPPGRSPSALRGSRRGLANVKEPAGSRPQISEMLLGCTVTLHQGSVGPHIPPKLSLPDPGGPWLGSQ

SEQ ID NO: 311124 - DNA, 1269 bp, Artificial Sequence
  derived and/or modified sequence
atgctgcacctgctggccctgttcctgcactgcctgcccctggccagcggcgactacgacatctgcaagagctgggtgaccaccgacgagggccccacctgggagttctacgcctgccagcccaaggtgatgagactgaaggactacgtgaaggtgaaggtggagcccagcggcatcacctgcggcgacccccccgagagattctgcagccacgagaacccctacctgtgcagcaacgagtgcgacgccagcaaccccgacctggcccacccccccagactgatgttcgacaaggaggaggagggcctggccacctactggcagagcatcacctggagcagataccccagccccctggaggccaacatcaccctgagctggaacaagaccgtggagctgaccgacgacgtggtgatgaccttcgagtacggcagacccaccgtgatggtgctggagaagagcctggacaacggcagaacctggcagccctaccagttctacgccgaggactgcatggaggccttcggcatgagcgccagaagagccagagacatgagcagcagcagcgcccacagagtgctgtgcaccgaggagtacagcagatgggccggcagcaagaaggagaagcacgtgagattcgaggtgagagacagattcgccatcttcgccggccccgacctgagaaacatggacaacctgtacaccagactggagagcgccaagggcctgaaggagttcttcaccctgaccgacctgagaatgagactgctgagacccgccctgggcggcacctacgtgcagagagagaacctgtacaagtacttctacgccatcagcaacatcgaggtgatcggcagatgcaagtgcaacctgcacgccaacctgtgcagcatgagagagggcagcctgcagtgcgagtgcgagcacaacaccaccggccccgactgcggcaagtgcaagaagaacttcagaaccagaagctggagagccggcagctacctgcccctgccccacggcagccccaacgcctgcgccaccgccggcagcttcggcaccctgcagacccccccccccggcagaagccccagcgccctgagaggcagcagaagaggcctggccaacgtgaaggagcccgccggcagcagaccccagatcagcgagatgctgctgggctgcaccgtgaccctgcaccagggcagcgtgggcccccacatcccccccaagctgagcctgcccgaccccggcggcccctggctgggcagccagtag

SEQ ID NO: 311125 - DNA, 1269 bp, Artificial Sequence
  derived and/or modified sequence
atgctgcatttgctggccctgttcctgcattgcctgccgctagcatcaggtgactacgacatctgtaaatcctgggtgactactgacgaagggccaacatgggagttctatgcttgccagccaaaggtcatgcgcctgaaagactacgtgaaggttaaagtggagccctcgggaatcacatgcggtgaccctcccgaacggttttgttcccatgaaaacccttatctttgcagtaacgagtgtgatgcaagtaatccagacttggcccaccccccacgtctgatgtttgataaggaagaggaaggattagccacatactggcagtcaatcacttggagtcgttacccttctcccctggaagctaacatcactttatcatggaacaagaccgtggagctgacagatgacgtggtgatgacttttgaatatgggcgccctacagtgatggtgctggaaaaatctttagacaacggcagaacctggcaaccctatcagttttacgcagaggattgcatggaagcttttggaatgtccgctagaagggctcgagacatgagcagttcttctgcccatcgggtcctttgcacagaagaatatagcaggtgggccgggtccaagaaggaaaagcacgtgcgttttgaggtgagggaccgcttcgccatcttcgctggaccggaccttagaaacatggacaatttatatacacgccttgaatctgccaagggactgaaggagttcttcactcttacagatctgcggatgcggctccttagaccggcactgggcggaacttatgtccaacgcgaaaatctgtataagtatttttacgccatttcgaacattgaagttatcgggcggtgcaagtgcaaccttcacgccaacctttgttccatgcgggaagggagtttgcaatgtgaatgcgaacataacacgaccggaccagactgtggcaagtgcaagaaaaatttccgaacgagaagttggcgcgctggtagttatctgcccctcccccacgggtcccccaatgcgtgcgcgaccgcaggtagttttggcactctgcagaccccccctcccggccggtccccctcagccctgagaggctcgcgccggggacttgccaacgtgaaagagccggcggggtcacgccctcagatttcagagatgttactggggtgtacagtaaccttgcatcaggggtcagtgggaccacatataccgcccaagctgagtctgccagaccccggaggaccttggttaggtagccagtag

SEQ ID NO: 311126 - DNA, 1269 bp, Artificial Sequence
  derived and/or modified sequence
atgctgcacctgctggccctcttcctgcactgcctgcccctggccagcggggactatgacatctgcaagtcctgggtgaccacagatgagggccccacctgggagttctacgcctgccagcccaaggtgatgaggctgaaggactatgtgaaggtgaaggtggagcccagcggcatcacctgtggggaccccccagagcgcttctgcagccatgagaacccctacctgtgcagcaatgaatgtgatgccagcaacccagacctggcccaccccccccggctgatgtttgacaaggaggaggagggcctggccacctactggcagagcatcacctggagccgctaccccagccccctggaggccaacatcaccctgtcctggaacaagacagtggagctgacagatgatgtggtgatgacctttgaatatggccggcccaccgtgatggtgctggagaagagcctggacaatggaagaacctggcagccctaccagttctatgcagaggactgcatggaggccttcggcatgtctgcccggcgggcccgggacatgagcagcagcagcgcccaccgggtgctgtgcacagaggagtacagccgctgggccggcagcaagaaggagaagcacgtgcgctttgaggtgcgggacagatttgccatctttgctggccctgacctgaggaacatggacaacctgtacacccggctggagagcgccaagggcctgaaggagttcttcaccctgacagacctgaggatgaggctgctgcggcctgccctgggcggcacctacgtgcagagagaaaatctctacaagtacttctacgccatcagcaacattgaagtcatcggccgctgcaagtgcaacctgcacgccaacctgtgcagcatgagggagggcagcctgcagtgtgaatgtgagcacaacaccaccggccctgactgtgggaagtgcaagaagaacttccgcaccaggtcctggagggctggcagctacctgcccctgccccacggcagccccaatgcctgtgccacagctggcagctttggcaccctgcagaccccacctcctggccgcagccccagcgccctgcggggcagcagaagaggcctggccaacgtgaaggagcctgctggcagccggccccagatcagcgagatgctgctgggctgcaccgtgaccctgcaccagggctctgtgggcccccacatcccccccaagctgagcctgcctgaccccggcggcccctggctgggcagccagtag

SEQ ID NO: 311127 - DNA, 2045 bp, Artificial Sequence
  derived and/or modified sequence
cgctcagcccgggcgggcgatgcgggcggcgcgggcggccccctcccccggcccgcgtctccgggacggctgcgggcggcccccccggcggccggagggctccctggccccgatctgacggcggcggcggcggcggccacagcggcgggagcggcgcggggaaggagcagcggctcgcagccctcggcccgcgcccccacccagcgccagcccgaggggggaggcgcagcgccggagggtggcggtcctcggccctcccaggtctccgcgccgggaagccgctccgagccggggctggagggttgttttgccgttgtgttgagcacgtcacccattaagagccctttaaagacctggattgattggaaggacaaaaattaaaagcaatctgatccagcctcatgcaggatccctgcggattttctccttatcccatttccatccactgtcacaatttgagaatctgcctgatttgatcagattcacctccaggggaggtgtgataccagggttaggaggacgtgaagttatgggcaactttctgatctgtccatcagcagtctgagaaacgctggctctgaattttccgtgtcggccttttggaaacaacaagttcctcgctgtttgcaaagcttcagtgctcgggtccctgggacaccccggccaccctcgcctggtagatgtggcatttccatgctgaggccgcgagtcccgcctgaccccgtcgctgcctctccagggcttctctgggccgcgcctctgcagactgcgcagccatgctgcatctgctggcgctcttcctgcactgcctccctctggcctctggggactatgacatctgcaaatcctgggtgaccacagatgagggccccacctgggagttctacgcctgccagcccaaggtgatgcgcctgaaggactacgtcaaggtgaaggtggagccctcaggcatcacatgtggagacccccctgagaggttctgctcccatgagaatccctacctatgcagcaacgagtgtgacgcctccaacccggacctggcccacccgcccaggctcatgttcgacaaggaggaggagggcctggccacctactggcagagcatcacctggagccgctaccccagcccgctggaagccaacatcaccctttcgtggaacaagaccgtggagctgaccgacgacgtggtgatgaccttcgagtacggccggcccacggtcatggtcctggagaagtccctggacaacgggcgcacctggcagccctaccagttctacgccgaggactgcatggaggccttcggtatgtccgcccgccgggcccgcgacatgtcatcctccagcgcgcaccgcgtgctctgcaccgaggagtactcgcgctgggcaggctccaagaaggagaagcacgtgcgcttcgaggtgcgggaccgcttcgccatctttgccggccccgacctgcgcaacatggacaacctctacacgcggctggagagcgccaagggcctcaaggagttcttcaccctcaccgacctgcgcatgcggctgctgcgcccggcgctgggcggcacctatgtgcagcgggagaacctctacaagtacttctacgccatctccaacatcgaggtcatcggcaggtgcaagtgcaacctgcacgccaacctgtgctccatgcgcgagggcagcctgcagtgcgagtgcgagcacaacaccaccggccccgactgcggcaagtgcaagaagaatttccgcacccggtcctggcgggccggctcctacctgccgctgccccatggctctcccaacgcctgtgccactgcaggttcctttggcaccttgcaaacccctccccctgggaggtcgccatctgctctgcgaggcagcaggagaggactggccaatgtcaaagagccagccgggagcagaccccaaatctcagagatgcttctggggtgcaccgtcaccctccaccagggctctgtggggccccacatcccacccaagttgtccctcccggacccagggggcccctggctgggaagccagtga

SEQ ID NO: 311128 - DNA, 1269 bp, Artificial Sequence
  derived and/or modified sequence
atgctgcacctgctggccctgttcctgcactgcctgcccctggccagcggtgactatgatatttgcaagtcttgggtgacgaccgatgaaggccctacttgggaattctacgcatgccagcctaaggttatgcgtctgaaagattatgtaaaagtcaaggtggagccttccggtatcacctgcggagaccccccggaacggttttgttctcacgagaatccctatctgtgctcgaacgagtgtgacgcttctaatcccgatctggcacatcctccccgcttgatgttcgacaaggaggaggagggtttggccacttattggcagagcataacgtggtcccggtacccatcccccctggaggctaatatcacgctgtcctggaataagaccgtggaactgaccgatgacgtcgtgatgaccttcgaatacggccgccctacggtaatggtcttggaaaagagccttgacaacgggcgaacatggcagccctatcagttctacgccgaggattgcatggaggcttttggcatgtccgcccgcagagccagagacatgagttccagtagtgcacacagggttctgtgtacggaggaatacagccgctgggccgggtcgaaaaaagaaaagcacgttagattcgaggtccgcgaccgctttgccattttcgccggccctgacctccgcaatatggataatctgtacactaggctcgaatcggccaaaggcctgaaagagttcttcactttaactgatttgcgcatgagactgctgagacccgcactggggggcacctacgttcagcgcgagaacctgtacaaatacttttacgcaatcagcaacatcgaggtaatcggtaggtgtaagtgcaatctccacgccaatctgtgttccatgagggaggggtccctgcagtgtgagtgcgaacacaataccaccggtcctgactgtggtaaatgcaaaaaaaatttccggacaaggtcatggagagccggatcgtacctgccgcttccacacggatctcccaacgcctgcgccacggcgggaagctttggtaccctgcagacccctccccctgggaggtcaccctctgccctccgaggctctcgtagggggttggctaacgtcaaggagccagccggatccagaccacagatctctgagatgctgcttggctgcacagtgacattacaccagggttcagtcggtccgcacatcccacctaaactttctcttcctgacccgggtggcccttggttaggatcccagtag

SEQ ID NO: 311129 - DNA, 1269 bp, Artificial Sequence
  derived and/or modified sequence
atgctacacctattggccttgtttctacattgtctgccactggcatccggagactacgatatttgtaaaagttgggtgaccaccgacgagggaccgacatgggagttctacgcctgccagcctaaagtgatgagactcaaggattatgtcaaagtcaaggtggaaccaagcgggataacctgcggggacccacctgagcggttttgttcccacgaaaatccttatctctgtagcaacgagtgtgatgccagcaaccctgatctcgcccatccgcctaggttaatgtttgataaagaggaggaagggctcgctacatattggcagtccattacttggtccagatacccttcccctttagaggctaatatcacattatcttggaacaaaaccgttgaattgacagacgacgtagttatgacattcgaatacggacggcctacagttatggtactggagaagtcattggacaacggtagaacatggcagccatatcagttctatgccgaggactgcatggaagctttcggtatgagcgcgagacgagctcgagacatgtcgtcatcttccgctcatcgagttctgtgcactgaagagtacagtagatgggctggttccaaaaaagagaagcacgtgcgctttgaggtcagagatagattcgccatattcgcgggacctgacctgcgcaatatggataacctatatacgcgactggaatcagctaagggattgaaggagtttttcaccttgacagacctgagaatgagactgctccgccctgctctgggaggcacatatgtgcaaagggagaacctgtacaagtacttctacgccatcagcaatattgaagtaatagggagatgtaaatgcaatctccatgcaaacctgtgttcaatgagggagggatccctgcagtgcgagtgtgaacataataccacagggccagattgtgggaaatgcaaaaagaacttccgcacacgttcctggcgggctggatcctatttgcctcttccccatggttctcccaacgcttgcgcgaccgcagggtcatttggcactctacagacaccgcctccagggaggtctccctctgccctgcgtggcagtagaaggggactcgctaatgtaaaggagccggcagggagcaggccccaaataagtgagatgctgctgggatgcactgtaacactccaccaaggaagtgtaggccctcatattccgccaaaattgagtctgcccgatcccggtggcccatggctgggatcccaatag

SEQ ID NO: 311130 - DNA, 633 bp, Artificial Sequence
  derived and/or modified sequence
atggccccctgggccctgctgagccccggcgtgctggtgagaaccggccacaccgtgctgacctggggcatcaccctggtgctgttcctgcacgacaccgacaagagcgccgacgagctgctggccacccacagccacagctggaaccagcacctgcaggccttcgcccagcccggcacccacttccccaccagcaactgcacccccaccccccccacccccgtgctgcccggccccgccagcctgtgcagccccgccagccccgagctgagacagtgggaggagcagggcgagctgctgctgcccctgaccttcctgctgctggtgctgggcagcctgctgctgtacctggccgtgagcctgatggaccccggctacgtgaacgtgcagccccagccccaggaggagctgaaggaggagcagaccgccatggtgccccccgccatccccctgagaagatgcagatactgcctggtgctgcagcccctgagagccagacactgcagagagtgcagaagatgcgtgagaagatacgaccaccactgcccctggatggagaactgcgtgggcgagagaaaccaccccctgttcgtggtgtacctggccctgcagctggtggtgctgctgtggtag

SEQ ID NO: 311131 - DNA, 633 bp, Artificial Sequence
  derived and/or modified sequence
atggctccatgggcgcttctatctcccggagtcttagtgcgcactggtcacactgtgctgacctggggtatcacactagtgctttttctgcacgacacagacaagtccgccgacgagctcctcgcgactcactcccactcatggaatcagcatctgcaggcattcgcccagcccgggacacactttcccacatcgaactgtaccccgactccacccacaccggtgttacctggccctgccagcctgtgcagccccgctagcccagagctcagacagtgggaggagcagggcgagttactgttaccattgacattcttattgcttgtgttgggcagcttattgctgtacttagctgtgagcctgatggaccccggctatgtgaatgtccagccccagccacaagaagagctgaaagaggaacagaccgctatggttccaccagcgattccgcttcggcggtgtcgctattgtcttgtgctgcaacctctgagggcacgccactgtcgggagtgcagacggtgtgtcaggaggtatgatcatcattgtccttggatggaaaactgtgtaggcgaaagaaatcatccactgtttgtggtctacctcgccctccagctggtggtattgctctggtag

SEQ ID NO: 311132 - DNA, 633 bp, Artificial Sequence
  derived and/or modified sequence
atggccccctgggccctgctgagccctggggtgctggtgaggacaggccacacagtgctgacctggggcatcaccctggtgctcttcctgcatgacacagacaagtctgcagatgagctgctggccacccacagccacagctggaaccagcacctgcaggcctttgcccagcccggcacccacttccccaccagcaactgcacccccaccccacccacccctgtgctgcccggccctgccagcctgtgcagccctgccagccctgagctgcggcagtgggaggagcagggcgagctgctgctgcccctgaccttcctgctgctggtgctgggcagcctgctgctgtacctggccgtgtccctgatggaccccggctacgtgaatgtgcagccccagccccaggaggagctgaaggaggagcagacagccatggtgcccccagccatccccctgcggcgctgccgctactgcctggtgctgcagcccctgcgggcccggcactgccgggagtgccgccgctgtgtgcggcgctatgaccaccactgcccctggatggagaactgtgtgggggagaggaaccaccccctgtttgtggtgtacctggccctgcagctggtggtgctgctgtggtag

SEQ ID NO: 311133 - DNA, 633 bp, Artificial Sequence
  derived and/or modified sequence
atggccccctgggccctgctgagccccggcgtgctggtgcggaccggccatacagtactgacttggggcatcaccctcgtactgttcttacatgacaccgataagagtgcagacgagcttctggcaacccactcccattcatggaaccagcacctgcaagccttcgcccagccaggcactcacttcccgacatccaactgcacccccactccccccacgccggtcttgcccggtcccgcctctctgtgctcccctgcctcccccgaacttagacagtgggaagaacagggggagctcttgctcccactgacctttctactgctggtactgggcagcttgttgttgtacctggcagtgtcactcatggaccccggctatgtcaacgtccaaccccaacctcaggaagagttaaaggaagagcagacagccatggtgccacccgcaatccccctccggcgatgtcgatactgtttggtcttacagccgctgcgagcaaggcattgccgcgagtgcaggcggtgcgtccggagatatgaccatcactgcccctggatggaaaactgtgttggggaaagaaatcatcctcttttcgtcgtctatctcgccctgcagctggtggttttgctgtggtag

SEQ ID NO: 311134 - DNA, 633 bp, Artificial Sequence
  derived and/or modified sequence
atggcaccctgggccttactctccccgggtgtcctggttcggacaggccacaccgttctgacatggggcattactctggtgttgtttctccacgatacagacaagtcagccgatgaactcctagccacacattcacattcatggaaccagcacctccaagcatttgcacagcccggtacccattttcccacctctaattgcacccccactccaccaactcctgtcctccccggacccgcttccctttgctccccagctagtcctgaactgcgacagtgggaggaacagggagagctgctgcttcccctgacctttcttctactagtattgggcagcctgttactgtatctggccgtcagcttgatggatcccggatacgtgaatgtgcaaccccagccacaagaggagctgaaggaggagcagacagcaatggtcccaccagccattcccctccggagatgcagatattgcctggtgctacagcccttgcgcgctcgccattgccgcgaatgtagacggtgcgtgaggaggtatgatcaccattgcccttggatggagaactgcgttggcgaaaggaatcatcctctattcgtggtctatctggccctacaactggtagtcctgctctggtag

SEQ ID NO: 311135 - DNA, 646 bp, Artificial Sequence
  derived and/or modified sequence
gccccgggccgaggcgatggcgccctgggcgctcctcagccctggggtcctggtgcggaccgggcacaccgtgctgacctggggaatcacgctggtgctcttcctgcacgataccgataaaagtgcagatgaactgctggccacacacagccactcatggaaccaacatctccaggcctttgctcagccaggaacacacttccccacctccaactgcaccccaaccccacccactcctgttctacccggcccagcctcactgtgctctccggcctctccagagctgcggcaatgggaggagcagggggagctgctcctgcccctcaccttcctgctcctggtgctgggctccctgctgctctacctcgctgtgtcactcatggaccctggctacgtgaatgtgcagccccagcctcaggaggagctcaaagaggagcagacagccatggttcctccagccatccctcttcggcgctgcagatactgcctggtgctgcagcccctgagggctcggcactgccgtgagtgccgccgttgcgtccgccgctacgaccaccactgcccctggatggagaactgtgtgggagagcgcaaccacccactctttgtggtctacctggcgctgcagctggtggtgcttctgtgg

SEQ ID NO: 311136 - DNA, 507 bp, Artificial Sequence
  derived and/or modified sequence
atgagcaaacgaaagtggaggggatttaggggggcacaacaggagagagcccagcccccagctgccagtccccagccctgtcctgcccctcacgccggacttcctggaggctctcgcagacgggcaccggcacccgctggacagcagcagatgagagccgagtcccgtagcggagcacagagacgcagggggtctgccagaaggggggcacatcgggaagccggaggctgtgtgcggggtaggacacgttctagtggcagtgagaggtctaatgccctgtggcaggccgtggatgccgcagaagcacttgctctctctagcccgctacgacgcccatgggatcaggcccagcacttcacaaaccccgctccattctccaaaggacctcagtctgctccaccttcgccccctgccggtcgtcggagaaggggcgctgatcttgccttgactccgctggccggtgaaggtcatactcgatggcgccagccaggaagacctggcaaatag

SEQ ID NO: 311137 - DNA, 507 bp, Artificial Sequence
  derived and/or modified sequence
atggaggagcagctggtgctgaagggcggccagcacccccaccagcctgtctggcacgatggacgcgccgtggccggccagcctctgcatccccactgggccccccagccccgtccccggggctcactggggcagcacctgctccgaggatcactgctggctgagagtttacagccactgagtgccggtcaggtgtgcagtcgcaaaccgcggtccaggttgcgcaaatgcccatcccggagtctaagaagtgagcctatttccgtgccaactctttggacaggccacgccgagagggggcagtgccccctgcttccacctgccccaacccatggccccttgttagacgactgttattcattcttcaggcgtctaggccttagtcaggtcaagccttttgtaccccgactgcatctcaaagggtgtcgtctagcctgggaaagtttgtttcaggtgttgacctgccggcagtgtagtctgacaggccctagccagctcctgaactag

SEQ ID NO: 311138 - protein, 164 aa, Artificial Sequence
  derived and/or modified sequence
MQVHYLKGYFLLRFLAKRLGDETYFSFLRKFVHTFHGQLILSQDFLQMLLENIPEEKRLELSVENIYQDWLESSGIPKPLQRERRAGAECGLARQVRAEVTKWIGVNRRPRKRKRREKEEVFEKTLNWSHLRNRERRRKKWITFKTLGGILFTVKQMRNLFAQV

SEQ ID NO: 311139 - DNA, 1584 bp, Artificial Sequence
  derived and/or modified sequence
ctctttgacactgacacttggagcttgcagataaggaagacaggggctcagacagctactgactttcctcatgctatcaggatatggtacaaaactaaacctgaagggcgatcggttacatggacctcagaccagagtggcaggccatgtgtttatactgtgggatctcccataaacaacagggccctttttccatgccaggagccacccgttgccatgtcaacatggcaggctacagttcgagcagctgcatcttttgttgttttaatgagtggggaaaattctgccaaaccaacgcagctttgggaagagtgctcaagctggtattactatgtaactatgccaatgccagcctccaccttcacaattgcagtgggatgctggacagaaatgaagatggagacatggtcatcaaatgatttggcaacagagagacccttctcaccttctgaggccaacttcaggcatgttggtgtttgcagtcacatggaatacccctgccgcttccagaatgcttctgccaccacccaggagatcattcctcatcgggtctttgcccctgtgtgcctcacgggtgcctgccaagagacccttctgcggctgatccctccttgcctctcagcagcacattctgttctgggagcacacccgttctctcggctggatgttctcatcgtccctgccaactttccaagtctggggatggccagcccacacatcatgttcctctctcagagcatcttgacaggagggaaccatctctgtgggacccgcctctgccatgaaattgcccatgcctggtttggcctagccatcggggcccgagactggacggaggagtggctgagtgaaggcttcgccactcacttggaggatgtgttttgggccacagcacagcagctggccccctatgaggcccgggagcagcaggagctgagggcttgtctgcgctggcgtcgcctccaggacgagatgcaatgctcccccgaggagatgcaggtgttaagacccagtaaagacaaaactggccacacaagtgactcgggagcatctgttatcaagcatggacttaatccggagaagatcttcatgcaggtgcattatttaaagggctacttccttcttcggtttcttgccaaaagacttggagatgaaacctatttttcatttttaagaaaatttgtgcacacatttcatggacagctgattctttcccaggatttccttcaaatgctactggagaacattccagaagaaaaaaggcttgagctgtctgttgaaaacatctaccaagactggcttgagagttccggaataccaaagccgctgcagagggagcgtcgcgccggggcggagtgcgggcttgcgcggcaagtgcgcgccgaggtcacgaaatggattggagtgaaccggagaccccgaaaacggaagcgcagggagaaggaagaggtgtttgaaaagactttaaattggagtcatctaagaaatagagagagaagaagaaagaagtggattacttttaaaacactaggaggaattttatttactgtaaagcagatgagaaatttgtttgcccaagtttag

SEQ ID NO: 311140 - DNA, 495 bp, Artificial Sequence
  derived and/or modified sequence
atgcaggtgcactacctgaagggctacttcctgctgagattcctggccaagagactgggcgacgagacctacttcagcttcctgagaaagttcgtgcacaccttccacggccagctgatcctgagccaggacttcctgcagatgctgctggagaacatccccgaggagaagagactggagctgagcgtggagaacatctaccaggactggctggagagcagcggcatccccaagcccctgcagagagagagaagagccggcgccgagtgcggcctggccagacaggtgagagccgaggtgaccaagtggatcggcgtgaacagaagacccagaaagagaaagagaagagagaaggaggaggtgttcgagaagaccctgaactggagccacctgagaaacagagagagaagaagaaagaagtggatcaccttcaagaccctgggcggcatcctgttcaccgtgaagcagatgagaaacctgttcgcccaggtgtag

SEQ ID NO: 311141 - DNA, 438 bp, Artificial Sequence
  derived and/or modified sequence
tgagacgagacctacttcagcttcctgagaaagttcgtgcacaccttccacggccagctgatcctgagccaggacttcctgcagatgctgctggagaacatccccgaggagaagagactggagctgagcgtggagaacatctaccaggactggctggagagcagcggcatccccaagcccctgcagagagagagaagagccggcgccgagtgcggcctggccagacaggtgagagccgaggtgaccaagtggatcggcgtgaacagaagacccagaaagagaaagagaagagagaaggaggaggtgttcgagaagaccctgaactggagccacctgagaaacagagagagaagaagaaagaagtggatcaccttcaagaccctgggcggcatcctgttcaccgtgaagcagatgagaaacctgttcgcccaggtgtag

SEQ ID NO: 311142 - DNA, 514 bp, Artificial Sequence
  derived and/or modified sequence
agatgaaacctatttttcatttttaagaaaatttgtgcacacatttcatggacagctgattctttcccaggatttccttcaaatgctactggagaacattccagaagaaaaaaggcttgagctgtctgttgaaaacatctaccaagactggcttgagagttccggaataccaaagccgctgcagagggagcgtcgcgccggggcggagtgcgggcttgcgcggcaagtgcgcgccgaggtcacgaaatggattggagtgaaccggagaccccgaaaacggaagcgcagggagaaggaagaggtgtttgaaaagactttaaattggagtcatctaagaaatagagagagaagaagaaagaagtggattacttttaaaacactaggaggaattttatttactgtaaagcagatgagaaatttgtttgcccaagtttagaatttcagtatgttactttgcagaagtttggactgcctgtcttttgattttgtattaaaacttgatttgtcattgtaa

SEQ ID NO: 311143 - DNA, 495 bp, Artificial Sequence
  derived and/or modified sequence
atgcaggttcattatctgaaggggtatttcctgttgcgtttcctagccaaacgcctgggggacgaaacctactttagtttcctgcggaaattcgtccacacgttccacggccagctgatcctgagtcaggatttcttacagatgctgttggaaaatatcccagaagagaaaagattagaactgtccgtggaaaatatatatcaggactggctcgaaagtagcgggatccccaaaccactgcagagggagagacgcgcaggcgcggagtgtgggttggcacgccaggttcgggccgaggtcaccaagtggatcggcgtgaataggcggcccaggaaacgcaaacgaagggagaaggaggaggtgttcgaaaagacacttaactggtcccatttgcggaatcgagaacggagaaggaagaaatggattacatttaagactctcggcggaatcctgtttaccgtcaagcaaatgcgtaacctcttcgctcaggtgtag

SEQ ID NO: 311144 - DNA, 438 bp, Artificial Sequence
  derived and/or modified sequence
tgagatgagacatacttctcttttctccgaaaattcgtgcacacatttcatggccaactgatactgagccaagacttcctgcaaatgctgctggagaatatcccggaggagaagaggctggagctgagcgttgaaaacatctatcaggactggctggaatctagcggcatccctaaacccctacagagggagcggcgagccggtgcggaatgtgggctggctcggcaagtgcgcgcggaggtcactaaatggattggcgttaatcggagaccacgaaagaggaagcggagggaaaaggaggaagtgtttgaaaaaaccctcaactggtctcacctgaggaatcgtgagcggcggcggaagaaatggataacctttaaaaccctgggcggcatactgtttacggtcaaacagatgcggaacctgtttgctcaggtgtag

SEQ ID NO: 311145 - DNA, 495 bp, Artificial Sequence
  derived and/or modified sequence
atgcaggtgcactacctgaagggctacttcctgctgcgcttcctggccaagaggctgggagatgagacctacttctccttcctgaggaagtttgtgcacaccttccacggccagctgatcctgagccaggacttcctgcagatgctgctggagaacatccctgaggagaagaggctggagctgtctgtggagaacatctaccaggactggctggagagcagcggcatccccaagcccctgcagcgggagcggcgggccggggctgaatgtggcctggcccggcaggtgcgggcagaggtgaccaagtggattggagtgaacagaagacccaggaagaggaagagaagagagaaggaggaggtgtttgagaagaccctgaactggagccacctgaggaaccgggagaggaggaggaagaagtggatcaccttcaagaccctgggcggcatcctcttcaccgtgaagcagatgaggaacctgtttgcccaggtgtag

SEQ ID NO: 311146 - DNA, 438 bp, Artificial Sequence
  derived and/or modified sequence
tgagatgagacctacttctccttcctgaggaagtttgtgcacaccttccacggccagctgatcctgagccaggacttcctgcagatgctgctggagaacatccctgaggagaagaggctggagctgtctgtggagaacatctaccaggactggctggagagcagcggcatccccaagcccctgcagcgggagaggagagctggagcagaatgtggcctggcccggcaggtgcgggcagaggtgaccaagtggattggagtgaacagaagacccaggaagaggaagaggcgggagaaggaggaggtgtttgagaagaccctgaactggagccacctgaggaaccgggagaggaggaggaagaagtggatcaccttcaagaccctgggcggcatcctcttcaccgtgaagcagatgaggaacctgtttgcccaggtgtag

SEQ ID NO: 311147 - DNA, 495 bp, Artificial Sequence
  derived and/or modified sequence
atgcaggtgcactacctgaagggctacttcctgctgcggttcctggccaagcgcctgggcgacgaaacctacttcagttttctacgtaagttcgtccacacattccacggccagctgattctgagtcaggatttcttacagatgctgctcgaaaacattccagaggaaaaaaggctggaactcagcgtcgaaaacatataccaagactggttggaatcctcaggaatccctaagccgttacaacgcgagcggagagccggagcagagtgtggcctagcaagacaagtgcgtgctgaggtcacaaagtggattggtgttaacaggcggccccggaagcgcaagcgaagagagaaagaagaggtgtttgagaaaacgctaaactggagccatctgcgcaatcgggaaagacggcgtaaaaagtggatcacttttaagactcttggaggcattctctttacggtgaagcagatgcggaacctgtttgctcaagtgtag

SEQ ID NO: 311148 - DNA, 438 bp, Artificial Sequence
  derived and/or modified sequence
tgagacgagacctacttcagcttcctgcggaagttcgtgcacacctttcacggacagctcatcctgtcccaggattttctgcaaatgctgcttgagaatatcccagaggaaaagcggcttgagctatccgtggaaaacatttaccaggattggctcgagtcctcaggaatcccgaaacctctgcaaagggagcgacgcgccggtgcagaatgcggactggccagacaggtgagggccgaggttactaagtggattggggttaaccgaaggccccggaaaagaaagagaagggagaaggaagaggttttcgaaaagacactaaattggagtcacttaaggaacagggaacggaggagaaaaaagtggattacgttcaaaacattgggggggatactctttacagtgaagcagatgcgtaacctgttcgcgcaggtctag

SEQ ID NO: 311149 - DNA, 495 bp, Artificial Sequence
  derived and/or modified sequence
atgcaagtgcattacctaaaagggtattttttactccgctttttggctaaacggctcggagatgaaacctactttagcttccttcgaaagttcgtacacactttccacgggcagctaatactgtcccaggatttcctgcagatgctcctcgagaatattcctgaggagaaacgtctggagctgagtgtcgaaaatatataccaggattggctcgagtctagcggaatcccaaagccgttgcagagggaaaggcgcgcaggcgctgagtgcggactggctcggcaggtgcgcgctgaggttaccaagtggattggcgtcaacaggcggcctcgtaagcgaaagaggcgagaaaaggaggaggttttcgaaaagacattgaactggtcacacctgaggaatcgcgaacggagaagaaaaaaatggataacattcaaaacgctgggagggattctgtttactgtcaaacaaatgcgcaacctgtttgcacaagtgtag

SEQ ID NO: 311150 - DNA, 438 bp, Artificial Sequence
  derived and/or modified sequence
tgagacgagacatatttcagcttcctgagaaagtttgtgcatacgtttcacggacagcttattttatcccaggacttcttacaaatgctgctcgaaaacattcccgaagaaaagagactcgagctgtcagtcgaaaatatctatcaggactggttggaaagcagcggaatccccaaacccctacaacgtgaacgaagagccggagccgagtgtggcttggccaggcaggtgagagccgaggtgactaaatggattggcgtgaatcggagacccaggaagaggaagcggagagaaaaagaggaagtgttcgagaaaactctgaactggagccatctgaggaacagagagcgacggcgaaaaaagtggataacatttaaaactctcggaggcatactgtttaccgtgaaacagatgcgaaaccttttcgcgcaagtgtag

SEQ ID NO: 311151 - DNA, 423 bp, Artificial Sequence
  derived and/or modified sequence
agcagcaagtactgctgcgacaccggcaaccacggcagcgaggacttcctgctggtgctggactgctgcgacctgagcgtgctgaaggtggaggaggtggacgtggccgccgtgcccggcctggagaagttcaccagaagccccgagctgaccgtggtgagcgaggagttcagaaaccagatcgtgagagagctggtgaccctgcccgccaacagatggagagagcagctggactactacgccagatgcagccaggcccccggctgcggcgagctgctgttcgacaccgacacctggagcctgcagatcagaaagaccggcgcccagaccgccaccgacttcccccacgccatcagaatctggtacaagaccaagcccgagggcagaagcgtgacctggaccagcgaccagagcggcagatag

SEQ ID NO: 311152 - DNA, 704 bp, Artificial Sequence
  derived and/or modified sequence
agctcaaagtactgctgtgacacagggaatcatgggagtgaggattttttgctagtgttggactgctgtgatttatctgtgttaaaagtcgaggaggtggatgttgctgctgtgccaggtctggaaaaatttacaaggtctcctgagctcacggttgtttctgaggagttcaggaatcagattgtacgtgaacttgtgactttgcctgcaaatcgttggagggagcagttagactattacgctcgctgcagccaggctcctggctgtggggaactcctctttgacactgacacttggagcttgcagataaggaagacaggggctcagacagctactgactttcctcatgctatcaggatatggtacaaaactaaacctgaagggcgatcggttacatggacctcagaccagagtggcaggtaagaaaataaaatgactggaagcttctagataaatctgtatctcaagtgagaaagagaatgactttttttgaatttgatcttcacgtcacttactgtatgcaaagctttcaagtatatttaaaacataaatttattatgttagctttcaataaatttctttttttaaattagacaaatataagaaaatctgtaaattggtaccttttcttttaagttccattagtggcttccccatttcccacctgtactgtatcccagctgagaataaaacttgtatcaaaa

SEQ ID NO: 311153 - DNA, 423 bp, Artificial Sequence
  derived and/or modified sequence
tcctccaagtattgttgtgacactgggaatcacggcagtgaggacttcctgttggttttagattgttgtgatctgagtgtcctcaaggttgaagaggtggatgtggcggccgttccaggattagaaaaattcacacgcagccctgaattaacggtagtgtctgaggaatttcggaatcaaattgtgcgcgaactggtcacgttacccgcaaatcggtggcgtgagcaactggattactacgcaaggtgtagccaggctcccggttgcggagaacttttattcgacacagatacttggagcttgcagatccgcaagactggagctcagaccgctacagattttccgcacgcaattcgaatttggtataagacaaaacccgaggggcgctccgtgacttggacttccgaccagagcgggagatag

SEQ ID NO: 311154 - DNA, 423 bp, Artificial Sequence
  derived and/or modified sequence
agcagcaagtactgctgtgacaccggcaaccacggcagcgaggacttcctgctggtgctggactgctgtgacctgtctgtgctgaaggtggaggaggtggatgtggccgctgtgcccggcctggagaagttcaccaggagccctgagctgactgtggtgtctgaggagttcaggaaccagatcgtgcgggagctggtgaccctgcctgccaaccgctggagggagcagctggactactatgcccgctgcagccaggcccctggctgtggggagctgctgtttgacacagacacctggagcctgcagatcaggaagacaggagcccagacagccacagacttcccccacgccatccgcatctggtacaagaccaagccagagggccgctctgtgacctggaccagtgaccagagcggccgctag

SEQ ID NO: 311155 - DNA, 423 bp, Artificial Sequence
  derived and/or modified sequence
agcagcaagtactgctgcgacaccggcaaccacggcagcgaggactttctattggtgctggattgctgcgacttatctgtgctgaaggttgaggaggtggatgtggccgccgtgccggggctggagaaattcacacggtctcccgagctcaccgtcgtttccgaagaatttagaaatcagattgtgcgggaactcgtgaccctgcccgctaacaggtggagggaacaactggactactacgcccggtgttctcaggcccctggatgtggcgaactgctgtttgacaccgacacatggagcctgcagatcagaaaaacgggtgcacagacagccacagatttcccccacgcgataaggatttggtacaaaactaaaccggagggcaggtccgtgacatggacctccgaccagtcagggagatag

SEQ ID NO: 311156 - DNA, 423 bp, Artificial Sequence
  derived and/or modified sequence
tcgtcaaaatattgctgtgatacaggaaaccatggatctgaggattttctattggtcctcgattgttgtgacctttcagtgcttaaagtagaggaggtggatgtcgcagctgtgccaggactggagaaattcacgagatcccccgagttaaccgtggtcagcgaagagtttaggaaccaaatcgttagagagctcgttacattgccagccaatcggtggcgggagcaactggattactatgcaaggtgctcccaagctccgggttgtggggagttgctgtttgacaccgacacttggagcctacaaatccgtaaaacaggggctcaaacagcaaccgattttccacacgccattcgcatttggtacaagaccaaaccggaaggcagatctgtgacttggacttccgaccagtctgggcgttag

SEQ ID NO: 311157 - DNA, 303 bp, Artificial Sequence
  derived and/or modified sequence
atgacccacagcggctggcagggcagcggcggcgccggccccggccccagagcccccgccagaagcagatgcagacccggcctgcccagcctgccctgcagacccaaccccctggaggccagaggctgcggcagcgccctgagaccctgggacctggccgccagaacccccatcccctgcttctgcgaccacagctgggccctgggcaagctgctgggccccaagagaagagagggcagaaagggcagcgagagaagaagaagaggccccggcggccagcagccccagcccgccgaggagtag

SEQ ID NO: 311158 - DNA, 1458 bp, Artificial Sequence
  derived and/or modified sequence
atgaagagaaagtccgagagaaggagctcatgggcggccgcacccccgtgctcacgccgctgcagcagcaccagccccggagtgaaaaagattagatctagcacacagcaggacccacgtagacgagacccacaggatgatgtgtatttggatatcactgataggttatgtttcgcaattctgtattcgcggccaaaaagcgccagtaacgtgcactacttttcgattgataatgaactggagtacgagaacttttatgccgactttggccccttgaatctggcaatggtgtacaggtactgttgcaaaatcaacaagaagctaaagtcaataactatgcttcgcaaaaagattgtgcatttcactggtagcgaccagagaaaacaggcaaatgccgcctttctagtggggtgttacatggttatctacctggggcgaactcctgaggaagcgtaccggattctgatcttcggtgaaaccagctacatcccatttagggatgccgcatacggctcctgcaacttctatatcaccctgttggactgctttcacgcagtcaagaaggccatgcagtacggctttttgaactttaactccttcaatctggacgagtatgaacactatgaaaaagccgaaaacggcgaccttaactggataatacctgaccgattcattgctttctgtggaccgcatagcagggctaggctggagtctgggtatcaccagcattcaccagagacctatattcaatacttcaagaaccacaatgtcactaccataatccgactgaataagcggatgtatgacgctaaacgcttcaccgatgccgggttcgatcaccatgacctcttctttgccgacggcagcactcccacagacgcaattgtaaaagaattcttggatatatgcgaaaacgctgagggcgcaatcgcagtccattgtaaagccgggctcggcagaaccggaacactgatagcatgttacataatgaaacattacaggatgacagccgccgagaccatcgcctgggttcgaatttgtagacccggcagtgtcatcggaccacaacagcagtttctggtgatgaaacagaccaatctatggctggagggcgattactttcgacagaagctgaaaggccaggagaatggccaacacagagctgcgttcagcaagttattgtccggcgtagatgatataagcatcaatggcgttgaaaatcaagaccagcaagaacccgaaccatactccgacgatgatgagattaacggtgttactcagggcgatcgtctgcgcgccctgaaatcacggcgtcagagcaagaccaacgccatccctctaacgtgccctttggcagttctcacaagtgcactctgttccgtcgtgatttggtggattgtttgtgactatattctgccaatcctacttttttgcctggacgggtttaggacacagtag

SEQ ID NO: 311159 - DNA, 1458 bp, Artificial Sequence
  derived and/or modified sequence
atgaaaagaaagagtgagcggcggagttcatgggctgccgctccaccttgcagtcggagatgttcgagcactagccctggcgttaaaaaaattcggagctcaactcaacaggaccctaggcgcagggatccacaagacgacgtttacctggatattactgataggctgtgttttgccatcctctatagcagaccgaaatcagccagcaatgtgcattatttttcaatcgataacgagctggagtatgagaatttttatgccgactttggcccactcaacctggcaatggtttaccgatactgttgcaagatcaacaaaaagctaaagagtattacaatgctacgcaagaagattgtgcatttcactggctctgaccagcggaaacaggctaatgccgcctttcttgtggggtgctatatggtcatttacctcggtcgcacccccgaagaggcctaccggattctaatattcggcgagacttcatatatcccgttccgtgatgcagcgtatggatcttgtaatttctatattaccctgctggattgcttccatgctgtgaagaaagctatgcaatacgggttcctcaatttcaattcattcaatttggacgagtacgagcactatgagaaggccgaaaatggggatcttaattggattatccctgatcggttcatcgcattttgcggtccacacagtcgcgcccgtctcgaatccgggtaccatcagcactcgcccgaaacgtacattcagtattttaaaaaccacaacgtcacaacaatcataaggctcaataagcgaatgtacgatgccaagagatttacagatgcaggctttgaccaccacgatctgtttttcgcagatggcagcaccccaacagacgccattgttaaggagtttttggacatttgcgagaatgcagagggagcaatcgctgttcattgcaaggccggacttgggcggacaggaacactgatcgcctgctacattatgaagcactaccgcatgactgccgcagagacaatcgcatgggttcgaatctgccgcccgggttcagttatcggaccgcagcagcagttcctggtgatgaagcagaccaacctgtggctggagggggattattttcggcagaaactgaaaggccaggagaacggccagcacagagccgctttcagcaagctgttgagcggagtggatgacatctcaatcaacggagttgagaaccaagatcagcaggagcctgaaccctactcagatgatgacgagatcaatggcgtaacccaaggtgacaggctccgcgcactaaagagccgacgccagagcaagactaatgctattcctctgacctgtcctctcgctgtactcacttccgccctgtgttcggtggtgatctggtggattgtctgtgattatattttacctattcttctattttgcctcgatggcttccgaacccagtag

SEQ ID NO: 311160 - DNA, 1458 bp, Artificial Sequence
  derived and/or modified sequence
atgaagaggaagtcagaaagaagaagctcctgggccgccgccccaccctgcagccgccgctgcagcagcaccagccctggggtgaagaagatccgcagcagcacccagcaggaccccaggagaagagacccccaggatgatgtgtacctggacatcacagaccggctgtgctttgccatcctgtacagccggcccaagagcgccagcaatgtgcactacttcagcattgacaatgagctggagtatgagaacttctatgctgactttggccccctgaacctggccatggtgtaccgctactgctgcaagatcaacaagaagctgaagagcatcaccatgctgaggaagaagatcgtgcacttcaccggcagtgaccagaggaagcaggccaatgctgccttcctggtgggctgctacatggtgatctacctgggccgcaccccagaggaggcctaccgcatcctgatctttggagagaccagctacatccccttcagagatgctgcctacggcagctgcaacttctacatcaccctgctggactgcttccacgctgtgaagaaggccatgcagtatggcttcctgaacttcaacagcttcaacctggatgaatatgagcactatgagaaggccgagaatggagacctgaactggatcatcccagaccgcttcatcgccttctgtggcccccacagccgggcccggctggagagcggctaccaccagcacagccctgagacctacatccagtacttcaagaaccacaacgtgaccaccatcatccggctgaacaagaggatgtatgatgccaagcgcttcacagatgctggctttgaccaccacgacctcttctttgctgatggcagcacccccacagatgccatcgtgaaggagttcctggacatctgtgaaaatgctgagggcgccatcgctgtgcactgcaaggccggcctgggccgcacaggcaccctgattgcctgctacatcatgaagcactacaggatgacagctgctgagaccatcgcctgggtgcgcatctgcaggcctggctctgtgattggcccccagcagcagttcctggtgatgaagcagaccaacctgtggctggagggggactacttccggcagaagctgaagggccaggagaatggccagcaccgggccgccttcagcaagctgctgtctggagtggatgacatcagcatcaatggagtggagaaccaggaccagcaggagcctgagccctacagtgatgatgatgagatcaatggagtgacccagggcgaccggctgcgggccctgaagagccggcggcagagcaagaccaatgccatccccctgacctgccccctggccgtgctgaccagcgccctgtgcagcgtggtgatctggtggatcgtgtgtgactacatcctgcccatcctgctcttctgcctggatggcttccgcacccagtag

SEQ ID NO: 311161 - DNA, 1458 bp, Artificial Sequence
  derived and/or modified sequence
atgaagcggaagagcgagcggcggagcagctgggccgccgcccccccatgttcaagacgctgcagcagcactagtccaggggtgaagaagattcgaagtagtacacagcaggaccctaggaggcgagatccacaggacgatgtttacctcgacatcactgaccgcctctgcttcgctatactttacagtaggcctaaatccgcctccaatgtgcactatttctctatcgacaacgaactggagtacgagaacttctacgcagattttggcccactgaatctcgcaatggtgtacagatactgttgcaaaatcaataaaaaactcaaaagcatcaccatgttgcgaaagaagattgttcattttactggctccgaccagaggaaacaggcaaacgctgcattcctggtgggttgctatatggtaatatatctgggacggacccctgaggaggcttaccgtattctcatctttggcgagacctcttatattccatttcgagatgcagcctacggaagctgcaacttctacattactttgcttgattgcttccatgctgtgaagaaagctatgcaatacggctttctcaacttcaattctttcaatcttgacgagtatgagcactatgagaaagccgagaacggggatctgaattggatcatccctgatcgattcattgcattttgtggtccccactcccgagctcggctggagtctggctaccatcagcactctcccgagacctacattcagtattttaaaaaccacaatgtgacaaccatcataaggctaaacaaacggatgtatgacgccaagcggttcactgacgctggctttgatcaccacgacctatttttcgctgacgggtccacaccaacagatgccatcgtcaaggagtttttggacatatgcgaaaacgccgaaggtgcgatcgcagtacattgcaaggccggcctgggtcgcacagggactctgatcgcctgctacataatgaaacattaccgcatgacagccgctgagactatagcctgggtgaggatatgtcggcccggttcagtcattggtccacagcagcagttcctggtgatgaagcaaaccaacctgtggctcgagggagattacttccgccagaaactgaaaggccaggaaaacgggcagcatagggccgccttctcaaaactactgagtggcgtggatgacatatccattaacggcgtagagaatcaggatcaacaagagccagagccatacagtgacgatgatgagatcaacggagttacccagggggataggctgagggccttgaagtccaggaggcagagcaaaacgaacgcgatacctctgacatgtccgctggccgtgctcacctctgcactgtgctctgtggtgatctggtggatcgtttgcgactatattttgcccatcctcctgttttgccttgatgggttcaggacccagtag

SEQ ID NO: 311162 - DNA, 1458 bp, Artificial Sequence
  derived and/or modified sequence
atgaagcggaagagcgagcggcggagcagctgggccgccgcccccccatgttcacggcgctgctcctccacttctcctggagtcaagaaaattcgtagctctactcaacaggacccgcgcaggcgggatccccaggacgatgtttacctagacattactgaccgtttgtgttttgctatattatacagccggcctaagtcagcttcaaatgttcattactttagcattgataatgagcttgaatatgaaaatttttacgccgacttcggtccgcttaacctggctatggtgtatcggtactgttgtaaaatcaacaagaagctgaagagtataacaatgctcaggaaaaaaatagtgcactttacgggctcagaccagaggaagcaagctaatgccgcatttttggtcgggtgttacatggtgatctacctcggccgaacccctgaagaggcataccgcatcctcatatttggagagacctcctacattccttttagagatgcagcctacgggagttgcaatttttacatcacgctgcttgactgtttccatgccgtcaagaaggcaatgcagtacggatttctgaatttcaattcattcaacctcgatgagtatgagcactacgagaaagcagagaacggggacttgaactggatcatccccgacagattcattgctttctgtggaccccactccagggctagactggaatctgggtaccatcaacattccccggaaacttacatacaatattttaagaaccataacgttaccaccatcataagattgaataagcgcatgtacgatgccaagcgttttactgacgctggatttgatcatcatgaccttttctttgctgatggatctactcccacagatgctattgtgaaggagttcctagatatttgtgagaacgcagagggggccattgcagttcattgtaaagccgggctggggcggaccggcacgttaatagcatgttatatcatgaagcattatcggatgaccgccgcagaaaccattgcttgggtgaggatctgtcggcccgggtcagtgattgggccacagcagcagttcttggttatgaaacagactaacctctggttggagggagactatttccgacagaagctgaaggggcaggagaatggacagcaccgagcagccttttcaaaactgctctccggagtcgacgacatcagcataaatggcgtggaaaatcaagaccaacaggagccggagccgtattctgatgacgacgaaatcaatggagtgactcagggcgacaggctccgtgccctcaagtcccggcgacagtccaagacaaatgcaatccctctcacatgtccgttggctgtccttaccagtgcgctttgtagcgtggtcatctggtggattgtttgtgactatatactgcctatccttctgttttgtctcgatggattcaggacccagtag

SEQ ID NO: 311163 - DNA, 1458 bp, Artificial Sequence
  derived and/or modified sequence
atgaagaggaaatccgagaggcgcagctcttgggccgcagcccctccatgttccagacggtgctcgtcaacctctccaggcgttaaaaaaatccgcagcagcacccaacaggaccccagacggcgtgacccccaggatgatgtatacttagatattacagataggctatgttttgccatcctttatagccggccaaagagtgctagcaatgtgcactactttagcatcgacaacgaactcgagtatgagaacttctatgctgactttgggcctctcaatctagcaatggtctatcggtactgctgcaagattaacaagaagctcaagtcaatcacaatgctccgtaaaaagatagtccatttcacaggctctgatcagcgtaaacaggccaacgcagcattcctggtggggtgttacatggttatctacctgggccgaaccccggaagaagcttacaggatcttgattttcggagaaacatcctatataccgttccgagatgcggcatacggtagctgtaatttttatatcacgctgctcgactgttttcatgccgtcaagaaagctatgcagtatggctttttaaactttaacagcttcaatctggatgagtatgaacactacgagaaagccgagaatggggaccttaactggatcatcccagaccggttcattgccttctgcggccctcacagccgggctcgactggagtccggataccaccaacacagccctgagacttatattcagtattttaagaaccacaacgttactacgattattcggctcaataaaagaatgtacgatgccaagcgctttactgacgctggctttgatcatcacgacttgtttttcgcagacgggagcactcccacggatgccattgtaaaagagttcctcgatatttgcgagaatgccgagggcgctattgcggtccattgcaaagcaggactggggaggactgggactctcattgcatgctatatcatgaagcattacaggatgactgctgccgagactatcgcctgggtgcgcatctgcagacccggatctgtcattggccctcagcaacagtttctagttatgaagcaaaccaatctttggttagagggtgattattttcggcagaagttgaagggacaggagaacggacagcatagggcagctttcagtaaactgttgtccggagtggatgacatctctattaacggggtcgagaatcaagaccagcaggaaccagagccctattctgatgacgatgaaatcaacggggtgactcagggggaccgcctccgagcactcaaatcccgacgccagagcaagaccaacgccatacccctgacatgccctcttgccgtgctgactagcgccctctgctcagtagttatctggtggatcgtctgcgattacatcctgcccatacttctgttctgtcttgacggattccgaactcaatag

SEQ ID NO: 311164 - DNA, 1458 bp, Artificial Sequence
  derived and/or modified sequence
atgaagcggaagtcagaacgacggagtagctgggctgccgcaccaccatgttcacgccgttgtagcagcacttcccccggagtgaagaagattcggtcgtcaacacagcaagatccacgcaggcgggaccctcaagatgacgtctacctggacattaccgatagattatgctttgcaattctttacagcagacccaaatccgcttcaaatgtgcactatttctctattgacaacgagcttgagtacgagaatttctatgctgactttggccctcttaaccttgccatggtgtacaggtattgctgtaaaattaacaaaaaactgaagagcattactatgcttagaaaaaagattgtgcacttcaccggatccgatcagcgtaaacaggctaacgccgcatttctggtgggctgctacatggtgatttacctcggcaggactccggaggaggcataccgtattctgatctttggcgagacatcatacattcctttccgggacgccgcatatggatcttgcaatttctatatcacccttctggactgctttcacgcagtgaaaaaggccatgcagtatgggtttctgaatttcaatagcttcaacctcgacgaatacgagcattacgagaaggcagagaacggcgatctcaactggatcatccccgataggttcatagcgttttgcggacctcatagccgagcaaggttagagagtggatatcaccagcacagccccgaaacgtatattcagtacttcaagaatcacaacgtgaccactataataagactgaacaagcgtatgtatgatgctaaaagatttacagatgcaggctttgatcatcacgatctgttcttcgccgacggatcaacgcctacagacgccatagtgaaagagtttctcgacatctgtgaaaacgcagaaggcgcaattgccgtccattgtaaggccggtctcggccgtacaggtaccctaatcgcatgttatatcatgaaacattacagaatgaccgcagcagaaactatcgcctgggtgaggatctgtcggcctgggtccgttatagggcctcagcagcagtttctggtcatgaagcaaaccaacctgtggttagaaggtgattacttccgacaaaagctaaagggccaggagaacgggcagcacagggctgccttctctaagctattatccggggtggatgacatctcgataaatggggtggagaaccaggaccagcaagagcctgagccttattctgacgacgatgaaatcaatggggttacccagggcgatcgcctgcgagcgctgaagagtaggcggcaatccaaaaccaatgccatccctctgacgtgccctctggccgtcctgacttctgcactctgctcggtggtgatttggtggattgtttgcgattatatactgccaatcttgctgttctgcctggatggatttcgcacgcagtag

SEQ ID NO: 311165 - DNA, 1910 bp, Artificial Sequence
  derived and/or modified sequence
cacggaacagccctcctggggtccccacgagccgcgtcctgctgtgccccggcgcctacgcagcagcggccgcggccgcggtgggcacgcacggttaccccgggcagctccggccgccagctgcagccccgtcgcctcggccgcgccagccggctgcgggcacctgggggcgggctgggggcgccggccgcggcaggaggcgctgtagcgagggctgcggcgccggtcctgcggcggccgcgggaggcagcggggcaggcgctgtgggccgggctcctcctccggctcctgcgcgaccgcctcccgccgggctctgccggcgcccgccgtccccgcagcgccgctctgcgcccgccgccccgagcgcccgcgcggggctggcgggagcctcggcgggcgcgcgggcgcgcggggccatggtcgtggccccctgacgggccgcggccgcctccatgaagcggaaaagcgagcggcggtcgagctgggccgccgcgcccccctgctcgcggcgctgctcgtcgacctcgccgggtgtgaagaagatccgcagctccacgcagcaagacccgcgccgccgggacccccaggacgacgtgtacctggacatcaccgatcgcctttgttttgccattctctacagcagaccaaagagtgcatcaaatgtacattatttcagcatagataatgaacttgaatatgagaacttctacgcagattttggaccactcaatctggcaatggtttacagatattgttgcaagatcaataagaaattaaagtccattacaatgttaaggaagaaaattgttcattttactggctctgatcagagaaaacaagcaaatgctgccttccttgttggatgctacatggttatatatttggggagaaccccagaagaagcatatagaatattaatctttggagagacatcctatattcctttcagagatgctgcctatggaagttgcaatttctacattacacttcttgactgttttcatgcagtaaagaaggcaatgcagtatggcttccttaatttcaactcatttaaccttgatgaatatgaacactatgaaaaagcagaaaatggagatttaaattggataataccagaccgatttattgccttctgtggacctcattcaagagccagacttgaaagtggttaccaccaacattctcctgagacttatattcaatattttaagaatcacaatgttactaccattattcgtctgaataaaaggatgtatgatgccaaacgctttacggatgctggcttcgatcaccatgatcttttctttgcggatggcagcacccctactgatgccattgtcaaagaattcctagatatctgtgaaaatgctgagggtgccattgcagtacattgcaaagctggccttggtcgcacgggcactctgatagcctgctacatcatgaagcattacaggatgacagcagccgagaccattgcgtgggtcaggatctgcagacctggctcggtgattgggcctcagcagcagtttttggtgatgaagcaaaccaacctctggctggaaggggactattttcgtcagaagttaaaggggcaggagaatggacaacacagagcagccttctccaaacttctctctggcgttgatgacatttccataaatggggtcgagaatcaagatcagcaagaacccgaaccgtacagtgatgatgacgaaatcaatggagtgacacaaggtgatagacttcgggccttgaaaagcagaagacaatccaaaacaaacgctattcctctcacatgtcccctagctgtgctgacctctgcactgtgtagtgttgtcatctggtggattgtttgtgactacattcttcccatcctgctattctgtctcgatggtttcagaacacagtag

SEQ ID NO: 311166 - DNA, 1734 bp, Artificial Sequence
  derived and/or modified sequence
ctgacgggccgcggccgcctccatgaagcggaaaagcgagcggcggtcgagctgggccgccgcgcccccctgctcgcggcgctgctcgtcgacctcgccgggtgtgaagaagatccgcagctccacgcagcaagacccgcgccgccgggacccccaggacgacgtgtacctggacatcaccgatcgcctttgttttgccattctctacagcagaccaaagagtgcatcaaatgtacattatttcagcatagataatgaacttgaatatgagaacttctacgcagattttggaccactcaatctggcaatggtttacagatattgttgcaagatcaataagaaattaaagtccattacaatgttaaggaagaaaattgttcattttactggctctgatcagagaaaacaagcaaatgctgccttccttgttggatgctacatggttatatatttggggagaaccccagaagaagcatatagaatattaatctttggagagacatcctatattcctttcagagatgctgcctatggaagttgcaatttctacattacacttcttgactgttttcatgcagtaaagaaggcaatgcagtatggcttccttaatttcaactcatttaaccttgatgaatatgaacactatgaaaaagcagaaaatggagatttaaattggataataccagaccgatttattgccttctgtggacctcattcaagagccagacttgaaagtggttaccaccaacattctcctgagacttatattcaatattttaagaatcacaatgttactaccattattcgtctgaataaaaggatgtatgatgccaaacgctttacggatgctggcttcgatcaccatgatcttttctttgcggatggcagcacccctactgatgccattgtcaaagaattcctagatatctgtgaaaatgctgagggtgccattgcagtacattgcaaagctggccttggtcgcacgggcactctgatagcctgctacatcatgaagcattacaggatgacagcagccgagaccattgcgtgggtcaggatctgcagacctggctcggtgattgggcctcagcagcagtttttggtgatgaagcaaaccaacctctggctggaaggggactattttcgtcagaagttaaaggggcaggagaatggacaacacagagcagccttctccaaacttctctctggcgttgatgacatttccataaatggggtcgagaatcaagatcagcaagaacccgaaccgtacagtgatgatgacgaaatcaatggagtgacacaaggtgatagacttcgggccttgaaaagcagaagacaatccaaaacaaacgctattcctctcacatgtcccctagctgtgctgacctctgcactgtgtagtgttgtcatctggtggattgtttgtgactacattcttcccatcctgctattctgtctcgatggtttcagaacacagtagccatcaggaccccctgacagatagctgcttctctccatttcaaggactaaaacagtcttgcgttaagtaaaaacctgtgaccagagctgaaggaagactctaggactgaaaactgcaacagaaattagcacaatttgaaaacaaaacaaaattgcaaaagccttagttgctttttccacctaagaagttgatcaatggagaaaatgtccactggagtttgaataatgaactttgagtttgggtgcaagcaaatg

SEQ ID NO: 311167 - DNA, 1458 bp, Artificial Sequence
  derived and/or modified sequence
atgaagagaaagagcgagagaagaagcagctgggccgccgcccccccctgcagcagaagatgcagcagcaccagccccggcgtgaagaagatcagaagcagcacccagcaggaccccagaagaagagacccccaggacgacgtgtacctggacatcaccgacagactgtgcttcgccatcctgtacagcagacccaagagcgccagcaacgtgcactacttcagcatcgacaacgagctggagtacgagaacttctacgccgacttcggccccctgaacctggccatggtgtacagatactgctgcaagatcaacaagaagctgaagagcatcaccatgctgagaaagaagatcgtgcacttcaccggcagcgaccagagaaagcaggccaacgccgccttcctggtgggctgctacatggtgatctacctgggcagaacccccgaggaggcctacagaatcctgatcttcggcgagaccagctacatccccttcagagacgccgcctacggcagctgcaacttctacatcaccctgctggactgcttccacgccgtgaagaaggccatgcagtacggcttcctgaacttcaacagcttcaacctggacgagtacgagcactacgagaaggccgagaacggcgacctgaactggatcatccccgacagattcatcgccttctgcggcccccacagcagagccagactggagagcggctaccaccagcacagccccgagacctacatccagtacttcaagaaccacaacgtgaccaccatcatcagactgaacaagagaatgtacgacgccaagagattcaccgacgccggcttcgaccaccacgacctgttcttcgccgacggcagcacccccaccgacgccatcgtgaaggagttcctggacatctgcgagaacgccgagggcgccatcgccgtgcactgcaaggccggcctgggcagaaccggcaccctgatcgcctgctacatcatgaagcactacagaatgaccgccgccgagaccatcgcctgggtgagaatctgcagacccggcagcgtgatcggcccccagcagcagttcctggtgatgaagcagaccaacctgtggctggagggcgactacttcagacagaagctgaagggccaggagaacggccagcacagagccgccttcagcaagctgctgagcggcgtggacgacatcagcatcaacggcgtggagaaccaggaccagcaggagcccgagccctacagcgacgacgacgagatcaacggcgtgacccagggcgacagactgagagccctgaagagcagaagacagagcaagaccaacgccatccccctgacctgccccctggccgtgctgaccagcgccctgtgcagcgtggtgatctggtggatcgtgtgcgactacatcctgcccatcctgctgttctgcctggacggcttcagaacccagtag

SEQ ID NO: 311168 - DNA, 1497 bp, Artificial Sequence
  derived and/or modified sequence
atgaagaggaagtctgaacgccgcagttcctgggcagccgctcccccatgctcccgaaggtgctcttcgacatctccaggagtgaaaaagattcgcagttcgacccagcaagacccacggcgccgggaccctcaggacgatgtctacctcgacattacagacaggctgtgcttcgccattctttactcccgccccaagagcgcgagtaatgttcactatttctcaatagataacgagttggaatatgaaaacttttatgccgacttcggtccactgaatttggctatggtgtatcgctattgctgcaagatcaacaaaaaactgaaatcaatcacaatgcttaggaagaagattgtgcatttcaccggatcagaccagcgcaaacaggccaacgccgccttcctcgtgggctgctacatggttatctatttggggaggactcctgaagaggcctatcggattcttatatttggtgagactagttacatacctttccgcgatgcggcctacggatcttgtaacttttacattaccctgctggattgcttccatgccgtgaaaaaagcgatgcagtacgggttcctcaacttcaatagtttcaatctggatgagtatgagcactacgagaaggctgagaatggcgatcttaattggatcatccccgacaggtttatcgccttttgtggcccacactcgcgggccaggcttgagtccgggtatcatcagcatagccctgaaacttatatccagtactttaagaatcacaatgtgacgacaataatccgcctgaacaagagaatgtatgacgctaagcgatttaccgacgctgggttcgaccatcacgacctgtttttcgccgacggaagcacgcccaccgacgcgatcgtgaaagagtttctggacatctgcgagaatgccgagggggcaatcgccgtgcactgtaaggcaggccttggtaggacgggcaccctaattgcttgctacattatgaagcattatcgcatgaccgccgccgaaactattgcatgggtgaggatttgtcgccccgggtccgtgattggcccccagcagcaattcctggtgatgaagcaaactaacttgtggctcgaaggggattatttccgccagaagctgaaaggccaggaaaacggacagcatcgcgcagctttcagcaaattgctgtcaggagtggacgacatatctataaatggcgtggagaatcaggaccaacaggagcccgaaccatatagcgacgacgatgagattaatggagtcacacaaggggaccgcttgcgggccttgaagagcagacggcagagcaaaactaacgctattccactgactgtgatcttgcagtcttctgtgcagtcgtgtaagaccagcgagcctaacatctccggcagtgccgggatcacgaagcgtaccaccaggtccgcctcccgcaaatcatccgtgaagagtctgtccatttcacggaccaagaccgttctgaggtag

SEQ ID NO: 311169 - DNA, 1497 bp, Artificial Sequence
  derived and/or modified sequence
atgaagaggaagtcagaaagaagaagctcctgggccgccgccccaccctgcagccgccgctgcagcagcaccagccctggggtgaagaagatccgcagcagcacccagcaggaccccaggagaagagacccccaggatgatgtgtacctggacatcacagaccggctgtgctttgccatcctgtacagccggcccaagagcgccagcaatgtgcactacttcagcattgacaatgagctggagtatgagaacttctatgctgactttggccccctgaacctggccatggtgtaccgctactgctgcaagatcaacaagaagctgaagagcatcaccatgctgaggaagaagatcgtgcacttcaccggcagtgaccagaggaagcaggccaatgctgccttcctggtgggctgctacatggtgatctacctgggccgcaccccagaggaggcctaccgcatcctgatctttggagagaccagctacatccccttcagagatgctgcctacggcagctgcaacttctacatcaccctgctggactgcttccacgctgtgaagaaggccatgcagtatggcttcctgaacttcaacagcttcaacctggatgaatatgagcactatgagaaggccgagaatggagacctgaactggatcatcccagaccgcttcatcgccttctgtggcccccacagccgggcccggctggagagcggctaccaccagcacagccctgagacctacatccagtacttcaagaaccacaacgtgaccaccatcatccggctgaacaagaggatgtatgatgccaagcgcttcacagatgctggctttgaccaccacgacctcttctttgctgatggcagcacccccacagatgccatcgtgaaggagttcctggacatctgtgaaaatgctgagggcgccatcgctgtgcactgcaaggccggcctgggccgcacaggcaccctgattgcctgctacatcatgaagcactacaggatgacagctgctgagaccatcgcctgggtgcgcatctgcaggcctggctctgtgattggcccccagcagcagttcctggtgatgaagcagaccaacctgtggctggagggggactacttccggcagaagctgaagggccaggagaatggccagcaccgggccgccttcagcaagctgctgtctggagtggatgacatcagcatcaatggagtggagaaccaggaccagcaggagcctgagccctacagtgatgatgatgagatcaatggagtgacccagggcgaccggctgcgggccctgaagagccggcggcagagcaagaccaatgccatccccctgaccgtcatcctgcagagctctgtgcagagctgcaagaccagcgagcccaacatcagcggcagcgctggcatcaccaagaggaccaccaggtctgccagcaggaagagctctgtgaagagcctgagcatcagcaggaccaagacagtgctgaggtag

SEQ ID NO: 311170 - DNA, 1497 bp, Artificial Sequence
  derived and/or modified sequence
atgaagcggaagagcgagcggcggagcagctgggccgccgcccccccttgcagccggcgatgttccagcaccagcccaggcgtgaaaaagatacggagtagtacacaacaggacccccgtcgtcgcgacccccaggacgacgtgtacctggacatcacagacagactgtgtttcgccatattatacagtcgacccaagtctgccagtaacgtccactacttttctattgacaacgagctcgagtatgagaacttttatgccgatttcggtcctctgaacctggcaatggtctaccgctattgctgtaaaatcaacaaaaaattaaagtcaatcaccatgctgagaaaaaaaatagtccatttcacaggaagtgaccagcgtaagcaagctaacgccgctttcttagtgggctgctacatggtcatctaccttgggagaactccagaggaggcctacaggattctcatctttggcgagacgtcttatatacccttccgcgacgctgcttacggatcttgcaatttctacattaccctccttgattgcttccacgcggtcaagaaggccatgcagtacggttttctaaacttcaatagcttcaatctggatgagtatgaacattacgagaaagccgaaaacggggacctcaactggattataccggaccgctttatagcgttttgtggtcctcactctagggcccggctggaatcgggttaccaccagcatagccctgaaacttacattcagtacttcaaaaaccataacgttaccacgattataagactcaacaagcgcatgtatgacgcgaagagatttacggatgctggcttcgatcatcacgacctttttttcgcagacggtagcaccccaactgatgcaattgtaaaagagttcctcgatatatgcgaaaacgccgaaggcgccattgcagtccattgcaaggccgggctcgggagaactggcaccctaatcgcctgttatattatgaaacattatcgtatgaccgccgccgagaccattgcttgggttcgaatttgtagaccaggcagcgtgataggtccccagcaacagttcctggtcatgaaacagaccaacctttggctggaaggtgactattttcgccagaagctgaaaggacaagagaacggacagcacagagccgcctttagcaagctcctctcaggggtagatgacatctccataaatggcgtagagaatcaagaccagcaggaacccgaaccctactctgatgacgatgagattaatggagtcacacaaggggacagactgagggcgctgaagtcccgcaggcagtcaaagacaaacgccattccgctgacagtcatcctgcagtcctctgttcagtcttgtaagacttcagagcctaatatctccgggtctgcgggtatcactaaacgtacgactaggtcagcaagtcgcaagagcagcgtgaaatctctgagtatctctcgcaccaaaaccgtactgaggtag

SEQ ID NO: 311171 - DNA, 1497 bp, Artificial Sequence
  derived and/or modified sequence
atgaagagaaagtccgaaagaagatcttcatgggccgctgctccaccatgtagcagaaggtgtagcagcacatctcctggtgtcaaaaagatacgatctagtacacagcaggatccacgccgacgcgaccctcaggatgacgtttacctggacataactgatagactgtgtttcgcaatcctttacagcagacccaagtcagcatcgaatgtgcactatttctccattgacaatgaactcgagtatgaaaacttttacgcggacttcggtccactgaatttagccatggtttaccgctactgctgtaaaattaacaagaagctgaagtccattacgatgttgcgtaaaaagattgtgcattttaccgggtcggatcaaaggaaacaagccaatgccgcttttttggtgggatgctatatggtgatttacctcggaagaaccccagaagaggcataccgtatcctgatcttcggagagacctcttatatacctttcagagatgccgcttatgggagctgcaatttctatatcaccctccttgattgtttccatgcggtgaaaaaagcgatgcaatacggatttctgaactttaattcttttaatctcgacgagtatgagcactatgagaaggcagagaacggggacctgaattggattatccctgaccggttcattgccttctgcggcccacattcccgggctcggttagaatctgggtatcaccaacattctcctgaaacctatattcaatactttaagaaccataatgttactaccattatccgcctcaataaaagaatgtatgacgctaaacgattcaccgatgccggttttgatcaccatgatctattttttgctgatggatcgaccccaaccgatgcgattgttaaagaattcctggatatctgcgagaacgcagagggtgccatcgctgtccactgcaaagccggtctgggacggaccggtactctaattgcatgttacattatgaaacactacaggatgacagccgctgaaacaatcgcctgggtccgaatttgccgcccagggtccgtcattggcccacaacagcaatttctggtgatgaaacagaccaacttatggcttgagggtgattacttccgccagaagctcaagggccaagaaaacggacagcacagggccgcttttagcaaactgctgtccggcgtagacgacatcagtattaacggcgtcgaaaaccaggaccagcaggagcctgaaccgtactctgatgatgacgagatcaatggtgtgacccagggagaccgattgagggctctgaagagtcgccgtcagtcaaaaacaaacgctattccactcaccgtcatcttgcagagttctgttcaaagctgcaaaaccagcgaaccaaatatttctggcagtgccggtatcactaagagaacaacccgctcagcctctcgcaagtcttctgtcaaatccctttccattagtagaacgaaaacagtcctgcgatag

SEQ ID NO: 311172 - DNA, 1497 bp, Artificial Sequence
  derived and/or modified sequence
atgaagagaaagagcgagagaagaagcagctgggccgccgcccccccctgcagcagaagatgcagcagcaccagccccggcgtgaagaagatcagaagcagcacccagcaggaccccagaagaagagacccccaggacgacgtgtacctggacatcaccgacagactgtgcttcgccatcctgtacagcagacccaagagcgccagcaacgtgcactacttcagcatcgacaacgagctggagtacgagaacttctacgccgacttcggccccctgaacctggccatggtgtacagatactgctgcaagatcaacaagaagctgaagagcatcaccatgctgagaaagaagatcgtgcacttcaccggcagcgaccagagaaagcaggccaacgccgccttcctggtgggctgctacatggtgatctacctgggcagaacccccgaggaggcctacagaatcctgatcttcggcgagaccagctacatccccttcagagacgccgcctacggcagctgcaacttctacatcaccctgctggactgcttccacgccgtgaagaaggccatgcagtacggcttcctgaacttcaacagcttcaacctggacgagtacgagcactacgagaaggccgagaacggcgacctgaactggatcatccccgacagattcatcgccttctgcggcccccacagcagagccagactggagagcggctaccaccagcacagccccgagacctacatccagtacttcaagaaccacaacgtgaccaccatcatcagactgaacaagagaatgtacgacgccaagagattcaccgacgccggcttcgaccaccacgacctgttcttcgccgacggcagcacccccaccgacgccatcgtgaaggagttcctggacatctgcgagaacgccgagggcgccatcgccgtgcactgcaaggccggcctgggcagaaccggcaccctgatcgcctgctacatcatgaagcactacagaatgaccgccgccgagaccatcgcctgggtgagaatctgcagacccggcagcgtgatcggcccccagcagcagttcctggtgatgaagcagaccaacctgtggctggagggcgactacttcagacagaagctgaagggccaggagaacggccagcacagagccgccttcagcaagctgctgagcggcgtggacgacatcagcatcaacggcgtggagaaccaggaccagcaggagcccgagccctacagcgacgacgacgagatcaacggcgtgacccagggcgacagactgagagccctgaagagcagaagacagagcaagaccaacgccatccccctgaccgtgatcctgcagagcagcgtgcagagctgcaagaccagcgagcccaacatcagcggcagcgccggcatcaccaagagaaccaccagaagcgccagcagaaagagcagcgtgaagagcctgagcatcagcagaaccaagaccgtgctgagatag

SEQ ID NO: 311173 - DNA, 1386 bp, Artificial Sequence
  derived and/or modified sequence
atgtctcgggaaggcgccggcgctgctttggtggccgaggttataaaggatcgactttgcttcgcgatcttatatagcaggccaaagtcggcttccaacgtgcattacttctccatcgataatgaattggagtatgaaaacttctatgcagacttcggacctctcaacctcgccatggtctacagatattgctgcaaaattaataaaaagcttaagagtattacaatgttgaggaagaagattgtgcacttcacaggatctgaccagcgtaagcaagccaacgcggccttcctggtgggttgctatatggtgatctacctgggacgaactcctgaagaagcctacaggatcctgatcttcggtgagactagctatatccccttcagagatgcagcatacggaagttgcaacttctatataactctactggattgtttccatgccgtgaagaaagcgatgcagtacggctttctgaattttaattctttcaacctggacgagtacgagcattatgagaaagcagaaaacggcgacctaaactggattatacccgacaggttcatcgctttctgcggcccccacagccgggcgcgattagagtcaggatatcaccagcactcccccgagacttatattcagtatttcaagaaccataatgtgacaactatcattagactgaataagcgaatgtatgatgctaaaagatttaccgatgccggcttcgaccaccacgacctgttcttcgctgacggttccacccctaccgacgctattgtcaaagaattcctagacatctgtgagaatgcagagggagccatcgcagtgcactgtaaggccggcttggggcggactggaaccctgatcgcttgctacataatgaagcactacaggatgaccgctgcggaaacaatcgcctgggtgagaatatgtagaccaggctcagttatcggaccccagcagcaatttctggtcatgaagcaaacaaatctgtggctcgagggtgactactttagacaaaagcttaagggtcaggagaacggtcagcatcgggccgcgttctctaagctactgagcggcgtggacgacatcagtatcaatggcgttgaaaatcaggatcagcaggagccagaaccttacagcgacgatgatgagatcaatggggtgactcagggcgatcggttaagggcccttaaatcaaggagacagtcaaagacaaatgcaattcccctcacagtgatccttcagagcagcgtccagagttgcaagacgagcgaacccaatataagtggtagtgcaggaataactaaacggacgacacgcagcgcctcacggaaaagcagcgttaagtctctatccatcagtaggacaaagactgtgcttcggtag

SEQ ID NO: 311174 - DNA, 1386 bp, Artificial Sequence
  derived and/or modified sequence
atgagccgggagggcgctggggccgccctggtggccgaggtgatcaaggaccggctgtgctttgccatcctgtacagccggcccaagagcgccagcaatgtgcactacttcagcattgacaatgagctggagtatgagaacttctacgccgactttggccccctgaacctggccatggtgtaccgctactgctgcaagatcaacaagaagctgaagagcatcaccatgctgaggaagaagatcgtgcacttcaccggcagtgaccagaggaagcaggccaatgctgccttcctggtgggctgctacatggtgatctacctgggccgcaccccagaggaggcctaccgcatcctgatctttggagagaccagctacatccccttcagagatgctgcctacggcagctgcaacttctacatcaccctgctggactgcttccacgctgtgaagaaggccatgcagtatggcttcctgaacttcaacagcttcaacctggatgaatatgagcactatgagaaggcagaaaatggagacctgaactggatcatcccagaccgcttcatcgccttctgtggcccccacagccgggcccggctggagagcggctaccaccagcacagccctgagacctacatccagtacttcaagaaccacaacgtgaccaccatcatccggctgaacaagaggatgtatgatgccaagcgcttcacagatgctggctttgaccaccacgacctcttctttgctgatggcagcacccccacagatgccatcgtgaaggagttcctggacatctgtgaaaatgctgagggcgccatcgctgtgcactgcaaggccggcctgggccgcacaggcaccctcatcgcctgctacatcatgaagcactacaggatgacagctgctgagaccatcgcctgggtgcgcatctgccggcccggcagcgtcatcggcccccagcagcagttcctggtgatgaagcagaccaacctgtggctggagggggactacttccggcagaagctgaagggccaggagaatggccagcacagagctgccttcagcaagctgctgagcggcgtggatgacatcagcatcaacggggtggagaaccaggaccagcaggagcctgagccctacagtgatgatgatgagatcaacggggtgacccagggcgaccggctgcgggccctgaagagccggcggcagagcaagaccaatgccatccccctgaccgtcatcctgcagagctctgtgcagagctgcaagaccagcgagcccaacatcagcggcagcgctggcatcaccaagaggaccaccaggtctgccagcaggaagagctctgtgaagagcctgagcatcagcaggaccaagacagtgctgaggtag

SEQ ID NO: 311175 - DNA, 1386 bp, Artificial Sequence
  derived and/or modified sequence
atgagccgggagggcgccggcgccgccctggtggccgaggtgatcaaggaccgtttatgctttgcaattctgtacagtcggcccaagtcagctagcaacgtacattatttttccattgacaatgaactcgagtatgaaaatttttatgctgatttcggcccattaaatctggccatggtttaccgttattgttgtaagataaataaaaagctgaagagcattactatgcttaggaaaaagatcgttcattttacagggtcggatcagcgaaagcaggccaatgcagcattcttggtgggctgctatatggtgatctacctaggtcggacaccggaggaagcgtatcgaattttgatattcggcgagacatcctacatcccgttcagagatgccgcttacgggagttgtaatttctacataaccctgctcgactgcttccacgcagtgaaaaaggccatgcagtacgggttcctgaacttcaactcattcaatctggatgagtatgaacactacgagaaagcagaaaatggagacttgaattggatcatccctgatcgatttattgccttttgcggtccccactcccgcgcaagattggagtccggataccaccagcactcacctgagacctacatacagtattttaagaaccataatgtgaccacgattatacgcctcaataagagaatgtatgatgcaaagcggtttacagacgcgggtttcgaccatcacgatctgtttttcgccgacgggagcacaccaacagacgccatcgtcaaggagttcttagatatctgcgagaatgcagagggggcaattgcggtgcattgcaaggcagggctgggacgcacagggacgctgatcgcgtgctatattatgaaacattacagaatgacggccgccgaaaccatagcttgggtgcgcatatgcagacctggatccgtcattgggccccagcagcagttcttggtgatgaagcaaactaatctgtggctcgagggagactatttccggcagaaactaaaaggtcaggaaaacgggcagcatcgggctgcgtttagtaagctcctctcgggggttgacgacatctcgattaatggcgtcgagaaccaggatcagcaggaacctgaaccctattcagacgatgatgagatcaatggagtgacacagggggacaggctccgcgcactgaagagtcgccgccagagtaaaacaaacgcaatcccccttacagtgatcctgcagtcttctgtacaaagctgcaaaaccagtgagcctaacatttccgggtccgccgggatcacgaagaggacgacacgaagcgcaagccgtaagtcaagcgtgaaatctctgagtatctcccgaaccaagacggtgttgcggtag

SEQ ID NO: 311176 - DNA, 1386 bp, Artificial Sequence
  derived and/or modified sequence
atgtcaagggaaggtgccggtgcagcactagtagctgaagttattaaagacaggctgtgctttgctattctgtattcccgtcccaaatctgcttctaatgtacattatttttcgattgacaatgagctcgaatacgagaatttttacgctgacttcgggccactgaacctggctatggtatatcgatactgctgcaaaataaataaaaagctgaaatcaattactatgctgaggaagaaaattgtgcactttaccggaagtgatcagagaaaacaggcaaacgccgcattcctcgttggctgctatatggtcatctacctcggcagaactcccgaggaagcctatagaatcctcatattcggggagacaagttacatcccttttagagacgccgcttacggaagctgcaatttttatatcacgctgctggattgcttccatgcggtgaaaaaagccatgcagtatgggtttctcaacttcaactcttttaacctcgatgagtatgaacactacgagaaagctgaaaacggggaccttaattggatcatccccgaccggttcatcgcattctgcggccctcattccagggcaaggctcgaatctggctaccaccagcacagcccggaaacttatatacagtacttcaaaaatcacaatgtgaccacaataattcgcctgaataagagaatgtatgacgcaaaacggttcactgatgcgggattcgaccatcatgacctcttcttcgcagatggatccacccctacggacgcaatagtcaaagaattcctcgatatttgcgagaacgccgagggggctatcgccgtccattgtaaggccggattgggacggaccggaactttaattgcctgctatatcatgaagcactataggatgaccgctgccgagacaatagcctgggtccgaatctgcagacccggtagcgtgattggacctcagcagcaattcctggtgatgaaacaaaccaacctgtggctggaaggcgattacttccgccagaaactgaaaggtcaggagaatggccagcatagggccgctttcagtaaactcctgtcaggagttgatgatatcagcataaatggtgtcgaaaaccaggatcaacaagaacccgaaccatattccgacgatgatgaaattaacggggttacccagggagaccgccttcgggcactgaagtcaaggagacaatccaagaccaacgccattccactcaccgtgatactgcaaagcagtgttcagtcatgcaagactagcgaacccaatatttctggatcagctggaataactaagcgaactactcggtccgcaagccgcaagtcgtcagtcaagagtttgtccatatcccggaccaagaccgttttgaggtag

SEQ ID NO: 311177 - DNA, 2965 bp, Artificial Sequence
  derived and/or modified sequence
ccttttgctcgaagtcctttaatcgctaaggagctttcccagactcttccctctgcaggcccgctggcctctgacgcatgtcccctctgcggagcgtttgggcactggaggagccctggttggcacaggccgccccgcgttcccagctggggaaggaaggcgggcggccaggcggggggaaagaaagcgggaggtggggcggggtgctgtccgtccccacggcctcgtcgcgcgcggggctttttccaggacttggggacttccggggttgcgctgtcgtgtcaggccgttgggccgccgaggggtgtcgctgcgcccgctgccccgcgcggccctttaaactttgttttttaaacttcgggggtgtggtcgcggcgcctcccctctcggcggctggcagtccttgcctctgccccgccttccagatgctttggagtcatgagccgggagggcgcgggggcagctttggtagccgaggtgatcaaagatcgcctttgttttgccattctctacagcagaccaaagagtgcatcaaatgtacattatttcagcatagataatgaacttgaatatgagaacttctacgcagattttggaccactcaatctggcaatggtttacagatattgttgcaagatcaataagaaattaaagtccattacaatgttaaggaagaaaattgttcattttactggctctgatcagagaaaacaagcaaatgctgccttccttgttggatgctacatggttatatatttggggagaaccccagaagaagcatatagaatattaatctttggagagacatcctatattcctttcagagatgctgcctatggaagttgcaatttctacattacacttcttgactgttttcatgcagtaaagaaggcaatgcagtatggcttccttaatttcaactcatttaaccttgatgaatatgaacactatgaaaaagcagaaaatggagatttaaattggataataccagaccgatttattgccttctgtggacctcattcaagagccagacttgaaagtggttaccaccaacattctcctgagacttatattcaatattttaagaatcacaatgttactaccattattcgtctgaataaaaggatgtatgatgccaaacgctttacggatgctggcttcgatcaccatgatcttttctttgcggatggcagcacccctactgatgccattgtcaaagaattcctagatatctgtgaaaatgctgagggtgccattgcagtacattgcaaagctggccttggtcgcacgggcactctgatagcctgctacatcatgaagcattacaggatgacagcagccgagaccattgcgtgggtcaggatctgcagacctggctcggtgattgggcctcagcagcagtttttggtgatgaagcaaaccaacctctggctggaaggggactattttcgtcagaagttaaaggggcaggagaatggacaacacagagcagccttctccaaacttctctctggcgttgatgacatttccataaatggggtcgagaatcaagatcagcaagaacccgaaccgtacagtgatgatgacgaaatcaatggagtgacacaaggtgatagacttcgggccttgaaaagcagaagacaatccaaaacaaacgctattcctctcacagtaattcttcaatccagtgttcagagctgtaaaacatctgaacctaacatttctggcagtgcaggcattactaaaagaaccaccagatctgcttcaaggaaaagcagtgttaaaagtctctccatttcaaggactaaaacagtcttgcgttaagtaaaaacctgtgaccagagctgaaggaagactctaggactgaaaactgcaacagaaattagcacaatttgaaaacaaaacaaaattgcaaaagccttagttgctttttccacctaagaagttgatcaatggagaaaatgtccactggagtttgaataatgaactttgagtttgggtgcaagcaaatgactcagagaagggtccagctctcaagctgaatgacaaacatgctgttgtaaatttagtctcaggtgtaaatacccaagccctctggtacccagggagctggctggtctgtggtgcatgtgtgtccctgtgatggcaatcattgtagttgctggccttcagaagaattgaggatctgatggaggttttttatgtatttattttctgttcaccttgtgaccctgtgtcaaaatttataaagatacaaaaggcattactgaaatggtactttctgtaatttgatactatttggcttaatcatcttcacttgactatttgtaatactgttgtaatgttaactctgttaagtacccaagctgcttgtcttccaccaaagagtgctttattaacaagaatctgtgaaaatcacatttaaacactgttgcatgttgtaagaccaggtggtaccttagtaacctaaaacttgcaagagaatattaatggtagctttagaagactcaggaggagaaactgacttcagagttggaagatgttgcaagtcgttcctttttctgtccttcagggactgaagaactgggaggctgcccattgtttggttgccagtcatacaaattaaaatcatatttccttccatgaatggaagaaacacactattggtttttccccttggaaacagcaatcccaaataatgtcggcttacaaaaaaaaaaagttaccacttttttagagtccttccctgtaacattggattttttttttcccttatgagatccacctaaggccattgacgtggcctgcgatctcagtgacaatgatctgcttctggatctcactgttgcctttggttagggaacacaactagtaactctgcagagtgccttctcccgcagccctactggaacacagcagagtctgtgccatgaagcagttacagaaacagaattgatgtgctgct

SEQ ID NO: 311178 - DNA, 1386 bp, Artificial Sequence
  derived and/or modified sequence
atgagcagagagggcgccggcgccgccctggtggccgaggtgatcaaggacagactgtgcttcgccatcctgtacagcagacccaagagcgccagcaacgtgcactacttcagcatcgacaacgagctggagtacgagaacttctacgccgacttcggccccctgaacctggccatggtgtacagatactgctgcaagatcaacaagaagctgaagagcatcaccatgctgagaaagaagatcgtgcacttcaccggcagcgaccagagaaagcaggccaacgccgccttcctggtgggctgctacatggtgatctacctgggcagaacccccgaggaggcctacagaatcctgatcttcggcgagaccagctacatccccttcagagacgccgcctacggcagctgcaacttctacatcaccctgctggactgcttccacgccgtgaagaaggccatgcagtacggcttcctgaacttcaacagcttcaacctggacgagtacgagcactacgagaaggccgagaacggcgacctgaactggatcatccccgacagattcatcgccttctgcggcccccacagcagagccagactggagagcggctaccaccagcacagccccgagacctacatccagtacttcaagaaccacaacgtgaccaccatcatcagactgaacaagagaatgtacgacgccaagagattcaccgacgccggcttcgaccaccacgacctgttcttcgccgacggcagcacccccaccgacgccatcgtgaaggagttcctggacatctgcgagaacgccgagggcgccatcgccgtgcactgcaaggccggcctgggcagaaccggcaccctgatcgcctgctacatcatgaagcactacagaatgaccgccgccgagaccatcgcctgggtgagaatctgcagacccggcagcgtgatcggcccccagcagcagttcctggtgatgaagcagaccaacctgtggctggagggcgactacttcagacagaagctgaagggccaggagaacggccagcacagagccgccttcagcaagctgctgagcggcgtggacgacatcagcatcaacggcgtggagaaccaggaccagcaggagcccgagccctacagcgacgacgacgagatcaacggcgtgacccagggcgacagactgagagccctgaagagcagaagacagagcaagaccaacgccatccccctgaccgtgatcctgcagagcagcgtgcagagctgcaagaccagcgagcccaacatcagcggcagcgccggcatcaccaagagaaccaccagaagcgccagcagaaagagcagcgtgaagagcctgagcatcagcagaaccaagaccgtgctgagatag

SEQ ID NO: 311179 - protein, 471 aa, Artificial Sequence
  derived and/or modified sequence
MKRKSERRSSWAAAPPCSRRCSSTSPGVKKIRSSTQQDPRRRDPQDDVYLDITDRLCFAILYSRPKSASNVHYFSIDNELEYENFYADFGPLNLAMVYRYCCKINKKLKSITMLRKKIVHFTGSDQRKQANAAFLVGCYMVIYLGRTPEEAYRILIFGETSYIPFRDAAYGSCNFYITLLDCFHAVKKAMQYGFLNFNSFNLDEYEHYEKAENGDLNWIIPDRFIAFCGPHSRARLESGYHQHSPETYIQYFKNHNVTTIIRLNKRMYDAKRFTDAGFDHHDLFFADGSTPTDAIVKEFLDICENAEGAIAVHCKAGLGRTGTLIACYIMKHYRMTAAETIAWVRICRPGSVIGPQQQFLVMKQTNLWLEGDYFRQKLKGQENGQHRAAFSKLLSGVDDISINGVENQDQQEPEPYSDDDEINGVTQGDRLRALKSRRQSKTNAIPLTDGWLSQAVTFLDRLLIWLGIHKD

SEQ ID NO: 311180 - DNA, 1416 bp, Artificial Sequence
  derived and/or modified sequence
atgaagcgaaaatcagagcgtaggtccagttgggctgctgccccaccttgctcgagacgttgcagtagcacctctcccggcgtgaaaaaaattaggtcttccactcagcaggatcctagacgacgggacccccaggacgatgtctacctggacattacagatagactctgcttcgccatcctgtattcacgacccaaatccgcctcaaatgtgcattatttctccattgacaacgagctggaatacgagaacttctacgcagactttggacccctcaacctcgctatggtgtatagatactgctgtaaaatcaataagaaactgaaaagcattacaatgctccgcaaaaagattgtgcacttcacaggttccgatcaaaggaagcaggccaatgccgctttcctcgtcgggtgctacatggtgatctacctgggccgaactcccgaagaggcttataggatactgattttcggagagactagctacatcccctttcgcgacgccgcctacggctcctgcaatttttacataactcttcttgattgttttcacgccgtcaaaaaagctatgcagtacggattcctgaactttaattccttcaacttggatgagtatgagcattatgaaaaggccgaaaacggcgatttaaactggatcatacctgatcgatttatagctttctgcgggccccactccagagcccggctcgagagcggctaccatcagcattcacctgagacctacattcaatactttaagaaccacaatgtgaccacaattatccggttgaataagagaatgtatgatgcaaagcggtttactgacgccgggttcgaccatcatgatctgttctttgccgacgggagtaccccgacagatgcgatcgttaaagagttcttggacatttgtgagaacgctgagggcgccatcgccgtgcactgcaaagcgggcctggggagaacgggaaccctgattgcttgctatatcatgaagcattaccgaatgactgctgccgagactattgcctgggttcgcatctgtcggcctgggagtgtcataggacctcagcaacagtttctcgtgatgaagcagactaacctttggttggagggcgactacttcagacagaaactcaaagggcaagagaacggacagcaccgtgctgcctttagcaagcttctgtccggcgtagacgatatttcaatcaacggagtggagaaccaggatcagcaggaaccagagccgtattccgacgacgacgagatcaacggcgttacccaaggtgacaggctgcgtgccctaaaatcacgcaggcagtctaagacaaatgctattcccctcacggacggatggctgagccaggccgtcacatttctggatcgactgctcatttggctgggaatccataaagattag

SEQ ID NO: 311181 - DNA, 1416 bp, Artificial Sequence
  derived and/or modified sequence
atgaagaggaagtcagaaagaagaagctcctgggccgccgccccaccctgcagccgccgctgcagcagcaccagccctggggtgaagaagatccgcagcagcacccagcaggaccccaggagaagagacccccaggatgatgtgtacctggacatcacagaccggctgtgctttgccatcctgtacagccggcccaagagcgccagcaatgtgcactacttcagcattgacaatgagctggagtatgagaacttctatgctgactttggccccctgaacctggccatggtgtaccgctactgctgcaagatcaacaagaagctgaagagcatcaccatgctgaggaagaagatcgtgcacttcaccggcagtgaccagaggaagcaggccaatgctgccttcctggtgggctgctacatggtgatctacctgggccgcaccccagaggaggcctaccgcatcctgatctttggagagaccagctacatccccttcagagatgctgcctacggcagctgcaacttctacatcaccctgctggactgcttccacgctgtgaagaaggccatgcagtatggcttcctgaacttcaacagcttcaacctggatgaatatgagcactatgagaaggccgagaatggagacctgaactggatcatcccagaccgcttcatcgccttctgtggcccccacagccgggcccggctggagagcggctaccaccagcacagccctgagacctacatccagtacttcaagaaccacaacgtgaccaccatcatccggctgaacaagaggatgtatgatgccaagcgcttcacagatgctggctttgaccaccacgacctcttctttgctgatggcagcacccccacagatgccatcgtgaaggagttcctggacatctgtgaaaatgctgagggcgccatcgctgtgcactgcaaggccggcctgggccgcacaggcaccctgattgcctgctacatcatgaagcactacaggatgacagctgctgagaccatcgcctgggtgcgcatctgcaggcctggctctgtgattggcccccagcagcagttcctggtgatgaagcagaccaacctgtggctggagggggactacttccggcagaagctgaagggccaggagaatggccagcaccgggccgccttcagcaagctgctgtctggagtggatgacatcagcatcaatggagtggagaaccaggaccagcaggagcctgagccctacagtgatgatgatgagatcaatggagtgacccagggcgaccggctgcgggccctgaagagccggcggcagagcaagaccaatgccatccccctgacagatggctggctgagccaggccgtgaccttcctggaccggctgctgatctggctgggcatccacaaggactag

SEQ ID NO: 311182 - DNA, 1416 bp, Artificial Sequence
  derived and/or modified sequence
atgaagcggaagagcgagcggcggagcagctgggccgccgcccccccatgttcaaggagatgttctagcacttccccaggcgtgaagaaaattcggtcaagtacccagcaggacccaagacgcagagatccccaggacgatgtgtaccttgatatcacagaccgcttatgcttcgccattctctattcacgcccaaagagtgcgagcaatgtgcattacttctcaatagacaacgagctcgagtatgagaatttctacgctgacttcggccccctaaatctggccatggtgtataggtactgttgtaaaatcaacaagaaattgaaaagtattacaatgctgcgcaagaaaattgtgcactttacgggtagcgatcagagaaagcaggcaaacgcagcctttttggtaggatgttacatggtgatttaccttggtagaacgccagaggaagcctaccggattctaatctttggagagacaagctacatcccgttcagggatgcagcctatgggtcctgcaacttctacatcacccttcttgattgcttccacgctgtgaaaaaggctatgcagtacggattcctcaacttcaattcttttaatctcgacgagtatgagcattacgaaaaagcagaaaacggggatctcaactggattatccccgaccgattcattgcgttttgcggcccgcacagccgtgctagactggagtctgggtatcatcagcattcacccgaaacttatatccaatatttcaaaaatcataacgttacaacaattatccgcttaaataagcgaatgtacgacgcaaagcggtttacagatgcaggctttgaccatcacgatctcttttttgcagacgggtctaccccaacagacgcgattgtcaaggagtttcttgatatttgtgaaaacgcagagggcgcaatcgccgtgcattgcaaagcgggtcttggacggaccggaacgcttatcgcctgttatatcatgaaacactacaggatgacagcggccgaaactatcgcttgggtgagaatttgccgcccaggcagtgtgattggcccgcaacaacagttccttgtgatgaaacaaacaaacctgtggctagaaggcgactactttaggcagaaactgaaaggtcaggaaaatggtcagcatcgcgccgccttctctaaactgctctccggagtggacgacatatctatcaatggtgtcgagaatcaggaccagcaggagcccgaaccctatagcgacgacgacgagatcaatggcgtgactcagggcgacagactgcgggccctgaagtctcgacggcagtccaaaacgaacgcaatccctctcaccgacggctggttgtcgcaagctgtaacctttctggaccgcttgctcatctggctgggcatccataaggactag

SEQ ID NO: 311183 - DNA, 1416 bp, Artificial Sequence
  derived and/or modified sequence
atgaagcgaaagtcggagagaaggagctcctgggccgctgcccctccttgttctcgtcggtgttcctctacaagcccaggcgtcaagaaaattcgatcctcaacccaacaggacccaagaagaagggatcctcaggatgacgtgtatctcgatatcactgatcgtctgtgctttgctattctgtattcaaggcctaagtctgcatccaacgtgcattattttagtatcgataacgaactcgagtacgagaacttctatgcagactttggccctctcaacctagctatggtgtatagatactgctgcaagattaataaaaagctaaaaagtattacaatgctccgcaagaaaatagtgcattttactgggtccgaccagagaaaacaggccaatgccgcttttctggtaggatgctacatggtcatctatctggggcgtacgcctgaggaggcttaccgaattcttatcttcggtgaaacgtcctatatcccattcagagatgccgcatatggctcgtgtaacttttatattacacttcttgattgtttccacgcagtgaagaaggcaatgcagtacggtttcttaaatttcaattccttcaacctagacgagtatgagcactatgagaaagccgagaacggtgatctgaactggatcattcctgaccggttcatcgcattttgcgggccacatagccgagctaggcttgaaagcggctatcaccagcatagccctgaaacatacattcagtacttcaagaaccacaacgtgaccacaataattaggttaaataagcggatgtatgacgctaaaagattcactgacgcgggtttcgatcaccacgatctcttttttgccgacgggagcactcccacagacgccattgtaaaggagtttcttgatatctgtgagaatgctgagggagctatcgcagtgcattgcaaggcaggcctgggccgtaccgggaccctgattgcttgctacattatgaagcattaccggatgacggccgcagagaccatcgcctgggtgagaatctgtcgtcctggctcagtaatcggtcctcagcagcaatttctggttatgaaacaaactaacctgtggctagaaggggactacttcaggcagaaactgaagggtcaagaaaatgggcagcatagggcagccttctccaagctgctgagtggtgtggatgacatttccataaacggcgtcgagaatcaggatcagcaggaacccgaaccctacagtgatgatgatgagattaacggtgtcacccaaggcgacaggcttagagcacttaagtcacggaggcagtcgaagaccaatgctattccgctgactgatggatggctgagtcaggcagtgacattcctggatcgccttctaatatggctcggaatccacaaagactag

SEQ ID NO: 311184 - DNA, 1868 bp, Artificial Sequence
  derived and/or modified sequence
cacggaacagccctcctggggtccccacgagccgcgtcctgctgtgccccggcgcctacgcagcagcggccgcggccgcggtgggcacgcacggttaccccgggcagctccggccgccagctgcagccccgtcgcctcggccgcgccagccggctgcgggcacctgggggcgggctgggggcgccggccgcggcaggaggcgctgtagcgagggctgcggcgccggtcctgcggcggccgcgggaggcagcggggcaggcgctgtgggccgggctcctcctccggctcctgcgcgaccgcctcccgccgggctctgccggcgcccgccgtccccgcagcgccgctctgcgcccgccgccccgagcgcccgcgcggggctggcgggagcctcggcgggcgcgcgggcgcgcggggccatggtcgtggccccctgacgggccgcggccgcctccatgaagcggaaaagcgagcggcggtcgagctgggccgccgcgcccccctgctcgcggcgctgctcgtcgacctcgccgggtgtgaagaagatccgcagctccacgcagcaagacccgcgccgccgggacccccaggacgacgtgtacctggacatcaccgatcgcctttgttttgccattctctacagcagaccaaagagtgcatcaaatgtacattatttcagcatagataatgaacttgaatatgagaacttctacgcagattttggaccactcaatctggcaatggtttacagatattgttgcaagatcaataagaaattaaagtccattacaatgttaaggaagaaaattgttcattttactggctctgatcagagaaaacaagcaaatgctgccttccttgttggatgctacatggttatatatttggggagaaccccagaagaagcatatagaatattaatctttggagagacatcctatattcctttcagagatgctgcctatggaagttgcaatttctacattacacttcttgactgttttcatgcagtaaagaaggcaatgcagtatggcttccttaatttcaactcatttaaccttgatgaatatgaacactatgaaaaagcagaaaatggagatttaaattggataataccagaccgatttattgccttctgtggacctcattcaagagccagacttgaaagtggttaccaccaacattctcctgagacttatattcaatattttaagaatcacaatgttactaccattattcgtctgaataaaaggatgtatgatgccaaacgctttacggatgctggcttcgatcaccatgatcttttctttgcggatggcagcacccctactgatgccattgtcaaagaattcctagatatctgtgaaaatgctgagggtgccattgcagtacattgcaaagctggccttggtcgcacgggcactctgatagcctgctacatcatgaagcattacaggatgacagcagccgagaccattgcgtgggtcaggatctgcagacctggctcggtgattgggcctcagcagcagtttttggtgatgaagcaaaccaacctctggctggaaggggactattttcgtcagaagttaaaggggcaggagaatggacaacacagagcagccttctccaaacttctctctggcgttgatgacatttccataaatggggtcgagaatcaagatcagcaagaacccgaaccgtacagtgatgatgacgaaatcaatggagtgacacaaggtgatagacttcgggccttgaaaagcagaagacaatccaaaacaaacgctattcctctcaccgatggttggctgtcccaggctgtcacctttctagaccggcttctgatctggctcgggatccacaaggactag

SEQ ID NO: 311185 - DNA, 1416 bp, Artificial Sequence
  derived and/or modified sequence
atgaagagaaagagcgagagaagaagcagctgggccgccgcccccccctgcagcagaagatgcagcagcaccagccccggcgtgaagaagatcagaagcagcacccagcaggaccccagaagaagagacccccaggacgacgtgtacctggacatcaccgacagactgtgcttcgccatcctgtacagcagacccaagagcgccagcaacgtgcactacttcagcatcgacaacgagctggagtacgagaacttctacgccgacttcggccccctgaacctggccatggtgtacagatactgctgcaagatcaacaagaagctgaagagcatcaccatgctgagaaagaagatcgtgcacttcaccggcagcgaccagagaaagcaggccaacgccgccttcctggtgggctgctacatggtgatctacctgggcagaacccccgaggaggcctacagaatcctgatcttcggcgagaccagctacatccccttcagagacgccgcctacggcagctgcaacttctacatcaccctgctggactgcttccacgccgtgaagaaggccatgcagtacggcttcctgaacttcaacagcttcaacctggacgagtacgagcactacgagaaggccgagaacggcgacctgaactggatcatccccgacagattcatcgccttctgcggcccccacagcagagccagactggagagcggctaccaccagcacagccccgagacctacatccagtacttcaagaaccacaacgtgaccaccatcatcagactgaacaagagaatgtacgacgccaagagattcaccgacgccggcttcgaccaccacgacctgttcttcgccgacggcagcacccccaccgacgccatcgtgaaggagttcctggacatctgcgagaacgccgagggcgccatcgccgtgcactgcaaggccggcctgggcagaaccggcaccctgatcgcctgctacatcatgaagcactacagaatgaccgccgccgagaccatcgcctgggtgagaatctgcagacccggcagcgtgatcggcccccagcagcagttcctggtgatgaagcagaccaacctgtggctggagggcgactacttcagacagaagctgaagggccaggagaacggccagcacagagccgccttcagcaagctgctgagcggcgtggacgacatcagcatcaacggcgtggagaaccaggaccagcaggagcccgagccctacagcgacgacgacgagatcaacggcgtgacccagggcgacagactgagagccctgaagagcagaagacagagcaagaccaacgccatccccctgaccgacggctggctgagccaggccgtgaccttcctggacagactgctgatctggctgggcatccacaaggactag

SEQ ID NO: 311186 - protein, 422 aa, Artificial Sequence
  derived and/or modified sequence
MAKQLQARRLDGIDYNPWVEFVKLASEHDVVNLGQGFPDFPPPDFAVEAFQHAVSGDFMLNQYTKTFGYPPLTKILASFFGELLGQEIDPLRNVLVTVGGYGALFTAFQALVDEGDEVIIIEPFFDCYEPMTMMAGGRPVFVSLKPGPIQNGELGSSSNWQLDPMELAGKFTSRTKALVLNTPNNPLGKVFSREELELVASLCQQHDVVCITDEVYQWMVYDGHQHISIASLPGMWERTLTIGSAGKTFSATGWKVGWVLGPDHIMKHLRTVHQNSVFHCPTQSQAAVAESFEREQLLFRQPSSYFVQFPQAMQRCRDHMIRSLQSVGLKPIIPQGSYFLITDISDFKRKMPDLPGAVDEPYDRRFVKWMIKNKGLVAIPVSIFYSVPHQKHFDHYIRFCFVKDEATLQAMDEKLRKWKVEL

SEQ ID NO: 311187 - DNA, 1903 bp, Artificial Sequence
  derived and/or modified sequence
ttctagcggcgctttctcccgctctcgcctccgcgctagcgccctgctgcttcggggcggaagtagcggagccgggctcggcccccttaaagggacagggactgctgcaacctacggggtgtacttgggaacgaggggtgaagcggcccaggtgaggctcgccatggccaaacagctgcaggcccgaaggctagacgggatcgactacaacccctgggtggagtttgtgaaactggccagtgagcatgacgtcgtgaacttgggccagggcttcccggatttcccaccaccagactttgccgtggaagcctttcagcacgctgtcagtggagacttcatgcttaaccagtacaccaagacatttggttacccaccactgacgaagatcctggcaagtttctttggggagctgctgggtcaggagatagacccgctcaggaatgtgctggtgactgttggtggctatggggccctgttcacagccttccaggccctggtggacgaaggagacgaggtcatcatcatcgaacccttttttgactgctacgagcccatgacaatgatggcagggggtcgtcctgtgtttgtgtccctgaagccgggtcccatccagaatggagaactgggttccagcagcaactggcagctggaccccatggagctggccggcaaattcacatcacgcaccaaagccctggtcctcaacacccccaacaaccccctgggcaaggtgttctccagggaagagctggagctggtggccagcctttgccagcagcatgacgtggtgtgtatcactgatgaagtctaccagtggatggtctacgacgggcaccagcacatcagcattgccagcctccctggcatgtgggaacggaccctgaccatcggcagcgccggcaagaccttcagcgccactggctggaaggtgggctgggtcctgggtccagatcacatcatgaagcacctgcggaccgtgcaccagaactccgtcttccactgccccacgcagagccaggctgcagtagccgagagctttgaacgggagcagctgctcttccgccaacccagcagctactttgtgcagttcccgcaggccatgcagcgctgccgtgaccacatgatacgtagcctacagtcagtgggcctgaagcccatcatccctcagggcagctacttcctcatcacagacatctcagacttcaagaggaagatgcctgacttgcctggagctgtggatgagccctatgacagacgcttcgtcaagtggatgatcaagaacaagggcttggtggccatccctgtctccatcttctatagtgtgccacatcagaagcactttgaccactatatccgcttctgttttgtgaaggatgaagccacgctccaggccatggacgagaagctgcggaagtggaaggtggaactctagccctgaagtcacgccttggccctgacatccccacatgcccgcagagatcctctttgagtgtctgtctttgtccaggtttcagacatttctaggttggggaagatgctattgggaaacctcttctccgtgacacagaatgttctgggtgggagccgcccttcttcatcttagagaaccaagtgcctcctgtctgaaaggtgagggtggcctgacctgggcctctccctgcccctccataggtgggtttgtagggtcttgtgttgcttctggtctctccaggcttggctgagacggacggtagacttccaccatgtaccgatcacatcccagctctgcatggcccctgctaaggctcaggtataacctcaccttccctggctcatcttggccttggggagttgcctttaggcttgagtcctcaagcctctccttttcgtccataataaaatgtttaagttattaagatcctta

SEQ ID NO: 311188 - DNA, 2105 bp, Artificial Sequence
  derived and/or modified sequence
gtcgccatctttatgaggagaattctagcggcgctttctcccgctctcgcctccgcgctagcgccctgctgcttcggggcggaagtagcggagccgggctcggcccccttaaagggacagggactgctgcaacctacggggtgtacttgggaacgaggggtgaagcggcccaggtgaggctcgccatggccaaacagctgcaggcccgaaggctagacgggatcgactacaacccctgggtggagtttgtgaaactggccagtgagcatgacgtcgtgaacttgggccagggcttcccggatttcccaccaccagactttgccgtggaagcctttcagcacgctgtcagtggagacttcatgcttaaccagtacaccaagacatttgtctcactctgttatccaggctggagtgcaatggtgcgatcatggtccactgcagccttgaccctgccagtctcaagtggtcctcccacctcagcctctggagtaactgggactacaggctggtctcagagctggttggaaagttccttctttgatccaaaaaaaaaaaaaatcatttggggttacccaccactgacgaagatcctggcaagtttctttggggagctgctgggtcaggagatagacccgctcaggaatgtgctggtgactgttggtggctatggggccctgttcacagccttccaggccctggtggacgaaggagacgaggtcatcatcatcgaacccttttttgactgctacgagcccatgacaatgatggcagggggtcgtcctgtgtttgtgtccctgaagccgggtcccatccagaatggagaactgggttccagcagcaactggcagctggaccccatggagctggccggcaaattcacatcacgcaccaaagccctggtcctcaacacccccaacaaccccctgggcaaggtgttctccagggaagagctggagctggtggccagcctttgccagcagcatgacgtggtgtgtatcactgatgaagtctaccagtggatggtctacgacgggcaccagcacatcagcattgccagcctccctggcatgtgggaacggaccctgaccatcggcagcgccggcaagaccttcagcgccactggctggaaggtgggctgggtcctgggtccagatcacatcatgaagcacctgcggaccgtgcaccagaactccgtcttccactgccccacgcagagccaggctgcagtagccgagagctttgaacgggagcagctgctcttccgccaacccagcagctactttgtgcagttcccgcaggccatgcagcgctgccgtgaccacatgatacgtagcctacagtcagtgggcctgaagcccatcatccctcagggcagctacttcctcatcacagacatctcagacttcaagaggaagatgcctgacttgcctggagctgtggatgagccctatgacagacgcttcgtcaagtggatgatcaagaacaagggcttggtggccatccctgtctccatcttctatagtgtgccacatcagaagcactttgaccactatatccgcttctgttttgtgaaggatgaagccacgctccaggccatggacgagaagctgcggaagtggaaggtggaactctagccctgaagtcacgccttggccctgacatccccacatgcccgcagagatcctctttgagtgtctgtctttgtccaggtttcagacatttctaggttggggaagatgctattgggaaacctcttctccgtgacacagaatgttctgggtgggagccgcccttcttcatcttagagaaccaagtgcctcctgtctgaaaggtgagggtggcctgacctgggcctctccctgcccctccataggtgggtttgtagggtcttgtgttgcttctggtctctccaggcttggctgagacggacggtagacttccaccatgtaccgatcacatcccagctctgcatggcccctgctaaggctcaggtataacctcaccttccctggctcatcttggccttggggagttgcctttaggcttgagtcctcaagcctctccttttcgtccataataaaatgtttaagttattaagatcctta

SEQ ID NO: 311189 - DNA, 736 bp, Artificial Sequence
  derived and/or modified sequence
ggtggctgagaagaatgttggatccccagctccacggcccaccagccatctgggactggcaaacccacaggaacggaaggttcctcagggaccacaaagcccatgtgaggtccctgctgctgaagggattctgaggacaggaggagccaaattacctatccagggtcacccagccaagctcgccatggccaaacagctgcaggcccgaaggctagacgggatcgactacaacccctgggtggagtttgtgaaactggccagtgagcatgacgtcgtgaacttgggccagggcttcccggatttcccaccaccagactttgccgtggaagcctttcagcacgctgtcagtggagacttcatgcttaaccagtacaccaagacatttggttacccaccactgacgaagatcctggcaagtttctttggggagctgctgggtcaggagatagacccgctcaggaatgtgctggtgactgttggtggctatggggccctgttcacagccttccaggccctggtggacgaaggagacgaggtcatcatcatcgaacccttttttgactgctacgagcccatgacaatgatggcagggggtcgtcctgtgtttgtgtccctgaagccgggtcccatccagaatggagaactgggttccagcagcaactggcagctggaccccatggagctggccggcaaattcacatcacgcaccaaagccctggtcctcaacacccccaac

SEQ ID NO: 311190 - DNA, 555 bp, Artificial Sequence
  derived and/or modified sequence
atggcaaaacagttgcaggcacggagactggatggcattgattataacccatgggtcgaatttgtgaagctggcctcagagcacgacgtcgttaacctgggccaagggtttccagacttcccgccaccagattttgccgtcgaggccttccagcacgccgttagcggggacttcatgctgaaccagtacacaaagacattcggatatcctcctcttaccaagatcttagcttccttttttggcgaattgttggggcaagagatcgaccccctgcggaatgtgttggttacagtaggcgggtatggcgcactgtttaccgcgttccaggcgttagtggatgagggagacgaggtcattataatagaacctttttttgactgttacgagccaatgacaatgatggctggggggaggcctgtgttcgtctccctgaaaccaggccccatacagaatggagagctgggaagctcttcaaattggcagttggatcccatggagcttgcaggaaagttcaccagccggaccaaagctcttgtcctgaacacccccaattag

SEQ ID NO: 311191 - DNA, 756 bp, Artificial Sequence
  derived and/or modified sequence
atggccaaacagctgcaggcacgcagactggacgggatagattataacccctgggtggaattcgttaagcttgcttctgaacatgacgttgtcaatttaggccagggattccctgacttcccaccaccagattttgccgttgaggcctttcaacatgctgtatccggtgacttcatgctaaatcagtacaccaaaacttttggataccccccgctcaccaaaattctggcatccttcttcggagagctcttgggccaggaaatcgaccctctgagaaacgtactagttaccgtaggtggctatggagctttgttcaccgccttccaagccttggtcgacgagggcgacgaggtcatcatcatcgagccattctttgactgttatgagccaatgacgatgatggccggtgggcgccctgtgtttgtgagtttgaaaccagggccaattcagaacggagagcttggaagctctagtaactggcagctggaccctatggagttggcgggcaaattcacttccaggacgaaggcattggttctgaataccccaaataaccccctgggtaaggtcttctcccgggaggagcttgagctggtggccagcctctgtcagcagcacgacgtagtgtgcatcacagatgaggtttaccaatggatggtctatgatgggcatcagcacatttcaattgccagcctgcccgggatgtgggagcggaccttgacaatcggtagcgccggcaaaactttttccgcttag

SEQ ID NO: 311192 - DNA, 555 bp, Artificial Sequence
  derived and/or modified sequence
atggccaagcagctgcaggcccggcggctggatggcatcgactacaacccctgggtggagtttgtgaagctggccagcgagcatgatgtggtgaacctgggccagggcttcccagacttccccccaccagactttgctgtggaggccttccagcacgctgtgtctggggacttcatgctgaaccagtacaccaagaccttcggctacccacccctgaccaagatcctggccagcttcttcggggagctgctgggccaggagattgaccccctgagaaatgtgctggtgacagtgggcggctatggagccctcttcaccgccttccaggccctggtggatgaaggagatgaggtgatcatcatcgagcccttctttgactgctatgagcccatgaccatgatggccggcggccggcctgtgtttgtgtccctgaagccaggccccatccagaatggagagctgggcagcagcagcaactggcagctggaccccatggagctggccggcaagttcaccagcaggaccaaggccctggtgctgaacacccccaactag

SEQ ID NO: 311193 - DNA, 756 bp, Artificial Sequence
  derived and/or modified sequence
atggccaagcagctgcaggcccggcggctggatggcatcgactacaacccctgggtggagtttgtgaagctggccagcgagcatgatgtggtgaacctgggccagggcttcccagacttccccccaccagactttgctgtggaggccttccagcacgctgtgtctggggacttcatgctgaaccagtacaccaagaccttcggctacccacccctgaccaagatcctggccagcttcttcggggagctgctgggccaggagattgaccccctgagaaatgtgctggtgacagtgggcggctatggagccctcttcaccgccttccaggccctggtggatgaaggagatgaggtgatcatcatcgagcccttctttgactgctatgagcccatgaccatgatggccggcggccggcctgtgtttgtgtccctgaagccaggccccatccagaatggagagctgggcagcagcagcaactggcagctggaccccatggagctggccggcaagttcaccagcaggaccaaggccctggtgctgaacacccccaacaaccccctgggcaaggtgttcagccgggaggagctggagctggtggccagcctgtgccagcagcatgatgtggtgtgcatcacagatgaggtgtaccagtggatggtgtatgatggccaccagcacatcagcatcgccagcctgcccggcatgtgggagaggaccctgaccatcggcagcgctgggaagaccttcagcgcctag

SEQ ID NO: 311194 - DNA, 555 bp, Artificial Sequence
  derived and/or modified sequence
atggccaagcagctgcaggcccggcggctggacggcatcgactacaatccttgggtggagttcgtaaagctcgccagcgaacatgatgttgtcaacctgggccaggggttccctgacttccccccgcctgatttcgctgtggaggcatttcagcatgctgtcagcggagattttatgctgaatcaatatactaagacattcggataccccccgctgactaaaattctggcaagcttcttcggcgagctgctggggcaggaaatcgatccacttagaaacgttcttgtaaccgtaggaggctacggcgctctgttcacggcttttcaggcccttgttgacgagggggacgaagtgataatcattgagcccttttttgactgctacgaacccatgactatgatggccggtggtcgccctgtgttcgtaagtttaaaacccggcccaattcagaatggcgagcttggctcatcctccaactggcagctcgatcccatggaattggcgggcaagttcacatctagaaccaaggctctggtgctaaatacacccaactag

SEQ ID NO: 311195 - DNA, 756 bp, Artificial Sequence
  derived and/or modified sequence
atggccaagcagctgcaggcccggcggctggacggcatcgactacaacccgtgggtggaattcgtgaaacttgcttcagagcacgatgttgtaaaccttgggcaggggtttcccgacttccccccgccagacttcgctgtagaggcttttcagcatgctgtttctggcgattttatgttgaaccagtacactaagaccttcggttacccaccccttacaaagatactggcttcattctttggggagctgctcggccaagagattgatcctctccgcaacgtgctagtgaccgtgggaggatatggagccctgttcacagctttccaggcccttgtcgacgagggcgatgaagtcattattattgagccatttttcgactgctacgaacctatgactatgatggccggcggaaggcctgtgtttgtatcattgaagcctgggccaatccaaaacggtgagctaggtagctcttcgaattggcaactggatcctatggaactggcggggaagttcacttcccgcactaaagccctggtcctaaacacacccaataatcctctcggtaaagttttcagtagagaggaactcgaactggtggccagcctgtgtcaacagcacgatgtggtttgcattaccgatgaggtctaccagtggatggtctatgatgggcaccagcatatctccatcgctagccttccgggaatgtgggaacgaacacttaccatcggcagtgctggtaagactttctctgcgtag

SEQ ID NO: 311196 - DNA, 555 bp, Artificial Sequence
  derived and/or modified sequence
atggctaagcaactgcaagctcgaaggctggatggaatcgattacaatccttgggtggaatttgttaaactcgcttctgagcacgacgttgtgaatttgggccaggggtttcctgactttcctcccccagattttgccgttgaggcttttcagcacgctgtgtcaggcgactttatgctgaaccagtacactaagacattcggctaccccccactaaccaagatcctagcatctttctttggggagcttcttgggcaggagatagaccctctacggaacgtgctcgttaccgtggggggttacggcgctctgtttactgcctttcaggctcttgtcgacgaaggggatgaagttattattatcgaacccttctttgattgttacgagcccatgaccatgatggccggaggacgccctgtgttcgtctccctgaaaccaggacccatacagaacggcgaactcggcagttcttcaaactggcagctggatcccatggagctcgccggaaagtttacctcccgcaccaaagctctggtcctgaatactccaaattag

SEQ ID NO: 311197 - DNA, 756 bp, Artificial Sequence
  derived and/or modified sequence
atggcgaagcagcttcaagctcgtagactcgatggaatagattacaatccgtgggttgagttcgttaaattagcatctgagcacgacgtggttaatctgggccagggcttccccgacttcccaccccctgattttgccgtggaggcttttcagcatgccgtgtcaggtgattttatgctcaaccagtatacgaaaactttcggctaccctcctttgaccaagattctagctagtttttttggcgaattgctcgggcaggaaatcgaccccctccggaatgtgctggtgacagtgggaggatatggcgctctgtttaccgcctttcaagcactagtagacgaaggggacgaggtgataataatcgaaccttttttcgactgctacgaaccaatgaccatgatggcgggagggaggccagtgttcgtatccctgaagcccggtcccatacagaacggcgagttgggttcatcctccaactggcagctggaccccatggagctggcagggaagtttacatcacgaacaaaggctctcgttttaaacaccccaaataaccctttgggtaaggtcttctccagagaggagcttgagttagtggccagcttatgtcagcagcatgacgtggtctgtatcaccgatgaggtctatcagtggatggtttacgatggacaccagcacatctccattgccagcttacctgggatgtgggagcgaaccctgacaataggatccgctgggaagacattttcagcttag

SEQ ID NO: 311198 - DNA, 555 bp, Artificial Sequence
  derived and/or modified sequence
atggccaagcagctgcaggccagaagactggacggcatcgactacaacccctgggtggagttcgtgaagctggccagcgagcacgacgtggtgaacctgggccagggcttccccgacttccccccccccgacttcgccgtggaggccttccagcacgccgtgagcggcgacttcatgctgaaccagtacaccaagaccttcggctacccccccctgaccaagatcctggccagcttcttcggcgagctgctgggccaggagatcgaccccctgagaaacgtgctggtgaccgtgggcggctacggcgccctgttcaccgccttccaggccctggtggacgagggcgacgaggtgatcatcatcgagcccttcttcgactgctacgagcccatgaccatgatggccggcggcagacccgtgttcgtgagcctgaagcccggccccatccagaacggcgagctgggcagcagcagcaactggcagctggaccccatggagctggccggcaagttcaccagcagaaccaaggccctggtgctgaacacccccaactag

SEQ ID NO: 311199 - DNA, 756 bp, Artificial Sequence
  derived and/or modified sequence
atggccaagcagctgcaggccagaagactggacggcatcgactacaacccctgggtggagttcgtgaagctggccagcgagcacgacgtggtgaacctgggccagggcttccccgacttccccccccccgacttcgccgtggaggccttccagcacgccgtgagcggcgacttcatgctgaaccagtacaccaagaccttcggctacccccccctgaccaagatcctggccagcttcttcggcgagctgctgggccaggagatcgaccccctgagaaacgtgctggtgaccgtgggcggctacggcgccctgttcaccgccttccaggccctggtggacgagggcgacgaggtgatcatcatcgagcccttcttcgactgctacgagcccatgaccatgatggccggcggcagacccgtgttcgtgagcctgaagcccggccccatccagaacggcgagctgggcagcagcagcaactggcagctggaccccatggagctggccggcaagttcaccagcagaaccaaggccctggtgctgaacacccccaacaaccccctgggcaaggtgttcagcagagaggagctggagctggtggccagcctgtgccagcagcacgacgtggtgtgcatcaccgacgaggtgtaccagtggatggtgtacgacggccaccagcacatcagcatcgccagcctgcccggcatgtgggagagaaccctgaccatcggcagcgccggcaagaccttcagcgcctag

SEQ ID NO: 311200 - DNA, 1269 bp, Artificial Sequence
  derived and/or modified sequence
atggctaagcagctacaggcccgtcggttagatggaattgattataacccgtgggtagagttcgtgaagctcgcgtcggagcacgatgtcgtgaatttgggacaaggctttcccgacttcccaccccctgattttgctgtggaggctttccaacacgctgtttccggtgactttatgctgaatcaatatacaaagaccttcggctacccacccctcaccaagattctggctagcttctttggtgaattgctgggacaagagatcgaccctctgcgtaacgtgctcgtgaccgttggcgggtatggggccctgtttactgcatttcaggccctcgtcgacgagggggatgaagtcatcataatcgagccattcttcgactgttacgaaccaatgacaatgatggctggaggacgcccagtttttgttagcttgaagccagggccaattcagaacggagagctgggttcctcaagtaactggcaacttgaccccatggaattagcagggaagttcacgagccggactaaagccttggtgctaaacacgccaaataatccactgggtaaagttttttcaagggaagaattagagcttgttgcaagcttatgtcagcagcatgacgtggtgtgtattactgacgaagtttaccaatggatggtttatgacgggcatcagcacatatctatcgcctccctccctggaatgtgggaaaggacgctgacgataggctctgcgggaaagaccttttccgctaccggctggaaagtggggtgggtcttgggtccagatcatatcatgaagcatctcaggacggtccaccagaactctgtcttccactgccccacccagtcccaagctgccgtggccgaatcctttgaacgtgagcaactgctctttcgtcaaccctcttcttatttcgttcagtttcctcaggccatgcaacggtgccgggatcatatgatccgctcgttgcagtctgtgggcctcaaacctattatcccgcaggggtcctattttctcatcaccgatatctcagattttaagcgaaagatgcctgacctccctggggccgtcgatgagccttatgacaggcggtttgtgaagtggatgataaagaacaaaggcttggtggccataccagtctccatcttttacagtgtccctcatcagaagcactttgatcactatataaggttctgttttgtgaaagatgaggccacactgcaggctatggatgagaagctcagaaaatggaaggtggaactgtag

SEQ ID NO: 311201 - DNA, 1269 bp, Artificial Sequence
  derived and/or modified sequence
atggccaagcagctgcaggcccggcggctggatggcatcgactacaacccctgggtggagtttgtgaagctggccagcgagcatgatgtggtgaacctgggccagggcttcccagacttccccccaccagactttgctgtggaggccttccagcacgctgtgtctggggacttcatgctgaaccagtacaccaagaccttcggctacccacccctgaccaagatcctggccagcttcttcggggagctgctgggccaggagattgaccccctgagaaatgtgctggtgacagtgggcggctatggagccctcttcaccgccttccaggccctggtggatgaaggagatgaggtgatcatcatcgagcccttctttgactgctatgagcccatgaccatgatggccggcggccggcctgtgtttgtgtccctgaagccaggccccatccagaatggagagctgggcagcagcagcaactggcagctggaccccatggagctggccggcaagttcaccagcaggaccaaggccctggtgctgaacacccccaacaaccccctgggcaaggtgttcagccgggaggagctggagctggtggccagcctgtgccagcagcatgatgtggtgtgcatcacagatgaggtgtaccagtggatggtgtatgatggccaccagcacatcagcatcgccagcctgcccggcatgtgggagaggaccctgaccatcggcagcgctgggaagaccttcagcgccaccggctggaaggtgggctgggtgctgggccctgaccacatcatgaagcacctgaggacagtgcaccagaacagcgtcttccactgccccacccagagccaggccgctgtggccgagagctttgagcgggagcagctgctcttccggcagcccagcagctactttgtgcagttcccccaggccatgcagcgctgccgggaccacatgatccgcagcctgcagagcgtgggcctgaagcccatcatcccccagggcagctacttcctgatcacagacatcagtgacttcaagaggaagatgccagacctgcctggagctgtggatgagccctatgacagaagatttgtgaagtggatgatcaagaacaagggcctggtggccatccctgtgtccatcttctacagcgtgccccaccagaagcactttgaccactacatccgcttctgctttgtgaaggatgaggccaccctgcaggccatggatgagaagctgaggaagtggaaggtggagctgtag

SEQ ID NO: 311202 - DNA, 1269 bp, Artificial Sequence
  derived and/or modified sequence
atggccaagcagctgcaggcccggcggctggacggcatcgactacaacccctgggttgaattcgtgaagctcgcgagcgagcacgacgtggttaacttgggccagggcttccccgacttcccccctccagatttcgcggtggaagccttccagcacgctgtgagcggtgactttatgttaaatcagtacaccaaaaccttcggctatcccccactgaccaagattctggcaagcttttttggggaactattagggcaggagattgaccctctccgcaacgttctggttactgtgggcggctacggcgccctgttcactgcctttcaggccttggtggacgagggggacgaggtcattatcatcgagcctttctttgactgctatgagccaatgacaatgatggctggggggaggccagtctttgtatcattgaaacctggccctatccaaaacggcgaacttgggtcaagctctaattggcaactggaccccatggagcttgccggaaaatttacctctaggacaaaagccctggtactgaataccccaaacaatccgctgggtaaggttttcagtagggaggagctcgaactcgtagcgagcctctgccaacaacatgacgtggtttgtataacagatgaggtctatcagtggatggtgtatgacggacatcagcacatctcaattgcaagtctcccaggaatgtgggaaaggacactgaccattggctctgccggtaaaacattctccgcgaccggatggaaggtcgggtgggtccttggacccgatcatatcatgaagcacctcaggacagttcatcagaattcagtgttccattgccctactcagagccaggctgctgtagcggaatcttttgagagggaacagctgctcttcaggcagcctagtagctatttcgttcagttcccacaagctatgcagaggtgtcgggaccatatgattagatcacttcagagcgtagggttgaagcccatcatcccacaaggcagttattttctcataactgacatctccgacttcaagagaaaaatgccagacctgccaggcgccgtggacgaaccctacgatcggcggtttgtgaaatggatgattaaaaacaaaggactggtggccattcccgtgtctattttctattctgtgccccaccaaaaacatttcgaccattatattagattctgttttgtcaaagatgaagcaaccctgcaggccatggatgaaaaactgagaaaatggaaggtcgagctttag

SEQ ID NO: 311203 - DNA, 1269 bp, Artificial Sequence
  derived and/or modified sequence
atggcgaagcaactccaggccagaagactggatggaatagattacaacccttgggtcgagtttgtgaagttagcttctgagcatgacgttgtgaacttgggccagggctttcctgacttccctcctccagactttgccgtggaagccttccagcatgcagtgtccggggacttcatgctgaatcagtatacaaaaacgttcgggtacccaccactgacaaaaattctggcttcttttttcggtgagctcctgggtcaggaaattgacccactaagaaatgtgctcgtaacagtcggagggtacggggcactgttcactgcctttcaagctctagtcgatgagggagatgaggtcatcatcatcgaaccgtttttcgactgttacgagccaatgacaatgatggcaggcggtcgcccagtattcgtgtccttaaagccagggccaatccagaacggggaactggggagctccagcaactggcaactggaccctatggagctcgccggaaaattcacaagccggaccaaagccctggttcttaatacacccaacaacccgctaggaaaggtcttcagccgcgaagaacttgagttggtggcttctctctgtcagcagcatgatgttgtctgcatcaccgacgaggtgtatcagtggatggtgtacgacggccatcagcatattagcatcgccagtctgccaggtatgtgggagcgaaccctgacaattggaagcgccggaaagacatttagtgccaccggctggaaggtaggctgggtgctcggcccagatcacattatgaagcatctacgcacagtgcaccagaattcagtgtttcattgcccaactcagagccaagcagcagttgccgaaagcttcgagcgtgaacagctcctctttagacaaccttcctcctactttgtgcagttcccacaggccatgcagcgctgccgggaccatatgatccgaagcctgcagtctgtcggtttaaagcctatcatcccacaggggtcgtacttcttgatcacggatatatccgactttaaaaggaaaatgcccgacctccctggcgctgtggatgagccttacgacaggaggtttgtgaagtggatgatcaagaataaagggttagtggctataccggtgtccatcttttacagcgtcccccaccagaaacatttcgatcactatatccggttctgttttgtcaaagacgaggctacgctgcaggctatggacgagaagctgaggaagtggaaagtggagctttag

SEQ ID NO: 311204 - DNA, 1269 bp, Artificial Sequence
  derived and/or modified sequence
atggccaagcagctgcaggccagaagactggacggcatcgactacaacccctgggtggagttcgtgaagctggccagcgagcacgacgtggtgaacctgggccagggcttccccgacttccccccccccgacttcgccgtggaggccttccagcacgccgtgagcggcgacttcatgctgaaccagtacaccaagaccttcggctacccccccctgaccaagatcctggccagcttcttcggcgagctgctgggccaggagatcgaccccctgagaaacgtgctggtgaccgtgggcggctacggcgccctgttcaccgccttccaggccctggtggacgagggcgacgaggtgatcatcatcgagcccttcttcgactgctacgagcccatgaccatgatggccggcggcagacccgtgttcgtgagcctgaagcccggccccatccagaacggcgagctgggcagcagcagcaactggcagctggaccccatggagctggccggcaagttcaccagcagaaccaaggccctggtgctgaacacccccaacaaccccctgggcaaggtgttcagcagagaggagctggagctggtggccagcctgtgccagcagcacgacgtggtgtgcatcaccgacgaggtgtaccagtggatggtgtacgacggccaccagcacatcagcatcgccagcctgcccggcatgtgggagagaaccctgaccatcggcagcgccggcaagaccttcagcgccaccggctggaaggtgggctgggtgctgggccccgaccacatcatgaagcacctgagaaccgtgcaccagaacagcgtgttccactgccccacccagagccaggccgccgtggccgagagcttcgagagagagcagctgctgttcagacagcccagcagctacttcgtgcagttcccccaggccatgcagagatgcagagaccacatgatcagaagcctgcagagcgtgggcctgaagcccatcatcccccagggcagctacttcctgatcaccgacatcagcgacttcaagagaaagatgcccgacctgcccggcgccgtggacgagccctacgacagaagattcgtgaagtggatgatcaagaacaagggcctggtggccatccccgtgagcatcttctacagcgtgccccaccagaagcacttcgaccactacatcagattctgcttcgtgaaggacgaggccaccctgcaggccatggacgagaagctgagaaagtggaaggtggagctgtag

SEQ ID NO: 311205 - protein, 308 aa, Artificial Sequence
  derived and/or modified sequence
MKAEGFVDALHRVRQIAAKIDSIPHLNNSTPLVDPSVYGYGVQKRPLDDGVGNQLGALVHQRTVITEEFKVPDKMVGFIIGRGGEQISRIQAESGCKIQIASESSGIPERPCVLTGTPESIEQAKRLLGQIVDRCRNGPGFHNDIDSNSTIQEILIPASKVGLVIGRGGETIKQLQERTGVKMVMIQDGPLPTGADKPLRITGDAFKVQQAREMVLEIIREKDQADFRGVRGDFNSRMGGGSIEVSVPRFAVGIVIGRNGEMIKKIQNDAGVRIQFKPDDGISPEYYRQQVAFYGQTLGQAQAHSQDE

SEQ ID NO: 311206 - DNA, 927 bp, Artificial Sequence
  derived and/or modified sequence
atgaaagcagagggattcgtagatgctcttcatcgagtgcgacaaatcgctgctaaaatagatagtatacctcaccttaataactcaacaccactagttgaccccagtgtatacggctatggggtgcaaaagcggccgcttgacgatggagtcggtaaccagcttggggctttagtgcaccagcgcacagtgattactgaagaattcaaagtgccagataaaatggtgggtttcataatcggccgcgggggggaacaaatttcgcgaatccaggccgagagcggttgtaagattcaaatcgcatctgaatcctctggcataccagaacgcccctgtgttctaaccgggacacccgagagtatcgagcaggcaaagaggttgctgggccagattgttgataggtgtcggaacgggcctggcttccacaacgacatcgacagtaactccacaattcaagagatcctgatacccgccagtaaggtaggcctggtgatcggaagagggggggagaccataaagcagctccaagagcgcacaggagtgaaaatggtgatgatacaagatggcccactccccacaggagctgataaacccttgagaatcacgggtgacgctttcaaggttcagcaggcccgggaaatggtccttgagataatacgcgaaaaggaccaggcagatttccgtggagtgcgaggcgactttaattcccgcatgggtgggggatctattgaagtgtccgtgccccgatttgccgtaggaatcgtaatcggccggaatggggagatgattaagaaaattcaaaacgacgcaggtgtccggatccagttcaaacctgatgatggcatctctccagagtactaccgccagcaggtagcattctatggacagactttgggacaggctcaggcccactcacaagatgagtag

SEQ ID NO: 311207 - DNA, 786 bp, Artificial Sequence
  derived and/or modified sequence
atgccccccattgggaaccaattaggcgccctggtgcaccaacggacggtgatcaccgaagaatttaaggtccccgacaagatggttggcttcataatcggccgcgggggagagcaaatctcacgaattcaagctgaaagtggttgtaagatccaaatcgcatcagagagttccggaattccggagagaccttgtgtgctcacaggaacaccagagagcatagagcaagcaaagcgacttctgggccagatcgtcgatcgctgccgtaacggcccgggattccataacgacatcgatagcaattctacaatccaggaaatcttgatccccgccagcaaggtagggcttgtcattggacgaggcggagagaccattaaacaactgcaggaaaggaccggcgtgaagatggtgatgatccaggacggaccactccctaccggcgctgataaacctctccgtatcacaggggatgcattcaaggtgcagcaggcaagagaaatggtgctagaaatcattagagagaaggatcaagcagacttccggggagtcagaggggatttcaactcacgcatgggggggggctcgatcgaagtgagtgtgccgcgcttcgcggtcgggattgttatcgggcggaacggagagatgattaagaaaatacagaatgacgcaggggtgcgtatccagtttaagcccgacgacggcatcagccccgaatactatcgccagcaagtggctttctatggccagaccctcggacaagcccaggctcattcccaggaacagtag

SEQ ID NO: 311208 - DNA, 927 bp, Artificial Sequence
  derived and/or modified sequence
atgaaggccgagggctttgtggatgccctgcaccgggtgcggcagattgctgccaagattgacagcatcccccacctgaacaacagcacccccctggtggaccccagcgtgtatggctacggcgtgcagaagaggcccctggatgatggagtgggcaaccagctgggcgccctggtgcaccagaggacagtcatcacagaggagttcaaggtgcctgacaagatggtgggcttcatcatcggccggggcggggagcagatcagccgcatccaggccgagagcggctgcaagatccagatcgccagcgagagcagcggcatccctgagcggccctgtgtgctgaccggcaccccagagagcattgagcaggccaagaggctgctgggccagatcgtggaccgctgcagaaatggacctggcttccacaatgacatcgacagcaacagcaccatccaggagatcctgatcccagccagcaaggtgggcctggtgattggccggggcggggagaccatcaagcagctgcaggagaggactggagtgaagatggtgatgatccaggacggccccctgcccactggagctgacaagcccctgcgcatcactggagatgccttcaaggtgcagcaggcccgggagatggtgctggagatcatccgggagaaggaccaggccgacttccggggcgtgcggggggacttcaacagcaggatgggcggcggcagcattgaggtgtctgtgcccaggtttgctgtgggcatcgtcatcggcagaaatggagagatgatcaagaagatccagaatgatgctggggtgcgcatccagttcaagccagatgatggcatcagccctgagtactaccggcagcaggtggccttctacggccagaccctgggccaggcccaggcccacagccaggatgaatag

SEQ ID NO: 311209 - DNA, 786 bp, Artificial Sequence
  derived and/or modified sequence
atgccacccatcggcaaccagctgggcgccctggtgcaccagaggacagtcatcacagaggagttcaaggtgcctgacaagatggtgggcttcatcatcggccggggcggggagcagatcagccgcatccaggccgagagcggctgcaagatccagatcgccagcgagagcagcggcatccctgagcggccctgtgtgctgaccggcaccccagagagcattgagcaggccaagaggctgctgggccagatcgtggaccgctgcagaaatggacctggcttccacaatgacatcgacagcaacagcaccatccaggagatcctgatcccagccagcaaggtgggcctggtgattggccggggcggggagaccatcaagcagctgcaggagaggactggagtgaagatggtgatgatccaggacggccccctgcccaccggggctgacaagcccctgcgcatcactggagatgccttcaaggtgcagcaggcccgggagatggtgctggagatcatccgggagaaggaccaggccgacttccggggcgtgcggggggacttcaacagcaggatgggcggcggcagcattgaggtgtctgtgcccaggtttgctgtgggcatcgtgattggaagaaatggagagatgatcaagaagatccagaatgatgctggggtgcgcatccagttcaagccagatgatggcatcagccctgagtactaccggcagcaggtggccttctacggccagaccctgggccaggcccaggcccacagccaggagcagtag

SEQ ID NO: 311210 - DNA, 927 bp, Artificial Sequence
  derived and/or modified sequence
atgaaggccgagggcttcgtggacgccctgcaccgggtgcggcagattgccgctaaaatcgacagcattcctcaccttaacaattctacccctctcgtcgacccttccgtgtatggttatggggtgcaaaagagaccactggatgatggagttggaaaccaactgggagcactggtgcaccagcggactgttattaccgaagagttcaaggtcccagacaaaatggtcggatttataatcggtcgagggggggaacagattagccggattcaagccgagtccggctgtaagattcagattgccagtgaatccagcggaattcctgagagaccttgcgtgctgaccggaacgcctgaatcaattgagcaggctaaacggctgttgggccagatagttgaccgctgccgaaacggcccaggtttccacaatgatatcgattctaattccaccatccaggagatactgattccagcctccaaagttggtctggtcattggccggggaggtgaaacaatcaaacagctgcaggagagaactggtgttaaaatggttatgatacaggacggtcccttaccaaccggagcggacaagcctctcagaatcaccggcgatgccttcaaggttcagcaagcaagggaaatggtgctggagataattagggagaaggaccaggcagactttcgaggggtgagaggggatttcaatagtagaatgggaggtggatctatcgaggtgagcgttcccaggttcgcagtgggtatcgtgattggacgcaatggggaaatgattaagaaaattcagaatgacgccggtgtccggatacagtttaagcctgacgacggcattagcccagaatactacaggcagcaggttgccttttatgggcagaccctcggtcaggctcaggcacactcccaggatgagtag

SEQ ID NO: 311211 - DNA, 786 bp, Artificial Sequence
  derived and/or modified sequence
atgccccccatcggcaaccagctgggcgccctggtgcaccagcggaccgtgatcacggaagaattcaaagttccagacaagatggtcggtttcattatcggacgcggaggcgagcagatttccagaattcaggccgagtctggatgcaagattcagattgcctccgagtcatctggtattccagagcgcccttgtgtcttgactggaacccctgaaagcattgaacaggcaaagagactccttggccagatcgtcgaccgatgtagaaatggacccggtttccataatgatattgattctaatagcactatacaggaaattctgatcccagcatccaaagtaggactagtcattggtaggggcggggaaacgatcaaacagctgcaggagaggaccggagtgaagatggtcatgattcaggatggcccactacccactggcgccgataaacccttacgcataacgggcgacgctttcaaggtgcagcaggcgagagagatggtgctggagattattcgcgagaaggatcaagccgacttccgcggagtccggggcgatttcaacagtcggatgggggggggcagcattgaggtgtccgtgcctcgcttcgcagttgggatcgtgattggtaggaacggtgaaatgattaaaaagattcaaaacgatgcgggggtgcgcatacagtttaagccagacgacgggatctcccctgagtactatcgtcagcaggtggcattttacggacagacccttggacaggctcaggctcattctcaggaacaatag

SEQ ID NO: 311212 - DNA, 927 bp, Artificial Sequence
  derived and/or modified sequence
atgaaagctgaagggttcgtcgatgcattgcacagggtacggcaaattgcggcaaagatcgatagtatcccacatttaaacaactcaacacccctggtggatcccagcgtgtatggctacggcgtccagaaaagaccactcgacgacggggtcggcaaccaactgggcgcactggtgcatcaacgcacagtgattacagaggaattcaaagttccggataagatggtaggtttcatcatcggtagggggggagagcaaataagtagaatccaggctgaaagtggctgcaagatccaaatcgcttcagaatcatccggcatcccagagagaccatgcgtgctgacaggaacccctgagtccatagagcaggcaaaacggcttctcggccagatcgtggatcggtgcaggaatggccctggtttccataatgatatcgactctaactcaacaatccaagaaatcctcatcccggctagcaaggttgggctggtaattggacggggtggtgaaactattaagcagctgcaggagcggacaggagtcaagatggtgatgattcaagatggaccactgccgaccggggcagataagccactgagaatcacaggggacgctttcaaagtgcagcaggcccgtgaaatggttctggaaatcataagagagaaggaccaggccgattttaggggagtaaggggcgatttcaactctagaatgggaggtgggtccatagaagtgagcgtccccaggtttgctgttggcatagtcatcggcagaaacggcgagatgataaagaaaatacagaatgatgccggtgtgaggattcagtttaagcctgatgatggaattagtcctgagtattataggcagcaggtggctttttacggacagactttaggccaagcccaagcccactctcaggacgagtag

SEQ ID NO: 311213 - DNA, 786 bp, Artificial Sequence
  derived and/or modified sequence
atgcctccaataggcaaccagcttggggctctcgtgcaccaacggactgttatcaccgaagaattcaaagtgccagacaagatggtggggttcattatcggcagaggaggcgaacagatttcacggatccaagctgaatcagggtgcaagatccagatcgcaagcgaaagctccgggattcctgaacgtccttgcgtgttaacgggaaccccggaaagtatagagcaagcaaaaaggcttttgggacagatagttgatcgctgtagaaatggacctggattccacaacgacatcgatagcaattcgacaattcaagagatcctgataccggcttcaaaagtggggctcgttataggccgagggggagagaccatcaagcagttacaggaacgcacaggggtcaaaatggtgatgattcaagatgggccactaccaacaggcgcagacaaacccctgcgaattactggagatgccttcaaagtccagcaggcacgggagatggtactggaaatcatcagagaaaaagatcaggccgatttcagaggagtacgaggagatttcaactcaagaatgggcggtggcagtatcgaggtcagcgtgcctcggttcgctgtcggaattgtgattgggagaaatggagagatgattaagaagattcaaaacgatgcaggagttcgcatccaattcaaaccagatgacggcatttctccagaatactatcggcagcaggtggccttctacgggcagactctcggacaggcccaggcccactctcaggagcagtag

SEQ ID NO: 311214 - DNA, 1071 bp, Artificial Sequence
  derived and/or modified sequence
tttccttttccggctacgggtccccaagcggagcgggaggccggaccggggagccgagcggcggcgtcggcggcgtcggcggcggcggcgacggcggcgggggcggtaatggcggagctggtgcaggggcagagcgctcctgtggggatgaaggccgagggcttcgtggatgccctgcaccgggtccggcagattgctgctaaaattgattcaattcctcacttgaataattccacacctctagtggacccctcagtatatggatacggagtacaaaaacggcccttggatgatggagtaggtaaccagttaggggccttggtacatcaaaggacggtaataacggaagaattcaaagtgcctgacaaaatggttggatttattatcggcaggggaggtgagcagatttcacggattcaagcagaatctggttgcaaaattcagattgcttcagagagttctgggattccagagaggccctgtgtacttaccggaaccccagaaagtattgaacaagccaaacggctcctgggacagattgtggaccgctgtcgaaatggacctggctttcataatgacatagacagcaacagcacaatccaggagattctcattcccgcatctaaagtgggtctggtcatcggcagaggaggggaaacaatcaagcagttgcaggagcggacaggggtgaagatggtcatgatccaggatggcccattgcccacgggagcagacaagcctcttcgtatcactggagatgcatttaaagtacagcaagcaagagaaatggtactagagattatccgagaaaaagaccaagctgactttcggggtgtacgcggcgatttcaactctcgaatgggaggaggcagtatagaggtatctgtgcctaggtttgctgtggggattgtaataggaagaaacggggaaatgatcaaaaagatccagaatgatgctggtgtgaggattcagtttaaaccagatgatgggattagtccagaatattacagacagcaggtcgctttctacggacagacgttagggcaggcgcaggcccacagccaggatgag

SEQ ID NO: 311215 - DNA, 2474 bp, Artificial Sequence
  derived and/or modified sequence
gagcggcggcgtcggcggcgtcggcggcggcggcgacggcggcgggggcggtaatggcggagctggtgcaggggcagagcgctcctgtggggatgaaggccgagggcttcgtggatgccctgcaccgggtccggcagattgctgctaaaattgattcaattcctcacttgaataattccacacctctagtggacccctcagtatatggatacggagtacaaaaacggcccttggatgatggagcgatgggatcacactctgctcaggctagagtgcagtggcgccgttgaactcctgggctcgagtgatcctcccacctcggcttcccaagtagctgggactacaggcatgagccaccatgcctcctataggtaaccagttaggggccttggtacatcaaaggacggtaataacggaagaattcaaagtgcctgacaaaatggttggatttattatcggcaggggaggtgagcagatttcacggattcaagcagaatctggttgcaaaattcagattgcttcagagagttctgggattccagagaggccctgtgtacttaccggaaccccagaaagtattgaacaagccaaacggctcctgggacagattgtggaccgctgtcgaaatggacctggctttcataatgacatagacagcaacagcacaatccaggagattctcattcccgcatctaaagtgggtctggtcatcggcagaggaggggaaacaatcaagcagttgcaggagcggacaggggtgaagatggtcatgatccaggatggcccattgcccacgggagcagacaagcctcttcgtatcactggagatgcatttaaagtacagcaagcaagagaaatggtactagagattatccgagaaaaagaccaagctgactttcggggtgtacgcggcgatttcaactctcgaatgggaggaggcagtatagaggtatctgtgcctaggtttgctgtggggattgtaataggaagaaacggggaaatgatcaaaaagatccagaatgatgctggtgtgaggattcagtttaaaccagatgatgggattagtccagaatattacagacagcaggtcgctttctacggacagacgttagggcaggcgcaggcccacagccaggagcagtaggacagcgtcctcgtggccaactctcccctcaaaatcattgtcaaagaaaacctatttgtaacagaggtttttacatttgcaaaccttttgatgaagaactgttgttttgttctgtgaaacactatatttagattaacggaatttttctaaaaatcaggaaaattagttactaaaaattgctgatcatttttgtttcattatttttgttatttcaaatgtataagctctgggattctttttggagcaatacctacaaagtcaggcaccagaatgtgcctcagagctgtgacatttcaacatgatggttttggtttggtttggttttgtgtcctttttatttgcagttttttctgttgcaacagaaagtggcttggaagtcttaggtggtatgtaacaaattctttttaaaaattttaaagcagtatttaagtattcttaaatgtgtaaattcatttaatgttttacttctaatttcttgtatcttggctgtctggttttattgcatttttaaaaaaactgaactattatgtattgtaatgaatgatgtgaattctgaactgagacagataattgtattgctgtccaacaggggttgggaggggcattttgtagggtttgtataatttctagagttcgaaaggggtaatataaaaatgtgctcgtgtgtttagcctacgtttttctcatgcctccattaccagttgcaattgtgtatctaagacctccaagcttgtttttaaaacaaaacaaaaaacctttctctattatctcagaaatataaatactgttatttttaatattaagaaattcaatataacttttaacacacactgtggaacattaaaccgtataaaaatgtagttataactatttttaattccaaggtgttgtttgcttttttcttttaaatattttcttaatattttgtcagattaactagatgaataaataaatctagtattaaccgcattatgaattaaataattttgatttaatgaaagggataatatgatttccagtgtttactgtagtgtatcttgtacagataacatgtatttttaaaggaaaaaaaacggaattgaagctattttttcttgcatttctaattgacctgagggacattccgtttgaaatgtactgaagttacagtttctggttttttctccttatttttcttataatgcttgaaatgtctaactattaaaaaagacaattggaaaatgttatgcatggggtttttaagaaaacaaagtgttctttttatttgactgacaattcattttacactctatataataaaatctccacaaggcatcttgtgggcaaagtc

SEQ ID NO: 311216 - DNA, 927 bp, Artificial Sequence
  derived and/or modified sequence
atgaaggccgagggcttcgtggacgccctgcacagagtgagacagatcgccgccaagatcgacagcatcccccacctgaacaacagcacccccctggtggaccccagcgtgtacggctacggcgtgcagaagagacccctggacgacggcgtgggcaaccagctgggcgccctggtgcaccagagaaccgtgatcaccgaggagttcaaggtgcccgacaagatggtgggcttcatcatcggcagaggcggcgagcagatcagcagaatccaggccgagagcggctgcaagatccagatcgccagcgagagcagcggcatccccgagagaccctgcgtgctgaccggcacccccgagagcatcgagcaggccaagagactgctgggccagatcgtggacagatgcagaaacggccccggcttccacaacgacatcgacagcaacagcaccatccaggagatcctgatccccgccagcaaggtgggcctggtgatcggcagaggcggcgagaccatcaagcagctgcaggagagaaccggcgtgaagatggtgatgatccaggacggccccctgcccaccggcgccgacaagcccctgagaatcaccggcgacgccttcaaggtgcagcaggccagagagatggtgctggagatcatcagagagaaggaccaggccgacttcagaggcgtgagaggcgacttcaacagcagaatgggcggcggcagcatcgaggtgagcgtgcccagattcgccgtgggcatcgtgatcggcagaaacggcgagatgatcaagaagatccagaacgacgccggcgtgagaatccagttcaagcccgacgacggcatcagccccgagtactacagacagcaggtggccttctacggccagaccctgggccaggcccaggcccacagccaggacgagtag

SEQ ID NO: 311217 - DNA, 786 bp, Artificial Sequence
  derived and/or modified sequence
atgccccccatcggcaaccagctgggcgccctggtgcaccagagaaccgtgatcaccgaggagttcaaggtgcccgacaagatggtgggcttcatcatcggcagaggcggcgagcagatcagcagaatccaggccgagagcggctgcaagatccagatcgccagcgagagcagcggcatccccgagagaccctgcgtgctgaccggcacccccgagagcatcgagcaggccaagagactgctgggccagatcgtggacagatgcagaaacggccccggcttccacaacgacatcgacagcaacagcaccatccaggagatcctgatccccgccagcaaggtgggcctggtgatcggcagaggcggcgagaccatcaagcagctgcaggagagaaccggcgtgaagatggtgatgatccaggacggccccctgcccaccggcgccgacaagcccctgagaatcaccggcgacgccttcaaggtgcagcaggccagagagatggtgctggagatcatcagagagaaggaccaggccgacttcagaggcgtgagaggcgacttcaacagcagaatgggcggcggcagcatcgaggtgagcgtgcccagattcgccgtgggcatcgtgatcggcagaaacggcgagatgatcaagaagatccagaacgacgccggcgtgagaatccagttcaagcccgacgacggcatcagccccgagtactacagacagcaggtggccttctacggccagaccctgggccaggcccaggcccacagccaggagcagtag

SEQ ID NO: 311218 - protein, 221 aa, Artificial Sequence
  derived and/or modified sequence
MRSCFCVRRSRDPPPPQPPPPPPQRGTDQSTMPEVKDLSEALPETSMDPITGVGVVASRNRAPTGYDVVAQTADGVDADLWKDGLFKSKVTRYLCFTRSFSKENSHLGNVLVDMKLIDIKDTLPVGFIPIQETVDTQEVAFRKKRLCIKFIPRDSTEAAICDIRIMGRTKQAPPQYTFIGELNSMGIWYRMGRVPRNHDSSQPTTPSQSSAASTPAPNLPR

SEQ ID NO: 311219 - protein, 139 aa, Artificial Sequence
  derived and/or modified sequence
AGVAALATVGVASGPGPGRPGPLQDETLGVASVPSQWRAVQGIRWETKSCQTASIATASASAQARNHVDAQVQTEAPVPVSVQPPSQYDIPRLAAFLRRVEAMVIRELNKNWQSHAFDGFEVNWTEQQQMAGPWGLEHA

SEQ ID NO: 311220 - protein, 272 aa, Artificial Sequence
  derived and/or modified sequence
LSQAGSAGVAALATVGVASGPGPGRPGPLQDETLGVASVPSQWRAVQGIRWETKSCQTASIATASASAQARNHVDAQVQTEAPVPVSVQPPSQYDIPRLAAFLRRVEAMVIRELNKNWQSHAFDGFEVNWTEQQQMVSCLYTLGYPPAQAQGLHVTSISWNSTGSVVACAYGRLDHGDWSTLKSFVCAWNLDRRDLRPQQPSAVVEVPSAVLCLAFHPTQPSHVAGELPAVSASSPLRTQLPALQRAQGSFPWALWPGDRKAGPDPLSLEPR

SEQ ID NO: 311221 - DNA, 420 bp, Artificial Sequence
  derived and/or modified sequence
gccggcgtggccgccctggccaccgtgggcgtggccagcggccccggccccggcagacccggccccctgcaggacgagaccctgggcgtggccagcgtgcccagccagtggagagccgtgcagggcatcagatgggagaccaagagctgccagaccgccagcatcgccaccgccagcgccagcgcccaggccagaaaccacgtggacgcccaggtgcagaccgaggcccccgtgcccgtgagcgtgcagccccccagccagtacgacatccccagactggccgccttcctgagaagagtggaggccatggtgatcagagagctgaacaagaactggcagagccacgccttcgacggcttcgaggtgaactggaccgagcagcagcagatggccggcccctggggcctggagcacgcctag

SEQ ID NO: 311222 - DNA, 819 bp, Artificial Sequence
  derived and/or modified sequence
ctgagccaggccggcagcgccggcgtggccgccctggccaccgtgggcgtggccagcggccccggccccggcagacccggccccctgcaggacgagaccctgggcgtggccagcgtgcccagccagtggagagccgtgcagggcatcagatgggagaccaagagctgccagaccgccagcatcgccaccgccagcgccagcgcccaggccagaaaccacgtggacgcccaggtgcagaccgaggcccccgtgcccgtgagcgtgcagccccccagccagtacgacatccccagactggccgccttcctgagaagagtggaggccatggtgatcagagagctgaacaagaactggcagagccacgccttcgacggcttcgaggtgaactggaccgagcagcagcagatggtgagctgcctgtacaccctgggctacccccccgcccaggcccagggcctgcacgtgaccagcatcagctggaacagcaccggcagcgtggtggcctgcgcctacggcagactggaccacggcgactggagcaccctgaagagcttcgtgtgcgcctggaacctggacagaagagacctgagaccccagcagcccagcgccgtggtggaggtgcccagcgccgtgctgtgcctggccttccaccccacccagcccagccacgtggccggcgagctgcccgccgtgagcgccagcagccccctgagaacccagctgcccgccctgcagagagcccagggcagcttcccctgggccctgtggcccggcgacagaaaggccggccccgaccccctgagcctggagcccagatag

SEQ ID NO: 311223 - DNA, 420 bp, Artificial Sequence
  derived and/or modified sequence
gccggagtggccgccctggcaaccgtcggggttgcttccgggccagggccaggcagacctggccctctccaggacgaaacgctgggagtagcaagcgtgccaagccagtggcgtgccgtgcaaggcatccgctgggagactaaatcatgccagactgcttccatcgctaccgcttctgcgtcagctcaagctcggaaccacgtggatgctcaggtgcaaacggaggctccagttcctgtctcagtccagcctcctagccaatacgacatcccacgcttagctgcgtttctccgaagggtggaagcaatggtgattagagagctgaataaaaactggcagtcccacgcattcgatggctttgaggtcaattggacagaacaacagcaaatggcaggcccttgggggcttgagcacgcttag

SEQ ID NO: 311224 - DNA, 819 bp, Artificial Sequence
  derived and/or modified sequence
ttgagccaggccggctctgcaggggtggccgctttagcgactgtcggcgtggctagtggacctgggccagggcgtcccgggcccttacaggacgaaaccctgggagttgctagcgtgccctctcaatggcgggcggtgcaggggattagatgggagaccaaaagctgccaaacagccagcatcgccacggcgagtgcttccgcacaggctcgcaatcatgtggatgcgcaggtccaaacagaggcccccgtgccggttagcgttcagcctcctagtcaatatgacattccacgtctggctgccttcttgcggcgggtagaggcaatggtgattcgtgagctcaataagaattggcaaagccacgcctttgacggcttcgaggtaaattggaccgaacaacaacagatggtttcctgtctgtacaccctgggatacccgcctgctcaggcccagggcctccacgttacctcaatatcatggaactccaccggctcagtagtagcatgcgcctacgggcgcctggaccacggtgactggagcacactgaaaagcttcgtctgcgcctggaatttagatcggcgagacctgcgccctcagcagccttcggctgtggtggaggtgccctccgctgttttgtgcttagcattccacccaacgcagccctcccacgtggctggcgaactgccggctgtgagcgcttcttctcccctgcgtactcagctccctgctctgcaacgggcccagggctcctttccatgggctctgtggcccggagatcgcaaggccggtcctgacccactaagcctcgagccgcgttag

SEQ ID NO: 311225 - DNA, 420 bp, Artificial Sequence
  derived and/or modified sequence
gctggggtggccgccctggccaccgtgggcgtggccagcggccctggccctggccggcccggccccctgcaggatgagaccctgggcgtggcctctgtgcccagccagtggagggctgtgcagggcatccgctgggagaccaagagctgccagacagccagcatcgccacagccagcgccagcgcccaggccagaaatcatgtggatgcccaggtgcagacagaggcccctgtgcctgtgtctgtgcagccccccagccagtatgacatcccccggctggccgccttcctgcggcgggtggaggccatggtgatccgggagctgaacaagaactggcagagccacgcctttgatggctttgaggtgaactggacagagcagcagcagatggccggcccctggggcctggagcacgcctag

SEQ ID NO: 311226 - DNA, 819 bp, Artificial Sequence
  derived and/or modified sequence
ctgagccaggccggcagcgctggggtggccgccctggccaccgtgggcgtggccagcggccctggccctggccggcccggccccctgcaggatgagaccctgggcgtggcctctgtgcccagccagtggagggctgtgcagggcatccgctgggagaccaagagctgccagacagccagcatcgccacagccagcgccagcgcccaggccagaaatcatgtggatgcccaggtgcagacagaggcccctgtgcctgtgtctgtgcagccccccagccagtatgacatcccccggctggccgccttcctgcggcgggtggaggccatggtgatccgggagctgaacaagaactggcagagccacgcctttgatggctttgaggtgaactggacagagcagcagcagatggtgtcctgcctgtacaccctgggctaccccccagcccaggcccagggcctgcacgtgaccagcatctcctggaacagcactggatctgtggtggcctgtgcctacggccgcctggaccacggggactggagcaccctgaagagctttgtgtgtgcctggaacctggacagaagagacctgcggccccagcagcccagcgctgtggtggaggtgcccagcgctgtgctgtgcctggccttccaccccacccagcccagccacgtggccggggagctgcctgctgtgtctgccagcagccccctgcggacccagctgcctgccctgcagagggcccagggcagcttcccctgggccctgtggccaggggacaggaaggccggccctgaccccctgagcctggagcccaggtag

SEQ ID NO: 311227 - DNA, 420 bp, Artificial Sequence
  derived and/or modified sequence
gccggcgtggccgccctggccaccgtgggcgtggccagcggccccgggcccggcaggccaggcccccttcaggatgagaccctcggtgtagcgtctgttccttcgcagtggcgtgcagtgcagggcattcgctgggagacgaagtcttgtcaaactgcctccattgctaccgcttccgcttcggcccaagccagaaaccatgtcgatgcacaggtgcagactgaggcccccgtgcccgtgtccgtccagccaccctcacagtacgacatcccaaggctcgcggccttcctcagaagagtggaagcgatggtgatcagagaactgaataaaaactggcagagccatgctttcgacgggttcgaggttaattggacagagcagcagcaaatggcaggcccctggggcctggagcacgcatag

SEQ ID NO: 311228 - DNA, 819 bp, Artificial Sequence
  derived and/or modified sequence
ctgagccaggccggcagcgccggcgtggccgccctggccaccgtgggagtggccagtggccccggtcctggacgacctgggccactgcaggacgagaccttgggagtagcaagcgtgcctagtcagtggcgtgcagtccaagggattcgttgggagactaaaagctgccagacagcctcaatcgccaccgcaagcgcatcagcccaagctcggaaccatgtggatgcccaggtacaaaccgaagcgccagtgccagttagcgttcagcctccttcccagtacgacattccccgcctagctgcctttctgcgccgggtggaggcaatggtgattagggaacttaacaagaactggcagtcccatgcgttcgacggcttcgaggtgaattggaccgagcagcagcagatggtaagttgcctgtatactctcggctaccctccggctcaggcccagggactacacgtgacaagcatatcttggaattccaccggaagtgtggtagcttgcgcctatggaagactcgaccatggcgattggtctacattaaaatcgttcgtgtgtgcatggaatctggaccgaagagatctgcggcctcagcagccctctgctgtggtggaggtgccatctgccgttctctgcctcgcctttcaccctacacagcccagccacgtcgctggcgagctccccgccgtcagcgcctccagtcctcttagaacccaacttcctgcattgcagcgggctcaggggtccttcccttgggccctgtggcccggcgaccggaaagcaggccccgacccattaagcctggagccgagatag

SEQ ID NO: 311229 - DNA, 420 bp, Artificial Sequence
  derived and/or modified sequence
gccggtgtggcggctctggccaccgtgggcgtggcctcagggccaggccctggacgacctgggccattacaagacgaaactctgggggtggccagcgtcccctctcagtggcgggctgttcagggtataaggtgggaaacaaagtcctgccagactgcaagtattgcaaccgctagtgcttcagcccaggctaggaaccacgttgacgcccaggttcagaccgaggcccctgtgccagtttccgtccagccgcctagccagtatgatattccacggctagcggctttccttcgcagagttgaagctatggtgatccgggagttaaacaagaattggcagtcccacgccttcgatggtttcgaagtgaattggacggaacagcaacagatggctggcccttggggtttagaacacgcttag

SEQ ID NO: 311230 - DNA, 819 bp, Artificial Sequence
  derived and/or modified sequence
ttgtctcaagctggatccgccggagttgctgctcttgccacagtgggcgtggcttccggcccagggcctggtagaccaggtccattgcaggatgaaacgctgggagtggcaagcgttccctcacagtggcgagccgtccagggaataagatgggaaacaaagtcctgtcagacggcctcaatcgcgacagcctctgcctccgcgcaggccagaaaccacgtggatgcacaggtccagaccgaagctcctgtgccagtcagcgtgcagcctccatctcagtatgacattcccaggcttgccgcttttctacgcagggtcgaggccatggtcatccgggaactgaataagaattggcaatcccatgcctttgatggctttgaggttaattggactgagcagcagcagatggtatcgtgtctctataccctgggatatcctcctgcacaggctcaggggttacatgtgacaagcatcagttggaatagcaccgggtccgtagttgcgtgcgcatatgggaggctcgaccacggcgactggagtactcttaagagttttgtgtgtgcctggaaccttgatcggcgagatttaagaccgcagcaaccttcagcggtggtcgaggttccctcagccgtattatgtctggccttccatccaacccagccttcgcacgtggcaggggagctcccagcagttagcgcttcatccccactgagaacccagctgcctgctttacagcgcgctcaaggcagttttccatgggctttgtggccaggcgataggaaagcgggtcctgatccattgtcccttgaaccacgatag

SEQ ID NO: 311231 - DNA, 1039 bp, Artificial Sequence
  derived and/or modified sequence
ctcagccaggcgggaagcgctggtgttgcggcgctggcgacagtcggggttgcgagcggcccggggccggggcggccagggccgctgcaggacgagaccctgggtgtggcgtccgtgccctcgcagtggagggccgtccagggcatccgctgggagacgaaaagttgccagacggccagcattgccactgccagtgcatccgcccaggccaggaatcatgtggacgcccaggtgcagacggaggcccccgtgcctgtcagcgtgcagcccccgtcccagtatgacatacccaggctcgcagcctttcttcggagagtggaggccatggtcatccgagagctgaacaagaattggcagagccacgcgtttgatggcttcgaggtgaactggaccgagcagcagcagatggtgtcttgtctgtataccctgggctacccgccagcccaagcgcagggtctgcatgtgaccagcatctcctggaactccactggctctgtggtggcctgtgcctacggccggctggaccatggggactggagcacgcttaagtccttcgtgtgtgcctggaacctggaccggcgagacctgcgtccccagcagccgtcggccgtggtggaggtccccagcgctgtcctgtgtctggccttccaccccacgcagccctcccacgtcgcaggtgagctgcctgctgtgtccgcctcctctcctctcaggactcagcttcccgccctgcagagggcacaagggagctttccatgggccctttggcccggagacaggaaggcgggccctgaccctctcagtctggagcccaggtgaaggtctgcagtgagccctgaggggtggaactcgggggaggagtctggaagggggccagggtcggggccaggacagggggctgtggagaggccagaagaggcaggtgcccttgggaagccgtcagtggtagggggcaggcaacgctggagggagctgccaggtgcagggcaggggtgtccggcaaagctccctggggtacaacaggggagctgggggctag

SEQ ID NO: 311232 - DNA, 372 bp, Artificial Sequence
  derived and/or modified sequence
atgcagagcgagaagccccagggcctgttcctgcagctgaaccccaacgcatcctctacggagacccagctcctggtgcccgcgttagaatcccgcgataccctgccccctacccactgcttcatggcggggaccgagagcccccttgggaatccctggccccttagtctgccacctccctgttggaccggctgtgtgctcccagcacctcgtggtcagcggaagccaggcccactcgggctgtccattttcatatcactggggaacaaaaggcacagatccgggaaccatgtagtacgggaatccgaacagcccctgagccagggcaatcctcaccaagggtggggccctgacaccagaaagggccgctag

SEQ ID NO: 311233 - DNA, 1947 bp, Artificial Sequence
  derived and/or modified sequence
gtaagacctcttagcgggcccatcgctgaggtgcagggacatgtcgcggccgaactcacctcgtggcctcggcgtggtgctctcagctcatgcccggaaaccaggtcccgacgccgcggtcagacggacctctagacgcgtccgcctcaatgccgccagctgccaggccgcccgtgacgcgttaagcctgcgccgcctcctggcttcgtgacgtcacgacgtccgcgcagctgcggtcgccgccgtcgcacgagtctttccttagtaacctgggcgatagctgtggatgtttccaaggattgtcttcagtcatggccttgggattaaagtgcttccgcatggtccaccctacctttcgcaattatcttgcagcctctatcagacccgtttcagaagttacactgaagacagtgcatgaaagacaacatggccataggcaatacatggcctattcagctgtaccagtccgccattttgctaccaagaaagccaaagccaaagggaaaggacagtcccaaaccagagtgaatattaatgctgccttggttgaggatataatcaacttggaagaggtgaatgaagaaatgaagtctgtgatagaagctctcaaggataatttcaataagactctcaatataaggacctcaccaggatcccttgacaagattgctgtggtaactgctgacgggaagcttgctttaaaccagattagccagatctccatgaagtcgccacagctgattttggtgaatatggccagcttcccagagtgtacagctgcagctatcaaggctataagagaaagtggaatgaatctgaacccagaagtggaagggacgctaattcgggtacccattccccaagtaaccagagagcacagagaaatgctggtgaaactggccaaacagaacaccaacaaggccaaagactctttacggaaggttcgcaccaactcaatgaacaagctgaagaaatccaaggatacagtctcagaggacaccattaggctaatagagaaacagatcagccaaatggccgatgacacagtggcagaactggacaggcatctggcagtgaagaccaaagaactccttggatgaaagtccactggggccagcaatactccagagcccagtttctgctggatcccatgggtggcacattgggacttctctccctcccccatctacacagaagactgtcaccatgctgacagaagcctgtccttgtaaggcccagccttccaggggaacactcagacatgttcattctcttcctgcttctgctctgggccggtgggtggctctcagaaaatacttgctgctggcaaaaggcctgtactcaggcatttgctttgacttgatgttgccaagggactgaggccattggcaggcttagtaccacctgctcctcatcttaggagtctccttttcaaataattaggctctgttcccattttaaaactctgatattggccttcacctgtgactggacactttactagaggcccattttcactaaacaataaaatctaaataaattggaaggaataacaaccacaaaggaaagaatagagttggtctggattgatgatcactgaggatctgtatgtgaggcacccataacagtagttttgcctgtgagtcgtcttcacacatgctgttttctctgcctggctctctcttcccctccttacctggccagtcctgtttatcatcaggccttgtcttggatatcacgtcctctgggaagtcttcttttcccctctaacctaggaccctcattaccggctctcatagcacagtctactgctttgtacgaattctaagtattcttgttgcacttaattagcctgtatatcctcagaactttgtgtaatgcctggagcatagtaggcagtcatatgttgtatcgtgaataaattgcacatagtagctacccagcaaa

SEQ ID NO: 311234 - DNA, 1675 bp, Artificial Sequence
  derived and/or modified sequence
atgtttccaaggattgtcttcagtcatggccttgggattaaagtgctcccgcatggtccaccctgcctttcgcaattatcttgcagcctctatcagacccgtttcagaagttacactgaagaaagtgtatgaaagacaacatggccataggcaatacgtggcctattcagctgtaccagtccaccattttgctaccaagaaagccaaagccaaagggaaaggaaagtcccaaaccagagtgaatattagtgctgcctttgttgaggatataatcaacttggaagaggtgaatgaagaaatgaagtctgtgatagaagcacgcaaggataatttcaataagactctcaatatagggacctcaccaggatcccttgacaagattgctgtggtaaccgctgatggaaaacttgctttaaaccagattaggcagatctccgtgaagttgccacagctgattttggtgaatatggccagcttcccagagttcacagttgcagctatcaaggctataagagaaagtggaatgaatctgaacccagaagtggaagggacactaattcgggtacccattccccaagtaatcagagagcacagagaaatgctggtgaaactggccaaacagaacaccaacaaggccacatactctttacggaaggtttgtaccaacgcaatgaacaagctgaagaaatccaaggatacagtctcggagggcaccattaggctaacagagaaacagatcagccaaatggccgatgacacagtggcagaactgtacaggcatctggcagtgaagaccaaagaactccttggatgaaagtccactacagaccagcaatacttcagagcccagtttctgctggatcccatgggtggcacattgggacctctctccctcccccatccacacagaagactgtcaccatgctgacagaaggctgtctttgtgaggcccagccttccagtggaacactcagacttgttcattctcttcctccttctgctctgggccttctgatgtgggtggctctcagaaaatacttgctgctggcaaagggcctttactcaggcatttgctttgacttgatgtcaccaagagactgaggacattggcaggcttagtaccacctgctcctcatcttaggagcctccttttcaaataattaggctctgttcccattgtaaaactctgcttgggctgatattggccttcacctgtgactggacactttactagaggcccattttcactaaacaataaaatctaaataaattggaaggaataacaaccacaaaggaaagaaaagagttggtctggattgatgatcactgaggatctgtatgtgaagcacccagagcagtagttttgcctgtgagtcatcttcacacatgctcttttctctgcctggatctctcttcccctccttacctggccagtcctgtttatcatcaggccttgtcttggatatcacatcctctggggtcttcctttcccctctcacctaggaccctcattaccggctctcatagcacagtctactgctttgtacgaactctaagtattctttttgcatttaattagcctgtgtatcctcagaactttgtgtaatgcctggagcatagtaggcagtcatatgttatattgtgaataaattgcacatagtagctacccagcaaa

SEQ ID NO: 311235 - protein, 262 aa, Artificial Sequence
  derived and/or modified sequence
MALGLKCFRMVHPTFRNYLAASIRPVSEVTLKTVHERQHGHRQYMAYSAVPVRHFATKKAKAKGKGQSQTRVNINAALVEDIINLEEVNEEMKSVIEALKDNFNKTLNIRTSPGSLDKIAVVTADGKLALNQISQISMKSPQLILVNMASFPECTAAAIKAIRESGMNLNPEVEGTLIRVPIPQVTREHREMLVKLAKQNTNKAKDSLRKVRTNSMNKLKKSKDTVSEDTIRLIEKQISQMADDTVAELDRHLAVKTKELLG

SEQ ID NO: 311236 - protein, 124 aa, Artificial Sequence
  derived and/or modified sequence
MAYSAVPVRHFATKKAKAKGKGQSQTRVNINAALVEDIINLEEVNEEMKSVIEALKDNFNKTLNIRTSPGSLDKIAVVTADGKLALNQISQISMKSPQLILVNMASFPETMKQIKQYFNGPNVA

SEQ ID NO: 311237 - protein, 158 aa, Artificial Sequence
  derived and/or modified sequence
MALGLKCFRMVHPTFRNYLAASIRPVSEVTLKTVHERQHGHRQYMAYSAVPVRHFATKKAKAKGKGQSQTRVNINAALVEDIINLEEVNEEMKSVIEALKDNFNKTLNIRTSPGSLDKIAVVTADGKLALNQISQISMKSPQLILVNMASFPEVRWPC

SEQ ID NO: 311238 - protein, 218 aa, Artificial Sequence
  derived and/or modified sequence
MAYSAVPVRHFATKKAKAKGKGQSQTRVNINAALVEDIINLEEVNEEMKSVIEALKDNFNKTLNIRTSPGSLDKIAVVTADGKLALNQISQISMKSPQLILVNMASFPECTAAAIKAIRESGMNLNPEVEGTLIRVPIPQVTREHREMLVKLAKQNTNKAKDSLRKVRTNSMNKLKKSKDTVSEDTIRLIEKQISQMADDTVAELDRHLAVKTKELLG

SEQ ID NO: 311239 - protein, 176 aa, Artificial Sequence
  derived and/or modified sequence
MALGLKCFRMVHPTFRNYLAASIRPVSEVTLKTVHERQHGHRQYMAYSAVPVRHFATKKAKAKGKGQSQTRVNINAALVEDIINLEEVNEEMKSVIEALKDNFNKTLNIRTSPGSLDKIAVVTADGKLALNQISQISMKSPQLILVNMASFPEELAWIRSLRVPGIRSHLYHQLAV

SEQ ID NO: 311240 - protein, 153 aa, Artificial Sequence
  derived and/or modified sequence
MALGLKCFRMVHPTFRNYLAASIRPVSEVTLKTVHERQHGHRQYMAYSAVPVRHFATKKAKAKGKGQSQTRVNINAALVEDIINLEEVNEEMKSVIEALKDNFNKTLNIRTSPGSLDKIAVVTADGKLALNQISQISMKSPQLILVNMASFPE

SEQ ID NO: 311241 - protein, 168 aa, Artificial Sequence
  derived and/or modified sequence
MALGLKCFRMVHPTFRNYLAASIRPVSEVTLKTVHERQHGHRQYMAYSAVPVRHFATKKAKAKGKGQSQTRVNINAALVEDIINLEEVNEEMKSVIEALKDNFNKTLNIRTSPGSLDKIAVVTADGKLALNQISQISMKSPQLILVNMASFPETMKQIKQYFNGPNVA

SEQ ID NO: 311242 - protein, 262 aa, Artificial Sequence [sequence omitted]

SEQ ID NO: 311243 - DNA, 789 bp, Artificial Sequence
  derived and/or modified sequence
atggccctgggcctgaagtgcttcagaatggtgcaccccaccttcagaaactacctggccgccagcatcagacccgtgagcgaggtgaccctgaagaccgtgcacgagagacagcacggccacagacagtacatggcctacagcgccgtgcccgtgagacacttcgccaccaagaaggccaaggccaagggcaagggccagagccagaccagagtgaacatcaacgccgccctggtggaggacatcatcaacctggaggaggtgaacgaggagatgaagagcgtgatcgaggccctgaaggacaacttcaacaagaccctgaacatcagaaccagccccggcagcctggacaagatcgccgtggtgaccgccgacggcaagctggccctgaaccagatcagccagatcagcatgaagagcccccagctgatcctggtgaacatggccagcttccccgagtgcaccgccgccgccatcaaggccatcagagagagcggcatgaacctgaaccccgaggtggagggcaccctgatcagagtgcccatcccccaggtgaccagagagcacagagagatgctggtgaagctggccaagcagaacaccaacaaggccaaggacagcctgagaaaggtgagaaccaacagcatgaacaagctgaagaagagcaaggacaccgtgagcgaggacaccatcagactgatcgagaagcagatcagccagatggccgacgacaccgtggccgagctggacagacacctggccgtgaagaccaaggagctgctgggctag

SEQ ID NO: 311244 - DNA, 657 bp, Artificial Sequence
  derived and/or modified sequence
atggcctacagcgccgtgcccgtgagacacttcgccaccaagaaggccaaggccaagggcaagggccagagccagaccagagtgaacatcaacgccgccctggtggaggacatcatcaacctggaggaggtgaacgaggagatgaagagcgtgatcgaggccctgaaggacaacttcaacaagaccctgaacatcagaaccagccccggcagcctggacaagatcgccgtggtgaccgccgacggcaagctggccctgaaccagatcagccagatcagcatgaagagcccccagctgatcctggtgaacatggccagcttccccgagtgcaccgccgccgccatcaaggccatcagagagagcggcatgaacctgaaccccgaggtggagggcaccctgatcagagtgcccatcccccaggtgaccagagagcacagagagatgctggtgaagctggccaagcagaacaccaacaaggccaaggacagcctgagaaaggtgagaaccaacagcatgaacaagctgaagaagagcaaggacaccgtgagcgaggacaccatcagactgatcgagaagcagatcagccagatggccgacgacaccgtggccgagctggacagacacctggccgtgaagaccaaggagctgctgggctag

SEQ ID NO: 311245 - DNA, 789 bp, Artificial Sequence
  derived and/or modified sequence
atggcgttgggacttaaatgttttagaatggtgcaccctactttccgaaactatctggccgctagcatacgtccagtgtctgaggtcacactcaaaaccgtgcacgaaagacaacatggccataggcagtatatggcttactccgctgttccggtccgtcatttcgcaaccaagaaagctaaagcaaagggcaagggacagtcgcagacaagagtgaacataaatgctgcactggttgaggatattatcaacctcgaggaggtgaacgaagagatgaagagcgtgattgaggccctgaaggacaattttaacaagaccctgaatattagaacaagtccaggatctctggacaaaatcgccgtggtgacggcagacggtaaactggccttgaaccaaatctctcaaatttctatgaagtcgccccagctcatactagtcaacatggcgtcctttccagaatgcacagctgcagctattaaagccatacgggagtctggtatgaatttaaaccctgaagtggaaggtacactgatcagagtgcctatcccccaggtgacaagggagcaccgggaaatgttggtgaagttggctaaacagaatacgaacaaggctaaggatagccttaggaaagtcagaactaactcaatgaataaactgaaaaagtctaaagacaccgtttctgaggataccattagactaatcgaaaagcagatcagccaaatggccgacgatacagtggcagagcttgatcgccatttggccgtgaaaactaaagaactcctgggctag

SEQ ID NO: 311246 - DNA, 657 bp, Artificial Sequence
  derived and/or modified sequence
atggcctattctgcagtccccgtgcggcatttcgccactaaaaaagcaaaagccaagggtaagggccagtcccagacccgggtcaacatcaacgctgctctggtggaggatattataaatctcgaagaagttaacgaggagatgaaatcggtgattgaagctttgaaggataattttaacaaaacgttaaacattcgcaccagccctggctctctggacaaaattgccgtggtcaccgcagatggcaaattggcccttaaccagattagtcagatttcgatgaagagcccacagttgatcttggtgaatatggcttcctttccggagtgcacagccgctgctatcaaagccattcgcgagagcggtatgaatctgaaccctgaggttgaaggaacgctcattcgagtgcccatcccacaggtgacccgcgagcacagggagatgttggttaagctggccaaacaaaacaccaacaaggcaaaagattctttacgaaaggtaagaacaaacagcatgaacaagctgaaaaagagcaaggacactgtatctgaagatactatcagactgatagaaaagcaaatctcgcagatggccgatgacacagtagcagagctggaccggcatttggctgtgaaaaccaaagaactccttggatag

SEQ ID NO: 311247 - DNA, 789 bp, Artificial Sequence
  derived and/or modified sequence
atggccctgggcctgaagtgcttcaggatggtgcaccccaccttcaggaactacctggccgccagcatccggcctgtgtctgaggtgaccctgaagacagtgcatgagcggcagcacggccaccggcagtacatggcctacagcgctgtgcctgtgcgccactttgccaccaagaaggccaaggccaagggcaagggccagagccagaccagggtgaacatcaatgctgccctggtggaggacatcatcaacctggaggaggtgaatgaggagatgaagagcgtcatcgaggccctgaaggacaacttcaacaagaccctgaacatccgcaccagccctggcagcctggacaagattgctgtggtgacagcagatggcaagctggccctgaaccagatcagccagatctccatgaagagcccccagctgatcctggtgaacatggccagcttcccagaatgtacagctgctgccatcaaggccatccgggagagcggcatgaacctgaaccctgaggtggagggcaccctcatccgggtgcccatcccccaggtgacccgggagcaccgggagatgctggtgaagctggccaagcagaacaccaacaaggccaaggacagcctgaggaaggtgaggaccaacagcatgaacaagctgaagaagagcaaggacacagtgtctgaggacaccatccgcctcatcgagaagcagatcagccagatggctgatgacacagtggccgagctggacagacacctggccgtgaagaccaaggagctgctgggctag

SEQ ID NO: 311248 - DNA, 657 bp, Artificial Sequence
  derived and/or modified sequence
atggcctacagcgctgtgcctgtgcgccactttgccaccaagaaggccaaggccaagggcaagggccagagccagaccagggtgaacatcaatgctgccctggtggaggacatcatcaacctggaggaggtgaatgaggagatgaagagcgtcatcgaggccctgaaggacaacttcaacaagaccctgaacatccgcaccagccctggcagcctggacaagattgctgtggtgacagcagatggcaagctggccctgaaccagatcagccagatctccatgaagagcccccagctgatcctggtgaacatggccagcttcccagaatgtacagctgctgccatcaaggccatccgggagagcggcatgaacctgaaccctgaggtggagggcaccctcatccgggtgcccatcccccaggtgacccgggagcaccgggagatgctggtgaagctggccaagcagaacaccaacaaggccaaggacagcctgaggaaggtgaggaccaacagcatgaacaagctgaagaagagcaaggacacagtgtctgaggacaccatccgcctcatcgagaagcagatcagccagatggctgatgacacagtggccgagctggacagacacctggccgtgaagaccaaggagctgctgggctag

SEQ ID NO: 311249 - DNA, 870 bp, Artificial Sequence
  derived and/or modified sequence
cacgagtctttccttagtaacctgggcgatagctgcctctatcagacccgtttcagaagttacactgaagacagtgcatgaaagacaacatggccataggcaatacatggcctattcagctgtaccagtccgccattttgctaccaagaaagccaaagccaaagggaaaggacagtcccaaaccagagtgaatattaatgctgccttggttgaggatataatcaacttggaagaggtgaatgaagaaatgaagtctgtgatagaagctctcaaggataatttcaataagactctcaatataaggacctcaccaggatcccttgacaagattgctgtggtaactgctgacgggaagcttgctttaaaccagattagccagatctccatgaagtcgccacagctgattttggtgaatatggccagcttcccagagtgtacagctgcagctatcaaggctataagagaaagtggaatgaatctgaacccagaagtggaagggacgctaattcgggtacccattccccaagtaaccagagagcacagagaaatgctggtgaaactggccaaacagaacaccaacaaggccaaagactctttacggaaggttcgcaccaactcaatgaacaagctgaagaaatccaaggatacagtctcagaggacaccattaggctaatagagaaacagatcagccaaatggccgatgacacagtggcagaactggacaggcatctggcagtgaagaccaaagaactccttggatgaaagtccactggggccagcaatactccagagcccagtttctgctggatcccatgggtggcacattgggacttctctccctcccccatctacacagaagactgtcacca

SEQ ID NO: 311250 - DNA, 789 bp, Artificial Sequence
  derived and/or modified sequence
atggccctgggcctgaagtgcttccggatggtgcaccccaccttccgtaattacctggctgcttctattcggcccgtatcagaagttaccctcaaaaccgtacacgaaaggcagcacgggcaccgccagtatatggcctacagcgctgtgcctgtgaggcatttcgcaaccaagaaagctaaggccaagggcaagggccagtcccagactagggtgaatattaatgcagcactcgtagaggatatcatcaacctggaagaggtgaatgaagagatgaaatcagtgatcgaggctctgaaggataacttcaacaagaccttgaacatccgaacgtctcccggttcactagataagatcgcggttgtgaccgctgacggcaagctggcactcaatcagataagccagatctctatgaaatcaccccagcttatcttagtcaacatggccagctttcctgaatgtaccgccgcagccatcaaagccatccgcgagagtggcatgaatttgaacccagaggtcgaaggcaccctcattcgggtgcccattccacaggtgacccgcgagcacagagagatgcttgtcaagctggccaaacaaaatacaaacaaagccaaagactcactgcggaaagtccggacaaattctatgaacaaactgaaaaaaagcaaggataccgtgtcggaggacacaattcgcctgatcgaaaaacagattagccagatggccgacgacacagtggctgagctcgatcgccatctggcggtgaaaacaaaggaattactgggctag

SEQ ID NO: 311251 - DNA, 657 bp, Artificial Sequence
  derived and/or modified sequence
atggcctacagcgccgtgcccgtgcggcacttcgccaccaagaaggccaaggcaaaaggaaaaggtcaatcacagaccagagtgaacatcaatgccgctctggtcgaagatatcatcaacctcgaggaggtaaatgaggagatgaaatctgtgattgaggctctgaaagacaattttaacaagactcttaatatccggacaagtccgggcagtttggataaaatcgcagtggtaactgctgatgggaagttggccttaaatcagatctctcagatttcaatgaagtccccacagttgatcttggtgaacatggcttcttttcccgaatgcaccgctgccgccattaaagctatccgcgaatcaggaatgaatttgaacccagaagtcgaagggacactgattcgcgtccccattccccaggtgactagggagcaccgggaaatgttggtgaaactagctaaacaaaacacgaacaaggctaaggattctctgagaaaagtgagaaccaactctatgaacaagctcaagaaatcgaaggatacggtctccgaggacacaatccgtctgattgagaagcagatcagtcagatggccgatgacacagtggctgagctggatagacatctcgccgttaagaccaaggagctgctgggatag

SEQ ID NO: 311252 - DNA, 789 bp, Artificial Sequence
  derived and/or modified sequence
atggccctgggcctcaagtgttttcgtatggtccaccccactttccgaaactatttagccgcatccatcaggccggtttccgaagtcactctcaaaacagtgcacgaaaggcagcacgggcatagacagtacatggcatattccgccgtgccggtgcgccattttgccactaagaaggctaaagccaagggaaagggacagtcacaaacaagggtaaatattaatgctgccctcgtggaggatataatcaacctggaggaggtgaacgaggaaatgaaaagcgtcatagaagccctcaaggacaacttcaataaaaccttgaacatccggacctcccctggatcattagacaagatcgccgtcgtgactgccgatggcaagctggccctcaaccaaattagccagatctcgatgaagtcacctcagcttatcctggttaacatggcatctttccctgagtgtactgccgcagccattaaggctataagggaatccggtatgaacctgaaccctgaagtggaggggaccctgataagggtccccattccacaggtgaccagggagcaccgggagatgctcgtgaagctggcgaaacagaatactaacaaagcaaaagattccttgcggaaagtccggaccaatagtatgaataaattgaaaaaatccaaggacacagtttccgaagatactattcgcttgatcgagaagcagatctcccagatggcagatgacaccgtggcggagctggatcgtcatcttgctgtcaagaccaaagaactgctcggctag

SEQ ID NO: 311253 - DNA, 657 bp, Artificial Sequence
  derived and/or modified sequence
atggcatattccgctgtgccggtgagacatttcgcaaccaaaaaggcgaaagctaaaggcaaaggccagagccagactcgtgtgaatattaatgctgctttagtggaggatattattaatctggaagaggtgaatgaggaaatgaagagtgtcatcgaggcacttaaagacaactttaacaagacgttaaatataaggacctccccagggagcctcgacaagatcgccgtcgtgacagctgacggtaagctggccctgaaccagatcagccagatctctatgaagagcccccagctcattcttgtgaatatggcttcgttcccagagtgtacagccgcagccatcaaagccattagagagtccggaatgaacctgaaccctgaagtggagggcaccctcatccgagttccaattccacaggtgaccagggaacatagggaaatgctggtcaagttagcgaagcagaacactaataaagctaaggattcactgagaaaagtgcgcactaactcaatgaacaaacttaaaaagagcaaggacaccgtgtctgaggatacaatacgtcttatcgaaaagcagatctctcaaatggccgacgacacagtggccgagctggaccgccaccttgcagtcaagacaaaagagctgctcggctag

SEQ ID NO: 311254 - DNA, 789 bp, Artificial Sequence
  derived and/or modified sequence
atggccctgggcctgaagtgcagcagaatggtgcaccccgccttcagaaactacctggccgccagcatcagacccgtgagcgaggtgaccctgaagaaggtgtacgagagacagcacggccacagacagtacgtggcctacagcgccgtgcccgtgcaccacttcgccaccaagaaggccaaggccaagggcaagggcaagagccagaccagagtgaacatcagcgccgccttcgtggaggacatcatcaacctggaggaggtgaacgaggagatgaagagcgtgatcgaggccagaaaggacaacttcaacaagaccctgaacatcggcaccagccccggcagcctggacaagatcgccgtggtgaccgccgacggcaagctggccctgaaccagatcagacagatcagcgtgaagctgccccagctgatcctggtgaacatggccagcttccccgagttcaccgtggccgccatcaaggccatcagagagagcggcatgaacctgaaccccgaggtggagggcaccctgatcagagtgcccatcccccaggtgatcagagagcacagagagatgctggtgaagctggccaagcagaacaccaacaaggccacctacagcctgagaaaggtgtgcaccaacgccatgaacaagctgaagaagagcaaggacaccgtgagcgagggcaccatcagactgaccgagaagcagatcagccagatggccgacgacaccgtggccgagctgtacagacacctggccgtgaagaccaaggagctgctgggctag

SEQ ID NO: 311255 - DNA, 789 bp, Artificial Sequence
  derived and/or modified sequence
atggctctaggtctgaaatgttctcggatggtacaccccgcttttcggaattatctagccgctagtatccggcccgtatctgaagttacactgaagaaggtttacgagaggcaacatgggcaccggcagtacgtcgcatactcagctgttccagttcatcactttgctaccaaaaaggcaaaggccaagggaaagggcaagagccagacgcgcgtgaacatctcggccgccttcgtagaggatataattaacctggaagaagttaatgaggaaatgaaaagtgtcatcgaggcgcgaaaagacaactttaataagacactcaatatcggtacctcccctggtagcctcgacaagattgctgtcgtcacagcagacggaaagttggcgttgaaccagattagacaaatctctgtgaaactcccgcagttgattctggttaacatggctagctttcctgagttcaccgtcgccgccatcaaagccattcgtgagagcggcatgaatctgaacccggaggtggagggcacattgatccgggtgcccattcctcaggtcattcgagaacaccgcgagatgttggtgaaattggccaaacaaaatactaacaaggcaacctacagcttgcggaaggtatgcacaaatgccatgaacaaactgaaaaaatctaaggacaccgtatcagaggggacaatcaggctgacggagaagcagatctctcagatggcggacgatactgttgcagagttgtaccgacacctggccgtgaagactaaggagctgctgggatag

SEQ ID NO: 311256 - DNA, 789 bp, Artificial Sequence
  derived and/or modified sequence
atggccctgggcctgaagtgcagcaggatggtgcacccagccttcaggaactacctggccgccagcatccggcctgtgtctgaggtgaccctgaagaaggtgtatgagcggcagcacggccaccggcagtatgtggcctacagcgctgtgcctgtgcaccactttgccaccaagaaggccaaggccaagggcaagggcaagagccagaccagggtgaacatctctgctgcctttgtggaggacatcatcaacctggaggaggtgaatgaggagatgaagagcgtcatcgaggccaggaaggacaacttcaacaagaccctgaacatcggcaccagccctggcagcctggacaagattgctgtggtgacagcagatggcaagctggccctgaaccagatccggcagatctctgtgaagctgccccagctgatcctggtgaacatggccagcttccctgagttcaccgtggccgccatcaaggccatccgggagagcggcatgaacctgaaccctgaggtggagggcaccctcatccgggtgcccatcccccaggtgatccgggagcaccgggagatgctggtgaagctggccaagcagaacaccaacaaggccacctacagcctgaggaaggtgtgcaccaatgccatgaacaagctgaagaagagcaaggacacagtgtctgagggcaccatccggctgacagagaagcagatcagccagatggctgatgacacagtggccgagctgtaccgccacctggccgtgaagaccaaggagctgctgggctag

SEQ ID NO: 311257 - DNA, 789 bp, Artificial Sequence
  derived and/or modified sequence
atggccctgggcctgaagtgcagccggatggtgcaccccgccttcagaaactatctggctgctagcatccgccccgtctctgaagtcacgctcaagaaggtttacgaaagacagcatggtcatcggcaatatgtggcatacagcgctgtgccggtgcaccactttgccacaaaaaaggcaaaagccaaaggcaaaggcaaatcccaaacgagagtgaacattagcgccgccttcgtcgaggatatcattaacctggaggaagttaacgaggaaatgaagtcagtgattgaggctaggaaggacaactttaacaaaacactgaacattgggacatcaccaggatctctggacaagatcgcggtcgtaacagcagatggtaagctggctctgaaccagattcgccagatctctgtaaagttgccacagttaattcttgtaaatatggcaagctttccagagtttaccgtggccgcaatcaaagccatcagggaatccggaatgaatctcaatcccgaggttgagggtaccctgattagagtcccgattcctcaggtgatccgggagcatagggaaatgctggtgaagttagcgaaacagaacactaacaaggccacgtactcgctgagaaaggtgtgtacaaatgcaatgaacaagctaaaaaagtctaaggatacagtctcagaggggactatacgtctgactgagaagcagatttcccaaatggctgatgacacagtggccgagctgtaccggcatctcgccgttaagaccaaagagctgctcggctag

SEQ ID NO: 311258 - DNA, 789 bp, Artificial Sequence
  derived and/or modified sequence
atggccctggggttgaaatgtagccggatggtacaccccgctttccgcaactatctcgccgcatctattagacccgtcagcgaagttaccctaaaaaaagtgtacgaacgacagcacgggcacaggcaatacgtggcctactccgcggtgcctgtccatcatttcgctactaagaaggccaaggccaagggcaaaggtaagagccagacacgcgttaatattagcgctgcatttgtggaagacattattaacttggaagaggttaatgaggaaatgaaaagtgtaatcgaggcgaggaaagataactttaacaagactctgaacatcggtacatcacctgggagtctcgataaaatagcagtagtgactgcggacgggaagctcgctctaaaccagatcaggcagatatcggtgaagctgccccagcttatccttgtgaatatggcatcttttccagagtttaccgtcgcagccataaaggccattcgggagtcaggcatgaatctaaatcctgaagtcgaaggaacactgatcagggtgccgatcccccaggtgatccgcgaacatagagaaatgctggttaagctggctaaacagaacaccaataaggcaacttatagcctgcgaaaagtgtgcaccaatgccatgaataagctcaagaagtcgaaagacaccgtgtctgaaggcacaattagactgaccgagaagcagatatcacagatggccgatgacaccgtcgccgagctctacaggcacctggcggtgaagactaaggaactactgggctag

SEQ ID NO: 311259 - DNA, 1837 bp, Artificial Sequence
  derived and/or modified sequence
acaggacaatccggggcggggcctgagatgcagtcctgcgagggcggcctcctgtaagacctcttagcgggcccatcgctgaggtgcagggacatgtcgcggccgaactcacctcgtggcctcggcgtggtgctctcagctcatgcccggaaaccaggtcccgacgccgcggtcagacggacctctagacgcgtccgcctcaatgccgccagctgccaggccgcccgtgacgcgttaagcctgcgccgcctcctggcttcgtgacgtcacgacgtccgcgcagctgcggtcgccgccgtcgcacgagtctttccttagtaacctgggcgatagctgtggatgtttccaaggattgtcttcagtcatggccttgggattaaagtgcttccgcatggtccaccctacctttcgcaattatcttgcagcctctatcagacccgtttcagaagttacactgaagacagtgcatgaaagacaacatggccataggcaatacatggcctattcagctgtaccagtccgccattttgctaccaagaaagccaaagccaaagggaaaggacagtcccaaaccagagtgaatattaatgctgccttggttgaggatataatcaacttggaagaggtgaatgaagaaatgaagtctgtgatagaagctctcaaggataatttcaataagactctcaatataaggacctcaccaggatcccttgacaagattgctgtggtaactgctgacgggaagcttgctttaaaccagattagccagatctccatgaagtcgccacagctgattttggtgaatatggccagcttcccagagtgtacagctgcagctatcaaggctataagagaaagtggaatgaatctgaacccagaagtggaagggacgctaattcgggtacccattccccaatcagccaaatggccgatgacacagtggcagaactggacaggcatctggcagtgaagaccaaagaactccttggatgaaagtccactggggccagcaatactccagagcccagtttctgctggatcccatgggtggcacattgggacttctctccctcccccatctacacagaagactgtcaccatgctgacagaagcctgtccttgtaaggcccagccttccaggggaacactcagacatgttcattctcttcctgcttctgctctgggccggtgggtggctctcagaaaatacttgctgctggcaaaaggcctgtactcaggcatttgctttgacttgatgttgccaagggactgaggccattggcaggcttagtaccacctgctcctcatcttaggagtctccttttcaaataattaggctctgttcccattttaaaactctgatattggccttcacctgtgactggacactttactagaggcccattttcactaaacaataaaatctaaataaattggaaggaataacaaccacaaaggaaagaatagagttggtctggattgatgatcactgaggatctgtatgtgaggcacccataacagtagttttgcctgtgagtcgtcttcacacatgctgttttctctgcctggctctctcttcccctccttacctggccagtcctgtttatcatcaggccttgtcttggatatcacgtcctctgggaagtcttcttttcccctctaacctaggaccctcattaccggctctcatagcacagtctactgctttgtacgaattctaagtattcttgttgcacttaattagcctgtatatcctcagaactttgtgtaatgcctggagcatagtaggcagtcatatgttgtatcgtgaataaattgcacatagtagctacccagc

SEQ ID NO: 311260 - DNA, 703 bp, Artificial Sequence
  derived and/or modified sequence
tccttagtaacctgggcgatagctgatgagacggaagtcctgagagtttgaccgatttaaggtcacgtgcctaggaagtgctggaaccaagactcggagttttctctaatggatgtttccaaggattgtcttcagtcatggccttgggattaaagtgcttccgcatggtccaccctacctttcgcaattatcttgcagcctctatcagacccgtttcagaagttacactgaagacagtgcatgaaagacaacatggccataggcaatacatggcctattcagctgtaccagtccgccattttgctaccaagaaagccaaagccaaagggaaaggacagtcccaaaccagagtgaatattaatgctgccttggttgaggatataatcaacttggaagaggtgaatgaagaaatgaagtctgtgatagaagctctcaaggataatttcaataagactctcaatataaggacctcaccaggatcccttgacaagattgctgtggtaactgctgacgggaagcttgctttaaaccagattagccagatctccatgaagtcgccacagctgattttggtgaatatggccagcttcccagaggtaagatggccttgctaaaatctctctccgtggtctcttttggaatggaggagactgggtcatatcaggaggaagtgttccttcagcttaggatgaaacaagagaga

SEQ ID NO: 311261 - DNA, 952 bp, Artificial Sequence
  derived and/or modified sequence
tccttagtaacctgggcgatagctgtggatgtttccaaggattgtcttcagtcatggccttgggattaaagtgcttccgcatggtccaccctacctttcgcaattatcttgcagcctctatcagacccgtttcagaagttacactgaagacagtgcatgaaagacaacatggccataggcaatacatggcctattcagctgtaccagtccgccattttgctaccaagaaagccaaagccaaagggaaaggacagtcccaaaccagagtgaatattaatgctgccttggttgaggatataatcaacttggaagaggtgaatgaagaaatgaagtctgtgatagaagctctcaaggataatttcaataagactctcaatataaggacctcaccaggatcccttgacaagattgctgtggtaactgctgacgggaagcttgctttaaaccagattagccagatctccatgaagtcgccacagctgattttggtgaatatggccagcttcccagaggtaagatggccttgctaaaatctctctccgtggtctcttttggaatggaggagactgggtcatatcaggaggaagtgttccttcagcttaggatgaaacaagagagaagacataataaagagaacttaaggataaggcaaagctcttttcctgttgccagattccttttctgttaaactcagatgctacagaggctaggtaagttgtttgaatacccaaacgggtcccatctaagaaaaacaatactggagatgcagtgattggtgcttggccagcgtgaaaaggctctggtgagctggagagcctgtaccttgtgtgagtggaatgcctctgcccagctcctgctgatcattgccaggcacaatgtaggcctggtaatcagtgttacctgatactacgatttttatttccagaagaagctagtaacacaaatttttatg

SEQ ID NO: 311262 - DNA, 895 bp, Artificial Sequence
  derived and/or modified sequence
acaggacaatccggggcggggcctgagatgcagtcctgcgagggcggcctcctgtaagacctcttagcgggcccatcgctgaggtgcagggacatgtcgcggccgaactcacctcgtggcctcggcgtggtgctctcagctcatgcccggaaaccaggtcccgacgccgcggtcagacggacctctagacgcgtccgcctcaatgccgccagctgccaggccgcccgtgacgcgttaagcctgcgccgcctcctggcttcgtgacgtcacgacgtccgcgcagctgcggtcgccgccgtcgcacgagtctttccttagtaacctgggcgatagctgtggatgtttccaaggattgtcttcagtcatggccttgggattaaagtgcttccgcatggtccaccctacctttcgcaattatcttgcagcctctatcagacccgtttcagaagttacactgaagacagtgcatgaaagacaacatggccataggcaatacatggcctattcagctgtaccagtccgccattttgctaccaagaaagccaaagccaaagggaaaggacagtcccaaaccagagtgaatattaatgctgccttggttgaggatataatcaacttggaagaggtgaatgaagaaatgaagtctgtgatagaagctctcaaggataatttcaataagactctcaatataaggacctcaccaggatcccttgacaagattgctgtggtaactgctgacgggaagcttgctttaaaccagattagccagatctccatgaagtcgccacagctgattttggtgaatatggccagcttcccagaggaattggcctggattaggagtcttagagtacctggaatccggtcccatctctaccaccaactggctgtttga

SEQ ID NO: 311263 - DNA, 1501 bp, Artificial Sequence
  derived and/or modified sequence
tggatgtttccaaggattgtcttcagtcatggccttgggattaaagtgcttccgcatggtccaccctacctttcgcaattatcttgcagcctctatcagacccgtttcagaagttacactgaagacagtgcatgaaagacaacatggccataggcaatacatggcctattcagctgtaccagtccgccattttgctaccaagaaagccaaagccaaagggaaaggacagtcccaaaccagagtgaatattaatgctgccttggttgaggatataatcaacttggaagaggtgaatgaagaaatgaagtctgtgatagaagctctcaaggataatttcaataagactctcaatataaggacctcaccaggatcccttgacaagattgctgtggtaactgctgacgggaagcttgctttaaaccagattagccagatctccatgaagtcgccacagctgattttggtgaatatggccagcttcccagagtgtacagctgcagctatcaaggctataagagaaagtggaatgaatctgaacccagaagtggaagggacgctaattcgggtacccattccccaatcagccaaatggccgatgacacagtggcagaactggacaggcatctggcagtgaagaccaaagaactccttggatgaaagtccactggggccagcaatactccagagcccagtttctgctggatcccatgggtggcacattgggacttctctccctcccccatctacacagaagactgtcaccatgctgacagaagcctgtccttgtaaggcccagccttccaggggaacactcagacatgttcattctcttcctgcttctgctctgggccggtgggtggctctcagaaaatacttgctgctggcaaaaggcctgtactcaggcatttgctttgacttgatgttgccaagggactgaggccattggcaggcttagtaccacctgctcctcatcttaggagtctccttttcaaataattaggctctgttcccattttaaaactctgatattggccttcacctgtgactggacactttactagaggcccattttcactaaacaataaaatctaaataaattggaaggaataacaaccacaaaggaaagaatagagttggtctggattgatgatcactgaggatctgtatgtgaggcacccataacagtagttttgcctgtgagtcgtcttcacacatgctgttttctctgcctggctctctcttcccctccttacctggccagtcctgtttatcatcaggccttgtcttggatatcacgtcctctgggaagtcttcttttcccctctaacctaggaccctcattaccggctctcatagcacagtctactgctttgtacgaattctaagtattcttgttgcacttaattagcctgtatatcctcagaactttgtgtaatgcctggagcatagtaggcagtcatatgttgtatcgtgaataaattgcacatagtagctacccagc

SEQ ID NO: 311264 - DNA, 858 bp, Artificial Sequence
  derived and/or modified sequence
tgcggtcgccgccgtcgcacgagtctttccttagtaacctgggcgatagctgatgagacggaagtcctgagagtttgaccgatttaaggtcacgtgcctaggaagtgctggaaccaagactcggagttttctctaagtttagtgcctttattttgttttaaaccacactgttgcatttccccccattttggaaagctttatagttggaaagaatgaaaacctgatctgaccccttcattttatggttgaaacaaaatctacgtaggagaaatcacttggtacaagtcacaagtcagtggtagagctgccgcaaatgctttttgaatacgtgtgattatgaatctaaatggcagatggcagggagtgataagtggatgtttccaaggattgtcttcagtcatggccttgggattaaagtgcttccgcatggtccaccctacctttcgcaattatcttgcagcctctatcagacccgtttcagaagttacactgaagacagtgcatgaaagacaacatggccataggcaatacatggcctattcagctgtaccagtccgccattttgctaccaagaaagccaaagccaaagggaaaggacagtcccaaaccagagtgaatattaatgctgccttggttgaggatataatcaacttggaagaggtgaatgaagaaatgaagtctgtgatagaagctctcaaggataatttcaataagactctcaatataaggacctcaccaggatcccttgacaagattgctgtggtaactgctgacgggaagcttgctttaaaccagattagccagatctccatgaagtcgccacagctgattttggtgaatatggccagcttcccagag

SEQ ID NO: 311265 - DNA, 871 bp, Artificial Sequence
  derived and/or modified sequence
acaggacaatccggggcggggcctgagatgcagtcctgcgagggcggcctcctgtaagacctcttagcgggcccatcgctgaggtgcagggacatgtcgcggccgaactcacctcgtggcctcggcgtggtgctctcagctcatgcccggaaaccaggtcccgacgccgcggtcagacggacctctagacgcgtccgcctcaatgccgccagctgccaggccgcccgtgacgcgttaagcctgcgccgcctcctggcttcgtgacgtcacgacgtccgcgcagctgcggtcgccgccgtcgcacgagtctttccttagtaacctgggcgatagctgtggatgtttccaaggattgtcttcagtcatggccttgggattaaagtgcttccgcatggtccaccctacctttcgcaattatcttgcagcctctatcagacccgtttcagaagttacactgaagacagtgcatgaaagacaacatggccataggcaatacatggcctattcagctgtaccagtccgccattttgctaccaagaaagccaaagccaaagggaaaggacagtcccaaaccagagtgaatattaatgctgccttggttgaggatataatcaacttggaagaggtgaatgaagaaatgaagtctgtgatagaagctctcaaggataatttcaataagactctcaatataaggacctcaccaggatcccttgacaagattgctgtggtaactgctgacgggaagcttgctttaaaccagattagccagatctccatgaagtcgccacagctgattttggtgaatatggccagcttcccagagactatgaagcaaataaaacaatactttaatgggccaaatgtggcctga

SEQ ID NO: 311266 - protein, 201 aa, Artificial Sequence
  derived and/or modified sequence
MALGLKCFRMVHPTFRNYLAASIRPVSEVTLKTVHERQHGHRQYMAYSAVPVRHFATKKAKAKGKGQSQTRVNINAALVEDIINLEEVNEEMKSVIEALKDNFNKTLNIRTSPGSLDKIAVVTADGKLALNQISQISMKSPQLILVNMASFPECTAAAIKAIRESGMNLNPEVEGTLIRVPIPQSAKWPMTQWQNWTGIWQ

SEQ ID NO: 311267 - DNA, 606 bp, Artificial Sequence
  derived and/or modified sequence
atggccctgggcctgaagtgcttcagaatggtgcaccccaccttcagaaactacctggccgccagcatcagacccgtgagcgaggtgaccctgaagaccgtgcacgagagacagcacggccacagacagtacatggcctacagcgccgtgcccgtgagacacttcgccaccaagaaggccaaggccaagggcaagggccagagccagaccagagtgaacatcaacgccgccctggtggaggacatcatcaacctggaggaggtgaacgaggagatgaagagcgtgatcgaggccctgaaggacaacttcaacaagaccctgaacatcagaaccagccccggcagcctggacaagatcgccgtggtgaccgccgacggcaagctggccctgaaccagatcagccagatcagcatgaagagcccccagctgatcctggtgaacatggccagcttccccgagtgcaccgccgccgccatcaaggccatcagagagagcggcatgaacctgaaccccgaggtggagggcaccctgatcagagtgcccatcccccagagcgccaagtggcccatgacccagtggcagaactggaccggcatctggcagtag

SEQ ID NO: 311268 - DNA, 375 bp, Artificial Sequence
  derived and/or modified sequence
atggcctacagcgccgtgcccgtgagacacttcgccaccaagaaggccaaggccaagggcaagggccagagccagaccagagtgaacatcaacgccgccctggtggaggacatcatcaacctggaggaggtgaacgaggagatgaagagcgtgatcgaggccctgaaggacaacttcaacaagaccctgaacatcagaaccagccccggcagcctggacaagatcgccgtggtgaccgccgacggcaagctggccctgaaccagatcagccagatcagcatgaagagcccccagctgatcctggtgaacatggccagcttccccgagaccatgaagcagatcaagcagtacttcaacggccccaacgtggcctag

SEQ ID NO: 311269 - DNA, 477 bp, Artificial Sequence
  derived and/or modified sequence
atggccctgggcctgaagtgcttcagaatggtgcaccccaccttcagaaactacctggccgccagcatcagacccgtgagcgaggtgaccctgaagaccgtgcacgagagacagcacggccacagacagtacatggcctacagcgccgtgcccgtgagacacttcgccaccaagaaggccaaggccaagggcaagggccagagccagaccagagtgaacatcaacgccgccctggtggaggacatcatcaacctggaggaggtgaacgaggagatgaagagcgtgatcgaggccctgaaggacaacttcaacaagaccctgaacatcagaaccagccccggcagcctggacaagatcgccgtggtgaccgccgacggcaagctggccctgaaccagatcagccagatcagcatgaagagcccccagctgatcctggtgaacatggccagcttccccgaggtgagatggccctgctag

SEQ ID NO: 311270 - DNA, 531 bp, Artificial Sequence
  derived and/or modified sequence
atggccctgggcctgaagtgcttcagaatggtgcaccccaccttcagaaactacctggccgccagcatcagacccgtgagcgaggtgaccctgaagaccgtgcacgagagacagcacggccacagacagtacatggcctacagcgccgtgcccgtgagacacttcgccaccaagaaggccaaggccaagggcaagggccagagccagaccagagtgaacatcaacgccgccctggtggaggacatcatcaacctggaggaggtgaacgaggagatgaagagcgtgatcgaggccctgaaggacaacttcaacaagaccctgaacatcagaaccagccccggcagcctggacaagatcgccgtggtgaccgccgacggcaagctggccctgaaccagatcagccagatcagcatgaagagcccccagctgatcctggtgaacatggccagcttccccgaggagctggcctggatcagaagcctgagagtgcccggcatcagaagccacctgtaccaccagctggccgtgtag

SEQ ID NO: 311271 - DNA, 462 bp, Artificial Sequence
  derived and/or modified sequence
atggccctgggcctgaagtgcttcagaatggtgcaccccaccttcagaaactacctggccgccagcatcagacccgtgagcgaggtgaccctgaagaccgtgcacgagagacagcacggccacagacagtacatggcctacagcgccgtgcccgtgagacacttcgccaccaagaaggccaaggccaagggcaagggccagagccagaccagagtgaacatcaacgccgccctggtggaggacatcatcaacctggaggaggtgaacgaggagatgaagagcgtgatcgaggccctgaaggacaacttcaacaagaccctgaacatcagaaccagccccggcagcctggacaagatcgccgtggtgaccgccgacggcaagctggccctgaaccagatcagccagatcagcatgaagagcccccagctgatcctggtgaacatggccagcttccccgagtag

SEQ ID NO: 311272 - DNA, 507 bp, Artificial Sequence
  derived and/or modified sequence
atggccctgggcctgaagtgcttcagaatggtgcaccccaccttcagaaactacctggccgccagcatcagacccgtgagcgaggtgaccctgaagaccgtgcacgagagacagcacggccacagacagtacatggcctacagcgccgtgcccgtgagacacttcgccaccaagaaggccaaggccaagggcaagggccagagccagaccagagtgaacatcaacgccgccctggtggaggacatcatcaacctggaggaggtgaacgaggagatgaagagcgtgatcgaggccctgaaggacaacttcaacaagaccctgaacatcagaaccagccccggcagcctggacaagatcgccgtggtgaccgccgacggcaagctggccctgaaccagatcagccagatcagcatgaagagcccccagctgatcctggtgaacatggccagcttccccgagaccatgaagcagatcaagcagtacttcaacggccccaacgtggcctag

SEQ ID NO: 311273 - DNA, 606 bp, Artificial Sequence
  derived and/or modified sequence
atggctctaggacttaagtgtttcaggatggtccaccccaccttcagaaattacttagcggcctctattagaccagtatctgaggtcaccctgaagactgtacacgagagacagcacgggcatcgacaatacatggcctattccgcagtgccagtgcgacactttgctacaaaaaaagcaaaggccaagggcaaaggccaatcccagacccgggtcaatataaacgcagcgcttgttgaagatatcattaatcttgaggaggtcaatgaagagatgaagtcagtgatagaagctctgaaggataatttcaataaaaccctcaacataagaacatctccaggcagcctagataagatagccgttgtaaccgccgatggcaaactcgctctcaatcagatcagccagatctccatgaaatctccccagctgatccttgtgaatatggcatcctttcccgagtgtacagcagccgcaattaaagccattcgcgagtccggcatgaacttgaacccagaagtcgaagggacacttatccgtgttcccatccctcaaagcgccaaatggcctatgacgcaatggcagaactggactggaatatggcaatag

SEQ ID NO: 311274 - DNA, 375 bp, Artificial Sequence
  derived and/or modified sequence
atggcatactcagccgtgccagttagacactttgccacaaagaaggcgaaagccaagggcaaaggccagtcccagaccagggtcaacatcaatgccgcactggtcgaagacatcattaacttggaggaggtgaacgaggagatgaagtcagttattgaggccctgaaggataatttcaacaaaacgctcaacattcgcacatcacctggaagcttggacaaaattgcagtcgttacagccgatggcaagctcgcgctgaatcagatcagccagatcagcatgaagagtccccagctcattctcgttaatatggcttcctttcctgaaaccatgaagcagatcaaacaatatttcaatggccctaacgtggcgtag

SEQ ID NO: 311275 - DNA, 477 bp, Artificial Sequence
  derived and/or modified sequence
atggctctcggccttaaatgtttccgaatggttcacccgacttttagaaattacctggctgcaagtatacgtcccgtttccgaagtgaccctcaagacagtgcatgagagacagcacggccataggcaatacatggcttactctgctgtgcccgtgcgacacttcgcaacaaagaaggctaaagctaaggggaaaggtcagtcccaaactcgagtgaacatcaacgcagcgctcgtggaggatatcattaatctcgaggaagtgaatgaggaaatgaaaagtgtgatcgaggcactaaaagataacttcaacaagacactcaatattcgcacatcccctggatccttggacaagattgccgtggtgactgcagatggtaagctcgccctgaaccagatatcacaaatttccatgaagtctccacagctgattctggtgaacatggcctcttttcccgaagtgcgctggccctgctag

SEQ ID NO: 311276 - DNA, 477 bp, Artificial Sequence
  derived and/or modified sequence
atggccctaggcctgaaatgttttcggatggtgcaccctacattccggaactatctggccgctagtatcaggcctgtctccgaagtgacacttaagaccgtccacgaaaggcagcatgggcacaggcagtacatggcctactccgctgtgccagtgcgccattttgcaacaaagaaagcgaaagccaagggaaagggtcaaagtcagacccgggtgaacattaacgcagccttagtggaggatattattaacctcgaggaggtaaatgaggaaatgaagtctgttattgaagctctgaaggataattttaataagacccttaatatcaggacgagtccagggagcctggacaagattgccgtggtcactgcagatggtaagctcgccttaaaccagatcagccaaatatctatgaaatcaccgcagctcatcctggtgaatatggcgtcattcccagaagtgcggtggccctgctag

SEQ ID NO: 311277 - DNA, 531 bp, Artificial Sequence
  derived and/or modified sequence
atggcgctcggactcaagtgttttcggatggtacatcccacatttcggaattatctcgccgcaagtattaggcccgttagcgaggtgacgctcaagaccgtgcatgaacgacagcatgggcatagacagtatatggcttactccgcggtgcccgtacgccattttgccaccaagaaagccaaagcaaagggcaaaggccagtcccaaacccgggtgaatataaacgcggccttagtcgaagacatcataaacctggaagaagtcaatgaggagatgaaaagtgtcatcgaggcgctgaaggataattttaataagactctcaacatacggacctcaccagggtccctcgacaagattgcagtggtgaccgcagatggcaagctggccctcaatcaaatctctcaaatctcaatgaagagtccacaactcatcctggttaatatggcgtccttcccagaggagcttgcctggatcagatccctgcgcgtgcctgggatcagaagtcatttgtatcaccagctggccgtttag

SEQ ID NO: 311278 - DNA, 606 bp, Artificial Sequence
  derived and/or modified sequence
atggccctaggcttgaagtgttttcgcatggtccaccccactttcagaaactatctggccgccagcattaggccggtctctgaggtgactcttaagaccgtgcatgagcgccagcacggtcacaggcaatacatggcatattcggctgtgccagtaaggcacttcgcgaccaagaaggcaaaagccaaggggaaggggcagtcccaaacaagagtcaatatcaacgccgctttggtcgaagacattataaatctggaagaagtgaatgaagagatgaagtctgtgatagaagccctaaaagataacttcaataaaacactaaatattcgtacaagtcccggctccttggacaagatagcagttgtgactgcagacggcaaactggctttgaaccaaatttcccaaatttccatgaaaagccctcagctgattctggtgaacatggcctcattccctgagtgcactgccgctgccataaaagctatcagggaatcaggaatgaacctgaatcctgaggtcgagggcactttaatcagagtcccaatccctcagagcgccaagtggccaatgacccagtggcagaactggaccggaatttggcagtag

SEQ ID NO: 311279 - DNA, 462 bp, Artificial Sequence
  derived and/or modified sequence
atggccctggggttaaagtgctttcgcatggtgcaccccacgtttcgcaactatcttgccgcttccatcaggccagtaagtgaggtgactctaaaaaccgtccatgagcgtcagcatgggcaccgacagtatatggcatattctgcagtgcctgtgagacattttgctacaaaaaaagctaaagctaaaggaaagggacaatcccaaacgcgcgtgaatattaacgccgctctggtggaggacattatcaatttggaggaagttaatgaggagatgaagtcggtcatcgaggcactaaaggacaacttcaacaagactcttaacatcaggacatcacccgggtcactagataaaatcgcagtggtgacagcagacggcaagttggctctgaaccaaatctcccagatcagtatgaagtcccctcaactgatcctggtgaatatggcctccttccccgaatag

SEQ ID NO: 311280 - DNA, 507 bp, Artificial Sequence
  derived and/or modified sequence
atggctctaggactgaagtgcttcaggatggttcatcctacgtttagaaattacctcgccgcctccattaggccggtcagtgaagtaactctgaagactgttcacgagcgacagcacgggcatcgacagtacatggcatattctgccgtacccgttagacacttcgccaccaaaaaagctaaagctaagggtaaagggcagtctcaaaccagggtgaacatcaacgcagccctcgttgaagacatcatcaaccttgaggaagtgaacgaggaaatgaagagcgtgattgaagcccttaaagataacttcaataagaccttaaacatcaggacgtcccctggcagtctcgacaagatcgccgtggtgaccgccgatggaaaactcgcactgaaccagattagccagatttctatgaagtccccacagttaattctagttaacatggcatcctttcctgaaacaatgaaacagattaagcagtattttaacggtccaaacgtagcctag

SEQ ID NO: 311281 - DNA, 606 bp, Artificial Sequence
  derived and/or modified sequence
atggccctgggcctgaagtgcttcaggatggtgcaccccaccttcaggaactacctggccgccagcatccggcctgtgtctgaggtgaccctgaagacagtgcatgagcggcagcacggccaccggcagtacatggcctacagcgctgtgcctgtgcgccactttgccaccaagaaggccaaggccaagggcaagggccagagccagaccagggtgaacatcaatgctgccctggtggaggacatcatcaacctggaggaggtgaatgaggagatgaagagcgtcatcgaggccctgaaggacaacttcaacaagaccctgaacatccgcaccagccctggcagcctggacaagattgctgtggtgacagcagatggcaagctggccctgaaccagatcagccagatctccatgaagagcccccagctgatcctggtgaacatggccagcttcccagaatgtacagctgctgccatcaaggccatccgggagagcggcatgaacctgaaccctgaggtggagggcaccctcatccgggtgcccatcccccagagcgccaagtggcccatgacccagtggcagaactggacaggcatctggcagtag

SEQ ID NO: 311282 - DNA, 375 bp, Artificial Sequence
  derived and/or modified sequence
atggcctacagcgctgtgcctgtgcgccactttgccaccaagaaggccaaggccaagggcaagggccagagccagaccagggtgaacatcaatgctgccctggtggaggacatcatcaacctggaggaggtgaatgaggagatgaagagcgtcatcgaggccctgaaggacaacttcaacaagaccctgaacatccgcaccagccctggcagcctggacaagattgctgtggtgacagcagatggcaagctggccctgaaccagatcagccagatctccatgaagagcccccagctgatcctggtgaacatggccagcttccctgagaccatgaagcagatcaagcagtacttcaacggccccaacgtggcctag

SEQ ID NO: 311283 - DNA, 477 bp, Artificial Sequence
  derived and/or modified sequence
atggccctgggcctgaagtgcttcaggatggtgcaccccaccttcaggaactacctggccgccagcatccggcctgtgtctgaggtgaccctgaagacagtgcatgagcggcagcacggccaccggcagtacatggcctacagcgctgtgcctgtgcgccactttgccaccaagaaggccaaggccaagggcaagggccagagccagaccagggtgaacatcaatgctgccctggtggaggacatcatcaacctggaggaggtgaatgaggagatgaagagcgtcatcgaggccctgaaggacaacttcaacaagaccctgaacatccgcaccagccctggcagcctggacaagattgctgtggtgacagcagatggcaagctggccctgaaccagatcagccagatctccatgaagagcccccagctgatcctggtgaacatggccagcttccctgaggtgcgctggccctgctag

SEQ ID NO: 311284 - DNA, 531 bp, Artificial Sequence
  derived and/or modified sequence
atggccctgggcctgaagtgcttcaggatggtgcaccccaccttcaggaactacctggccgccagcatccggcctgtgtctgaggtgaccctgaagacagtgcatgagcggcagcacggccaccggcagtacatggcctacagcgctgtgcctgtgcgccactttgccaccaagaaggccaaggccaagggcaagggccagagccagaccagggtgaacatcaatgctgccctggtggaggacatcatcaacctggaggaggtgaatgaggagatgaagagcgtcatcgaggccctgaaggacaacttcaacaagaccctgaacatccgcaccagccctggcagcctggacaagattgctgtggtgacagcagatggcaagctggccctgaaccagatcagccagatctccatgaagagcccccagctgatcctggtgaacatggccagcttccctgaggagctggcctggatccgcagcctgcgggtgcccggcatccgcagccacctgtaccaccagctggccgtgtag

SEQ ID NO: 311285 - DNA, 462 bp, Artificial Sequence
  derived and/or modified sequence
atggccctgggcctgaagtgcttcaggatggtgcaccccaccttcaggaactacctggccgccagcatccggcctgtgtctgaggtgaccctgaagacagtgcatgagcggcagcacggccaccggcagtacatggcctacagcgctgtgcctgtgcgccactttgccaccaagaaggccaaggccaagggcaagggccagagccagaccagggtgaacatcaatgctgccctggtggaggacatcatcaacctggaggaggtgaatgaggagatgaagagcgtcatcgaggccctgaaggacaacttcaacaagaccctgaacatccgcaccagccctggcagcctggacaagattgctgtggtgacagcagatggcaagctggccctgaaccagatcagccagatctccatgaagagcccccagctgatcctggtgaacatggccagcttccctgagtag

SEQ ID NO: 311286 - DNA, 507 bp, Artificial Sequence
  derived and/or modified sequence
atggccctgggcctgaagtgcttcaggatggtgcaccccaccttcaggaactacctggccgccagcatccggcctgtgtctgaggtgaccctgaagacagtgcatgagcggcagcacggccaccggcagtacatggcctacagcgctgtgcctgtgcgccactttgccaccaagaaggccaaggccaagggcaagggccagagccagaccagggtgaacatcaatgctgccctggtggaggacatcatcaacctggaggaggtgaatgaggagatgaagagcgtcatcgaggccctgaaggacaacttcaacaagaccctgaacatccgcaccagccctggcagcctggacaagattgctgtggtgacagcagatggcaagctggccctgaaccagatcagccagatctccatgaagagcccccagctgatcctggtgaacatggccagcttccctgagaccatgaagcagatcaagcagtacttcaacggccccaacgtggcctag

SEQ ID NO: 311287 - DNA, 884 bp, Artificial Sequence
  derived and/or modified sequence
atgagacggaagtcctgagagtttgaccgatttaaggtcacgtgcctaggaagtgctggaaccaagactcggagttttctctaagtttagtgcctttattttgttttaaaccacactgttgcatttccccccattttggaaagctttatagttggaaagaatgaaaacctgatctgaccccttcattttatggttgaaacaaaatctacgtaggagaaatcacttggtacaagtcacaagtcagtggtagagctgccgcaaatgctttttgaatacgtgtgattatgaatctaaatggcagatggcagggagtgataagcctctatcagacccgtttcagaagttacactgaagacagtgcatgaaagacaacatggccataggcaatacatggcctattcagctgtaccagtccgccattttgctaccaagaaagccaaagccaaagggaaaggacagtcccaaaccagagtgaatattaatgctgccttggttgaggatataatcaacttggaagaggtgaatgaagaaatgaagtctgtgatagaagctctcaaggataatttcaataagactctcaatataaggacctcaccaggatcccttgacaagattgctgtggtaactgctgacgggaagcttgctttaaaccagattagccagatctccatgaagtcgccacagctgattttggtgaatatggccagcttcccagagactatgaagcaaataaaacaatactttaatgggccaaatgtggcctgagggccaccaatttgtgacctctgcattagtatttggagcagaccctccaggaagtccttttatactagactgaccattgcagaatattgcatggagcacagtgcttccaaaactggaag

SEQ ID NO: 311288 - DNA, 606 bp, Artificial Sequence
  derived and/or modified sequence
atggccctgggcctgaagtgcttccggatggtgcaccccaccttccgcaactatctggccgcttccatcaggcccgtgtcggaagtgacactgaagacagtccatgaaagacagcacggccatcgacagtatatggcctactccgctgtccctgtgcggcatttcgctacaaagaaggcaaaggcaaaaggaaaagggcagtcccagacacgggtgaatatcaacgctgcactagtggaagacattattaatcttgaggaagttaacgaggaaatgaagtcagtaatagaggcactcaaagacaacttcaataagactctcaatataaggacctcgcccggctcacttgataagatcgctgttgtgaccgctgatggaaagctcgccctcaatcagatctcgcaaatcagtatgaaaagcccacagctcatactagttaatatggcctcttttcccgagtgcaccgccgccgccattaaggctatccgggaaagcgggatgaacctcaaccctgaggtggaggggactctgattagggtgcctattccgcagagcgctaaatggcctatgacccagtggcaaaattggaccggaatctggcagtag

SEQ ID NO: 311289 - DNA, 375 bp, Artificial Sequence
  derived and/or modified sequence
atggcctacagcgccgtgcccgtgcggcacttcgccaccaagaaggctaaagctaaaggaaaggggcagagccagactagggtgaacatcaatgcagccctggtggaagacattattaatctcgaagaggtgaatgaggagatgaagtctgttatagaagctctgaaagataatttcaacaagaccctcaacattcgtacatccccaggctcacttgacaagatagctgtagtgacggccgacgggaagcttgcccttaatcaaattagccaaatttccatgaaatccccccagttaattctggtgaatatggcttcttttcccgaaactatgaaacaaatcaaacagtactttaatggacccaatgttgcatag

SEQ ID NO: 311290 - DNA, 477 bp, Artificial Sequence
  derived and/or modified sequence
atggccctgggcctgaagtgcttccggatggtgcaccccaccttccgaaactacttggcagctagcatcagacccgtctcggaagtcactcttaaaaccgttcacgaacggcaacacggacaccggcagtatatggcttattccgcagtgccggttcgtcattttgcgaccaagaaggccaaggctaagggaaaaggccagagccagactcgcgtgaacattaatgcagcgttggtggaggatatcataaacttggaggaggtgaacgaggagatgaaatccgtaattgaagctttgaaggataacttcaataagactctcaacataagaacatctccgggaagcctggataagatcgctgtggtaacggcagacggcaaattagctttgaatcagattagtcagatatccatgaagtcgccccagttaatactcgttaacatggcctcattcccagaggtgcgctggccatgctag

SEQ ID NO: 311291 - DNA, 477 bp, Artificial Sequence
  derived and/or modified sequence
atggccctgggcctgaagtgcttccggatggtgcaccccaccttccggaattatctggcggcgagtataagacctgtttcggaggtcacattgaaaactgtgcacgagcgccagcatggccaccggcagtacatggcttatagcgctgtcccagttagacactttgccacaaagaaggctaaggctaagggtaagggtcagagccagacacgcgtgaatataaacgcagctctggtggaagacatcatcaatctggaggaggtaaatgaagagatgaagagcgttatcgaagcattaaaggacaacttcaataaaaccctgaacatccgcacatcgccaggcagcctggacaaaatcgccgtggtgactgcagatggaaagttagcgttgaatcagatttcccaaatatctatgaagtctcctcagctgattctggtcaatatggcatcgtttcctgaagtcaggtggccgtgctag

SEQ ID NO: 311292 - DNA, 531 bp, Artificial Sequence
  derived and/or modified sequence
atggccctgggcctgaagtgcttccggatggtgcaccccaccttccggaactacctcgccgccagcatcaggcccgtgtctgaggtaacacttaaaactgtccatgaaagacagcatggccaccgacagtatatggcatactctgcagttcccgtcagacacttcgccaccaagaaggcaaaggctaagggcaagggtcagtcccaaacaagagtaaacattaacgcggccctagtagaagatataatcaacctggaggaggtaaacgaggaaatgaagtcagtcatagaagctcttaaggacaatttcaataaaaccctcaatatccgaacctccccaggaagcctggataagatcgccgtagtgactgctgatggcaagttagccttgaatcaaataagccaaatttctatgaaaagccctcagttgattttggtgaacatggcttccttccccgaagagctggcctggataaggagtcttagagtccccgggattcggagtcacctgtatcatcagctagccgtatag

SEQ ID NO: 311293 - DNA, 606 bp, Artificial Sequence
  derived and/or modified sequence
atggccctgggcctgaagtgcttccggatggtgcaccccaccttcaggaactacctggctgcatcgatccgccctgtgtcagaggtcacactcaaaactgtgcatgagcggcagcacggacatagacagtacatggcatactctgccgttcccgttaggcatttcgctactaagaaagctaaggccaagggtaaaggacagtcgcagacaagggtgaacattaacgccgccttggtagaagacatcatcaatctggaggaggtaaacgaggagatgaaaagcgtcattgaagctcttaaggataatttcaacaagactcttaatatcaggaccagtcccggttctttagataagatcgcggtggtgacagccgacggaaagctcgcgttaaatcaaataagccaaatttccatgaagagtccacagcttatcctggtgaacatggcctcatttccagaatgcacagccgcggccataaaggcaatcagggagtcagggatgaatcttaatccagaagtagaaggaaccttaattcgggtacctattccgcagtcagctaagtggcccatgacccagtggcagaattggactggaatttggcagtag

SEQ ID NO: 311294 - DNA, 462 bp, Artificial Sequence
  derived and/or modified sequence
atggccctgggcctgaagtgcttccggatggtgcaccccaccttccgcaactatctagccgcctccatacggccagtgtccgaggtcaccttgaagaccgtgcacgaacggcagcacgggcacagacagtacatggcatactcagcggtccctgtacgccatttcgcaactaaaaaggccaaagcaaagggcaaaggacagtcccagacccgcgtcaatatcaatgccgccctggtagaggatattataaacctcgaggaggtgaacgaagagatgaaatctgttatagaggcactgaaagataactttaataagaccctcaatattcgcacaagccccggatctctagacaagatcgccgtcgttactgctgacgggaagctggccttaaatcagatctcccagatcagcatgaagtccccacagctaatcttggtgaatatggcatccttcccagagtag

SEQ ID NO: 311295 - DNA, 507 bp, Artificial Sequence
  derived and/or modified sequence
atggccctgggcctgaagtgcttccggatggtgcaccccaccttcagaaactacctggccgccagcatcagacccgtatcggaagtcactttgaaaactgttcacgaaagacagcacggccaccggcagtacatggcttattccgccgtgcctgttaggcattttgctaccaagaaggctaaggcaaaggggaagggccagtcccagactagagtgaacattaacgctgcacttgttgaagatattattaacttggaggaggttaatgaggagatgaagagcgttattgaagcactgaaggataatttcaataagaccctgaatataagaactagcccaggtagtcttgacaaaatagcagtggtgacagcagacggaaaactggcactgaaccaaattagtcagatctctatgaagtcccctcagctgatccttgttaatatggcctcgtttcccgagactatgaaacagattaaacagtatttcaatggcccaaacgttgcctag

SEQ ID NO: 311296 - DNA, 606 bp, Artificial Sequence
  derived and/or modified sequence
atggctttgggcctgaaatgtttccgcatggtgcaccccaccttccggaactacctggccgcatctatccggccagtttcagaggtgactctcaagactgtgcacgagaggcaacacgggcatcgacagtatatggcatactccgcagtacccgttcgacacttcgctacaaagaaagccaaggcaaaagggaaaggccagagccagactagagttaacattaacgctgcactcgtcgaagatataataaacttggaggaagtgaacgaggaaatgaagtcggtgattgaggccctcaaggacaactttaataagaccctgaatataaggacttccccaggaagcttagataagattgccgtcgtgacggccgacggcaagctagccttaaaccaaataagccagatatcaatgaagtccccgcagctgatcctggttaacatggccagtttccccgaatgcactgcagctgctatcaaagccatcagggaatctggtatgaatctgaaccccgaggtagaaggtacacttattcgcgtgccgattccgcagtcagccaagtggcctatgacccagtggcagaattggacaggcatctggcagtag

SEQ ID NO: 311297 - DNA, 375 bp, Artificial Sequence
  derived and/or modified sequence
atggcctacagcgccgtgcccgtgcgtcactttgctacaaaaaaagcgaaggcgaaaggtaagggccagtctcaaacacgggtgaatataaacgctgctctagtggaggatattattaacctcgaggaagtgaacgaagaaatgaagtctgtgatcgaagctctgaaggacaactttaataaaaccctgaatattaggacctctccgggtagtctggacaagatagcagtggtgactgccgatgggaagctggccctcaatcaaattagtcagatctcaatgaaaagcccgcagttaattctcgttaatatggcttccttcccggaaacaatgaaacaaattaagcagtactttaacggcccaaacgtcgcctag

SEQ ID NO: 311298 - DNA, 477 bp, Artificial Sequence
  derived and/or modified sequence
atggccttaggcctaaagtgcttccggatggtgcatcccacgttcaggaattacctggccgcttcaatacgccctgtgtccgaagtaactctaaaaaccgtccatgagcgacagcacggccacagacagtatatggcctacagtgccgtccccgttaggcacttcgccacgaagaaagccaaagctaagggcaagggccagtctcaaacccgcgttaacattaacgcagcattggtggaggatatcattaacctggaggaggtcaacgaggaaatgaaatccgtcatcgaggcactgaaagataacttcaataagacactgaatatccggaccagccccggttcactagataaaatcgccgtggtcacagccgacggcaaactcgcgttgaatcagatcagccaaatatccatgaaaagcccgcaacttatattggttaacatggcctcattcccggaagtcaggtggccatgctag

SEQ ID NO: 311299 - DNA, 477 bp, Artificial Sequence
  derived and/or modified sequence
atggcgttagggctgaagtgctttcgtatggtccaccctacttttagaaactacttggccgctagtatcaggcctgtgtcagaagttacgctgaagacggtgcatgagagacaacatggacacagacagtacatggcttacagcgctgtacccgtgagacacttcgccacgaagaaggccaaggcaaaggggaaggggcagtcccagacaagggtaaacatcaatgccgctctggttgaggacatcataaatctcgaggaggtcaatgaagaaatgaagtccgtaatagaagctctgaaggataattttaacaaaacgctgaatattcggacgtcaccaggatcgcttgataaaattgctgtggtcacagccgatggaaaactggcacttaatcaaatttcccaaatttcgatgaagtccccacaactgatactcgtgaatatggcctcctttcccgaggtcaggtggccctgctag

SEQ ID NO: 311300 - DNA, 531 bp, Artificial Sequence
  derived and/or modified sequence
atggccttggggcttaaatgctttcgaatggtccacccaacgttccgaaactatctggcagccagcatcagaccagtatcggaagtaactctaaagacagtgcatgagcggcaacacgggcacaggcagtatatggcctattcggcagttcctgtgcgccattttgccactaaaaaggccaaggccaagggcaaaggccaatcacagacacgcgtgaacataaatgcggcactagtcgaggatatcataaatctcgaggaggtaaatgaagaaatgaaaagtgttattgaggctctgaaagacaatttcaacaagacactgaacatccggactagccctggcagtctagataaaatcgctgtcgtgaccgccgacggaaagctcgccctcaaccagatatcccaaatatcaatgaagtcacctcagcttatcttggtgaacatggccagttttcccgaagaattggcctggatccgctccctccgtgttcccggtatccgctcacacttatatcaccagctggcagtgtag

SEQ ID NO: 311301 - DNA, 606 bp, Artificial Sequence
  derived and/or modified sequence
atggccctgggcttgaaatgctttcgcatggtgcacccaacctttcgcaattatttggccgcttctatccgtccagtgtctgaggtgacgttgaagaccgtacacgagagacagcatggacaccggcagtatatggcatacagcgccgtccccgtcagacattttgctacaaagaaagcaaaggctaagggtaagggccaatcacagaccagggtgaacattaatgcagcgctggtcgaggatatcatcaacctcgaagaggttaacgaggaaatgaagagcgtaatcgaggcgctgaaggacaactttaacaaaacgctcaatatcaggacctcccccggaagcctcgacaagattgctgtggtgaccgccgatgggaagctcgccctgaatcagattagccaaattagcatgaagtctccccagcttatacttgtgaatatggcttcgtttccggaatgtacagccgctgctattaaggccatcagagaatcagggatgaatttaaatccagaggtggagggcacccttattcgtgtacctatccctcaatccgctaagtggcccatgactcagtggcagaactggaccggcatttggcagtag

SEQ ID NO: 311302 - DNA, 462 bp, Artificial Sequence
  derived and/or modified sequence
atggcactggggctgaagtgtttccggatggtacaccctacgttcagaaactacttggccgctagcatccgcccagtgtcagaggtgacgcttaagacagtgcacgagcgacagcacggacacaggcagtatatggcatattctgcggtgccagtgcgacatttcgctactaaaaaggccaaagcaaaaggtaaaggccagtcgcagacacgggtgaatattaatgctgccttggttgaggatataattaatttggaggaagtgaatgaggaaatgaagtctgtgattgaggccctgaaagacaactttaataagacattgaatatccggacgagccccggttccctcgacaagatagctgtagttaccgcagacgggaagcttgccttaaatcaaatcagccaaatcagcatgaagagcccccagctcatcctcgttaacatggcctctttccccgaatag

SEQ ID NO: 311303 - DNA, 507 bp, Artificial Sequence
  derived and/or modified sequence
atggcattggggctcaagtgttttagaatggtgcacccaacatttcgaaattatctcgctgcaagtataagaccggtgagtgaggtaaccctcaagactgtgcatgaacggcagcacggccacaggcaatacatggcttacagcgctgtacctgtcaggcattttgctacaaagaaagccaaggctaaaggtaagggccagtcgcagactagggtcaacataaatgcggctctagtcgaggacatcattaatctcgaggaggtgaacgaggagatgaagagtgttatcgaggccttgaaggataacttcaacaagacgctgaacattcggacgtctccagggagcctggataaaattgcggtggtgaccgcagatggcaagttggcacttaaccagatctcccagatctcaatgaagtcccctcagctgatcttagtcaacatggccagttttccggagaccatgaaacagataaagcaatatttcaacggcccaaatgtagcttag

SEQ ID NO: 311304 - protein, 101 aa, Artificial Sequence
  derived and/or modified sequence
MEELIWEQYTVTLQKDSKRGFGIAVSGGRDNPHFENGETSIVISDVLPGGPADGLLQENDRVVMVNGTPMEDVLHSFAVQQLRKSGKVAAIVSTGFAFSLP

SEQ ID NO: 311305 - protein, 161 aa, Artificial Sequence
  derived and/or modified sequence
MEELIWEQYTVTLQKDSKRGFGIAVSGGRDNPHFENGETSIVISDVLPGGPADGLLQENDRVVMVNGTPMEDVLHSFAVQQLRKSGKVAAIVVKRPRKVQVAALQASPPLDQDDRAFEVMDEFDGRSFRSGYSERSRLNSHGGRSRSWEDSPERGRPHERA

SEQ ID NO: 311306 - DNA, 1774 bp, Artificial Sequence
  derived and/or modified sequence
tgatcacacccacagttgagctgcgctggccagagatgcctgcccacagcctggtgatgagcagcccggccctcccggccttcctgctctgcagcacgctgctggtcatcaagatgtacgtggtggccatcatcacgggccaagtgaggctgcggaagaaggcctttgccaaccccgaggatgccctgagacacggaggcccccagtattgcaggagcgaccccgacgtggaacgctgcctcagggcccaccggaacgacatggagaccatctaccccttccttttcctgggcttcgtctactcctttctgggtcctaacccttttgtcgcctggatgcacttcctggtcttcctcgtgggccgtgtggcacacaccgtggcctacctggggaagctgcgggcacccatccgctccgtgacctacaccctggcccagctcccctgcgcctccatggctctgcagatcctctgggaagcggcccgccacctgtgaccagcagctgatgcctccttggccaccagaccatgggccaagagccgccgtggctatacctggggacttgatgttccttccagattgtggtgggccctgagtcctggtttcctggcagcctgctgcgcgtgtgggtctctgggcacagtgggcctgtgtgtgtgcccgtgtgtgtgtatgtgtgtgtgtatgtttcttagccccttggattcctgcacgaagtggctgatgggaaccatttcaagacagattgtgaagattgatagaaaatccttcagctaaagtaacagagcatcaaaaacatcactccctctccctccctaacagtgaaaagagagaagggagactctatttaagattcccaaacctaatgatcatctgaatcccgggctaagaatgcagacttttcagactgaccccagaaattctggcccagccaatctagaggcaagcctggccatctgtatttttttttttccaagacagagtcttgctctgttgcccaagctggagtgaagtggtacaatctggctcactgcagcctccgcctcccgggttcaagcgattctcccgcctcagcctcctgagtagctgggattacaggcgcgtatcaccatacccagctaatttttgtatttttagtagagacgggttcaccatgttgcccaggagggtctcgaactcctggcctcaagtgatccaccggcctcggcctcccaaagtgctgggatgacaggcatgaatcactgtgctcagccaccatctggagttttaaaaggctcccatgtgagtccctgtgatggccaggccaggggacccctgccagttctctgtggaagcaaggctggggtcttgggttcctgtatggtggaagctgggtgagccaaggacagggctggctcctctgcccccgctgacgcttcccttgccgttggctttggatgtctttgctgcagtcttctctctggctcaggtgtgggtgggaggggcccacaggaagctcagccttctcctcccaaggtttgagtccctccaaagggcagtgggtggaggaccgggagctttgggtgaccagccactcaaaggaactttctggtcccttcagtatcttcaaggtttggaaactgcaaatgtccccttgatggggaatccgtgtgtgtgtgtgtgtgtgtgtgtgtgtgtgtgtgtgtgtgtgtgtgttttctcctagacccgtgacctgagatgtgtgatttttagtcattaaatggaagtgtctgccagctgggcccagcacctcg

SEQ ID NO: 311307 - protein, 179 aa, Artificial Sequence
  derived and/or modified sequence
ERGASIAHCPNSNLSLSSGFLNVLEVLKHEVKIGLGTDVAGGYSYSMLDAIRRAVMVSNILLINKVNEKSLTLKEVFRLATLGGSQALGLDGEIGNFEVGKEFDAILINPKASDSPIDLFYGDFFGDISEAVIQKFLYLGDDRNIEEVYVGGKQVVPFSSSVKETIHLPASSPHPPPFP

SEQ ID NO: 311308 - protein, 393 aa, Artificial Sequence
  derived and/or modified sequence
MFLEEASQQEKLAKEWCFKPCEIRELSHHEFFMPGLVDTHIHASQYSFAGSSIDLPLLEWLTKYTFPAEHRFQNIDFAEEVYTRVVRRTLKNGTTTACYFATIHTDSSLLLADITDKFGQRAFVGKVCMDLNDTFPEYKETTEESIKETERFVSEMLQKNSHISENRDEVEAVKNLYPSYKNYTSVYDKNNLLTNKTVMAHGCYLSAEELNVFHERGASIAHCPNSNLSLSSGFLNVLEVLKHEVKIGLGTDVAGGYSYSMLDAIRRAVMVSNILLINKVNEKSLTLKEVFRLATLGGSQALGLDGEIGNFEVGKEFDAILINPKASDSPIDLFYGDFFGDISEAVIQKFLYLGDDRNIEEVYVGGKQVVPFSSSVKETIHLPASSPHPPPFP

SEQ ID NO: 311309 - DNA, 1182 bp, Artificial Sequence
  derived and/or modified sequence
atgtttttagaggaggcatctcagcaggagaagcttgccaaggagtggtgcttcaaaccgtgcgaaattcgcgagctctcccatcacgaattttttatgcctggtctggttgatacccatattcacgcctctcagtattcgtttgcagggtcttctattgatctgccactgttggagtggttgacaaagtacacgttccccgcagaacacaggttccagaatattgactttgccgaggaggtatacactcgagtcgtaaggaggaccctcaaaaacggcactaccacagcttgctactttgccaccattcacacagattctagtttgctgctggccgacattactgataagtttggccagagagcatttgttggtaaagtgtgcatggatctcaacgacactttcccagaatataaagaaactaccgaagaaagcatcaaagagaccgaacgcttcgtgtccgagatgctccagaaaaactcccatatttcagagaaccgggatgaagtagaggctgtgaaaaacctctatccctcctataaaaattacacatcagtgtacgacaaaaacaacctccttacaaacaagactgttatggcccacggctgctacctatctgccgaagagctgaacgtatttcatgagagaggggcctcgatcgcccattgccctaactctaatctgtccctcagttccgggtttctcaacgtacttgaggttctcaagcacgaagtcaaaataggccttggaaccgacgtagctggcggatatagttatagcatgctggacgcaattcgaagggccgtcatggtttcaaacattctattaattaacaaagttaacgaaaagtcacttaccttgaaggaagtttttcgactagccacccttggcggaagtcaagcccttgggctggatggggaaatcggcaattttgaggtgggtaaggagtttgacgcaattctcataaaccccaaggctagcgacagtcccattgaccttttttatggagattttttcggcgacatctctgaagctgtcatccagaaattcttgtacctgggagacgacagaaacattgaggaggtttacgtgggagggaaacaagtcgtgccattttcctccagcgtgaaggagacaatccacctccccgcttcttcgccacacccaccaccatttccatag

SEQ ID NO: 311310 - DNA, 1771 bp, Artificial Sequence
  derived and/or modified sequence
agcctgtgtccgcccggcagccgcccgcagctgcagagagtcccgctgcgtctccgccgcgtgcgccctcctcgaccagcagacccgcgctgcgctccgccgctgacatgtgtgccgctcagatgccgcccctggcgcacatcttccgagggacgttcgtccactccacctggacctgccccatggaggtgctgcgggatcacctcctcggcgtgagcgacagcggcaaatgtttttagaagaagcatctcaacaggaaaaactggccaaagaatggtgcttcaagccgtgtgaaataagagaactgagccaccatgagttcttcatgcctgggctggttgatacacacatccatgcctctcagtattcctttgctggaagtagcatagacctgccactcttggagtggctgaccaagtacacatttcctgcagaacacagattccagaacatcgactttgcagaagaagtatataccagagttgtcaggagaacactaaagaatggaacaaccacagcttgttactttgcaacaattcacactgactcatctctgctccttgccgacattacagataaatttggacagcgggcatttgtgggcaaagtttgcatggatttgaatgacacttttccagaatacaaggagaccactgaggaatcgatcaaggaaactgagagatttgtgtcagaaatgctccaaaagaacagccatataagtgaaaatcgtgatgaagttgaagctgtgaaaaacttataccccagttataaaaactacacatctgtgtatgataaaaacaatcttttgacaaataagacagtgatggcacacggctgctacctctctgcagaagaactgaacgtattccatgaacgaggagcatccatcgcacactgtcccaattctaatttatcgctcagcagtggatttctaaatgtgctagaagtcctgaaacatgaagtcaagatagggctgggtacagacgtggctggtggctattcatattccatgcttgatgcaatcagaagagcagtgatggtttccaatatccttttaattaataaggtaaatgagaaaagcctcaccctcaaagaagtcttcagactagctactcttggaggaagccaagccctggggctggatggtgagattggaaactttgaagtgggcaaggaatttgatgccatcctgatcaaccccaaagcatccgactctcccattgacctgttttatggggacttttttggtgatatttctgaggctgttatccagaagttcctctatctaggagatgatcgaaatattgaagaggtttatgtgggcggaaagcaggtggttccgttttccagctcagtgaaagaaacaattcacttaccagcctcctcaccccatcctccaccatttccttaatgttccatggtattttcaacggaatacactttgaaagttctcagaataactgtagaatgtgctggaaatggaacattctcagataaggaggaactggccagatcaaactaagctgtgttcccatccctcctgaaacaggatcttatggtgctttagcccaggacgtcaagtatcccctaggtatgaaacccagagtggagcatgctttgaaggtccctcagctacatgcagactagactgcatgtagctgactctaactgccctgggaaactatcctgagctttgacagacctgccatgaatcttaagcttttattgtcccttgctgcctatctgtgaggaataaagttgcttcacttac

SEQ ID NO: 311311 - DNA, 1182 bp, Artificial Sequence
  derived and/or modified sequence
atgttcctggaggaggccagccagcaggagaagctggccaaggagtggtgcttcaagccctgtgagatccgggagctgagccaccacgagttcttcatgcctggcctggtggacacccacatccacgccagccagtacagctttgctggcagcagcattgacctgcccctgctggagtggctgaccaagtacaccttccctgctgagcaccgcttccagaacatcgactttgctgaggaggtgtacaccagggtggtgcggaggaccctgaagaatggcaccaccacagcctgctactttgccaccatccacacagacagcagcctgctgctggccgacatcacagacaagtttggccagagggcctttgtgggcaaggtgtgcatggacctgaatgacaccttccctgagtacaaggagaccacagaggagagcatcaaggagacagaaagatttgtgtctgagatgctgcagaagaacagccacatcagtgaaaatagagatgaggtggaggccgtgaagaacctgtaccccagctacaagaactacacctctgtgtatgacaagaacaacctgctgaccaacaagacagtgatggcccacggctgctacctgtctgctgaggagctgaatgtgttccacgagcggggggccagcatcgcccactgccccaacagcaacctgagcctgagcagcggcttcctgaatgtgctggaggtgctgaagcatgaggtgaagattggcctgggcacagatgtggccggcggctacagctacagcatgctggatgccatccggcgggctgtgatggtgagcaacatcctgctgatcaacaaggtgaatgagaagagcctgaccctgaaggaggtgttccggctggccaccctgggcggcagccaggccctgggcctggatggagagatcggcaactttgaggtgggcaaggagtttgatgccatcctgatcaaccccaaggccagtgacagccccatcgacctcttctatggagacttctttggagacatcagcgaggccgtcatccagaagttcctgtacctgggagatgacagaaatattgaggaggtgtatgtgggcggcaagcaggtggtgcccttcagcagctctgtgaaggagaccatccacctgcctgccagcagcccccaccccccacccttcccctag

SEQ ID NO: 311312 - DNA, 1182 bp, Artificial Sequence
  derived and/or modified sequence
atgttcctggaggaggccagccagcaggagaagctggccaaggagtggtgttttaagccatgcgagatacgggagctttctcaccacgagttttttatgcccggactggtggatacacacatccatgcttctcagtactcgttcgctggctcatccattgaccttccattactggaatggttgacgaaatacacttttcctgccgagcaccggttccagaacatcgacttcgcagaggaggtttatacaagggtggtgcggaggacattgaaaaacggaactactacggcctgttacttcgccaccattcacaccgatagctccctgctcttggccgatattacagataagttcggacagagggccttcgttggcaaggtgtgtatggatctcaatgataccttccccgaatacaaagagacaacggaggagtcaattaaggagacagaaagatttgtaagcgagatgctgcagaaaaatagtcatatctctgaaaatagagacgaggtggaagctgtcaaaaacttatatccttcatataaaaactatacctctgtatacgataaaaacaatctgctgaccaataaaacagtgatggcccatggctgctacctctccgctgaagaattgaacgtgttccacgagagaggagcgtcgatagctcactgccctaactcgaacttgtctctatcatcgggcttcttaaacgtgctagaggtgctcaaacacgaggtcaaaatcggtcttggaacggacgtcgctggtgggtattcttatagcatgcttgatgcaatccggcgcgcggtgatggtctctaacatcctgctgatcaacaaagtgaacgaaaaaagcctcaccttgaaagaggtgtttagattagccacactcggtggctcacaggctttgggactcgacggggagattgggaatttcgaggtgggtaaagagtttgatgcgatcttgataaatcccaaggcaagcgacagtcccatcgatctattttacggcgatttttttggggacatctccgaggccgtgatacagaagttcctgtatctgggcgatgatcgcaatatcgaagaagtgtacgtcggaggaaagcaggttgtccctttttccagttcagtcaaggagaccatccaccttcccgcaagcagccctcatcccccgccttttccttag

SEQ ID NO: 311313 - DNA, 1182 bp, Artificial Sequence
  derived and/or modified sequence
atgtttttagaggaggcaagtcaacaggagaagttggctaaagaatggtgtttcaagccctgcgaaatacgggagctgtcgcatcatgaatttttcatgcctggcctggtggacacacacatccatgcttcccagtatagcttcgcgggttcgtccatcgatctccccctattggaatggctgacgaagtacaccttcccagctgagcaccggttccagaacatagactttgccgaggaggtgtacactcgggttgtcaggcgcactctgaagaatggcactacaaccgcctgttatttcgccacaattcacacagacagtagcctccttctggctgatattacagacaaatttggccagcgcgcatttgtggggaaagtctgcatggacctgaatgacacttttcccgagtacaaagagactacagaggagagtattaaagagactgagaggtttgtatccgaaatgttgcagaagaactcgcatattagcgagaatagggacgaggtggaggccgtgaaaaatttgtatccaagctacaagaactacacttctgtatacgataagaataacctgcttactaacaaaacagtgatggcccacggatgttacctcagtgcggaggaactgaacgttttccacgaaagaggggcttccatagcccattgcccgaacagcaatctgagcctgtcaagtggctttctgaatgtgttagaagtcctgaagcacgaggtaaaaattggactgggaaccgacgtggcagggggatattcttactctatgcttgatgccattcggcgagctgtgatggtgtccaacattctgctcattaacaaggtcaacgaaaagagtctgactctcaaagaggtattccggctggccactctagggggttcgcaggccctcgggcttgacggggaaatcggcaattttgaggtcggtaaagaatttgatgctatactgataaatcccaaggcctcagatagccccatcgacctgttctatggcgacttttttggggacatctctgaagcagtgatacaaaaatttctctatctgggggacgaccggaatatcgaagaggtgtatgtcggtggtaagcaggtggtgcccttcagctcctccgtgaaagagactatccacctgcccgcttcatctccacatcctccccctttcccgtag

SEQ ID NO: 311314 - DNA, 1182 bp, Artificial Sequence
  derived and/or modified sequence
atgttcctggaggaggccagccagcaggagaagctggccaaggagtggtgcttcaagccctgcgagatcagagagctgagccaccacgagttcttcatgcccggcctggtggacacccacatccacgccagccagtacagcttcgccggcagcagcatcgacctgcccctgctggagtggctgaccaagtacaccttccccgccgagcacagattccagaacatcgacttcgccgaggaggtgtacaccagagtggtgagaagaaccctgaagaacggcaccaccaccgcctgctacttcgccaccatccacaccgacagcagcctgctgctggccgacatcaccgacaagttcggccagagagccttcgtgggcaaggtgtgcatggacctgaacgacaccttccccgagtacaaggagaccaccgaggagagcatcaaggagaccgagagattcgtgagcgagatgctgcagaagaacagccacatcagcgagaacagagacgaggtggaggccgtgaagaacctgtaccccagctacaagaactacaccagcgtgtacgacaagaacaacctgctgaccaacaagaccgtgatggcccacggctgctacctgagcgccgaggagctgaacgtgttccacgagagaggcgccagcatcgcccactgccccaacagcaacctgagcctgagcagcggcttcctgaacgtgctggaggtgctgaagcacgaggtgaagatcggcctgggcaccgacgtggccggcggctacagctacagcatgctggacgccatcagaagagccgtgatggtgagcaacatcctgctgatcaacaaggtgaacgagaagagcctgaccctgaaggaggtgttcagactggccaccctgggcggcagccaggccctgggcctggacggcgagatcggcaacttcgaggtgggcaaggagttcgacgccatcctgatcaaccccaaggccagcgacagccccatcgacctgttctacggcgacttcttcggcgacatcagcgaggccgtgatccagaagttcctgtacctgggcgacgacagaaacatcgaggaggtgtacgtgggcggcaagcaggtggtgcccttcagcagcagcgtgaaggagaccatccacctgcccgccagcagcccccaccccccccccttcccctag

SEQ ID NO: 311315 - DNA, 588 bp, Artificial Sequence
  derived and/or modified sequence
atgactttgttccaaaacacgcggcgtcccctgaggaaccggtcccggaagcttcgtgattgtcattccgtaacccaggctggggtgcagtggcgtgacctgtcaagtctaaagcctcctcctcctgtattcaaaagattttcatgcctgtccctcccaagcagttgggactatcgctttgtaagcgagatgctgcagaaaaactacagccgcgttaaaccgatcgtgactccccgcttcagtctttcctgctcagagacactgatgggcgaattagggaatatagccaagactcgagaccttcatatccagtcccatatctctgaaaatcgcgatgaagtggaggctgttaagaacctgtacccttcctataaaaattacacctctgtttatgataagaacaatcttctgactaataaaacagtcatggcccacgggtgctatctgagcgctgaggagctcaacgtttttcacgagcggggagcctccatcgcccactgtcctaattccaatttgagtcttagctctggcttcctcaatgtgcttgaggtcctgaagcatgaagtgaaaatcggtttgggtacatag

SEQ ID NO: 311316 - DNA, 540 bp, Artificial Sequence
  derived and/or modified sequence
gaaaggggcgcctccattgcacactgccctaatagcaatctttccctgtccagtggttttcttaacgttctcgaggtgctgaaacatgaagtcaagatagggttgggaacagatgtggctggtggatactcctactctatgctcgacgccataaggagagcggtgatggtgtctaatatattactgatcaacaaagtgaacgagaaaagcctgacactgaaagaagtttttcgcctggcgacactgggcggctcacaggccttgggcctcgatggagagatcggcaattttgaggtgggcaaagaatttgatgctattctcataaatcccaaggcctctgatagcccaattgacctgttctacggggacttttttggggacatatctgaggctgtaatccaaaagtttctgtacttgggggatgaccgtaacatcgaagaggtctacgtaggaggtaaacaggtggtgcctttctctagcagtgtgaaagaaaccattcacttaccggcaagctccccccatcccccgccctttccatag

SEQ ID NO: 311317 - DNA, 694 bp, Artificial Sequence
  derived and/or modified sequence
cagcttgttactttgcaacaattcacactgactcatctctgctccttgccgacattacagataaatttggacagcgggcatttgtgggcaaagtttgcatggatttgaatgacacttttccagaatacaaggagaccactgaggaatcgatcaaggaaactgagagactgtcactctgtcacccaggctggagtgcaatggcgcgatctcagctcactgaaacctccacctcctgtgttcaagagattctcctgcctcagcctcccgagtagctgggattacagatttgtgtcagaaatgctccaaaagaactattctagagtgaagcccatagtgacaccacgtttttccctctcctgctctgagactttgatgggtgaactgggcaacattgctaaaacccgtgatttgcacattcagagccatataagtgaaaatcgtgatgaagttgaagctgtgaaaaacttataccccagttataaaaactacacatctgtgtatgataaaaacaatcttttgacaaataagacagtgatggcacacggctgctacctctctgcagaagaactgaacgtattccatgaacgaggagcatccatcgcacactgtcccaattctaatttatcgctcagcagtggatttctaaatgtgctagaagtcctgaaacatgaagtcaagatagggctgggtacag

SEQ ID NO: 311318 - DNA, 990 bp, Artificial Sequence
  derived and/or modified sequence
gaacgaggagcatccatcgcacactgtcccaattctaatttatcgctcagcagtggatttctaaatgtgctagaagtcctgaaacatgaagtcaagatagggctgggtacagacgtggctggtggctattcatattccatgcttgatgcaatcagaagagcagtgatggtttccaatatccttttaattaataaggtaaatgagaaaagcctcaccctcaaagaagtcttcagactagctactcttggaggaagccaagccctggggctggatggtgagattggaaactttgaagtgggcaaggaatttgatgccatcctgatcaaccccaaagcatccgactctcccattgacctgttttatggggacttttttggtgatatttctgaggctgttatccagaagttcctctatctaggagatgatcgaaatattgaagaggtttatgtgggcggaaagcaggtggttccgttttccagctcagtgaaagaaacaattcacttaccagcctcctcaccccatcctccaccatttccttaatgttccatggtattttcaacggaatacactttgaaagacctgagtgtgaaagactgagagttgaggagttactttgtggatcttgtccaaatttagtgaaatgtggaagtcaaccagaccaatgatggaattaaatgtaaattccaagagggctttcacagtccacagggttcaaatgacttgggtaacagaagttattcttagcttacctgttatgtgacagtgatttacctgtccatttccaacccaaaagcctgtcagaaagcattctttagagaaaaccactttacatttgttgttaaactcctgatcgctactcttaagaatatacatgtatgtattcataggaacattttttctcaatatttgtatgattcgcttactgttattgtgctgagtgagctcctgtgtgcttcagacaaaaataaatgagactttgtgtttacgtta

SEQ ID NO: 311319 - DNA, 588 bp, Artificial Sequence
  derived and/or modified sequence
atgaccctcttccagaacacccggcggcccctgaggaacagaagcaggaagctgcgggactgccacagcgtgacccaggccggcgtgcagtggagggacctgagcagcctgaagcccccacctcctgtgttcaagcgcttcagctgcctgagcctgcccagctcctgggactacagatttgtgtctgagatgctgcagaagaactacagccgggtgaagcccatcgtgaccccccgcttcagcctgagctgcagcgagaccctgatgggagagctgggcaacatcgccaagacccgggacctgcacatccagagccacatcagtgaaaatagagatgaggtggaggccgtgaagaacctgtaccccagctacaagaactacacctctgtgtatgacaagaacaacctgctgaccaacaagacagtgatggcccacggctgctacctgtctgctgaggagctgaatgtgttccacgagcggggggccagcatcgcccactgccccaacagcaacctgagcctgagcagcggcttcctgaatgtgctggaggtgctgaagcatgaggtgaagattggcctgggcacctag

SEQ ID NO: 311320 - DNA, 540 bp, Artificial Sequence
  derived and/or modified sequence
gagcggggggccagcatcgcccactgccccaacagcaacctgagcctgagcagcggcttcctgaatgtgctggaggtgctgaagcatgaggtgaagattggcctgggcacagatgtggccggcggctacagctacagcatgctggatgccatccggcgggctgtgatggtgagcaacatcctgctgatcaacaaggtgaatgagaagagcctgaccctgaaggaggtgttccggctggccaccctgggcggcagccaggccctgggcctggatggagagatcggcaactttgaggtgggcaaggagtttgatgccatcctgatcaaccccaaggccagtgacagccccatcgacctcttctatggagacttctttggagacatcagcgaggccgtcatccagaagttcctgtacctgggagatgacagaaatattgaggaggtgtatgtgggcggcaagcaggtggtgcccttcagcagctctgtgaaggagaccatccacctgcctgccagcagcccccaccccccacccttcccctag

SEQ ID NO: 311321 - DNA, 588 bp, Artificial Sequence
  derived and/or modified sequence
atgaccctgttccagaacacccggcggcccctgcggaaccggagcaggaagctgcgggactgtcatagcgtgactcaagctggagtgcaatggagagatttatccagtttgaagcctcccccccctgtctttaaaagatttagctgcctcagtctgccatcctcttgggactatcgattcgtgtccgagatgttgcaaaaaaactactctagggtcaaacctattgtcacaccaagattctctctctcttgttccgaaactcttatgggtgagctggggaacatcgctaagacccgcgatctacatattcagtcgcatatcagcgagaaccgggatgaggttgaggccgtgaagaatttgtacccctcttacaagaactacacaagcgtgtacgataagaacaacctgttaaccaataagactgttatggcgcacggatgttacctatctgctgaggaactgaacgtgttccatgagcgcggcgcttccatcgcccattgtccaaactccaatttgagtctatcctcaggatttctgaacgtgctggaagttctgaagcatgaggtgaaaataggactcggcacatag

SEQ ID NO: 311322 - DNA, 540 bp, Artificial Sequence
  derived and/or modified sequence
gagcggggcgccagcatcgcccactgccccaacagcaacctgagcctctccagtggcttcctgaatgtgttggaggtgctgaaacatgaagtgaagattggtttagggacagatgtggcaggtgggtactcctacagcatgctggatgcgatcaggagggccgtaatggtgtctaacatcctgctcataaataaggttaatgaaaaaagcctgactctcaaggaggtgtttagactagccaccctcggggggagtcaagcactcggtcttgacggcgaaataggcaacttcgaggtcggcaaggagtttgacgcgatacttattaatcctaaagcttctgacagcccgatagacctcttctacggagacttctttggcgacataagtgaagctgtcattcagaaatttctgtacctgggagatgatcgcaatatagaggaggtgtatgtgggcggaaagcaggttgtgccattttcctccagcgtgaaggagacaatacacctgcccgcaagttccccacacccccccccatttccatag

SEQ ID NO: 311323 - DNA, 588 bp, Artificial Sequence
  derived and/or modified sequence
atgaccttgttccagaacactcggcgacccctgagaaatagatccaggaagctgagggactgtcacagtgtgactcaggccggagttcagtggcgagatctgtccagcctgaagccaccccctccggtatttaagcgattctcctgcctgagtctgccgagctcttgggactatcgatttgttagcgaaatgttgcaaaagaactactccagagtgaagcccattgtgaccccacgctttagtttgtcctgctccgagactctgatgggagagttagggaatatcgcgaaaacccgagacctccacatccagtcacacatatccgagaaccgcgatgaggtggaagccgtgaaaaatctctatccctcatataaaaattatacatcggtctacgataagaacaacctgctgacgaataagactgtgatggcccatggttgctatctgagtgcggaggagctgaatgtgtttcacgagcggggagccagcattgcgcattgtcctaactccaacctgagcctcagctccggctttctgaacgtccttgaagtactgaagcacgaggttaagatcggactgggaacctag

SEQ ID NO: 311324 - DNA, 540 bp, Artificial Sequence
  derived and/or modified sequence
gagcgcggtgcttctattgcacactgtcctaattctaacttgtctttgagctccggcttcctgaatgtgctcgaggtgcttaagcacgaagttaaaatcggattgggcaccgatgtggccggtggctattcttattcaatgctggacgcaataaggcgggctgtaatggtgtctaacattctgctcataaataaagttaatgaaaaaagtctgacccttaaggaagtgttcagactggccactttgggtgggtctcaggctctcggtctggatggagaaattggtaactttgaggtaggtaaagaatttgatgcgatcctgatcaacccaaaggccagtgactccccaattgatcttttttacggggacttttttggtgacatctcagaggctgtgatacagaagtttctgtatctgggcgatgatagaaacatcgaagaagtctacgtcggcggaaaacaggtggtgcccttttccagctcggtgaaagagactattcaccttccagcgtcgagccctcatccaccaccttttccctag

SEQ ID NO: 311325 - DNA, 588 bp, Artificial Sequence
  derived and/or modified sequence
atgaccctgttccagaacaccagaagacccctgagaaacagaagcagaaagctgagagactgccacagcgtgacccaggccggcgtgcagtggagagacctgagcagcctgaagccccccccccccgtgttcaagagattcagctgcctgagcctgcccagcagctgggactacagattcgtgagcgagatgctgcagaagaactacagcagagtgaagcccatcgtgacccccagattcagcctgagctgcagcgagaccctgatgggcgagctgggcaacatcgccaagaccagagacctgcacatccagagccacatcagcgagaacagagacgaggtggaggccgtgaagaacctgtaccccagctacaagaactacaccagcgtgtacgacaagaacaacctgctgaccaacaagaccgtgatggcccacggctgctacctgagcgccgaggagctgaacgtgttccacgagagaggcgccagcatcgcccactgccccaacagcaacctgagcctgagcagcggcttcctgaacgtgctggaggtgctgaagcacgaggtgaagatcggcctgggcacctag

SEQ ID NO: 311326 - DNA, 540 bp, Artificial Sequence
  derived and/or modified sequence
gagagaggcgccagcatcgcccactgccccaacagcaacctgagcctgagcagcggcttcctgaacgtgctggaggtgctgaagcacgaggtgaagatcggcctgggcaccgacgtggccggcggctacagctacagcatgctggacgccatcagaagagccgtgatggtgagcaacatcctgctgatcaacaaggtgaacgagaagagcctgaccctgaaggaggtgttcagactggccaccctgggcggcagccaggccctgggcctggacggcgagatcggcaacttcgaggtgggcaaggagttcgacgccatcctgatcaaccccaaggccagcgacagccccatcgacctgttctacggcgacttcttcggcgacatcagcgaggccgtgatccagaagttcctgtacctgggcgacgacagaaacatcgaggaggtgtacgtgggcggcaagcaggtggtgcccttcagcagcagcgtgaaggagaccatccacctgcccgccagcagcccccaccccccccccttcccctag

SEQ ID NO: 311327 - protein, 153 aa, Artificial Sequence
  derived and/or modified sequence
  misc_feature (1)..(1): Xaa can be any naturally occurring amino acid
XNSPRTRSCVYSPTGPCICSLGNSAAVPTMEGPLRRKTLLKEGRKPALSSWTRYWVILSGSTLLYYGAKSLRGTDRKHYKSTPGKKVSIVGWMVQLPDDPEHPDIFQLNNPDKGNVYKFQTGSRFHAILWHKHLDDACKSNRPQVPANLMSFE

SEQ ID NO: 311328 - protein, 173 aa, Artificial Sequence
  derived and/or modified sequence
MYKRNGLMASVLVTSATPQGSSSSDSLEGQSCDYASKSYDAVVFDVLKVTPEEFASQITLMDIPVFKAIQPEELASCGWSKKEKHSLAPNVVAFTRRFNQKLLELNNLHSLMSVVSALQSAPIFRLTKTWALLNRKDKTTFEKLDYLMSKEDNYKRTREYIRSLKMVPSIPYL

SEQ ID NO: 311329 - DNA, 522 bp, Artificial Sequence
  derived and/or modified sequence
atgtacaaacgcaatggcctgatggcttccgtgctggtgacaagcgcaactccccaaggctccagctcttcagattccctggaagggcagtcgtgcgactatgcctccaaatcttacgacgcagtggtgtttgatgtccttaaggtgacaccagaggaattcgctagtcaaattaccctgatggacatccccgtgtttaaggcgattcagcccgaggaactggcttcttgtgggtggtccaaaaaagagaagcacagcctcgctcccaacgtcgtagccttcacaaggcgcttcaatcagaagctcttagaactgaacaatcttcatagcctgatgagtgttgtgtcagccctgcagagcgcacctatctttcgattgaccaaaacctgggcactgcttaaccgtaaagataaaacaactttcgagaagttagactatttaatgtctaaggaggataattataagaggacacgagagtacatccgatctcttaagatggtgccgagcatcccgtacctctag

SEQ ID NO: 311330 - DNA, 522 bp, Artificial Sequence
  derived and/or modified sequence
atgtacaagagaaatggcctgatggcctctgtgctggtgaccagcgccaccccccagggcagcagcagcagtgacagcctggagggccagagctgtgactatgccagcaagagctatgatgctgtggtgtttgatgtgctgaaggtgaccccagaggagtttgccagccagatcaccctgatggacatccctgtgttcaaggccatccagcctgaggagctggccagctgtggctggagcaagaaggagaagcacagcctggcccccaacgtggtggccttcacccggcgcttcaaccagaagctgctggagctgaacaacctgcacagcctgatgtctgtggtgtctgccctgcagagcgcccccatcttccggctgaccaagacctgggccctgctgaacaggaaggacaagaccacctttgagaagctggactacctgatgagcaaagaagacaactacaagaggacccgggagtacatccgcagcctgaagatggtgcccagcatcccctacctgtag

SEQ ID NO: 311331 - DNA, 522 bp, Artificial Sequence
  derived and/or modified sequence
atgtacaagcggaacggcctgatggccagcgtgctggtgaccagcgccacccctcagggcagctcctcaagcgactccttggaggggcagtcgtgcgactatgcatcaaaatcatatgacgcggtggtctttgatgtcctgaaggtgactcccgaagagttcgccagccaaattaccctgatggatattcctgtgttcaaagccatacagccagaagagctggctagctgcggatggtcaaagaaagaaaagcatagtctcgctccaaacgtggtagcattcacaagacgttttaaccagaaactgcttgagttgaataacctgcactctctgatgtctgtggtgtcagccctgcagagcgctcctatttttaggctgaccaagacctgggccctcctgaaccgtaaggataagactacgttcgagaagttggactacctgatgagcaaggaggacaattacaagagaaccagggagtatatccgctcccttaaaatggtaccaagcattccctacctgtag

SEQ ID NO: 311332 - DNA, 522 bp, Artificial Sequence
  derived and/or modified sequence
atgtacaaacgcaacggactgatggcctcggtactggtcacatcggctacgccgcagggatcctcctcttctgatagtcttgaaggacaatcctgcgactatgctagcaaaagttatgatgccgtcgtgttcgacgtcctcaaggtgacaccagaagagtttgccagccagattaccctgatggatattccggtgttcaaagccattcaacccgaagaactggcttcttgtggatggtccaaaaaagaaaagcactccttggccccaaacgtggttgcgttcactagaaggttcaaccagaaactgctggaactgaacaatctccacagtctgatgtcagttgtgagcgccctgcagagcgccccaattttcaggctcacaaaaacctgggccttgctgaatcggaaagataagacaaccttcgaaaaattggattatttaatgagtaaagaggacaactataaacgtacccgcgagtatatccgcagccttaaaatggtgccaagcatcccctacctatag

SEQ ID NO: 311333 - DNA, 770 bp, Artificial Sequence
  derived and/or modified sequence
gctcccgcgtctgcccgcgctccagctgcgcctggcccggccccggcccggctcggcgtggccccggcctccaagcgaaggcgccgctgccgctgggccgctcccagggccatgaggaagcggcggcagccactgcggcccgcgtcaaggtgaccggccgggactgcggcggcggggagagcggcggacttctccagacaggttatgttacctgcagaggctgccctgaagctccctgtggcctggagactatgtacaagaggaatggtctgatggctagcgtgttggtcacctctgccactccacagggcagcagcagctcggactctctggagggccagagctgcgactatgccagcaagagctatgatgccgttgtcttcgatgtcttgaaagtgaccccagaggagtttgctagccagattacattaatggatatacctgtgtttaaagctatccagccggaggaactagccagctgtggatggagtaagaaggagaaacacagtcttgcccctaacgttgtggcctttacccggaggtttaaccagaaacttctagaactcaacaaccttcattctctcatgtctgtggtatcagcattacaaagtgctcccatcttcaggctgacaaaaacctgggctcttttaaatcgaaaagacaagactacctttgagaaattggactacctgatgtcgaaagaagataattacaagcggacacgggaatatatccgaagcctgaagatggttccaagtattccctatcta

SEQ ID NO: 311334 - DNA, 522 bp, Artificial Sequence
  derived and/or modified sequence
atgtacaagagaaacggcctgatggccagcgtgctggtgaccagcgccaccccccagggcagcagcagcagcgacagcctggagggccagagctgcgactacgccagcaagagctacgacgccgtggtgttcgacgtgctgaaggtgacccccgaggagttcgccagccagatcaccctgatggacatccccgtgttcaaggccatccagcccgaggagctggccagctgcggctggagcaagaaggagaagcacagcctggcccccaacgtggtggccttcaccagaagattcaaccagaagctgctggagctgaacaacctgcacagcctgatgagcgtggtgagcgccctgcagagcgcccccatcttcagactgaccaagacctgggccctgctgaacagaaaggacaagaccaccttcgagaagctggactacctgatgagcaaggaggacaactacaagagaaccagagagtacatcagaagcctgaagatggtgcccagcatcccctacctgtag

SEQ ID NO: 311335 - DNA, 462 bp, Artificial Sequence
  derived and/or modified sequence
tagaatagccctcgaactcgctcttgtgtgtacagccctacagggccctgcatatgttctcttggcaatagcgcagcggtgcccacgatggagggccccctgcggcgtaaaaccctgctgaaggaagggcggaaacccgccctaagtagctggacacggtattgggtaatcctgagcgggtctaccctgctctactatggggcaaaaagcctgcggggtaccgacaggaaacactacaaatccacccccggaaagaaagttagcattgtgggctggatggtgcagctccctgatgatcctgaacacccagatattttccagctgaacaatccggataaaggtaatgtatacaagtttcagacagggtctaggttccacgcgattctgtggcataaacatctggatgatgcctgcaagagcaacagaccacaagtgccagccaatctgatgtcgtttgagtag

SEQ ID NO: 311336 - DNA, 462 bp, Artificial Sequence
  derived and/or modified sequence
tgaaacagccccaggaccaggagctgtgtgtacagccccaccggcccctgcatctgcagcctgggcaacagcgctgctgtgcccaccatggagggccccctgcggaggaagaccctgctgaaggagggcaggaagccagccctgagctcctggacccgctactgggtgatcctgagcggcagcaccctgctgtactacggggccaagagcctgcggggcacagacaggaagcactacaagagcaccccaggcaagaaggtgtccatcgtgggctggatggtgcagctgcctgatgatcctgagcacccagacatcttccagctgaacaacccagacaagggaaatgtgtacaagttccagacaggcagccgcttccacgccatcctgtggcacaagcacctggatgatgcctgcaagagcaaccggccccaggtgcctgccaacctgatgagctttgaatag

SEQ ID NO: 311337 - DNA, 462 bp, Artificial Sequence
  derived and/or modified sequence
tgaaacagcccccggacccggagctgcgtgtacagccccaccggcccttgcatttgttccctcgggaatagcgcggccgtgcccacaatggaggggccattgcgacggaagacactgctcaaggaggggcgcaaaccagcgttatcctcatggacgagatactgggtgatcctcagtgggagtaccctactttactacggcgccaagtcgctcagggggacggatcgaaaacactataagtcaacccccggaaagaaagtgtccattgttggctggatggtgcagctcccagatgaccctgaacaccccgatattttccagcttaacaaccccgacaagggcaatgtttataagtttcaaactggctctcggtttcatgctatactgtggcacaaacatctggatgacgcttgtaagtccaaccggccgcaagtgcccgctaatctcatgtcatttgagtag

SEQ ID NO: 311338 - DNA, 462 bp, Artificial Sequence
  derived and/or modified sequence
tagaactcaccccgaactcgctcctgtgtgtactctccaaccggcccttgtatatgtagtctcgggaactccgcggctgtacccactatggaaggacctctgaggcggaaaacgttgttgaaggaggggaggaagcccgctttatcttcttggacccggtactgggtgatcttatctggttctactctgctgtattatggcgctaaatctctgcgcggtactgacagaaagcactacaaaagtacccccggtaagaaggtgagcatcgtgggctggatggtacagctgccggacgaccccgaacaccctgacatcttccagctgaataatcctgataaggggaacgtttacaaatttcagacaggctcacggtttcacgctattctgtggcacaagcacttggacgatgcctgtaaatcaaaccggccacaagtacccgctaatctaatgtcgttcgagtag

SEQ ID NO: 311339 - DNA, 4858 bp, Artificial Sequence
  derived and/or modified sequence
ggaattctcccagaacccggagctgtgtctacagccccaccggcccgtgcatctgttctctggggaactccgcagctgtgcccaccatggaggggcctctgagaagaaaaaccctgctcaaggaagggcggaagcctgcgctgtcctcgtggaccaggtactgggtcatactctcaggatccaccctcctgtactacggagccaagtccttgcggggcacagacagaaaacactataaatccacacctggcaaaaaggtttccatcgtgggctggatggtgcagctgcccgatgaccccgagcacccagatatcttccagctgaacaaccctgacaaaggcaatgtttacaagtttcagactggttcccgatttcatgcaatactgtggcacaagcatttggatgatgcatgtaaaagcaacaggcctcaggtacctgcaaaccttatgtcatttgagtaagtctctgcaggacgtggcatgacttcagaggcttctgggaacccaggctgggcctggtggtgaagagcagtcctgggcacaggctgtgagccagggtgctgggaaactcacagctggactcaggggacacggcctgtggcctcaccatcccagagggcttcaccagtgtgggatccacctgtcagtccccagcgactctcatgacactcattctgcagcaccgcctcttggggcagtggtcagaccccacacgccctctctgggcccaccacctgcatctgcgactagagagcacccggcccacgttgggttctcagtgctttctactgcacagagtggacagcgctaactaacctgtgagaggggcccgagagaaggaacagctgtggaacaggctttttacaccccaagtgcatggggttgctcgcccacagggctgcctcagattttgtacaaccccgaagcgtcctctgcgtgtgcgtgctgtacgtgtgtgtgtgtgtgtgagcgagtgtgaactcttcaagaaacatgcattttggcacaagactcgtgacatcacacacttcattcgctttgaggccctgctttaaccttaagttatagccctgtccaccgaggaaggtcagggtgagagcctagattcctcctgtgtcaagggtccctcgcattcttttactgtaaacaaacaatgccttaaattgtgtcttgttttctgttcctatgggtgctattcatctggaaggcctgcttccaggcctctttgctgtcagcccttctgagacaggacctggcttcaggactgtggactgggctgctggcctgcttgcttcctcccttccccattcctagcagggcctgaggccctcctcttctcgcccttcccaccatgccagaatgggaagttgtgacgttgcagctccaaccgacgtgctcatagtgatcagctgtgcaggagccatgaggcaccaacctctccccgcagggcaaagcctgtgcccccatcatctcactcctttgcctgcactgccagggtggggcccaccaagattcctgatcatgacgggaagctgagtgaccctgaggccttaagcttccccagtcttggccccaaatgcagtcaccagcaagttttccattttccaagtccaagggcacaattgttgatgaccgtgtgacaatagagcgaagccccggggagtgaacggtccaacctctgcattcagttaggagctcttcacatgaatcacatccttatctgtcaccttgtgtcacattttaaagtgacttttattttgcacaaataatttttattcagaataataaatcactctttatcatagtatcttctcttccctcttcccctttagtttggatagcctaactctgagaagttaacccttaaacagttttctggaagagactgaatttctgggtccttgcagctgtgatggtttcagagctcagactgatcaggcatcaagctaccctcaagagtttctgggctggatgtttcagaacaacatctacaccagtaaagtgtaataggtcagtttcaaaacgaccaaaagacccaccactgtattttgaccaaataatgacaacttctttagaaatttgaatggcttggtgaggaaagtagttgtcaccagggcctcattttgtagttgagccttacaatgcttagtagttcatcttctttttgagcaaagactagaatactttcctcctaagagaaactcccaggtgataaaagttgatgccatcaaaccttgacaccgggtgctctgcacacccacgcggatgttgcacctcattctcccgatgactattcaaatcagcatctagaggctgaatgacaatgccaaacactccacctctgatcagaaccatgcagtgttaacactttaacctacattgaatctgattctacctgttaacttttaaaaagtcgtaagtttggatgaaagtgcaagatgtggaacatcaactacctattttccttgggtttttccactctgcaaactgtcctggtttttcacaccaatgaagtattatagatgccaatccaaaacctcagaatttcaggcaccacaaaaacaggtaattttctatcccttataagtttgtcttttctttcagaaacatctcttagcctaatttgaaatagcacaatcacaattcaaaatgtttagtcttctcactaattgagtctgcttccacgtcctctcccaggaacattcttagctcggactcttgaagaatctctttagattttgttggcaaaagccttatagaagcagtaagaggcttgaccacgccggaagagtcctggagctaaagctggaagacactcagctctctaagcaggggctcggccaaacatgggagttaagtgctgcttgtcttcccagtgttggtttgaaccctgtgagcctgagacagagagggccaggcaccaaccacaaggcgggaaagtccatgggtagaccctccccctggagggaagcatttctagtttttgctccttgactgtccagagtgtacaaatgttcataacgccattgaagggattatttcttgcatgcatatgctgaatttttttaagcaaatggatcatggcaccccaaaatgaaagttatagaaagctgtctacaactgtggagttggtagctggtaacattgttgtctcaagaacaactcacctctctccctaggactaatttttgtctctctcagttgaacatgttttgtcattcaagatcagtcaggtgcattctggcaactgacatacttgatggaggattgattcggtagagagcagtagaaatcttgttctaactgtgcctggtgagagactttggccccctccctccctataaggctgtggaacctgaggaagtagatacttgaagagattctgtttaggaagaaactcactctcttttgccagttgaatttatagagcattttttttcttaccaagatggccagtatcattttacccccacctcccaagccccaagaggtgtaccttttcagatgccattttacaggcggaaatgctccatgaaacaggaagccacttgcaagcaacatctgctctgttcctcaggtggggcccagagcccttccccgagactgctgatgtctgtaaccactggggagcactgccaaaaatacagctttctggtttgtgagcccataaatgacttaaatcagctttacatcatttttacatatcaagtggtttcatgttaaaaaacaaactcctagtcctttagaaataacagattctctgcacaaaaccacccattcattcatttattcattcacagcactagcaagtgctgcctatgctgagaacaagtcagatctgatccctgccctcatggacctgaccactcaacaaacagtccccaccacacctatctccttaggcaagactttgcctctctcctagtcctgagtataaatcctgtgcatagattcctctagaaaggcatcaaaaggctcaacagactgaatggcctcttggtctgcgaaaattcagttgcaatgaggatgaagtcactatcctagaggctgcttggcccagaagagccaggcacagagctgcagttgggcacgccaaggattccaaaggtggaatgagagagtagggtcaaactgtcacagtatctgctccataggtttctgtttttaatttcaatgttaaatacaactacaatatgagcgagaactgcattttcttgggtgttgagaacttgtaccatggacttcagaccgccttgcagccgtatgctgcacaagcgtgtacaccccctgggcagcctcaaaaccccgcttacagcagcaacacaggagatcatctgtccattttagaaccattaatctctttatccattgctgaacgactgtgactattcagtaacgaagtaatagtaattaattagtatggtataatctttaataaatttcgtgccaaaatgcatggttttccacttagcattcaaaatgttgcatagagagtagttttcaatttcttatgtactcttcgaagtaagttgaaaatcagtttctacattttaattcgtttcctgttaaatctgttgcactctcctgggctgtctttttctccagcagacccctgcatgcagttgtgtaaggactttctctaattcttgtgaatcgtctcacccgcagtaaccactgaacgtcaatcagccctccatggggttctttcgatttttggtgaagtattttgttacctcagtcttgtatcaagttgctgtatttttcagcttgttacattgataataattatttcactaattaaatactttaatgtacaaacatctttgtttactttgaaattaaatgtgttttccaatgaa

SEQ ID NO: 311340 - DNA, 462 bp, Artificial Sequence
  derived and/or modified sequence
tgaaacagccccagaaccagaagctgcgtgtacagccccaccggcccctgcatctgcagcctgggcaacagcgccgccgtgcccaccatggagggccccctgagaagaaagaccctgctgaaggagggcagaaagcccgccctgagcagctggaccagatactgggtgatcctgagcggcagcaccctgctgtactacggcgccaagagcctgagaggcaccgacagaaagcactacaagagcacccccggcaagaaggtgagcatcgtgggctggatggtgcagctgcccgacgaccccgagcaccccgacatcttccagctgaacaaccccgacaagggcaacgtgtacaagttccagaccggcagcagattccacgccatcctgtggcacaagcacctggacgacgcctgcaagagcaacagaccccaggtgcccgccaacctgatgagcttcgagtag

SEQ ID NO: 311341 - DNA, 1164 bp, Artificial Sequence
  derived and/or modified sequence
atgtacagatggaagctgagcagccacgagccctgcagcgccacctgcaccaccggcgtgatgagcgcctacgccatgtgcgtgagatacgacggcgtggaggtggacgacagctactgcgacgccctgaccagacccgagcccgtgcacgagttctgcgccggcagagagtgccagcccagatgggagaccagcagctggagcgagtgcagcagaacctgcggcgagggctaccagttcagagtggtgagatgctggaagatgctgagccccggcttcgacagcagcgtgtacagcgacctgtgcgaggccgccgaggccgtgagacccgaggagagaaagacctgcagaaaccccgcctgcggcccccagtgggagatgagcgagtggagcgagtgcaccgccaagtgcggcgagagaagcgtggtgaccagagacatcagatgcagcgaggacgagaagctgtgcgaccccaacaccagacccgtgggcgagaagaactgcaccggccccccctgcgacagacagtggaccgtgagcgactggggcccctgcagcggcagctgcggccagggcagaaccatcagacacgtgtactgcaagaccagcgacggcagagtggtgcccgagagccagtgccagatggagaccaagcccctggccatccacccctgcggcgacaagaactgccccgcccactggctggcccaggactgggagagatgcaacaccacctgcggcagaggcgtgaagaagagactggtgctgtgcatggagctggccaacggcaagccccagaccagaagcggccccgagtgcggcctggccaagaagccccccgaggagagcacctgcttcgagagaccctgcttcaagtggtacaccagcccctggagcgagtgcaccaagacctgcggcgtgggcgtgagaatgagagacgtgaagtgctaccagggcaccgacatcgtgagaggctgcgaccccctggtgaagcccgtgggcagacaggcctgcgacctgcagccctgccccaccgagccccccgacgacagctgccaggaccagcccggcaccaactgcgccctggccatcaaggtgaacctgtgcggccactggtactacagcaaggcctgctgcagaagctgcagacccccccacagctag

SEQ ID NO: 311342 - DNA, 1164 bp, Artificial Sequence
  derived and/or modified sequence
atgtaccgctggaagctgtcctcccatgagccgtgctccgcaacatgtaccacaggggtcatgtccgcgtatgctatgtgtgtgagatacgacggggtggaagtggatgacagttactgcgatgccctgactcgcccagaaccggtccacgagttctgcgccggaagagaatgccagccaaggtgggaaacgtccagttggtctgaatgcagcaggacctgtggtgaaggttatcaatttagagtggtgcgatgctggaaaatgctcagtcccggcttcgacagctccgtgtactccgatctctgcgaggctgccgaggccgttcgccccgaggagagaaaaacatgcaggaatccggcctgtggccctcagtgggaaatgtcggagtggtccgaatgcacggctaagtgcggcgagagatctgtggtcactcgcgatatccgctgttccgaggacgagaagctttgtgacccaaatacccgtccagtaggggagaagaactgcacaggtcccccctgcgataggcagtggacagtctccgattggggcccctgtagcggctcctgcgggcaaggcagaacaatacgacatgtgtattgtaaaaccagcgatggccgagtggtgccagagtcacagtgtcaaatggaaactaaacccctggccatccatccctgcggggataaaaactgtcctgcccactggttggcccaggactgggagcgatgcaacaccacttgcggccgtggagtgaagaagaggctcgtcctgtgtatggagctggcaaatgggaagccacaaacacggtccggaccggaatgtgggctcgccaaaaaacctccagaggaaagtacatgcttcgagagaccatgcttcaagtggtatacaagcccctggagtgaatgtacgaaaacatgcggcgtgggggtgaggatgagagacgtcaagtgttatcagggaacggatattgtacggggctgcgaccctttggtaaaacctgtgggtcgtcaggcctgtgatctgcagccatgtcccacagagccgcccgatgactcgtgtcaggatcagccgggcaccaactgcgctcttgctattaaagtgaacctgtgcggacattggtattactccaaggcctgttgccggagttgtcggcctcctcatagctag

SEQ ID NO: 311343 - DNA, 435 bp, Artificial Sequence
  derived and/or modified sequence
atgattcgggcagccctgcttgagcctcagccacctaagttgaagcaaagcagtcatttgtctccccaaggagctggtacaaccggagccggcccccataccccattaacctttctgtacttctttagacttgaactgctgcaagccgctctgcccccccagccgcctaaggtactggttagacagcctgggggaaaggactccctggcagaatcaccgtttgacctgtcaactggacggaatgcaccatgcggcggtgccttgggaaacctgcgacacctgcagtggggcggtgcctggccactgctgtttctcggtggaacctgggactctgtctaccaggctggatcaactttggcgctgggccgggtgtccgtgtcactgtttttcttcctcccaaacaaatttcatagccacccatctcgtcacttgtag

SEQ ID NO: 311344 - DNA, 1164 bp, Artificial Sequence
  derived and/or modified sequence
atgtaccgctggaagctgagcagccatgagccctgcagcgccacctgcaccaccggggtgatgtctgcctatgccatgtgtgtgcgctatgatggagtggaggtggatgacagctactgtgatgccctgaccaggcctgagcctgtgcatgagttctgtgccggccgggagtgccagccccgctgggagaccagctcctggagcgaatgttccaggacctgtggggagggctaccagttccgggtggtgcgctgctggaagatgctgagccctggctttgacagctctgtgtacagcgacctgtgtgaggccgctgaggccgtgcggcctgaggagaggaagacctgcagaaatcctgcctgtggcccccagtgggagatgtctgagtggagcgagtgcacagccaagtgtggggagaggtctgtggtgacccgggacatccgctgcagtgaagatgagaagctgtgtgaccccaacaccaggcctgtgggggagaagaactgcaccggccccccctgtgaccggcagtggacagtgtctgactggggcccctgcagcggcagctgtggccagggccgcaccatcagacatgtgtactgcaagaccagtgatggccgggtggtgcctgagagccagtgccagatggagaccaagcccctggccatccacccctgtggggacaagaactgcccagcccactggctggcccaggactgggagcgctgcaacaccacctgtggccggggcgtgaagaagaggctggtgctgtgcatggagctggccaacgggaagccccagaccaggagcggcccagaatgtggcctggccaagaagcccccagaggagagcacctgctttgagcggccctgcttcaagtggtacaccagcccctggagcgagtgcaccaagacctgtggggtgggcgtgaggatgagagatgtgaagtgctaccagggcacagacatcgtgcggggctgtgaccccctggtgaagcctgtgggccggcaggcctgtgacctgcagccctgccccacagagcccccagatgacagctgccaggaccagcccggcaccaactgtgccctggccatcaaggtgaacctgtgtggccactggtactacagcaaggcctgctgccgcagctgccggcccccccacagctag

SEQ ID NO: 311345 - DNA, 1164 bp, Artificial Sequence
  derived and/or modified sequence
atgtaccggtggaagctgagcagccacgagccctgcagcgccacctgtactaccggggtgatgagcgcttacgctatgtgtgtgcggtacgatggcgtggaagtggatgactcctattgcgatgctttgactcggccagagcctgtgcacgaattctgcgccgggagggagtgtcagcctcgctgggagaccagttcatggagtgaatgctcgaggacgtgcggtgagggttatcaattccgggttgtacgttgctggaagatgctgtcacctggattcgatagcagtgtgtacagcgatttgtgcgaggctgctgaggcggtgagacccgaggagcggaagacgtgtcgaaacccggcttgcggcccccagtgggaaatgagcgaatggagtgaatgcactgccaagtgcggcgaacggtccgtcgtcactcgcgatattcggtgctctgaggatgagaagctgtgcgatccaaacactcgacccgttggcgagaaaaactgcaccgggcccccttgtgaccgccagtggaccgtatctgactggggaccctgctctggaagctgcggccagggccggaccatccgccatgtgtactgtaaaacctcagacgggcgggttgtgcccgagtcacaatgccagatggagaccaaaccattagctatacacccttgtggggacaagaattgccccgcccactggctggcacaagactgggagaggtgcaataccacgtgtggacgcggcgtaaagaagaggctggtgctttgcatggagctagctaacggcaagccgcagacccgaagtggcccagagtgcgggctcgccaagaaaccccctgaggaatcaacatgtttcgagcgaccttgtttcaagtggtatacctcaccctggtctgagtgtactaagacctgtggagttggggttcgcatgcgtgacgtgaagtgttaccagggaactgacatcgtccggggatgcgatcccctcgttaagcctgtcggaagacaagcgtgtgaccttcagccctgcccgacagaaccacccgacgacagctgtcaggatcagccagggacaaattgcgcactggcgataaaggtcaatttgtgcggccattggtattactcaaaggcttgctgcagatcctgtcgccccccacactcctag

SEQ ID NO: 311346 - DNA, 435 bp, Artificial Sequence
  derived and/or modified sequence
atgccatcaagtgctcacgcccacgctatattgaaagacgctcaggattcccctggcgtagttctcggacagggtgtgatacgagccggtaagggttgggagaacggacccgaaagtcatcgcgtccgctatcgtgggaagaagaatacagactggcacacccggtctcctgcactcacatttactgttctgtggccaagttgcccattggtgccaatcgtgctggggctcaacccgggattctgtccttgcgcccgttctagcggggaatgtaaccacagtggacacatcatcgagggcactcggtgggaccaaggccagttgtgtcttctgtttacactcagccgcgctgatattcgcgcttgctggcgcgttggggaacaacagtacgtgtccctgttcacacacgtgcagatgcagcatcctagcctatag

SEQ ID NO: 311347 - DNA, 1164 bp, Artificial Sequence
  derived and/or modified sequence
atgtatagatggaagcttagctctcacgaaccatgctcagcaacctgtaccactggagtcatgagtgcgtacgccatgtgcgtcagatacgatggtgtggaggtagatgattcttattgtgatgcgctgacccgtccagaaccagtgcacgagttctgcgccggaagagagtgccaacccagatgggagacttcgagttggagtgagtgcagcagaacctgtggcgagggttaccagtttcgcgtggttagatgctggaagatgcttagtccgggattcgatagttcagtgtactcagatctttgcgaggccgctgaggccgtccgccctgaagaaagaaagacttgcagaaatcccgcttgcgggccacagtgggagatgtcagaatggtccgaatgtaccgcgaagtgcggcgaacggtctgtggtgactcgggacatcaggtgcagcgaagatgaaaagctgtgtgaccccaacacaaggcctgtgggcgagaaaaattgcacgggcccaccttgcgaccggcagtggaccgtatccgactggggaccatgttctgggtcctgtggccagggtaggactatacgccatgtgtactgtaaaacctcagacggacgcgtggtgcccgagagccaatgtcaaatggagactaaacccctggctattcatccttgtggggataaaaattgcccagcccactggctggcccaagactgggagcggtgcaataccacttgcgggcgaggggtaaaaaaacgcttggtcttatgcatggaactagctaatggaaaaccccaaacccgctctggacccgagtgcggattagccaaaaagcctccggaggagtctacatgtttcgagcggccttgctttaaatggtatactagtccatggtccgagtgcacaaagacttgtggagtgggcgtccggatgagagacgttaagtgctatcagggcaccgacatcgttaggggatgtgatccactggtcaagcctgtgggacgacaggcttgcgaccttcagccttgcccaacggagccccctgacgacagctgccaggaccagccagggaccaattgcgcactggcgatcaaggtaaacctgtgcggtcattggtactacagcaaggcgtgctgccggtcttgtcgcccaccccactcttag

SEQ ID NO: 311348 - protein, 117 aa, Artificial Sequence
  derived and/or modified sequence
MRNNCTASLMKVFYKPVIEDLSMELARKCTELISDIRYKEEFKKSKDKCTFVTDSPMLNHVKNIGAFISEAKYKGTIKADLSNSLYKRMPATIDSVFAGEVTQLQSEVAYKQKHDAA

SEQ ID NO: 311349 - DNA, 354 bp, Artificial Sequence
  derived and/or modified sequence
atgagaaataactgtacagccagtctcatgaaagtcttttataaacccgtaatcgaagacctgtccatggagctggccagaaagtgcacggaactcatctccgatatacgatacaaggaggagtttaagaaatccaaagacaagtgtaccttcgtcaccgactctccaatgctgaatcacgtcaaaaatatcggtgcctttatttctgaggccaagtataagggcactataaaggcagacctatctaattctctgtacaagcgcatgcctgccacaattgattccgtgttcgcaggagaggtcactcagttacagtcggaggtggcatacaagcaaaaacatgacgcagcgtag

SEQ ID NO: 311350 - DNA, 354 bp, Artificial Sequence
  derived and/or modified sequence
atgaggaacaactgcacagccagcctgatgaaggtgttctacaagcctgtgattgaggacctgtccatggagctggccaggaagtgcacagagctgatcagtgacatccgctacaaggaggagttcaagaagagcaaggacaagtgcacctttgtgacagacagccccatgctgaaccacgtgaagaacatcggggccttcatcagcgaggccaagtacaagggcaccatcaaggctgacctgagcaacagcctgtacaagaggatgcctgccaccattgattctgtgtttgctggggaggtgacccagctgcagagcgaggtggcctacaagcagaagcatgatgctgcctag

SEQ ID NO: 311351 - DNA, 354 bp, Artificial Sequence
  derived and/or modified sequence
atgcggaacaactgcaccgccagcctgatgaaggtgttctacaagcccgtcatcgaggacctgagcatggagttggcgcgaaagtgtaccgagctgattagtgacattaggtacaaagaggagtttaaaaagagcaaagacaagtgtacctttgtgaccgattcccctatgctgaatcatgtgaagaatatcggggcatttatctcagaagcgaaatacaagggcaccattaaggcggacctgtcaaactcactatacaagaggatgcctgctactattgacagtgtcttcgccggcgaagtgacccagctgcagtccgaggtggcgtataagcagaaacacgacgccgcttag

SEQ ID NO: 311352 - DNA, 633 bp, Artificial Sequence
  derived and/or modified sequence
gttctgatcctagtgcttcattgaatggctttgtaaatgagacacataatttttcatagccttcattttgtcatctgtgaaagagagggctttaggtgtattgatttcttaaggatccctttggcttgaaattctgattctagaatctcaaatggaaaatttgtgttcacattgcacgtggtgtttggtttttgttttcaaaagtttgtgcattaaatctcaacagcttattttcttgcagcacagtgaagagtccctaagaacatattacgtgatgggaaatgagaaataactgcactgcaagcctgatgaaggtcttctataagcctgttattgaagacttaagcatggaattggccagaaaatgcacggaactcattagcgatatccgttataaagaagagtttaaaaagtccaaggataagtgtacatttgtgactgacagtcctatgctaaaccatgtaaaaaatatcggtgcttttatttctgaggcaaaatacaaaggcaccattaaagctgacctttctaattctctttataagcggatgccagccacaattgacagtgtttttgcaggagaagttacacagctccagagtgaggtggcctacaagcagaaacatgatgctgcca

SEQ ID NO: 311353 - DNA, 354 bp, Artificial Sequence
  derived and/or modified sequence
atgcggaacaactgtactgctagcttgatgaaagtgttctacaaaccagtgatcgaggacttgtcgatggagctggcccgtaaatgtacggagctcatcagtgacatcaggtacaaggaagaattcaaaaaatccaaagacaaatgtacttttgtgacggattctccgatgctgaaccatgtgaaaaatataggggctttcatatcagaagctaagtacaaaggtaccattaaggctgacttgtccaacagtttatacaagcgaatgcctgccacaatagatagcgtgtttgccggtgaagtaacgcagctgcagtccgaagtggcatacaaacaaaagcacgatgcagcatag

SEQ ID NO: 311354 - DNA, 354 bp, Artificial Sequence
  derived and/or modified sequence
atgagaaacaactgcaccgccagcctgatgaaggtgttctacaagcccgtgatcgaggacctgagcatggagctggccagaaagtgcaccgagctgatcagcgacatcagatacaaggaggagttcaagaagagcaaggacaagtgcaccttcgtgaccgacagccccatgctgaaccacgtgaagaacatcggcgccttcatcagcgaggccaagtacaagggcaccatcaaggccgacctgagcaacagcctgtacaagagaatgcccgccaccatcgacagcgtgttcgccggcgaggtgacccagctgcagagcgaggtggcctacaagcagaagcacgacgccgcctag

SEQ ID NO: 311355 - protein, 508 aa, Artificial Sequence
  derived and/or modified sequence
MRCPKSAVTMRNEELLLSNGTANKMNGALDHSDQPDPDAIKMFVGQIPRSWSEKELKELFEPYGAVYQINVLRDRSQNPPQSKGCCFVTFYTRKAALEAQNALHNIKTLPGMHHPIQMKPADSEKSNAVEDRKLFIGMVSKKCNENDIRVMFSPFGQIEECRILRGPDGLSRGCAFVTFSTRAMAQNAIKAMHQSQTMEGCSSPIVVKFADTQKDKEQRRLQQQLAQQMQQLNTATWGNLTGLGGLTPQYLALLQQATSSSNLGAFSGIQQMAGMNALQLQNLATLAAAAAAAQTSATSTNANPLSTTSSALGALTSPVAASTPNSTAGAAMNSLTSLGTLQGLAGATVGLNNINALAGMAALNGGLGATGLTNGTAGTMDALTQAYSGIQQYAAAALPTLYSQSLLQQQSAAGSQKEGPEGANLFIYHLPQEFGDQDILQMFMPFGNVISAKVFIDKQTNLSKCFGFVSYDNPVSAQAAIQAMNGFQIGMKRLKVQLKRSKNDSKPY

SEQ ID NO: 311356 - protein, 314 aa, Artificial Sequence
  derived and/or modified sequence
VGRMEGCSSPIVVKFADTQKDKEQRRLQQQLAQQMQQLNTATWGNLTGLGGLTPQYLALLQQATSSSNLGAFSGIQQMAGMNALQLQNLATLAAAAAAAQTSATSTNANPLSTTSSALGALTSPVAASTPNSTAGAAMNSLTSLGTLQGLAGATVGLNNINALAGMAALNGGLGATGLTNGTAGTMDALTQAYSGIQQYAAAALPTLYSQSLLQQQSAAGSQKEGPEGANLFIYHLPQEFGDQDILQMFMPFGNVISAKVFIDKQTNLSKCFGFVSYDNPVSAQAAIQAMNGFQIGMKRLKVQLKRSKNDSKPY

SEQ ID NO: 311357 - DNA, 1527 bp, Artificial Sequence
  derived and/or modified sequence
atgagatgccccaagagcgccgtgaccatgagaaacgaggagctgctgctgagcaacggcaccgccaacaagatgaacggcgccctggaccacagcgaccagcccgaccccgacgccatcaagatgttcgtgggccagatccccagaagctggagcgagaaggagctgaaggagctgttcgagccctacggcgccgtgtaccagatcaacgtgctgagagacagaagccagaaccccccccagagcaagggctgctgcttcgtgaccttctacaccagaaaggccgccctggaggcccagaacgccctgcacaacatcaagaccctgcccggcatgcaccaccccatccagatgaagcccgccgacagcgagaagagcaacgccgtggaggacagaaagctgttcatcggcatggtgagcaagaagtgcaacgagaacgacatcagagtgatgttcagccccttcggccagatcgaggagtgcagaatcctgagaggccccgacggcctgagcagaggctgcgccttcgtgaccttcagcaccagagccatggcccagaacgccatcaaggccatgcaccagagccagaccatggagggctgcagcagccccatcgtggtgaagttcgccgacacccagaaggacaaggagcagagaagactgcagcagcagctggcccagcagatgcagcagctgaacaccgccacctggggcaacctgaccggcctgggcggcctgaccccccagtacctggccctgctgcagcaggccaccagcagcagcaacctgggcgccttcagcggcatccagcagatggccggcatgaacgccctgcagctgcagaacctggccaccctggccgccgccgccgccgccgcccagaccagcgccaccagcaccaacgccaaccccctgagcaccaccagcagcgccctgggcgccctgaccagccccgtggccgccagcacccccaacagcaccgccggcgccgccatgaacagcctgaccagcctgggcaccctgcagggcctggccggcgccaccgtgggcctgaacaacatcaacgccctggccggcatggccgccctgaacggcggcctgggcgccaccggcctgaccaacggcaccgccggcaccatggacgccctgacccaggcctacagcggcatccagcagtacgccgccgccgccctgcccaccctgtacagccagagcctgctgcagcagcagagcgccgccggcagccagaaggagggccccgagggcgccaacctgttcatctaccacctgccccaggagttcggcgaccaggacatcctgcagatgttcatgcccttcggcaacgtgatcagcgccaaggtgttcatcgacaagcagaccaacctgagcaagtgcttcggcttcgtgagctacgacaaccccgtgagcgcccaggccgccatccaggccatgaacggcttccagatcggcatgaagagactgaaggtgcagctgaagagaagcaagaacgacagcaagccctactag

SEQ ID NO: 311358 - DNA, 1527 bp, Artificial Sequence
  derived and/or modified sequence
atgcgctgtcccaaaagtgccgttaccatgcgcaacgaagaattactactgagcaatggcacggccaataaaatgaatggggctttagaccactcagaccagcccgaccctgacgcaattaagatgtttgtcggacagattcccaggtcctggtcggaaaaagagctgaaagaactgttcgagccctacggagctgtttaccagattaacgtccttagagatcggtctcagaaccccccccagtctaagggatgttgcttcgtgactttctatacgcgtaaggcggccctggaggcccaaaatgcactgcacaatatcaaaactctgccagggatgcatcatcccatccagatgaaaccggccgactcggaaaaatccaacgccgtagaagataggaaactgttcataggcatggtctccaagaaatgcaacgaaaacgatatacgggttatgtttagcccattcgggcagattgaagagtgtaggatcctgcggggccctgatgggctgtccagaggttgtgcattcgtgactttcagtaccagggccatggcgcaaaacgctataaaggctatgcaccagagccaaaccatggagggatgctcctctccaatcgtggtcaagttcgccgatactcaaaaagacaaagagcagaggcgccttcagcaacaactggcacagcagatgcaacagctcaataccgccacatggggtaatctgaccggcctgggaggcttaacccctcagtacctggccctcctgcagcaggctaccagcagtagtaacctcggcgcatttagcggcatccaacagatggccgggatgaatgcacttcagttacagaatttggccacacttgcggctgccgcagctgctgcgcagaccagtgctacgtcgactaatgcaaatccactgagcaccactagctcagcactgggagctctgacctcaccagtagcagctagcactcctaactcaacagccggcgctgccatgaattcgttgacctccctgggcaccttgcaaggtctggctggtgctacagtgggcctgaataatataaatgctctggcaggcatggcagcgttaaacggcgggttgggagctacgggactgacaaacggcactgccggaaccatggacgccctgacccaagcctactcggggatccagcagtacgccgccgccgccctgcccacactctatagtcagtccttgctgcagcagcagtcggctgcaggatcccaaaaggaggggcccgagggcgccaacttatttatttatcacctaccccaggagttcggcgatcaggacatcctgcagatgttcatgccatttggtaatgttatctcggcaaaagtgtttattgataagcagaccaatttgtctaagtgctttggatttgtgagttacgacaaccccgtgtccgcgcaggcggctatacaggccatgaacgggtttcagataggaatgaagagactgaaggtccagttgaagcggagcaagaacgactcaaaaccttattag

SEQ ID NO: 311359 - DNA, 1527 bp, Artificial Sequence
  derived and/or modified sequence
atgaggtgccctaaatcggcggtcacaatgagaaacgaggaactgcttttgtctaatgggactgccaacaagatgaacggcgccctggatcactcagatcagccagatccggacgctatcaagatgttcgtgggtcaaatcccacgcagctggtccgagaaggagctgaaggaattgtttgaaccctatggcgcggtctatcagatcaacgtgctgcgcgaccgctctcagaacccgcctcagagtaaagggtgttgttttgtgactttctacactcgaaaggctgccctggaggctcagaacgcgctccataacataaaaaccctgcccggcatgcaccaccctattcagatgaagcccgcagattctgaaaagtccaatgccgtcgaggataggaaactttttattggcatggtgagtaagaagtgcaacgagaacgatattagggtaatgttctctccgttcgggcaaatagaggagtgcaggatcctgagggggcctgatgggctgtctcggggatgcgctttcgttaccttcagtactagagctatggcccagaacgcaatcaaggctatgcaccagtctcaaaccatggaggggtgctccagtcccatcgtggtgaaatttgctgacactcaaaaggacaaggaacaaagaagactccagcagcagctagcccagcagatgcagcagctgaatacagctacctggggtaacctaactggcctcggagggctgaccccccagtatctagccctgctgcaacaggcgactagttctagcaatctgggtgcattcagcgggattcagcagatggcaggcatgaatgccctccagctgcaaaatctggccactcttgctgctgccgcggctgcagcccagacttctgccaccagcaccaacgctaatccgctgagtaccacgtcgtccgcgctgggagccttgacctcccccgtagctgcatcaactcctaattctaccgcaggcgccgcaatgaattccctgacctctcttggcactctgcagggcttagcaggagcaaccgtggggctgaataacatcaacgcgctggcaggcatggcagcacttaacggcgggctgggcgcgaccgggttgacaaatggaaccgccggaaccatggatgctcttacccaggcatatagcgggattcagcagtacgcagccgcggctctgcctacattatattcacagtcgctcttgcagcagcagtctgcggcgggcagtcaaaaggagggcccagaaggtgccaacctgttcatttatcacttgcctcaggagttcggggatcaagatattctccaaatgtttatgccctttgggaatgtcatttcagctaaagtattcatcgataagcagacaaacctatccaagtgcttcggctttgtatcctacgacaatcctgtctcagcgcaggctgcaattcaagcaatgaatggattccagatcgggatgaaacggcttaaggtacaactcaagaggtccaagaatgattctaaaccatactag

SEQ ID NO: 311360 - DNA, 1527 bp, Artificial Sequence
  derived and/or modified sequence
atgcgctgccccaagtctgctgtgaccatgagaaatgaggagctgctgctgagcaatggaacagccaacaagatgaatggagccctggaccacagcgaccagcctgaccctgatgccatcaagatgtttgtgggccagatccccaggtcctggagcgagaaggagctgaaggagctgtttgagccctatggagctgtgtaccagatcaacgtgctgcgggacaggagccagaaccccccccagagcaagggctgctgctttgtgaccttctacaccaggaaggccgccctggaggcccagaatgccctgcacaacatcaagaccctgcccggcatgcaccaccccatccagatgaagccagctgacagcgagaagagcaatgctgtggaggacaggaagctgttcatcggcatggtgtccaagaagtgcaatgaaaatgacatccgggtgatgttcagccccttcggccagatcgaggagtgccgcatcctgcggggcccagatggcctgagccggggctgtgcctttgtgaccttcagcacccgggccatggcccagaatgccatcaaggccatgcaccagagccagaccatggagggctgcagcagccccatcgtggtgaagtttgctgacacccagaaggacaaggagcagaggcggctgcagcagcagctggcccagcagatgcagcagctgaacacagccacctggggcaacctgaccggcctgggcggcctgaccccccagtacctggccctgctgcagcaggccaccagcagcagcaacctgggcgccttcagcggcatccagcagatggccggcatgaatgccctgcagctgcagaacctggccaccctggccgctgctgctgctgctgcccagaccagcgccaccagcaccaatgccaaccccctgagcaccaccagcagcgccctgggcgccctgaccagccctgtggccgccagcacccccaacagcacagctggggccgccatgaacagcctgaccagcctgggcaccctgcagggcctggccggggccaccgtgggcctgaacaacatcaatgccctggccggcatggccgccctgaatggaggcctgggcgccaccggcctgaccaacggcacagctggcaccatggatgccctgacccaggcctacagcggcatccagcagtatgctgctgctgccctgcccaccctgtacagccagagcctgctgcagcagcagagcgctgctggcagccagaaggagggccctgagggcgccaacctcttcatctaccacctgccccaggagtttggagaccaggacatcctgcagatgttcatgccctttggaaatgtcatcagcgccaaggtgttcatcgacaagcagaccaacctgagcaagtgcttcggctttgtgtcctatgacaaccctgtgtctgcccaggccgccatccaggccatgaatggcttccagatcggcatgaagaggctgaaggtgcagctgaagaggagcaagaatgacagcaagccctactag

SEQ ID NO: 311361 - DNA, 9233 bp, Artificial Sequence
  derived and/or modified sequence
gaggagagggcgcgttagtgagcagcgactgtggcattgatgtttgagcatacttctgaactggcttttgttgagactatcagtatagaagcatgcgctgtcccaaatccgctgttactatgagaaatgaagagctgcttttaagtaacggcacagccaacaagatgaacggagctttggatcactcagaccaaccagacccagatgccattaagatgtttgtcggacagatcccccggtcatggtcggaaaaggagctgaaagaactttttgagccttacggagccgtctaccagatcaacgtcctccgggaccggagtcagaaccctccgcagagtaaaggttgttgtttcgtaacattttatacaagaaaagctgcacttgaggcccagaatgcactgcacaatattaaaactttacctgggatgcatcatcccattcagatgaaacctgcagatagtgaaaagtccaacgctgtggaagacagaaaattgttcataggaatggtatcgaagaaatgtaatgagaacgacatcagggtgatgttctctccatttggccagatagaagaatgccggatcctccggggacctgatgggctgagtcgaggctgtgcgtttgtcacattttctacaagggcaatggcacagaatgcaatcaaagccatgcatcagtctcagaccatggagggctgctcttcacctatcgtggtgaagtttgctgacactcagaaggacaaagagcaaaggcgcctccagcagcagctcgctcagcagatgcagcagctcaacactgccacctgggggaacctgacagggctgggcggactgaccccacagtatctggcgctcctgcagcaggccacctcctccagcaacctgggtgcgttcagcggcattcaacaaatggcaggcatgaatgctttacagttgcagaacctggcgacgctggctgctgctgcagctgcggcccagacctcagccaccagcaccaatgcaaaccctctctctaccacgagcagcgccctgggagccctcacgagtcccgtggctgcttcaacccccaactccactgctggtgcagccatgaactccttgacctctctcgggactctgcaaggactggctggagccactgttggactgaataatattaatgcactagcaggtatggcggctctgaatggaggacttggcgccacaggcttgacgaatggcacggctggcaccatggacgccctcacccaggcctactcaggaattcaacagtacgcagccgccgcgctgcccactctgtacagccagagcctgctgcagcagcagagcgctgcaggcagccagaaggaaggtccagagggggcaaacctctttatttaccaccttccacaggaatttggagaccaggacattctgcagatgttcatgccttttggaaatgttatctctgctaaagtcttcattgacaaacagaccaatctgagcaagtgctttggttttgttagctacgacaatccagtctctgcacaagctgctatccaagctatgaatggctttcagatcggcatgaaacgcttgaaggtgcagctgaagcgttccaaaaacgacagcaaaccttactgatcctaaccccagaggctccctgctctcattttagctttcttagggtaagtcccacgagccagcctgtctcaacagggaaggcagaggaggaccacattgccaacttttaccaagagagacggttatttttacaataaggcctccatgtccccacccacttcccctacccagtttgccataattaaaacttgggctactttgtttctattgagtaattcctcctccagttgtgccactgtattctcctttgttttgcgatttgaatctccttttacctttttttttaatttttttcatttttgcttttttttaaagagaagcatatacacaaataaatggcatcttgagaatttaaaaggcaaacaaacaaacgctaatgtgcaattctaactctgaaaccactggtgccccgagagcactgcctggagaattcacccctccttgcccggcgcccgcccccggagggagggcccggtgcttagaggttaacttggtggcctaggagagggagaagccaggagaagcacttactccaaccacacgtctttccactacatcggcttgttttactaagtaggattttattttagggttcaaagaaacatgacatttattggtcaaaatattacactggttgtctattttgttattgttttattttagtttttagaaaggattaatgtacaaaaagatttagagatctgtttcttaaagctacagggtttaaaaaataaaaatgagtgaaaatacttgatgtttcttgaaagataaatttaataataataaataaatacataaatacataaataaaaaagaaagccacaggcctgtaaattttatttgtaaaaaagcatttctatttttatacaaaatttttactgcctcagaaataatggaagttatttattgcctattgttaacttattgggtacctaaagagcagttctctgtctagctagaaccttctgaagtagtctctagaggaattgttctaggaatgggctttttttcaccgttgaaccctagacctgaagttcatgctttatcctctcgttgtttgtatctgtctgattattttgtttgtaacttccattatctagtttacagttcagtcgtctgactttccccgtatgtcacatttgttgaaactggaccttctccccctgtccctcaccccaaaacacccggaatccatcccgtttcgctctctccagatggattctcttggggtttcattgtgctgtggataaggagtgtaagaaatgcaaattatgtgaatggctcggagactccctaatgacctaagatttgcattagtttttctcctgcacccttaaaagtgattttgttgccgctgcatagattctgtgtaactttttactcttccttgttttttccctagacatcttcatgcccgttagttcatcgtttgcctagcatgtccctgtggcgtctcaaaaaaaagtttcatcgtcccgtcattgtttctgatgtctttctgacctcacatcatatttggttctcctactgacctttgatctagtttgacctttgaaatttgcatgtgacctcatctagctatgaattctgggaagtcaatgtgaaaaacattgctgcattcatgcaagactgaaatttattattagacaaattcattatagaaaaaacctgtggcaaaaacgtttctttcttattttttttcttttcctaaaacagacttgaaagtattatacagggattggcattcttcccggtcactggtaacaatagcaatatgtgtccagggacacagaatgttggtttctaacagactacttccaaaaacagtttgagaaaaaaactgtctgattttaagtctctagaggtctgtaatagtttttacatttttcaggcagtgtaaagttttttgataaggccattttaggtggctcactttctcattaagatatatatatagaaccactttttgtagattagtataagaaaaatatttaccctgttttggggcaaatgctacctatttgtgtcaccttttgctgaactcacagttagacaatccatggtttaatgcacatgaaattacctatattttatactgtttcaatgtacaggagaaaggttactgtaaactgtgttatgttggtgcttctgtgaattaagttgtggtttcatcatgagtcttaatgttctttgttgataagacaagtttagaattggtttacttaatacaaaaaaaaaaaaaagaatttcaaaaaaaaaagttgtttgcttaaaaaaaatttcatgtgagggaaaaaaaaaaaacctattccagaataagttttgtgttggcttgtgaagcattgatgtcattttttttaattgtggactatttagatgtgtttgtgttcagcaaaatgtgatgtttttttcttttaaagaaaaaaagtgaaaatatatagtgccaaattccaaaggtacttccttcctagagcttcagtgtgtttcttgtgagaagtaatttgataacatgggtattttattatgtgttttgtataaatccctaatatttaaaaaaaaaaacaaaacaaaaaaaggttacaaagtttgttaacttgctatcctgtggtcttgttgcctgaaattgttattgtttgttatttctctctgatgttttttgtaagacattgtataagtgcccatgtcccacttttttaaccactccgcacatcagtgctgtgaaggcaacctcaccatgtattttcttcataatctatggaaacctctaaggtgagaaagttttgaacttttaaccctttctacccagagctatctggaatgttgatgactttttatactgtcatgatttgagtttgttttggggtgtttccaatttggatttttttccctgcatctatcctctaagttgtttcggtttgactactttgttctttggttaagatccaaaagaaaacagaaaacaattccacgaggccaatctaaagggaaaaaatcctacactacttttactacttttgattatttctcatttttgggaaaagaattcctaatgtgctactagaattccttcttcagttttaacgagtaattggataaaccctgagggaaaacggaggtagattcagcacctaacaatcctgtatgcttttgagatcacgtttagtgctatgtcctagtctagaatattttcatataccttgcagtaaaacgactttgtggcaggacagtctcttgaggggttttgtttctgtttcctaaatactcctaaataatatttctaatcagccattatgctggggcatctctgatcccagtaggtacctctgaatataccaggtgtctggagttagaagcccatagccctttcccagcctttttggtttttttaattgaacacatttcatctaagtaaagctcagttctttatcacaatttactgaccaaatacctagcaccagttcctgctgccactttttaaagtgccatatgactttctacgaacaggtaccttgctgtcttgacaaatcctaatgtcacgcctacagccccaacacaagctccagtcttcctcttcggcatgccctggaagcttcttggcctcagctccccttccccgctcagcaccctgttaggatcagtgtgtgtggatgggatagccctgggatggaaaggactagcctctactgatgcaaaaaaacaaaaagcaacacaaacgtttccttcttatagcacatgcacttccttacaatgacatgatttgtattatcctcacatgtgtttactactgctggggccttccttcatcctctgagggctattttgtactttctgcagcaatcagcttaataacaacacttattgcacctgtctctctctgagaacacggtgtgtctcgacacgtaccacgtacgtggaaacacaagagcccaccacttgaatttctaagaccatttcattctgaaacttcttatcaattacctaaatctcaacgaaaaacaatttactgaagccgactcccctccccatctccctctcaacctcaacccacctgcatgcatctcccccagaggaaacactgagggtaggggacaggaggctcaggacgcgccctctgaatcgagtgtttcttcttcacaagtcaccaagagaggacatgagggggaaagtcctttttgcccttctccaaaaaataaccttccacagagacaaactgtccttctatccacttttatcttttaataaatatcaaaaggaaaaagctgcaagggtgcaaagggcctgtgccagaagaaaacacacacagggaaaccgctttttttaatcaattgtagagaatagtcatttttaatctaaattagagaattgtgatacaatggcagtcctcaaaggcgtaacgagttcatctttctttcaccataggggttatagttggcttgtgctactctggaatcattttactgtttgtttttattatcttaagtgctaattaaaaaaaaaataaaattttaaaaaaacctgtagtttcattacctttttgaataatgtcatacaaaaaatgtatttgtttttttgtgctgtgagaattgatgtttgtagattaataatcattttgtttagaattacaaaatagtttttaaatattgtctgagaaaagccaaagttaatgcaacctagtggaaactgtaagaccatttgagtattgtttgttttattgatgcatttggattttgttgtttgatggaatttgagccaaaaaaaaaatacgcaggctttcctatttctacaactgattgtacttatgcattttgtaccagtggaactttttatactggagattaaaaaaaaaatggaaatttttgtggcttgctctggtgggcccctgacaatgactgatttcaagtttgatttcgggttgattgattgattgattgatagaaagaaagttgcttttcttttgagaattaaaaactttggcttgatttcttttttccctttgcttatatctagcattagaattttgtcttaaaataacagcggtaagtttcactttttattctgtattgtgcagttacacaataaggtaattagatttagaagtactcagtcactttaagtggataaatgtattagttaaaactttagggtttgcttttttgctgtttagatcaaagttttttctgattcttctgtcctcattgtgaacataaccgtgtagttgaaacagtcaaacttatttttgtaatgtatgttattgtgtgatgcagttttttgcttctgtctccaatattaaaccattttcctaatacttgtttctctctctgcgtgttgtattgttggtagtcattatatgttggtgatacatctgcacacctcactgtttcacgtatctgtttttttctctatgttgtgtaaaaagatacagtcgattccacttaagtgaatatctgatttggggaagaggaaactgcacagcagccacctttgatttatgtacaaccgcccacttgaactcctgcttccaagatttatacacttttttcctacagttcacctcagtaactgcctttggggttggatttgccaaggtgttttacggtcttttgaccacacaggttaatttccccttctctcccctccctcatgagtctatccacgcagttcttaacatacattccaaactgctgcggggtttcctctccacacccacgaggccaaacccgcatcattacagtccaactcttcttagacactaatcactttctaaaagaagtgagttctccagggaagaaaaatcaacttagccagtgaaaagggttaaacttaagtctattatttgttgccctcaatcaaaagatatgtatagaaaagtcatttaaattatttatttctacaagctaattgaatccaggagcagctttaattattaacactaacggaagagaaaagaagtatttccaagggctcaaatggaagctgtactcagtccggtggaggcagggggaggtaaagtttctcacactcaagtcgtcttcatagtttactgtccttttccaaacaaaagctaataacgccatacgcatccacacactccctcctggatgaacctaagtctcgtccccactgtcaccccaaggccagttatcaaaaactgttccttctctgccctcaaagactgaagccgcaggccctgttctgcctctgctcaggaatctgattgctcttaaagtgctcttacaagattccgtcgatgtttgctccctctgtcttatctctccttccagtattttcagacgcacaagctctgactcaggccacccagcacctggcagccttcctctgcgtgccagtgaaatctctcccagtaggtgctcaggctcttcaccctctcgttgcagcagcccctctggcccgagattgtattttctagtctgctcaagaacagaggggcctggcgaggtggaggaagggaggctccctccccggggctggccgcctcagtgatggtgatgccaccagctccagcctgcacggatggagctcacttcctaccatcacttctgctttcagtctcctcatagccttcggcagtctcctctgaaaacacactgcctacgttagtgggaaaggatggctaagggtgtgatttctttttattagggaggtgggagggggatgttgggaggcatggggggtgattaaattatcatttccaaggtgcaagtgtttatttttcaaatctataagtacatagttccaccattttggcacaagacaaaatactcatgctaagcaaaggaagagaaagacaaagccagtttttgttgcttttctaaagcaacaaataattctccaaagaaggggatgaaaatgctagttcctttaagcacttactgactgtaaagttggtccctgcttaaattcatacccatagttttgagtcggtatgacaccactgcagtgtgagcaaggtgaatccgtgtgccatgcatggaccaccttgggataccgcagcaccatcaacatccgccttgctgatggaagccacacacgctgcccagcccacagcagtcgcacgcagccgatgggctcggactcttagctggcaggctaggacacacagtgaacattaatgtactgtgaatcgttcctgataagtgaataaaacattgtgaccaaacaatcagcttattcacttatcaggaatcgactgttctgctaatttgctgttgttgtttttcatctctgttgtagttcactatttttgctgtgttctgttttctcctctcatgcttgggcaaatcactgggaatattatcttcatgtgaccatgaaacgtttctattgagtgaaaatgatatcttaacaaaatctatgcacttgctatcaggaacacaatactggatgtgtcttatatatattgaactatatagtactcgatttcttaaataaagcttaagaaaggactctgttgtgtgtaaagttaatgtgattatttttcaaagcagtgtttctaaggggtatttttgttcttttaagtcttgagtgatacaggatatttttcattaaaattatatcactggctttatgacttaatattcaataaattgactttgg

SEQ ID NO: 311362 - DNA, 1527 bp, Artificial Sequence
  derived and/or modified sequence
atgcggtgccccaagagcgccgtgaccatgcggaacgaggagctgttgctaagtaacggcacagccaacaagatgaacggagccctggatcattcggatcagcctgatcccgatgcaataaagatgtttgtgggccagatccctagatcatggtcagaaaaagagctgaaggagctgttcgagccttatggtgcggtatatcagatcaacgttttgcgcgatcgctcccagaaccctccacaatccaaaggatgctgcttcgtcactttctacactcggaaagccgccctggaggcccagaatgccctccacaacatcaaaacactgcctggcatgcaccatcccatccagatgaaacctgctgactccgagaaaagcaacgcagtcgaggaccggaagctgttcatcggcatggtgtccaagaagtgcaacgagaatgacattagggtaatgttctccccgtttggtcaaattgaagagtgtcggattcttcgtggcccagacggtttgtcaagagggtgcgccttcgtgacctttagtacaagggctatggctcagaatgcgataaaggccatgcaccaatcccaaaccatggagggatgcagcagtccgatagtggtgaaattcgctgacacccagaaggacaaagaacagaggcgcctgcagcagcagctcgcgcaacaaatgcagcaattgaataccgcgacctggggtaatctgacagggctgggaggactgacacctcagtatctagctctcctccagcaagccaccagcagctcaaacctgggggcattctctggtatccagcagatggcaggcatgaatgccctacaactccagaatctggccacgcttgcagccgctgctgctgcggctcagaccagcgccactagtactaatgctaaccctttgtcaacaacttcgtccgccttgggcgccctgacctcacctgttgccgccagcactcccaattcaacggccggtgctgccatgaactctctgacatcgctcggtacactgcaaggccttgctggcgcaacagttggcctgaacaacatcaatgcactggcagggatggccgcactcaacggcggcctgggcgctacaggcctgactaacgggactgcaggtactatggatgcccttacccaggcatactcaggaatacagcaatacgccgcagctgcactgccaaccctgtattcccagtcactcctgcaacagcaatcagccgccggctctcagaaggagggcccagagggggctaacttattcatttaccacctgccccaggagtttggcgatcaggacattctgcagatgttcatgccattcggaaatgtgatcagcgccaaagtgtttatagacaaacagacgaacctatccaagtgtttcgggtttgtgagctacgacaaccccgtaagtgcacaggccgcaatccaggctatgaacgggttccagattggaatgaaacggctgaaggtgcagctcaagagatccaaaaatgattccaaaccatactag

SEQ ID NO: 311363 - DNA, 1527 bp, Artificial Sequence
  derived and/or modified sequence
atgcggtgccccaagagcgccgtgaccatgcggaacgaggagctgttgctttccaatggcaccgctaataaaatgaatggcgcactggatcatagcgatcagcctgaccccgatgcgattaagatgtttgtgggacagatccccagaagttggtctgaaaaggagctcaaggagttgttcgagccatacggagcagtctatcagattaatgttttgagagataggtcacagaatccacctcagagcaaaggatgctgttttgtcacgttctatactcgaaaagcagccctcgaggcacagaatgccctacacaatataaagactttgcccggcatgcaccacccaatccagatgaagcccgcagactccgaaaaatcaaacgcagtggaggaccgcaaacttttcattggcatggtgtctaagaagtgcaatgagaacgacatacgagtgatgttttcgcccttcggtcaaatcgaggaatgccgcattcttcgaggccctgacggcctctctaggggatgtgcattcgtcactttttccactagggccatggcgcaaaacgcaatcaaagctatgcatcaatctcagaccatggaggggtgctcttctcccattgtagtgaagtttgctgatactcaaaaagataaggagcagcggagactgcagcagcagctcgcccagcagatgcaacaactgaacactgcaacctggggcaatttgactggactgggcgggctcaccccgcaatacctcgcacttctccagcaagcaacaagttcaagtaacctgggtgccttttccggcatacagcaaatggccggcatgaacgctctgcagctccagaatttggctaccttagccgccgccgccgccgcggcccaaactagcgctaccagcacaaatgctaatccgttaagcaccacctcatccgctcttggggctctgacaagccctgtggccgcctcaactcctaattctaccgcgggggccgccatgaatagcctgactagtcttggcactctgcaagggctggctggtgctactgtggggttaaataatattaatgcactcgcaggtatggccgccctcaacggcggcctgggggcaaccggtctcacgaacgggaccgcggggactatggatgctttgacacaggcctatagcggcatccaacagtacgccgccgccgcactgccgactctctatagtcagagcctgcttcagcaacagagcgccgcaggaagtcagaaagagggcccagaaggcgcgaacctgtttatataccaccttccccaagagtttggcgaccaggacattcttcagatgtttatgccattcgggaatgtgatctccgctaaggtcttcattgacaagcagaccaatctttccaaatgcttcggatttgtgagttacgacaacccggtgagcgcacaggctgcaatccaggcaatgaacgggttccagattgggatgaagcggctgaaagtgcagctaaaacgatctaagaacgattccaaaccctattag

SEQ ID NO: 311364 - DNA, 2398 bp, Artificial Sequence
  derived and/or modified sequence
atgcgctgtcccaaatccgctgttactatgagaaatgaagagctgcttttaagtaacggcacagccaacaagatgaacggagctttggatcactcagaccaaccagacccagatgccattaagatgtttgtcggacagatcccccggtcatggtcggaaaaggagctgaaagaactttttgagccttacggagccgtctaccagatcaacgtcctccgggaccggagtcagaaccctccgcagagtaaaggttgttgtttcgtaacattttatacaagaaaagctgcacttgaggcccagaatgcactgcacaatattaaaactttacctgggatgcatcatcccattcagatgaaacctgcagatagtgaaaagtccaacgctgtggaagacagaaaattgttcataggaatggtatcgaagaaatgtaatgagaacgacatcagggtgatgttctctccatttggccagatagaagaatgccggatcctccggggacctgatgggctgagtcgaggctgtgcgtttgtcacattttctacaagggcaatggcacagaatgcaatcaaagccatgcatcagtctcagaccatggagggctgctcttcacctatcgtggtgaagtttgctgacactcagaaggacaaagagcaaaggcgcctccagcagcagctcgctcagcagatgcagcagctcaacactgccacctgggggaacctgacagggctgggcggactgaccccacagtatctggcgctcctgcagcaggccacctcctccagcaacctgggtgcgttcagcggcattcaacaaatggcaggcatgaatgctttacagttgcagaacctggcgacgctggctgctgctgcagctgcggcccagacctcagccaccagcaccaatgcaaaccctctctctaccacgagcagcgccctgggagccctcacgagtcccgtggctgcttcaacccccaactccactgctggtgcagccatgaactccttgacctctctcgggactctgcaaggactggctggagccactgttggactgaataatattaatgcactagcaggtatggcggctctgaatggaggacttggcgccacaggcttgacgaatggcacggctggcaccatggacgccctcacccaggcctactcaggaattcaacagtacgcagccgccgcgctgcccactctgtacagccagagcctgctgcagcagcagagcgctgcaggcagccagaaggaaggtccagagggggcaaacctctttatttaccaccttccacaggaatttggagaccaggacattctgcagatgttcatgccttttggaaatgttatctctgctaaagtcttcattgacaaacagaccaatctgagcaagtgctttggttttgttagctacgacaatccagtctctgcacaagctgctatccaagctatgaatggctttcagatcggcatgaaacgcttgaaggtgcagctgaagcgttccaaaaacgacagcaaaccttactgatcctaaccccagaggctccctgctctcattttagctttcttaggacatcttcatgcccgttagttcatcgtttgcctagcatgtccctgtggcgtctcaaaaaaaagtttcatcgtcccgtcattgtttctgatgtctttctgacctcacatcatatttggttctcctactgacctttgatctagtttgacctttgaaatttgcatgtgacctcatctagctatgaattctgggaagtcaatgtgaaaaacattgctgcattcatgcaagactgaaatttattattagacaaattcattatagaaaaaacctgtggcaaaaacgtttctttcttattttttttcttttcctaaaacagacttgaaagtattatacagggattggcattcttcccggtcactggtaacaatagcaatatgtgtccagggacacagaatgttggtttctaacagactacttccaaaaacagtttgagaaaaaaactgtctgattttaagtctctagaggtctgtaatagtttttacatttttcaggcagtgtaaagttttttgataaggccattttaggtggctcactttctcattaagatatatatatagaaccactttttgtagattagtataagaaaaatatttaccctgttttggggcaaatgctacctatttgtgtcaccttttgctgaactcacagttagacaatccatggtttaatgcacatgaaattacctatattttatactgtttcaatgtacaggagaaaggttactgtaaactgtgttatgttggtgcttctgtgaattaagttgtggtttcatcatgagtcttaatgttctttgttgataagacaagtttagaattggtttacttaatac

SEQ ID NO: 311365 - DNA, 1527 bp, Artificial Sequence
  derived and/or modified sequence
atgaggtgcccaaagtcagcagtcactatgaggaacgaagagctcctgctctctaacggaacagctaataaaatgaatggcgctctggaccactccgatcagcccgatcctgatgccatcaagatgttcgtgggacagattccaagatcatggtccgaaaaagaactcaaagaactcttcgagccttacggggcagtgtaccagatcaacgtactccgggataggtcacaaaatccaccgcagtcgaagggctgctgttttgtaacgttctacaccagaaaggcagccctggaggcccagaatgccctgcataacattaaaaccctgcctggaatgcaccatcccatccagatgaaacccgctgattccgagaaatcgaacgccgtcgaggaccgcaagttattcatcggcatggtgagtaaaaagtgcaatgaaaacgatatcagagtgatgttctctccctttggacaaattgaagagtgtcgtatccttcgaggccctgacgggttaagccgtggctgtgccttcgtgaccttctctacacgtgcaatggctcaaaatgccattaaggcaatgcaccagagccagaccatggagggctgctccagtcctatcgtggtgaaattcgccgatacgcagaaagacaaagagcagcgcagactgcagcagcaactcgcacagcagatgcaacagctgaatactgcaacatggggaaatttaaccggtctggggggtctgaccccccagtacctcgccttactgcagcaagccacgagttcctcgaatttgggtgccttcagcgggatccagcagatggcaggcatgaatgccttgcaactccagaacctggcaacactggctgcagctgccgctgcagcccaaacctctgcaacttctactaacgctaacccattgtccaccacaagtagtgctttgggcgcactgacttcgccagtcgccgcttccacacctaattccacagctggcgctgctatgaactcgcttacttcattaggaactctgcagggcctagctggcgcaacagtcggccttaataacatcaatgcacttgccggaatggcagccttgaatggcggtttgggagccaccgggctgacaaacgggaccgccggaacaatggatgcgctcacacaggcgtactcgggaattcagcagtatgcagctgcagctttgcctaccctgtactcccagagtcttctgcagcaacaatcagctgccggatctcagaaggagggccctgaaggcgctaatctctttatttatcacctccctcaggaatttggcgaccaggacatcctgcagatgttcatgcctttcggcaatgtgatcagtgcgaaggtcttcatcgacaaacagacgaatttgtccaagtgctttggctttgtgtcctatgataatccggtatcggcacaggccgctattcaggctatgaatggcttccagatcggcatgaagcgattaaaagtgcagctgaaacggtcaaaaaacgactctaaaccctactag

SEQ ID NO: 311366 - DNA, 1527 bp, Artificial Sequence
  derived and/or modified sequence
atgcggtgtcctaagagtgctgtaacaatgcgcaatgaggaactcctcctttccaacggtaccgcaaataagatgaacggagccctggatcacagcgaccagccagaccccgatgccattaaaatgtttgtaggccagatcccccgtagctggagtgagaaggaactgaaggagcttttcgagccctacggcgcagtgtatcaaatcaacgtcttgagagaccgaagtcagaaccctccacaatcgaaaggctgttgtttcgttacgttttacacacgcaaagccgctctggaggcccagaacgctctgcataatatcaaaaccctccccggaatgcaccacccaattcagatgaaacccgcagattccgaaaagagcaacgccgtagaggatcgcaagctgtttatcggcatggtaagcaagaaatgcaacgagaatgacatcagggtgatgttctcccccttcggccagattgaggaatgtcgcatcttgaggggtcctgacggcctctctcggggttgcgctttcgtcactttttctacacgggctatggctcagaatgcgattaaggctatgcaccaatcccagactatggagggttgctcttctccaattgtggtgaagttcgcagatacacaaaaggacaaagagcagcgcagactgcagcagcagttggctcaacagatgcagcaattaaacacagcaacctggggtaacctgaccgggttgggaggcttgactccacagtatctggcactgctgcaacaggccaccagttcttcaaacttgggcgcattttccggcattcagcagatggcaggaatgaacgctttacagcttcagaaccttgcgactcttgcagccgctgccgcagctgcacagacgagcgccacaagtactaacgcaaacccactttctacgacctcaagcgcactcggagcccttacatccccagtggctgccagtacccccaattctactgcgggagctgcaatgaattccttaaccagcctgggcaccttgcaaggcctggctggcgcaaccgtgggattgaacaacatcaatgccctggccggtatggcggcactcaatgggggattgggcgctacaggattaacgaacggcactgctggcaccatggatgcactgactcaggcctatagcgggattcagcaatatgccgcagccgcactacccaccctgtattcgcagtctttgctgcaacagcagtccgcagctgggtctcagaaggagggacccgagggcgctaatctgttcatctaccatttaccacaggaatttggggaccaggatattctccaaatgtttatgccttttggaaatgtgatcagcgcaaaagtgtttattgacaaacaaactaatctgagcaagtgctttggcttcgtcagttatgacaaccctgtctccgcacaggcagcaattcaggcgatgaacggatttcagatcggaatgaaaaggctcaaggttcagttgaaacggagtaaaaatgactccaagccgtattag

SEQ ID NO: 311367 - DNA, 945 bp, Artificial Sequence
  derived and/or modified sequence
gtgggcagaatggagggctgcagcagccccatcgtggtgaagttcgccgacacccagaaggacaaggagcagagaagactgcagcagcagctggcccagcagatgcagcagctgaacaccgccacctggggcaacctgaccggcctgggcggcctgaccccccagtacctggccctgctgcagcaggccaccagcagcagcaacctgggcgccttcagcggcatccagcagatggccggcatgaacgccctgcagctgcagaacctggccaccctggccgccgccgccgccgccgcccagaccagcgccaccagcaccaacgccaaccccctgagcaccaccagcagcgccctgggcgccctgaccagccccgtggccgccagcacccccaacagcaccgccggcgccgccatgaacagcctgaccagcctgggcaccctgcagggcctggccggcgccaccgtgggcctgaacaacatcaacgccctggccggcatggccgccctgaacggcggcctgggcgccaccggcctgaccaacggcaccgccggcaccatggacgccctgacccaggcctacagcggcatccagcagtacgccgccgccgccctgcccaccctgtacagccagagcctgctgcagcagcagagcgccgccggcagccagaaggagggccccgagggcgccaacctgttcatctaccacctgccccaggagttcggcgaccaggacatcctgcagatgttcatgcccttcggcaacgtgatcagcgccaaggtgttcatcgacaagcagaccaacctgagcaagtgcttcggcttcgtgagctacgacaaccccgtgagcgcccaggccgccatccaggccatgaacggcttccagatcggcatgaagagactgaaggtgcagctgaagagaagcaagaacgacagcaagccctactag

SEQ ID NO: 311368 - DNA, 945 bp, Artificial Sequence
  derived and/or modified sequence
gtcgggagaatggaaggttgttcatccccaatcgtggtcaaattcgcagacacccagaaggacaaggagcagagacggctccagcagcagttagcccaacaaatgcagcagcttaacactgcaacttggggtaacctaacagggctcggcggccttacaccccagtacttggcgctgctgcagcaggctacctcctcaagcaatctaggtgcgttcagtggcattcagcagatggctggcatgaatgctctccaattgcagaatctcgccacattagcggccgccgctgccgctgctcagacatctgcgactagtacgaatgcaaacccactctcaaccacctcctcagcgttgggtgctctgaccagcccggtggccgcctctacaccgaattctacagctggggctgcaatgaattctttgacgagtctgggaactttgcagggtctcgctggagccacagttggcctgaataatatcaacgcattggcgggaatggctgccctgaatgggggcttgggggccacagggctaaccaatggcacagctggtactatggacgctcttacgcaggcttactccgggatacaacaatacgcagcagcagccctgccaaccctgtacagccagtcacttctccagcagcagtctgccgccggctcacagaaggagggacctgaaggggccaatctcttcatataccacctcccacaggaatttggcgatcaggatatcctgcagatgttcatgccctttggtaacgtcattagcgcaaaagtgttcatcgacaaacagactaatttgtccaaatgctttggttttgtttcttacgacaaccctgtctccgcccaagccgcaatccaagcaatgaacggattccaaattggaatgaaacggctcaaagtccagctaaagcgctctaaaaatgattccaaaccgtattag

SEQ ID NO: 311369 - DNA, 945 bp, Artificial Sequence
  derived and/or modified sequence
gtgggccgcatggagggctgcagcagccccatcgtggtgaagtttgctgacacccagaaggacaaggagcagaggcggctgcagcagcagctggcccagcagatgcagcagctgaacacagccacctggggcaacctgaccggcctgggcggcctgaccccccagtacctggccctgctgcagcaggccaccagcagcagcaacctgggcgccttcagcggcatccagcagatggccggcatgaatgccctgcagctgcagaacctggccaccctggccgctgctgctgctgctgcccagaccagcgccaccagcaccaatgccaaccccctgagcaccaccagcagcgccctgggcgccctgaccagccctgtggccgccagcacccccaacagcacagctggggccgccatgaacagcctgaccagcctgggcaccctgcagggcctggccggggccaccgtgggcctgaacaacatcaatgccctggccggcatggccgccctgaatggaggcctgggcgccaccggcctgaccaacggcacagctggcaccatggatgccctgacccaggcctacagcggcatccagcagtatgctgctgctgccctgcccaccctgtacagccagagcctgctgcagcagcagagcgctgctggcagccagaaggagggccctgagggcgccaacctcttcatctaccacctgccccaggagtttggagaccaggacatcctgcagatgttcatgccctttggaaatgtcatcagcgccaaggtgttcatcgacaagcagaccaacctgagcaagtgcttcggctttgtgtcctatgacaaccctgtgtctgcccaggccgccatccaggccatgaatggcttccagatcggcatgaagaggctgaaggtgcagctgaagaggagcaagaatgacagcaagccctactag

SEQ ID NO: 311370 - DNA, 945 bp, Artificial Sequence
  derived and/or modified sequence
gtgggccggatggagggctgcagcagccccatcgtggtgaagttcgctgacacgcagaaggacaaggagcaacgacggttacagcagcagctggcccagcagatgcagcagttgaatacagcaacctgggggaacctgaccgggctgggaggactcactccccagtatctggccctgttgcagcaggctacatcttcaagtaatttgggcgccttctccggaattcagcagatggcaggtatgaacgccctgcagctgcagaacttagctactcttgccgccgccgctgccgccgctcagactagtgcgacttcaaccaatgcaaaccccctctctactactagcagcgctcttggggctcttacttctcccgtggcagcctctacacccaactccacggcaggggccgcaatgaacagcctgacttccctcggaaccctgcaaggcctggcgggagctactgtgggcctgaataatattaatgccttggccggaatggcggctcttaatggagggctgggagcgaccggactcactaacgggactgccggtaccatggatgctctgactcaagcatacagcggcatccaacaatatgctgctgcagcattgccgaccctttatagccagagccttctacagcagcagtcggctgctggctcacagaaggagggccctgagggagctaatctatttatctatcacttaccacaggaattcggcgaccaggatatcttgcagatgttcatgccgtttggaaacgtgatctccgccaaagtgtttattgacaagcaaacaaatctttccaagtgcttcgggttcgtaagttacgataatccagtctccgcgcaagccgctatccaggccatgaatggatttcagatcggaatgaagagattgaaggtccagcttaaaagaagtaaaaacgactccaaaccttattag

SEQ ID NO: 311371 - DNA, 945 bp, Artificial Sequence
  derived and/or modified sequence
gtgggtcggatggaaggctgtagcagcccaatagtggtgaagttcgccgacacccagaaagacaaagagcagcgacggctgcaacaacaactagcgcagcaaatgcagcagctcaacaccgccacctggggaaatttaacagggcttggtgggttgacaccacaatatctcgctctcctgcagcaagccacatcatcatcaaacctgggggcttttagcggcatacaacaaatggcgggaatgaacgccctccagctccaaaatttggctacactggcggcagctgcggctgccgcacagaccagcgcaaccagtaccaacgccaacccactgtcaacaacctcttcggctctgggcgcacttacatcccctgtcgcggcttcaaccccaaactcaactgcgggtgccgctatgaatagtctaacatccctagggactctgcaggggttagctggcgctaccgtcgggctgaataacattaatgctctcgcaggaatggctgctctgaatggaggcctgggcgctactggcctcacaaatgggacagctggtacaatggatgctctcactcaggcctattcaggaatacagcagtacgcagccgcagcacttcccaccctgtactcgcagagtctgttgcagcagcaaagcgctgctgggtcccagaaggagggcccagagggcgctaacctattcatatatcaccttcctcaagaatttggagaccaggatatactccaaatgttcatgcctttcgggaacgtgatctctgcgaaggtgtttatcgacaaacaaaccaacctcagtaaatgttttggtttcgtgtcctacgacaatcctgtttcagctcaagctgcaattcaggctatgaatggctttcagattggtatgaagcgactgaaagttcaactgaagcgatctaagaatgactcaaagccttattag

SEQ ID NO: 311372 - DNA, 1816 bp, Artificial Sequence
  derived and/or modified sequence
gtggggcgcatggagggctgctcttcacctatcgtggtgaagtttgctgacactcagaaggacaaagagcaaaggcgcctccagcagcagctcgctcagcagatgcagcagctcaacactgccacctgggggaacctgacagggctgggcggactgaccccacagtatctggcgctcctgcagcaggccacctcctccagcaacctgggtgcgttcagcggcattcaacaaatggcaggcatgaatgctttacagttgcagaacctggcgacgctggctgctgctgcagctgcggcccagacctcagccaccagcaccaatgcaaaccctctctctaccacgagcagcgccctgggagccctcacgagtcccgtggctgcttcaacccccaactccactgctggtgcagccatgaactccttgacctctctcgggactctgcaaggactggctggagccactgttggactgaataatattaatgcactagcaggtatggcggctctgaatggaggacttggcgccacaggcttgacgaatggcacggctggcaccatggacgccctcacccaggcctactcaggaattcaacagtacgcagccgccgcgctgcccactctgtacagccagagcctgctgcagcagcagagcgctgcaggcagccagaaggaaggtccagagggggcaaacctctttatttaccaccttccacaggaatttggagaccaggacattctgcagatgttcatgccttttggaaatgttatctctgctaaagtcttcattgacaaacagaccaatctgagcaagtgctttggttttgttagctacgacaatccagtctctgcacaagctgctatccaagctatgaatggctttcagatcggcatgaaacgcttgaaggtgcagctgaagcgttccaaaaacgacagcaaaccttactgatcctaaccccagaggctccctgctctcattttagctttcttaggacatcttcatgcccgttagttcatcgtttgcctagcatgtccctgtggcgtctcaaaaaaaagtttcatcgtcccgtcattgtttctgatgtctttctgacctcacatcatatttggttctcctactgacctttgatctagtttgacctttgaaatttgcatgtgacctcatctagctatgaattctgggaagtcaatgtgaaaaacattgctgcattcatgcaagactgaaatttattattagacaaattcattatagaaaaaacctgtggcaaaaacgtttctttcttattttttttcttttcctaaaacagacttgaaagtattatacagggattggcattcttcccggtcactggtaacaatagcaatatgtgtccagggacacagaatgttggtttctaacagactacttccaaaaacagtttgagaaaaaaactgtctgattttaagtctctagaggtctgtaatagtttttacatttttcaggcagtgtaaagttttttgataaggccattttaggtggctcactttctcattaagatatatatatagaaccactttttgtagattagtataagaaaaatatttaccctgttttggggcaaatgctacctatttgtgtcaccttttgctgaactcacagttagacaatccatggtttaatgcacatgaaattacctatattttatactgtttcaatgtacaggagaaaggttactgtaaactgtgttatgttggtgcttctgtgaattaagttgtggtttcatcatgagtcttaatgttctttgttgataagacaagtttagaattggtttacttaatac

SEQ ID NO: 311373 - protein, 585 aa, Artificial Sequence
  derived and/or modified sequence
MVIFTSLHRYVIFISCIIVINWYMSRVHGMHPKETTRQLSLAVKDGLIVETLTVGCKGSKAGIEQEGYWLPGDEIDWETENHDWYCFECHLPGEVLICDLCFRVYHSKCLSDEFRLRDSSSPWQCPVCRSIKKKNTNKQEMGTYLRFIVSRMKERAIDLNKKGKDNKHPMYRRLVHSAVDVPTIQEKVNEGKYRSYEEFKADAQLLLHNTVIFYGADSEQADIARMLYKDTCHELDELQLCKNCFYLSNARPDNWFCYPCIPNHELVWAKMKGFGFWPAKVMQKEDNQVDVRFFGHHHQRAWIPSENIQDITVNIHRLHVKRSMGWKKACDELELHQRFLREGRFWKSKNEDRGEEEAESSISSTSNEQLKVTQEPRAKKGRRNQSVEPKKEEPEPETEAVSSSQEIPTMPQPIEKVSVSTQTKKLSASSPRMLHRSTQTTNDGVCQSMCHDKYTKIFNDFKDRMKSDHKRETERVVREALEKLRSEMEEEKRQAVNKAVANMQGEMDRKCKQVKEKCKEEFVEEIKKLATQHKQLISQTKKKQWCYNCEEEAMYHCCWNTSYCSIKCQQEHWHAEHKRTCRRKR

SEQ ID NO: 311374 - DNA, 1689 bp, Artificial Sequence
  derived and/or modified sequence
atgagcagagtgcacggcatgcaccccaaggagaccaccagacagctgagcctggccgtgaaggacggcctgatcgtggagaccctgaccgtgggctgcaagggcagcaaggccggcatcgagcaggagggctactggctgcccggcgacgagatcgactgggagaccgagaaccacgactggtactgcttcgagtgccacctgcccggcgaggtgctgatctgcgacctgtgcttcagagtgtaccacagcaagtgcctgagcgacgagttcagactgagagacagcagcagcccctggcagtgccccgtgtgcagaagcatcaagaagaagaacaccaacaagcaggagatgggcacctacctgagattcatcgtgagcagaatgaaggagagagccatcgacctgaacaagaagggcaaggacaacaagcaccccatgtacagaagactggtgcacagcgccgtggacgtgcccaccatccaggagaaggtgaacgagggcaagtacagaagctacgaggagttcaaggccgacgcccagctgctgctgcacaacaccgtgatcttctacggcgccgacagcgagcaggccgacatcgccagaatgctgtacaaggacacctgccacgagctggacgagctgcagctgtgcaagaactgcttctacctgagcaacgccagacccgacaactggttctgctacccctgcatccccaaccacgagctggtgtgggccaagatgaagggcttcggcttctggcccgccaaggtgatgcagaaggaggacaaccaggtggacgtgagattcttcggccaccaccaccagagagcctggatccccagcgagaacatccaggacatcaccgtgaacatccacagactgcacgtgaagagaagcatgggctggaagaaggcctgcgacgagctggagctgcaccagagattcctgagagagggcagattctggaagagcaagaacgaggacagaggcgaggaggaggccgagagcagcatcagcagcaccagcaacgagcagctgaaggtgacccaggagcccagagccaagaagggcagaagaaaccagagcgtggagcccaagaaggaggagcccgagcccgagaccgaggccgtgagcagcagccaggagatccccaccatgccccagcccatcgagaaggtgagcgtgagcacccagaccaagaagctgagcgccagcagccccagaatgctgcacagaagcacccagaccaccaacgacggcgtgtgccagagcatgtgccacgacaagtacaccaagatcttcaacgacttcaaggacagaatgaagagcgaccacaagagagagaccgagagagtggtgagagaggccctggagaagctgagaagcgagatggaggaggagaagagacaggccgtgaacaaggccgtggccaacatgcagggcgagatggacagaaagtgcaagcaggtgaaggagaagtgcaaggaggagttcgtggaggagatcaagaagctggccacccagcacaagcagctgatcagccagaccaagaagaagcagtggtgctacaactgcgaggaggaggccatgtaccactgctgctggaacaccagctactgcagcatcaagtgccagcaggagcactggcacgccgagcacaagagaacctgcagaagaaagagatag

SEQ ID NO: 311375 - DNA, 1758 bp, Artificial Sequence
  derived and/or modified sequence
atggtgatcttcaccagcctgcacagatacgtgatcttcatcagctgcatcatcgtgatcaactggtacatgagcagagtgcacggcatgcaccccaaggagaccaccagacagctgagcctggccgtgaaggacggcctgatcgtggagaccctgaccgtgggctgcaagggcagcaaggccggcatcgagcaggagggctactggctgcccggcgacgagatcgactgggagaccgagaaccacgactggtactgcttcgagtgccacctgcccggcgaggtgctgatctgcgacctgtgcttcagagtgtaccacagcaagtgcctgagcgacgagttcagactgagagacagcagcagcccctggcagtgccccgtgtgcagaagcatcaagaagaagaacaccaacaagcaggagatgggcacctacctgagattcatcgtgagcagaatgaaggagagagccatcgacctgaacaagaagggcaaggacaacaagcaccccatgtacagaagactggtgcacagcgccgtggacgtgcccaccatccaggagaaggtgaacgagggcaagtacagaagctacgaggagttcaaggccgacgcccagctgctgctgcacaacaccgtgatcttctacggcgccgacagcgagcaggccgacatcgccagaatgctgtacaaggacacctgccacgagctggacgagctgcagctgtgcaagaactgcttctacctgagcaacgccagacccgacaactggttctgctacccctgcatccccaaccacgagctggtgtgggccaagatgaagggcttcggcttctggcccgccaaggtgatgcagaaggaggacaaccaggtggacgtgagattcttcggccaccaccaccagagagcctggatccccagcgagaacatccaggacatcaccgtgaacatccacagactgcacgtgaagagaagcatgggctggaagaaggcctgcgacgagctggagctgcaccagagattcctgagagagggcagattctggaagagcaagaacgaggacagaggcgaggaggaggccgagagcagcatcagcagcaccagcaacgagcagctgaaggtgacccaggagcccagagccaagaagggcagaagaaaccagagcgtggagcccaagaaggaggagcccgagcccgagaccgaggccgtgagcagcagccaggagatccccaccatgccccagcccatcgagaaggtgagcgtgagcacccagaccaagaagctgagcgccagcagccccagaatgctgcacagaagcacccagaccaccaacgacggcgtgtgccagagcatgtgccacgacaagtacaccaagatcttcaacgacttcaaggacagaatgaagagcgaccacaagagagagaccgagagagtggtgagagaggccctggagaagctgagaagcgagatggaggaggagaagagacaggccgtgaacaaggccgtggccaacatgcagggcgagatggacagaaagtgcaagcaggtgaaggagaagtgcaaggaggagttcgtggaggagatcaagaagctggccacccagcacaagcagctgatcagccagaccaagaagaagcagtggtgctacaactgcgaggaggaggccatgtaccactgctgctggaacaccagctactgcagcatcaagtgccagcaggagcactggcacgccgagcacaagagaacctgcagaagaaagagatag

SEQ ID NO: 311376 - DNA, 1689 bp, Artificial Sequence
  derived and/or modified sequence
atgagtcgggtccacggcatgcatccaaaagaaacaacccggcagctgagcctcgccgtgaaggatggacttattgtggaaacgttgacagttgggtgtaagggcagcaaagctggaatcgaacaggaaggctattggttgccaggcgatgaaattgactgggagacagagaaccatgactggtattgctttgaatgtcatttgccaggagaggtcctgatctgtgatctgtgctttagggtgtaccacagtaagtgtttgtcggatgaattcaggctccgtgactcatcaagcccctggcagtgtccagtgtgtaggagcatcaagaaaaaaaacaccaacaaacaggagatgggcacctacttaagattcattgtgagccgtatgaaggagagggcaatcgatctgaataaaaagggcaaagacaataagcatccaatgtaccggagactcgtccactccgccgttgacgttcctaccattcaggagaaagtaaatgaaggcaagtaccgcagctatgaagaattcaaagctgacgcgcaactgctgctccataacaccgtgatcttctatggggccgacagcgagcaagctgacatcgccagaatgctgtacaaggatacgtgccacgaactcgatgagctacaattatgcaaaaactgtttctatttgtctaatgctcggcctgataactggttctgttacccatgcataccaaaccacgagctcgtgtgggccaaaatgaagggcttcgggttctggcctgccaaagtgatgcagaaggaggacaatcaagtggacgtccgattcttcgggcatcatcaccagagggcttggatcccctctgagaacatccaggacatcaccgtgaatatccatcgactgcacgtcaagcggagtatgggctggaagaaggcttgcgacgaactggagctccaccagcgcttcctgcgcgaggggagattttggaaatcaaagaatgaggatcgcggcgaagaagaggcggaaagctccatctcttcaacctccaatgagcagctgaaggttacccaggaaccacgggcaaaaaagggcaggagaaaccagtcagtcgagcctaagaaggaggagccggagccagagacagaagctgtgagctcctcccaagagattcccacaatgccacaaccaattgaaaaggtgagcgtatccacccaaactaaaaagctgtctgcctccagtcctcggatgcttcatcgatcaactcagactaccaacgatggtgtctgtcagtccatgtgccacgataagtacaccaaaatctttaacgacttcaaggaccgcatgaagagcgatcataaaagggagacagagagagttgtgcgtgaggccctcgagaagctacggtctgagatggaggaggagaagcgacaggccgtcaacaaagccgtggctaatatgcagggagagatggatcgtaaatgtaaacaggtgaaagagaaatgcaaggaggaatttgtggaagagattaagaaattagcgacccaacacaagcagctcataagtcagaccaaaaagaaacagtggtgctacaattgcgaggaggaggccatgtaccattgttgctggaatacttcctattgttcgatcaaatgccagcaggagcactggcacgcagaacacaaacggacttgcagacgcaagaggtag

SEQ ID NO: 311377 - DNA, 1758 bp, Artificial Sequence
  derived and/or modified sequence
atggttatattcaccagcctgcaccgctacgtgattttcatctcgtgcatcatagtgatcaattggtatatgagtagagtacatggaatgcatcccaaagagacaacaagacaactcagcctcgctgtgaaggacgggcttattgtcgaaaccctcacagtcggctgcaagggctcaaaggccgggatcgagcaagaaggctactggttacctggcgatgagatcgactgggaaacagaaaatcacgattggtactgtttcgaatgtcatcttcccggagaggtgctcatttgcgacctgtgctttagagtttatcattcgaaatgtctgtcagatgagttcagactgcgggattcctcttcgccgtggcagtgcccagtttgccggtcaatcaagaagaaaaataccaataagcaggagatgggtacatatcttcgtttcatcgtcagccggatgaaggaacgagcaattgatttgaataagaaaggtaaggacaataagcatcctatgtacagaaggctggtccattctgcagtcgacgtgccaaccattcaagagaaggtgaatgaaggcaagtaccggagttatgaggaattcaaagctgatgcccagctgctcctacacaatacagtaattttttacggtgcggacagcgaacaggctgatattgcacgtatgctgtataaggatacatgtcacgagctcgacgaactgcagctttgtaagaactgcttttacctatccaatgcacgacctgacaactggttctgctacccgtgcatcccgaaccacgaattggtgtgggcaaagatgaagggattcggcttctggcccgctaaagttatgcagaaagaggataatcaggttgatgtaagattcttcggccaccaccaccagcgggcgtggatcccttctgagaatatccaggatattacagttaatatccacaggttgcacgtgaaaaggagtatgggctggaagaaggcctgcgacgagcttgaactgcaccaacgctttctgagagaaggaaggttttggaaaagtaagaatgaagaccgtggcgaggaagaagcagaatcttcgattagctcaaccagtaatgagcaactgaaggtgacccaggagccccgagccaagaagggcagacgcaaccaatctgtggagcctaagaaagaagaacccgagcccgaaacggaggccgtaagttcttctcaggagatccccaccatgccccagccaatcgagaaggtgtccgtgtctacccagacaaagaaactgagcgccagtagcccacggatgttacacagatcgacgcagacaacaaatgacggcgtatgccaatctatgtgtcacgataaatatacaaaaatcttcaatgatttcaaggaccgcatgaagtccgatcataaaagggaaaccgaaagggtcgtccgcgaagcattggagaagctccggagcgaaatggaggaagagaagcggcaggccgtaaacaaggccgttgcgaatatgcagggagagatggatcgcaagtgcaagcaagtcaaagagaagtgtaaggaggagtttgtggaggagattaagaagctcgccacacaacacaaacagctcatttctcagacaaaaaaaaaacagtggtgttacaattgtgaggaggaagctatgtatcattgctgttggaacacttcatactgcagcataaaatgtcaacaagagcactggcatgcggagcacaagcgcacgtgccgaaggaagaggtag

SEQ ID NO: 311378 - DNA, 1689 bp, Artificial Sequence
  derived and/or modified sequence
atgtctcgagtgcatggtatgcaccccaaagagacaactaggcagctgtccctggcggtgaaagatggtctcatcgtggagactctgacagtgggttgcaagggcagcaaggcaggtattgagcaggagggctattggttgccaggagacgaaattgactgggagacagaaaatcatgactggtactgcttcgagtgccatctgcccggcgaagtgctaatctgtgacctctgtttccgggtgtaccatagcaaatgcctgagcgatgaatttcgcctacgggattcctcctctccatggcagtgtccagtctgtcgctcaatcaagaaaaaaaataccaacaagcaagaaatgggcacctacttgcgcttcatcgtctcacgaatgaaagagagagctatcgatctaaataagaaggggaaagacaacaaacatcctatgtaccggcgcctggttcatagtgccgtcgatgtgccgaccatccaggagaaggtaaacgagggcaagtatcgcagctatgaagagtttaaggctgacgcgcagctgcttctgcacaatactgtcattttttacggggccgatagtgagcaggccgacatcgcccggatgctttataaagacacctgccatgagctggatgagctccagttgtgtaagaattgtttttacctttccaacgccaggcctgacaattggttctgctacccctgcatccctaatcacgaactggtctgggctaaaatgaagggtttcggcttttggccagccaaggttatgcaaaaagaggataatcaagtggatgtgcgtttcttcggccaccaccaccaaagggcctggatccccagtgagaacattcaagacattacagtgaatatccaccggctacacgtcaaacgttctatgggttggaagaaggcttgtgacgaactcgagctgcatcagaggttcctgagagaaggccgcttctggaaatcaaagaatgaagatcggggcgaagaggaagccgaaagctctattagctctacctctaatgagcaactgaaggtgacacaggaaccaagagctaagaagggccgtcgaaaccaaagcgtggaacccaaaaaagaagaacccgagccagaaaccgaggccgtttcaagctcccaggagatccctactatgccccagcctattgagaaggtctccgtgagtacccagacaaaaaagctctccgctagctccccgcgcatgctgcacaggtctacccagacgactaacgacggagtgtgccagtcgatgtgtcatgataaatataccaaaatctttaacgattttaaggatcggatgaagtccgaccataagcgggagacagagcgggttgtgcgcgaggcactcgagaagctcagatctgaaatggaagaagagaagcgacaggctgttaacaaagctgtggctaacatgcagggtgagatggaccgcaagtgcaaacaggttaaggagaaatgtaaagaggagttcgtggaggagattaaaaaactcgccactcaacataaacagctgatttcgcagacaaagaagaagcagtggtgttacaactgtgaagaagaagccatgtatcattgctgctggaatacaagctactgcagcatcaaatgccagcaagagcactggcacgcagagcataaaaggacctgtagacggaaaaggtag

SEQ ID NO: 311379 - DNA, 1689 bp, Artificial Sequence
  derived and/or modified sequence
atgagccgggtgcacggcatgcaccccaaggagaccacccggcagctgagcctggccgtgaaggatggcctgattgtggagaccctgactgtgggctgcaagggcagcaaggccggcatcgagcaggagggctactggctgcctggagatgaaattgactgggagacagaaaatcatgactggtactgctttgagtgccacctgcctggagaggtgctgatctgtgacctgtgcttccgggtgtaccacagcaagtgcctgagtgatgagttccggctgcgggacagcagcagcccctggcagtgccctgtgtgccgcagcatcaagaagaagaacaccaacaagcaggagatgggcacctacctgcgcttcatcgtgtccaggatgaaggagcgggccatcgacctgaacaagaagggcaaggacaacaagcaccccatgtacagaaggctggtgcacagcgctgtggatgtgcccaccatccaggagaaggtgaatgaaggcaagtaccgctcctatgaggagttcaaggcagatgcccagctgctgctgcacaacacagtcatcttctatggagctgacagcgagcaggccgacatcgccaggatgctgtacaaggacacctgccacgagctggatgagctgcagctgtgcaagaactgcttctacctgagcaatgcccggccagacaactggttctgctacccctgcatccccaaccacgagctggtgtgggccaagatgaagggcttcggcttctggccagccaaggtgatgcagaaggaggacaaccaggtggatgtgcgcttcttcggccaccaccaccagagggcctggatccccagcgagaacatccaggacatcaccgtgaacatccaccggctgcacgtgaagaggtccatgggctggaagaaggcctgtgatgagctggagctgcaccagcgcttcctgcgggagggccgcttctggaagagcaagaatgaagatagaggagaggaggaggccgagagcagcatcagcagcaccagcaatgagcagctgaaggtgacccaggagccccgggccaagaagggcagaagaaaccagagcgtggagcccaagaaggaggagcctgagcctgagacagaagctgtgagcagcagccaggagatccccaccatgccccagcccatcgagaaggtgtctgtgtccacccagaccaagaagctgagcgccagcagccccaggatgctgcacaggagcacccagaccaccaatgatggagtgtgccagagcatgtgccacgacaagtacaccaagatcttcaatgacttcaaggacaggatgaagagtgaccacaagcgggagacagagcgggtggtgcgggaggccctggagaagctgcggtctgagatggaggaggagaagaggcaggccgtgaacaaggctgtggccaacatgcagggcgagatggacaggaagtgcaagcaggtgaaggagaagtgcaaggaggagtttgtggaggagatcaagaagctggccacccagcacaagcagctgatcagccagaccaagaagaagcagtggtgctacaactgtgaggaggaggccatgtaccactgctgctggaacaccagctactgcagcatcaagtgccagcaggagcactggcacgccgagcacaagaggacctgcaggaggaagaggtag

SEQ ID NO: 311380 - DNA, 1758 bp, Artificial Sequence
  derived and/or modified sequence
atggtgatcttcaccagcctgcaccgctacgtgatcttcatcagctgcatcatcgtcatcaactggtacatgagccgggtgcacggcatgcaccccaaggagaccacccggcagctgagcctggccgtgaaggatggcctcatcgtggagaccctgactgtgggctgcaagggcagcaaggccggcatcgagcaggagggctactggctgcctggagatgaaattgactgggagacagagaaccacgactggtactgctttgagtgccacctgcccggggaggtgctgatctgtgacctgtgcttccgggtgtaccacagcaagtgcctgagtgatgagttccggctgcgggacagcagcagcccctggcagtgccctgtgtgccgcagcatcaagaagaagaacaccaacaagcaggagatgggcacctacctgcgcttcatcgtgtccaggatgaaggagcgggccatcgacctgaacaagaagggcaaggacaacaagcaccccatgtaccgccgcctggtgcacagcgctgtggatgtgcccaccatccaggagaaggtgaatgaaggcaagtaccgctcctatgaggagttcaaggcagatgcccagctgctgctgcacaacacagtcatcttctacggggctgacagcgagcaggccgacatcgccaggatgctgtacaaggacacctgccacgagctggatgagctgcagctgtgcaagaactgcttctacctgagcaatgcccggccagacaactggttctgctacccctgcatccccaaccacgagctggtgtgggccaagatgaagggcttcggcttctggccagccaaggtgatgcagaaggaggacaaccaggtggatgtgcgcttcttcggccaccaccaccagagggcctggatccccagcgagaacatccaggacatcaccgtgaacatccaccggctgcacgtgaagaggtccatgggctggaagaaggcctgtgatgagctggagctgcaccagcgcttcctgcgggagggccgcttctggaagagcaagaatgaagatagaggagaggaggaggccgagagcagcatcagcagcaccagcaatgagcagctgaaggtgacccaggagccccgggccaagaagggcagaagaaaccagagcgtggagcccaagaaggaggagcctgagcctgagacagaggccgtgagcagcagccaggagatccccaccatgccccagcccatcgagaaggtgtctgtgtccacccagaccaagaagctgagcgccagcagccccaggatgctgcacaggagcacccagaccaccaatgatggagtgtgccagagcatgtgccacgacaagtacaccaagatcttcaatgacttcaaggacaggatgaagagtgaccacaagcgggagacagagcgggtggtgcgggaggccctggagaagctgcggtctgagatggaggaggagaagaggcaggccgtgaacaaggctgtggccaacatgcagggcgagatggacaggaagtgcaagcaggtgaaggagaagtgcaaggaggagtttgtggaggagatcaagaagctggccacccagcacaagcagctgatcagccagaccaagaagaagcagtggtgctacaactgtgaggaggaggccatgtaccactgctgctggaacaccagctactgcagcatcaagtgccagcaggagcactggcatgctgagcacaagaggacctgcaggaggaagaggtag

SEQ ID NO: 311381 - DNA, 1689 bp, Artificial Sequence
  derived and/or modified sequence
atgagccgggtgcacggcatgcaccccaaggagaccacccggcagctcagcctagccgtgaaagatgggctgatagtcgagaccctaaccgtgggatgcaaaggtagcaaggctgggatcgagcaggagggttattggctgcccggggacgagatcgactgggagacagaaaaccatgattggtattgttttgaatgccacctgccaggagaagtgctgatctgcgacttgtgctttagggtttaccactctaagtgtttgagcgatgaattcaggctccgggactcctctagcccctggcagtgtccggtgtgccgaagcatcaagaaaaaaaacacgaacaaacaggagatgggaacttacctacgattcattgtaagccgaatgaaggagagagccatcgaccttaataaaaagggcaaggataataagcacccgatgtatagaagactggtgcattccgcagtagacgtgcccacaattcaggagaaagtgaacgaaggtaagtatagatcatatgaagaatttaaagccgacgcacagctgctcctccataacactgtgattttctacggggcagattctgagcaggccgacatcgctcgcatgctttacaaggatacgtgtcacgagctggacgagttgcaattgtgtaagaattgcttctatctgtccaatgcccggcctgataactggttttgttacccgtgcatccccaatcatgagctagtctgggcaaagatgaagggatttggattttggcccgcaaaggtaatgcagaaggaagataaccaagtggatgtgcgatttttcggccatcaccaccaaagggcgtggatcccaagcgagaacattcaggatattactgtcaatattcacagactgcacgtgaagaggtccatggggtggaagaaggcatgcgacgagctggagttgcatcagcggtttctgcgggagggcagattttggaagtcaaaaaatgaagaccggggagaggaagaagctgaatctagcatctcatctaccagcaacgaacaactgaaggtgacgcaggagcccagagccaagaaaggaaggaggaaccagtcagtagagccgaagaaggaggagccagaacctgaaacagaagccgtgagcagctctcaggagatccctacaatgccccaacccattgaaaaggtgtcagtttccactcagacaaagaaattaagcgcatctagcccgcggatgcttcacaggtctacacaaacaacaaacgacggggtttgtcagtcaatgtgtcatgataagtacactaaaatctttaacgatttcaaggaccgcatgaaatccgaccataaacgagaaacggagcgtgtagtcagagaggcactcgagaagctgagaagcgaaatggaggaggagaaaaggcaggctgtgaacaaggccgtggccaacatgcaaggagaaatggatcgaaaatgcaaacaggttaaagaaaaatgtaaggaggaatttgtggaggagattaaaaaacttgccacacagcataagcaacttatatcacagacgaaaaagaagcagtggtgttacaattgcgaggaggaggctatgtatcactgctgctggaacacctcttattgttccatcaagtgccagcaggagcactggcacgccgagcataaaaggacctgtagacgcaagaggtag

SEQ ID NO: 311382 - DNA, 1758 bp, Artificial Sequence
  derived and/or modified sequence
atggtgatcttcaccagcctgcaccggtacgtgatcttcatcagctgtataatagtgatcaactggtacatgagcagagtacacggaatgcacccgaaggagaccactagacagctgagcctggcggttaaggacggattgatcgtggaaacactgaccgtgggatgtaagggctcgaaggctggcatcgagcaggaggggtactggttacccggtgacgaaatcgactgggagactgagaatcatgactggtactgcttcgaatgtcatcttccgggagaagtcctcatctgcgatctgtgtttcagagtatatcattccaagtgtcttagcgatgagtttaggctgagagattcttctagcccttggcagtgccctgtttgtaggagcatcaaaaagaaaaacaccaacaagcaggagatgggaacatacctgcggttcatcgtctctagaatgaaggaaagggccatcgatctcaacaaaaagggaaaagacaataagcaccccatgtaccggcggctcgttcacagcgctgtcgacgttccaactatccaggagaaagtcaacgaaggaaagtaccggagttacgaggagtttaaggctgacgctcagctgctgctacataacacggtcattttctacggggccgacagcgagcaggccgacatcgctcggatgctgtacaaggatacttgccatgaactggacgagctgcagctctgcaaaaactgcttctacctttctaacgccaggcctgacaattggttttgctacccctgcatccctaatcatgaattggtgtgggccaaaatgaagggctttggcttttggccagctaaggtcatgcagaaggaggacaatcaggtggatgttcgtttcttcgggcaccaccaccagcgggcttggattccgtcagaaaacatccaggatataacagtgaatatccatcgtcttcacgtgaagcgttcaatgggctggaaaaaggcttgtgacgaactagagcttcaccagagatttctccgcgagggcaggttttggaaaagtaagaatgaagaccggggggaggaagaggccgaaagtagcatcagtagtacaagcaatgagcaactcaaggttacccaagaaccccgagcaaaaaaaggcagaaggaatcagtccgtcgagcctaagaaggaagaacctgaaccagagacagaagccgtttcaagctcccaagagatccctacaatgccccaaccaatcgagaaggtctctgtgtcaacccagacaaaaaaactgagtgcgagttcacctcgtatgctgcaccgctcgacgcagaccactaatgatggcgtctgccagtctatgtgccacgacaagtataccaagatttttaacgactttaaggatagaatgaagtcagaccataagcgggaaaccgagcgagtggtgagggaggcactcgagaagctccgatctgagatggaggaagagaaacggcaggcggtcaataaggcagtggcaaatatgcaaggcgaaatggacagaaaatgcaagcaggtgaaagagaagtgcaaagaagaattcgtggaagagatcaaaaagctagccactcagcataagcagctgattagccaaactaagaaaaagcagtggtgctataactgcgaggaggaagctatgtaccattgttgttggaacaccagctactgcagcataaaatgtcagcaagaacactggcacgcagaacataagcgtacatgtcgtcgcaaacggtag

SEQ ID NO: 311383 - DNA, 1689 bp, Artificial Sequence
  derived and/or modified sequence
atgagccgggtgcacggcatgcaccccaaggagaccacccggcagctgtctctggccgtcaaggatgggctgatagtcgagaccctgactgtaggctgtaagggttcaaaggccggaattgaacaagaggggtattggctcccaggggatgagattgattgggaaaccgagaatcatgactggtactgctttgagtgccacctccctggcgaggtactgatatgcgacctttgctttagagtgtaccattctaagtgtctaagcgatgagttccggcttcgagacagctctagtccgtggcagtgcccagtgtgccggagcatcaagaagaaaaatactaacaaacaggagatggggacatatcttcgcttcattgtctcaaggatgaaggagagagctatcgatctaaataagaaaggcaaggataacaagcaccccatgtataggcgccttgtgcactctgccgtagacgtgcctactatacaggaaaaagttaatgagggaaaatacaggtcgtacgaggagtttaaagccgacgctcagctgttacttcataacacggtgattttctacggcgctgattcagagcaggctgatatcgcaagaatgctatataaggacacatgccacgaactggatgagcttcagctgtgtaagaactgtttttatttgagtaacgcacggcccgataattggttctgctatccatgcatcccaaatcatgaattggtttgggctaaaatgaaggggtttggtttctggcccgccaaagtaatgcagaaggaggacaatcaagtagatgtgcgtttctttggacatcaccaccagagggcttggatcccttccgagaatattcaggacatcaccgtcaacattcatcgcttgcacgtgaagcggtctatggggtggaagaaagcctgcgacgagctggaattgcaccaaaggtttctgagggagggacgattttggaagagcaaaaatgaggaccgcggcgaggaggaggctgaatcctccataagcagtacttcaaacgagcaactgaaagtcacgcaggaaccgagggctaaaaaagggagaagaaaccagtcagtggaacccaaaaaggaggagccagaacccgagaccgaagctgtgtcgtccagccaggagattcctacaatgccacaacctattgaaaaggtttcagtttccacacagactaagaaactctccgcttccagtccaaggatgctacacagaagtacgcagaccactaatgatggtgtatgtcagagcatgtgtcatgacaagtacaccaagatcttcaatgactttaaagatcgcatgaaaagcgatcataaaagggagacagagagagtcgtgagagaagcgttggaaaagttacggagcgagatggaagaggaaaaacgtcaggccgtcaataaggccgtcgccaatatgcaaggggagatggatcggaaatgcaagcaggtgaaagagaagtgcaaagaggaattcgttgaggagattaagaagctcgccactcagcataaacagctgattagtcagacaaagaagaagcagtggtgttataactgtgaagaggaggcgatgtaccattgctgctggaatacctcttattgctcaatcaaatgtcagcaggagcattggcacgcagaacacaagcgcacatgccggcggaagcgatag

SEQ ID NO: 311384 - DNA, 1689 bp, Artificial Sequence
  derived and/or modified sequence
atgagtcgggtacacgggatgcaccccaaggagactacccgacaactcagccttgcagtgaaagatggactgattgtagaaaccctcaccgtgggatgtaagggatccaaggccggtatcgaacaggagggttactggcttccgggtgatgagatcgattgggagactgaaaaccacgactggtattgctttgagtgccacttgccgggagaagtgttaatatgtgacctatgcttccgggtttatcactccaaatgtctttccgacgaattcaggctgagagattcgagctccccatggcagtgcccagtatgtcggtccataaagaagaagaatactaacaagcaggagatggggacctacctcagattcattgtgtcaagaatgaaagagagagccatcgacctaaataagaaggggaaagataataaacatccaatgtacagaagactggttcactccgctgttgacgtgccaaccatccaagagaaggttaatgaagggaagtatcggtcttatgaggagttcaaggcagacgcacagctgcttcttcacaataccgtaattttctatggcgctgattctgaacaggccgacatcgccaggatgctctacaaagatacctgccatgaactagatgaactgcaactgtgtaagaactgtttttacctgagtaatgccagaccagacaactggttctgctacccgtgcattcctaaccacgaattagtgtgggctaaaatgaagggctttggcttctggccggctaaggtgatgcagaaagaggacaaccaagttgacgtccgtttcttcgggcaccaccatcagcgggcttggatcccttccgaaaacatccaggacatcactgtaaatatccatagactacatgtcaagcggtcaatgggatggaaaaaggcctgtgacgaattggaactccatcaacgcttcttgcgcgagggcaggttctggaaatcaaaaaatgaagatcgcggtgaggaagaggctgagagttcaataagcagcacctccaatgaacagttaaaggtgacgcaagaacccagggccaaaaaggggagaagaaatcagtcagtcgaacctaagaaagaggaacctgaacccgaaacagaagccgtaagctcaagtcaggagatccccacaatgcctcagcctatcgaaaaggtttccgtgagtacacagacaaagaaactttctgcctcctccccgagaatgctgcataggtctacccagaccacaaacgatggggtgtgtcagtctatgtgtcatgataagtatacaaagatcttcaatgacttcaaagacagaatgaaatccgatcacaagcgagaaaccgagagagtggtccgagaggcgttagagaagctgagatccgaaatggaagaggagaagaggcaggctgtgaataaggcagtggccaacatgcagggagagatggaccgcaaatgcaaacaagtaaaggaaaagtgcaaggaggaatttgtggaggaaatcaaaaagcttgccacacagcataagcagttaattagccagaccaagaagaagcagtggtgctataattgtgaggaggaagctatgtaccactgctgttggaacaccagttattgctcgatcaagtgccagcaggagcattggcacgctgagcataaaagaacctgtcgtcgcaaacggtag

SEQ ID NO: 311385 - DNA, 1758 bp, Artificial Sequence
  derived and/or modified sequence
atggtgatttttacgagtctgcacaggtacgtgattttcatctcctgtatcatagttataaactggtacatgagccgtgtgcacggtatgcatccaaaggagaccactcgacagctaagcctcgctgtgaaagacggtcttattgttgagactttgactgtagggtgcaagggatcaaaagcgggaatcgaacaggagggatactggttgcctggtgatgaaatcgattgggaaactgagaatcatgactggtattgtttcgagtgccaccttcccggagaggtgttgatttgtgacctgtgcttcagggtctatcacagcaaatgcttgtcagacgagtttcgtctgagggactcaagttccccatggcagtgccccgtctgtcggtccatcaaaaagaaaaatacgaataagcaggagatgggcacttacctcagattcatcgtttcccggatgaaggagcgagccatcgatttgaataaaaagggtaaggacaataagcatccaatgtatcgcaggctagtccactctgccgtcgacgtaccaaccatacaggagaaggtaaatgaggggaaataccgttcttatgaggagttcaaggccgatgcccagctgcttctccataatactgtgatcttttatggggctgattcggagcaggctgacattgcccgtatgctttataaggacacatgccacgaactggatgagctgcaattatgcaagaattgcttttacttgagcaacgccagacctgacaactggttctgttacccttgtatccctaaccatgaactggtctgggcaaaaatgaaggggtttggattttggccagcgaaggttatgcagaaggaggataatcaggttgatgtacggttcttcgggcatcatcatcagagagcttggataccctctgaaaatatccaggacataaccgttaacatccatcgcttgcatgttaagcggagtatgggctggaagaaggcttgtgatgaactcgaactccaccagagatttcttagagagggcagattctggaagagcaaaaacgaggataggggcgaggaagaggccgaatctagcatatcatctactagcaacgagcagctcaaagtgacacaagaaccacgggctaaaaagggacgcaggaatcagtctgtagaacctaagaaggaagaacctgagccagagacagaggccgtgtcctcctctcaagagattccaacaatgcctcagcccatcgaaaaagtaagcgtgagcacgcagactaagaagctgtctgcgtcatcaccacgaatgttacaccgaagcacccagacaaccaacgatggggtgtgtcagtctatgtgccatgacaagtacacaaaaattttcaatgacttcaaggaccggatgaagtcagatcataaacgggagaccgagagggtagttagggaggccctggagaaattaagaagcgaaatggaggaggagaagcgacaggcagtgaataaggctgtggccaacatgcagggcgagatggacaggaagtgtaagcaagtgaaagagaaatgcaaggaggagtttgtggaagagatcaagaagctggccacacaacacaagcaactgatatctcagaccaagaagaaacagtggtgctacaattgcgaagaagaggccatgtaccattgctgctggaacaccagttattgtagcatcaaatgccaacaggaacattggcatgctgagcataaacggacttgccgccgaaaacgctag

SEQ ID NO: 311386 - DNA, 1689 bp, Artificial Sequence
  derived and/or modified sequence
atgagtcgagtgcacggcatgcatcccaaggagactacccgccagctttccttggcagtgaaagacgggctgattgtggagactctgacggtgggttgtaaaggaagcaaagccggaattgagcaggagggatactggctccccggtgacgagatcgactgggagaccgagaatcatgactggtattgcttcgagtgccatctgcccggagaagtgctcatttgcgatctctgttttagggtgtatcactctaaatgtctgtctgatgaattcagattgagggactcttccagcccgtggcagtgtcctgtgtgtagatccattaaaaaaaaaaacaccaacaagcaggaaatggggacctacttgcggttcattgtgtcacgaatgaaggagcgggctatcgaccttaacaaaaaaggaaaagacaacaaacatcctatgtatcggaggctggtgcattccgccgtggatgtaccgaccatacaagagaaagttaatgagggtaagtaccgctcgtatgaggagttcaaggcggatgcccagctgctcctgcacaatactgtcattttttatggagcggatagcgaacaggccgacatcgccagaatgctgtacaaagatacctgtcacgagctggatgagctacagctatgtaagaattgtttctatttaagcaacgctaggccagacaactggttctgttatccttgtatccccaaccacgagctggtctgggcaaagatgaaagggttcggcttctggcctgccaaggtgatgcagaaagaagacaaccaagttgatgtgcgatttttcgggcaccatcatcagagggcttggattccaagcgagaacatccaggatattacagtgaatatccatcgcctccacgtcaagagatcaatggggtggaagaaggcctgcgacgagctcgagctgcatcagagattcctgagagaggggcgtttctggaaaagtaaaaacgaggaccgcggagaagaggaagctgagtccagtatctctagcacttccaatgaacagctgaaagtaacccaggagccccgtgctaagaaagggaggcggaaccagtcagtagagcctaaaaaagaggaaccggagcctgagaccgaggcagtgagttcttcccaggagatacccactatgccccagcctatcgaaaaagtttctgtcagcacacagacaaaaaaattatcagcatcctctcccaggatgctgcacaggtctacccagactaccaatgatggtgtgtgtcagtctatgtgccacgacaaatacacgaaaatcttcaatgattttaaggatcggatgaaatccgatcacaagcgggagacggaaagagtggttagggaagcgctggagaagctgcgctccgaaatggaggaggagaaaagacaggcagtcaataaggcagtcgcgaacatgcagggcgagatggataggaaatgcaaacaggtgaaagaaaaatgcaaagaagaatttgttgaagaaatcaaaaagttggcaacacaacacaagcaactaatctcccagacaaaaaaaaagcagtggtgctataactgtgaagaggaggccatgtatcactgttgctggaacacttcctactgtagtatcaagtgccagcaagaacattggcatgctgaacataaacggacatgtcgcaggaagagatag

SEQ ID NO: 311387 - DNA, 2709 bp, Artificial Sequence
  derived and/or modified sequence
ctaaagaagtaaacaggtcatggcacgtttaacaaaaagacgacaggcggatacaaaagctatccagcatctttgggcagccattgagattatacggaaccagaagcagattgccaacattgaccgtattacaaaatgtgaaacaactacattattcttgaacctatggtgatttttacatcattacacagatatgtcattttcattagttgtatcattgttataaactggtatatgtctcgagtccacggtatgcaccctaaagagaccacccgtcagctgagcttagctgtgaaagatggtcttattgtcgaaactctaacagtgggctgcaaaggttcaaaagctggtattgaacaagaaggatattggttgccaggagatgagattgactgggaaacagaaaatcatgactggtattgttttgaatgccatttgcctggagaggtgttgatatgtgacctgtgttttcgtgtgtatcattccaagtgtttgtctgatgagttcaggcttagagacagcagtagtccctggcagtgcccagtttgcaggagcattaagaagaagaatacaaacaaacaggagatgggcacatacctcagattcattgtctcccgcatgaaggagagggctatagatcttaataaaaaggggaaggacaataaacacccgatgtacaggaggctggtgcactcagctgtggacgttcccaccattcaagagaaagtgaatgaagggaaataccgaagttatgaagagttcaaagctgatgcccaattgcttctccacaataccgtgattttctatggagcagacagtgagcaagctgacattgcgaggatgctatataaagacacatgtcatgagctggatgaactgcagctttgcaagaattgcttttacttgtcaaatgctcgtcctgacaactggttctgttatccttgtatacctaatcatgagctggtttgggctaaaatgaaaggttttgggttttggccagccaaagtcatgcagaaagaagacaatcaagtcgacgttcgcttctttggccaccaccaccagagggcctggattccttctgaaaacattcaagatatcacagtcaacattcatcggctgcacgtgaagcgcagtatgggttggaaaaaggcctgtgatgagctggagctgcatcagcgtttcctacgagaagggagattttggaaatctaagaatgaggaccgaggtgaggaagaggcagaatccagtatctcctccaccagtaatgagcagctaaaggtcactcaagaaccaagagcaaagaaaggacgacgtaatcaaagtgtggagcccaaaaaggaagaaccagagcctgaaacagaagcagtaagttctagccaggaaatacccacgatgcctcagcccatcgaaaaagtctccgtgtcaactcagacaaagaagttaagtgcctcttcaccaagaatgctgcatcggagcacccagaccacaaacgacggcgtgtgtcagagcatgtgccatgacaaatacaccaagatcttcaatgacttcaaagaccggatgaagtcggaccacaagcgggagacagagcgtgttgtccgagaagctctggagaagctgcgttctgaaatggaagaagaaaagagacaagctgtaaataaagctgtagccaacatgcagggtgagatggacagaaaatgtaagcaagtaaaggaaaagtgtaaggaagaatttgtagaagaaatcaagaagctggcaacacagcacaagcaactgatttctcagaccaagaagaagcagtggtgctacaactgtgaggaggaggccatgtaccactgctgctggaacacatcctactgctccatcaagtgccagcaggagcactggcacgcggagcacaagcgcacctgccgccggaaaagatgaagctggcccttcccggagtcaccccgatgattactcttttcagacacagcggtttttgtttccaagaagccaaaattgtttagaatttgcttcccattttgcaccagcctttaaacacttttcgtgaagaaattttgcacagtagtttaaatcttttgttaatgctcctccgaagtttttcagggggtaaaagtaacatcagtggagggtattattttaaataaattttaattgagaatttgttgcattttcagcaaattttaaaacatttttaggttttacagagattttaacctttaaacaacagatctttaaaaaacaggtgaatacaagtgagtttaacaaagaaacatttagaatagatctgaatgtaagaactacagaactgtttcagaaataaaacatactaccttgatgtgacatttttttcttaaccttgttgagctggttttgttcagcttaatttactgttcaaaggcattatctgttggtcacaccagtgggtatatgattgaatttagggaacagggttgacacagcagggctagtcctgcatattttttcttaaatatttcccaattgtgtttttcattatttcttttcaatatataacttttataacaaattattagctttgatcttgtagtttaaaattgcagggaactggggtaatcttttactgagctggatcttagagaaaatgaatatttaaattttaaagtttgcacatttcatctttgtcctaacatgagtgcttgtaacaaaataaacaacaaaaacaaagcc

SEQ ID NO: 311388 - DNA, 2683 bp, Artificial Sequence
  derived and/or modified sequence
gctaaagaagtaaacaggtcatggcacgtttaacaaaaagacgacaggcggatacaaaagctatccagcatctttgggcagccattgagattatacggaaccagaagcagattgccaacattgaccgtattacaaaatgtgaaacaactacattattcttgaacctatggtgatttttacatcattacacagatatgtcattttcattagttgtatcattgttataaactggtatatgtctcgagtccacggtatgcaccctaaagagaccacccgtcagctgagcttagctgtgaaagatggtcttattgtcgaaactctaacagtgggctgcaaaggttcaaaagctggtattgaacaagaaggatattggttgccaggagatgagattgactgggaaacagaaaatcatgactggtattgttttgaatgccatttgcctggagaggtgttgatatgtgacctgtgttttcgtgtgtatcattccaagtgtttgtctgatgagttcaggcttagagacagcagtagtccctggcagtgcccagtttgcaggagcattaagaagaagaatacaaacaaacaggagatgggcacatacctcagattcattgtctcccgcatgaaggagagggctatagatcttaataaaaaggggaaggacaataaacacccgatgtacaggaggctggtgcactcagctgtggacgttcccaccattcaagagaaagtgaatgaagggaaataccgaagttatgaagagttcaaagctgatgcccaattgcttctccacaataccgtgattttctatggagcagacagtgagcaagctgacattgcgaggatgctatataaagacacatgtcatgagctggatgaactgcagctttgcaagaattgcttttacttgtcaaatgctcgtcctgacaactggttctgttatccttgtatacctaatcatgagctggtttgggctaaaatgaaaggttttgggttttggccagccaaagtcatgcagaaagaagacaatcaagtcgacgttcgcttctttggccaccaccaccagagggcctggattccttctgaaaacattcaagatatcacagtcaacattcatcggctgcacgtgaagcgcagtatgggttggaaaaaggcctgtgatgagctggagctgcatcagcgtttcctacgagaagggagattttggaaatctaagaatgaggaccgaggtgaggaagaggcagaatccagtatctcctccaccagtaatgagcagctaaaggtcactcaagaaccaagagcaaagaaaggacgacgtaatcaaagtgtggagcccaaaaaggaagaaccagagcctgaaacagaagcagtaagttctagccaggaaatacccacgatgcctcagcccatcgaaaaagtctccgtgtcaactcagacaaagaagttaagtgcctcttcaccaagaatgctgcatcggagcacccagaccacaaacgacggcgtgtgtcagagcatgtgccatgacaaatacaccaagatcttcaatgacttcaaagaccggatgaagtcggaccacaagcgggagacagagcgtgttgtccgagaagctctggagaagctgcgttctgaaatggaagaagaaaagagacaagctgtaaataaagctgtagccaacatgcagggtgagatggacagaaaatgtaagcaagtaaaggaaaagtgtaaggaagaatttgtagaagaaatcaagaagctggcaacacagcacaagcaactgatttctcagaccaagaagaagcagtggtgctacaactgtgaggaggaggccatgtaccactgctgctggaacacatcctactgctccatcaagtgccagcaggagcactggcacgcggagcacaagcgcacctgccgccggaaaagatgaagctggcccttcccggagtcaccccgatgattactcttttcagacacagcggtttttgtttccaagaagccaaaattgtttagaatttgcttcccattttgcaccagcctttaaacacttttcgtgaagaaattttgcacagtagtttaaatcttttgttaatgctcctccgaagtttttcagggggtaaaagtaacatcagtggagggtattattttaaataaattttaattgagaatttgttgcattttcagcaaattttaaaacatttttaggttttacagagattttaacctttaaacaacagatctttaaaaaacaggtgaatacaagtgagtttaacaaagaaacatttagaatagatctgaatgtaagaactacagaactgtttcagaaataaaacatactaccttgatgtgacatttttttcttaaccttgttgagctggttttgttcagcttaatttactgttcaaaggcattatctgttggtcacaccagtgggtatatgattgaatttagggaacagggttgacacagcagggctagtcctgcatattttttcttaaatatttcccaattgtgtttttcattatttcttttcaatatataacttttataacaaattattagctttgatcttgtagtttaaaattgcagggaactggggtaatcttttactgagctggatcttagagaaaatgaatatttaaattttaaagtttgcacatttcatctttgtcctaacatgagtgcttgt

SEQ ID NO: 311389 - protein, 397 aa, Artificial Sequence
  derived and/or modified sequence
MGTYLRFIVSRMKERAIDLNKKGKDNKHPMYRRLVHSAVDVPTIQELDELQLCKNCFYLSNARPDNWFCYPCIPNHELVWAKMKGFGFWPAKVMQKEDNQVDVRFFGHHHQRAWIPSENIQDITVNIHRLHVKRSMGWKKACDELELHQRFLREGRFWKSKNEDRGEEEAESSISSTSNEQLKVTQEPRAKKGRRNQSVEPKKEEPEPETEAVSSSQEIPTMPQPIEKVSVSTQTKKLSASSPRMLHRSTQTTNDGVCQSMCHDKYTKIFNDFKDRMKSDHKRETERVVREALEKLRSEMEEEKRQAVNKAVANMQGEMDRKCKQVKEKCKEEFVEEIKKLATQHKQLISQTKKKQWCYNCEEEAMYHCCWNTSYCSIKCQQEHWHAEHKRTCRRKR

SEQ ID NO: 311390 - DNA, 1194 bp, Artificial Sequence
  derived and/or modified sequence
atgggcacctacctgagattcatcgtgagcagaatgaaggagagagccatcgacctgaacaagaagggcaaggacaacaagcaccccatgtacagaagactggtgcacagcgccgtggacgtgcccaccatccaggagctggacgagctgcagctgtgcaagaactgcttctacctgagcaacgccagacccgacaactggttctgctacccctgcatccccaaccacgagctggtgtgggccaagatgaagggcttcggcttctggcccgccaaggtgatgcagaaggaggacaaccaggtggacgtgagattcttcggccaccaccaccagagagcctggatccccagcgagaacatccaggacatcaccgtgaacatccacagactgcacgtgaagagaagcatgggctggaagaaggcctgcgacgagctggagctgcaccagagattcctgagagagggcagattctggaagagcaagaacgaggacagaggcgaggaggaggccgagagcagcatcagcagcaccagcaacgagcagctgaaggtgacccaggagcccagagccaagaagggcagaagaaaccagagcgtggagcccaagaaggaggagcccgagcccgagaccgaggccgtgagcagcagccaggagatccccaccatgccccagcccatcgagaaggtgagcgtgagcacccagaccaagaagctgagcgccagcagccccagaatgctgcacagaagcacccagaccaccaacgacggcgtgtgccagagcatgtgccacgacaagtacaccaagatcttcaacgacttcaaggacagaatgaagagcgaccacaagagagagaccgagagagtggtgagagaggccctggagaagctgagaagcgagatggaggaggagaagagacaggccgtgaacaaggccgtggccaacatgcagggcgagatggacagaaagtgcaagcaggtgaaggagaagtgcaaggaggagttcgtggaggagatcaagaagctggccacccagcacaagcagctgatcagccagaccaagaagaagcagtggtgctacaactgcgaggaggaggccatgtaccactgctgctggaacaccagctactgcagcatcaagtgccagcaggagcactggcacgccgagcacaagagaacctgcagaagaaagagatag

SEQ ID NO: 311391 - DNA, 1194 bp, Artificial Sequence
  derived and/or modified sequence
atggggacttacttgaggttcattgtctctagaatgaaagaaagagctatcgacctgaataagaaagggaaagataataagcaccctatgtaccggcggctggtgcactcagctgtggacgtgcctacaattcaggaactggatgagcttcagctctgcaagaactgcttctatttatccaacgctcggcccgacaattggttctgctatccttgcattcctaaccatgagctcgtctgggccaagatgaagggattcggattttggcctgctaaagtcatgcagaaagaggacaaccaggttgatgtcaggttctttggacaccatcaccagagagcctggataccttccgaaaacatccaggatataaccgtgaacatccaccgcctgcatgtcaaaagatcaatgggttggaagaaagcatgtgacgaattggagctccaccagagatttttacgcgagggcaggttctggaaatcgaagaacgaggatagaggcgaggaggaggccgaatctagcatttcatcgacgtccaatgaacagctgaaggtgacccaggagccacgcgccaagaagggaaggcgcaatcagtctgtggaacctaagaaagaggaacccgagccagaaaccgaggccgtgtcatcaagtcaagagatcccaacgatgccacagcctattgagaaagtcagcgtgtctacccagactaagaaactgagcgcttcttctccacggatgctgcatcgctcgactcagacaaccaatgatggagtttgccagtcaatgtgccatgacaaatatactaaaatctttaatgatttcaaggaccggatgaagtccgaccataaaagagaaacggagcgagttgtgcgcgaggcactcgagaagctcaggagtgaaatggaggaagaaaaaagacaggcagttaataaagccgttgccaatatgcaaggcgaaatggatagaaaatgtaagcaggtgaaagaaaaatgcaaagaagaatttgtcgaagagataaaaaaactcgccacccaacacaagcagctcatctcccagaccaaaaagaaacagtggtgctataactgtgaagaggaggcaatgtatcattgctgctggaacacttcgtattgtagcatcaagtgccaacaggaacattggcacgcggagcataagcggacttgcagacgaaagagatag

SEQ ID NO: 311392 - DNA, 1194 bp, Artificial Sequence
  derived and/or modified sequence
atgggcacctacctgcgcttcatcgtgtccaggatgaaggagcgggccatcgacctgaacaagaagggcaaggacaacaagcaccccatgtaccgccgcctggtgcacagcgctgtggatgtgcccaccatccaggagctggatgagctgcagctgtgcaagaactgcttctacctgagcaatgcccggccagacaactggttctgctacccctgcatccccaaccacgagctggtgtgggccaagatgaagggcttcggcttctggccagccaaggtgatgcagaaggaggacaaccaggtggatgtgcgcttcttcggccaccaccaccagagggcctggatccccagcgagaacatccaggacatcaccgtgaacatccaccggctgcacgtgaagaggtccatgggctggaagaaggcctgtgatgagctggagctgcaccagcgcttcctgcgggagggccgcttctggaagagcaagaatgaagatagaggagaggaggaggccgagagcagcatcagcagcaccagcaatgagcagctgaaggtgacccaggagccccgggccaagaagggcagaagaaaccagagcgtggagcccaagaaggaggagcctgagcctgagacagaggccgtgagcagcagccaggagatccccaccatgccccagcccatcgagaaggtgtctgtgtccacccagaccaagaagctgagcgccagcagccccaggatgctgcacaggagcacccagaccaccaatgatggagtgtgccagagcatgtgccacgacaagtacaccaagatcttcaatgacttcaaggacaggatgaagagtgaccacaagcgggagacagagcgggtggtgcgggaggccctggagaagctgcggtctgagatggaggaggagaagaggcaggccgtgaacaaggctgtggccaacatgcagggcgagatggacaggaagtgcaagcaggtgaaggagaagtgcaaggaggagtttgtggaggagatcaagaagctggccacccagcacaagcagctgatcagccagaccaagaagaagcagtggtgctacaactgtgaggaggaggccatgtaccactgctgctggaacaccagctactgcagcatcaagtgccagcaggagcactggcatgctgagcacaagaggacctgcaggaggaagaggtag

SEQ ID NO: 311393 - DNA, 1194 bp, Artificial Sequence
  derived and/or modified sequence
atgggcacctacctgcggttcatcgtgagccggatgaaggagcgggctatcgatctgaacaaaaagggcaaggacaacaaacaccccatgtaccgccgacttgtgcacagtgctgtggatgtgccaaccatacaggagcttgacgagctccaactctgtaaaaactgcttctatctgagcaatgctcgcccagataattggttctgttatccctgtatccctaaccatgagttggtgtgggctaagatgaaggggttcgggttttggcccgcgaaggtcatgcagaaagaagacaaccaggtggacgtccgtttctttggccatcaccaccaaagggcctggatccctagcgagaacatacaagacattacggtgaacatacacaggctccatgtgaagcggtccatggggtggaagaaagcgtgcgacgaactcgaactgcatcagagattcctgagagaggggaggttctggaagtccaagaacgaagatagaggcgaggaggaagccgagagtagcattagctccacgtctaatgaacagttgaaagttacccaggagccacgggccaagaaggggaggaggaaccagtccgtcgagcctaagaaggaggaacccgaaccagagaccgaagcagtctcctcctcccaagagatcccaactatgccacaacccatcgaaaaggtctctgtctctacacaaactaaaaagctgtctgcttcttcccctagaatgcttcacagaagtacacagaccaccaacgatggagtgtgccagtccatgtgtcacgacaagtacactaagattttcaatgacttcaaggacagaatgaaaagcgatcataaacgagagaccgaacgtgtcgtgcgagaagctctcgagaaacttcggtccgaaatggaggaagagaagagacaggccgtgaataaagccgtcgcaaatatgcagggtgaaatggaccgaaaatgtaaacaggtcaaggaaaagtgtaaagaagagttcgtcgaagaaattaaaaaacttgctactcagcataagcagctgatctcacagactaaaaaaaagcagtggtgctacaattgtgaagaagaggccatgtatcactgctgctggaatacctcatactgttccatcaaatgtcagcaggaacactggcacgccgaacacaagcggacttgcagacgcaaaaggtag

SEQ ID NO: 311394 - DNA, 1194 bp, Artificial Sequence
  derived and/or modified sequence
atgggcacttatctgaggtttattgtgtctaggatgaaagagcgggcaatagacctaaacaagaaaggcaaggataataagcaccctatgtaccgcaggcttgtgcacagcgccgtggacgtcccaaccattcaggagttggacgagttgcagctgtgtaaaaattgcttctacttgtctaatgcccgtcccgacaactggttctgctatccatgtatcccaaaccacgaactggtatgggccaagatgaaaggattcggattctggccagccaaagtgatgcaaaaagaggataaccaagtggatgtgcgatttttcgggcatcaccaccagcgcgcttggattccctccgagaacatccaggatattacagtcaacattcacaggctccatgttaagcggagcatggggtggaagaaggcgtgcgacgaactagagctgcaccagcggtttctgagggagggacggttctggaagtcgaaaaatgaggaccgtggggaggaagaagctgagagtagcatatcaagtacaagtaacgagcagctcaaagttacgcaagaacccagagccaagaaaggccgaagaaaccagtcagtcgaacccaagaaagaagaaccagagccagagaccgaggccgtttcctccagtcaagaaatccccacaatgccacagcccatcgagaaagtgtcagtgtccacccagacaaagaagctgtctgcctcctctccacgtatgctccaccgatctactcagaccacgaatgatggagtgtgccagtctatgtgtcacgacaagtacaccaaaatctttaatgacttcaaggataggatgaaatccgaccataaacgcgagaccgagagagttgttcgcgaagcactggaaaaactgcgctcggaaatggaagaggaaaaacggcaagccgtgaataaggcagttgcgaacatgcagggggaaatggatagaaagtgcaagcaggtcaaagagaaatgcaaagaggagtttgtcgaagagataaaaaaactcgctactcaacataaacagctgattagccaaaccaagaagaagcaatggtgctacaattgcgaggaagaggcaatgtaccattgctgctggaacacctcttactgtagtattaagtgccagcaagagcattggcatgctgagcacaaacgcacttgtcggagaaagcggtag

SEQ ID NO: 311395 - DNA, 1427 bp, Artificial Sequence
  derived and/or modified sequence
tgaaagatggtcttattgtcgaaactctaacagtgggctgcaaaggttcaaaagctggtattgaacaagaaggatattggttgccaggagatgagattagcattaagaagaagaatacaaacaaacaggagatgggcacatacctcagattcattgtctcccgcatgaaggagagggctatagatcttaataaaaaggggaaggacaataaacacccgatgtacaggaggctggtgcactcagctgtggacgttcccaccattcaagagctggatgaactgcagctttgcaagaattgcttttacttgtcaaatgctcgtcctgacaactggttctgttatccttgtatacctaatcatgagctggtttgggctaaaatgaaaggttttgggttttggccagccaaagtcatgcagaaagaagacaatcaagtcgacgttcgcttctttggccaccaccaccagagggcctggattccttctgaaaacattcaagatatcacagtcaacattcatcggctgcacgtgaagcgcagtatgggttggaaaaaggcctgtgatgagctggagctgcatcagcgtttcctacgagaagggagattttggaaatctaagaatgaggaccgaggtgaggaagaggcagaatccagtatctcctccaccagtaatgagcagctaaaggtcactcaagaaccaagagcaaagaaaggacgacgtaatcaaagtgtggagcccaaaaaggaagaaccagagcctgaaacagaagcagtaagttctagccaggaaatacccacgatgcctcagcccatcgaaaaagtctccgtgtcaactcagacaaagaagttaagtgcctcttcaccaagaatgctgcatcggagcacccagaccacaaacgacggcgtgtgtcagagcatgtgccatgacaaatacaccaagatcttcaatgacttcaaagaccggatgaagtcggaccacaagcgggagacagagcgtgttgtccgagaagctctggagaagctgcgttctgaaatggaagaagaaaagagacaagctgtaaataaagctgtagccaacatgcagggtgagatggacagaaaatgtaagcaagtaaaggaaaagtgtaaggaagaatttgtagaagaaatcaagaagctggcaacacagcacaagcaactgatttctcagaccaagaagaagcagtggtgctacaactgtgaggaggaggccatgtaccactgctgctggaacacatcctactgctccatcaagtgccagcaggagcactggcacgcggagcacaagcgcacctgccgccggaaaagatgaagctggcccttcccggagtcaccccgatgattactcttttcagacacagcggtttttgtttccaagaagccaaaattgtttagaatttgcttcccattttgc

SEQ ID NO: 311396 - protein, 27 aa, Artificial Sequence
  derived and/or modified sequence
NPNWKRIRLNDGPFMPVLGFGTYAPDH

SEQ ID NO: 311397 - protein, 126 aa, Artificial Sequence
  derived and/or modified sequence
MDPKYQRVELNDGHFMPVLGFGTYAPPEVPRNRAVEVTKLAIEAGFRHIDSAYLYNNEEQVGLAIRSKIADGSVKREDIFYTSKLWCTFFQPQMVQPALESSLKKLQLDYVDLYLLHFPMALKSTT

SEQ ID NO: 311398 - protein, 132 aa, Artificial Sequence
  derived and/or modified sequence
MEYMSTGSDNKEEIDLLIKHLNVSDVIDIMENLYASEEPAVYEPSLMTMCQDSNQNDERSKSLLLSGQEVPWLSSVRYGTVEDLLAFANHISNTAKHFYGQRPQESGILLNMVRFFPISWVLCAQLSYCSFI

SEQ ID NO: 311399 - DNA, 3096 bp, Artificial Sequence
  derived and/or modified sequence
cgggcgcccagagggcaaatgaggggcggcggggtggcgggtcggggggagacgcggaatttcccagcgcgggggctctggcttaccctgcaaccgggcagtctctttctgtttacggagagaaaggggaaatggaaaagtcggggaggcggtggctggcgtccgctgcgccgcccctgggcaggctcagacgccgtgagtcaggggcagagcagggcggtctgagcgtgcgggcgacgcgggtctcactcgtccgctccgctctggactgcgcgccacgctctggggtccggcgccctggttcctgcttctgccgctgccgccgccggatcccagtggcccggcgtgctcggctcccacaggcctgcagccagcatcgcaccgaaccttcggggggccgcggctggagcgctcggccggcgtgggagcgccaaggccgcagatgcaatcttcttaccgcgaagaagccaggggaataggtagccacatcttgtttgcagataagaaaggaagctaacgcagtatctgcaaagccaggagtctgactcagtacttttctcactcatgcatacaaagcagctaaaaatgacacagcttatttaccatgcccctgacactgcactgagcactttatgagcttgaactctgttaatcctcacgaccacctcatgagactctccagaaagagcaacagtaatggagtacatgagcactggaagtgacaataaagaagagattgatttattaattaaacatttaaatgtgtctgatgtaatagacattatggaaaatctttatgcaagtgaagagccagcagtttatgaacccagtctaatgaccatgtgtcaagacagtaatcaaaacgatgagcgttctaagtctctgctgcttagtggccaagaggtaccatggttgtcatcagtcagatatggaactgtggaggatttgcttgcttttgcaaaccatatatccaacactgcaaagcatttttatggacaacgaccacaggaatctggaattttattaaacatggtcatcactccccaaaatggacgttaccaaatagattccgatgttctcctgatcccctggaagctgacttacaggaatattggttctgattttattcctcggggcgcctttggaaaggtatacttggcacaagatataaagacgaagaaaagaatggcgtgtaaactgatcccagtagatcaatttaagccatctgatgtggaaatccaggcttgcttccggcacgagaacatcgcagagctgtatggcgcagtcctgtggggtgaaactgtccatctctttatggaagcaggcgagggagggtctgttctggagaaactggagagctgtggaccaatgagagaatttgaaattatttgggtgacaaagcatgttctcaagggacttgattttctacactcaaagaaagtgatccatcatgatattaaacctagcaacattgttttcatgtccacaaaagctgttttggtggattttggcctaagtgttcaaatgaccgaagatgtctattttcctaaggacctccgaggaacagagatttacatgagcccagaggtcatcctgtgcaggggccattcaaccaaagcagacatctacagcctgggggccacgctcatccacatgcagacgggcaccccaccctgggtgaagcgctaccctcgctcagcctatccctcctacctgtacataatccacaagcaagcacctccactggaagacattgcagatgactgcagtccagggatgagagagctgatagaagcttccctggagagaaaccccaatcaccgcccaagagccgcagacctactaaaacatgaggccctgaacccgcccagagaggatcagccacgctgtcagagtctggactctgccctcttggagcgcaagaggctgctgagtaggaaggagctggaacttcctgagaacattgctgattcttcgtgcacaggaagcaccgaggaatctgagatgctcaagaggcaacgctctctctacatcgacctcggcgctctggctggctacttcaatcttgttcggggaccaccaacgcttgaatatggctgaaggatgccatgtttgctctaaattaagacagcattgatctcctggaggctggttctgctgcctctacacaggggccctgtacagtgaatggtgccattttcgaaggagcagtgtgacctcctgtgacccatgaatgtgcctccaagcggccctgtgtgtttgacatgtgaagctatttgatatgcaccaggtctcaaggttctcatttctcaggtgacgtgattctaaggcaggaatttgagagttcacagaaggatcgtgtctgctgactgtttcattcactgtgcactttgctcaaaattttaaaaataccaatcacaaggataatagagtagcctaaaattactattcttggttcttatttaagtatggaatattcattttactcagaatagctgttttgtgtatattggtgtatattatataactctttgagcctttattggtaaattctggtatacattgaattcattataatttgggtgactagaacaacttgaagattgtagcaataagctggactagtgtcctaaaaatggctaactgatgaattagaagccatctgacagcaggccactagtgacagtttcttttgtgttcctatggaaacattttatactgtacatgctatgctgaagacattcaaaacgtgatgttttgaatgtggataaaactgtgtaaaccacataatttttgtacatcccaaaggatgagaatgtgacctttaagaaaaatgaaaacttttgtaaattattgatgattttgtaattcttatgactaaattttcttttaagcatttgtatattaaaatagcatactgtgtatgttttatatcaaatgccttcatgaatctttcatacatatatatatttgtaacattgtaaagtatgtgagtagtcttatgtaaagtatgtttttacattatgcaaataaaacccaatacttttgtccaatgtggttggtcaaatcaactgaataaattcagtattttgcctt

SEQ ID NO: 311400 - DNA, 3096 bp, Artificial Sequence
  derived and/or modified sequence
cgggcgcccagagggcaaatgaggggcggcggggtggcgggtgggggggagacgcggaatttcccagcgcgggggctctggcttaccctgcaaccgggcagtctctttctgtttacggagagaaaggggaaatggaaaagtcggggaggcggtggctggcgtccgctgcgccgcccctgggcaggctcagacgccgtgagtcaggggcagagcagggcggtctgagcgtgcgggcgacgcgggtctcactcgtccgctccgctctggactgcgcgccacgctctggggtccggcgccctggttcctgcttctgccgctgccgccgccggatcccagtggcccggcgtgctcggctcccacaggcctgcagccagcatcgcaccgaaccttcggggggccgcggctggagcgctcggccggcgtgggagcgccaaggccgcagatgcaatcttcttaccgcgaagaagccaggggaataggtagccacatcttgtttgcagataagaaaggaagctaacgcagtatctgcaaagccaggagtctgactcagtacttttctcactcatgcatacaaagcagctaaaaatgacacagcttatttaccatgcccctgacactgcactgagcactttatgagcttgaactctgttaatcctcacgaccacctcatgagactctccagaaagagcaacagtaatggagtacatgagcactggaagtgacaataaagaagagattgatttattaattaaacatttaaatgtgtctgatgtaatagacattatggaaaatctttatgcaagtgaagagccagcagtttatgaacccagtctaatgaccatgtgtcaagacagtaatcaaaacgatgagcgttctaagtctctgctgcttagtggccaagaggtaccatggttgtcatcagtcagatatggaactgtggaggatttgcttgcttttgcaaaccatatatccaacactgcaaagcatttttatggacaacgaccacaggaatctggaattttattaaacatggtcatcactccccaaaatggacgttaccaaatagattccgatgttctcctgatcccctggaagctgacttacaggaatattggttctgattttattcctcggggcgcctttggaaaggtatacttggcacaagatataaagacgaagaaaagaatggcgtgtaaactgatcccagtagatcaatttaagccatctgatgtggaaatccaggcttgcttccggcacgagaacatcgcagagctgtatggcgcagtcctgtggggtgaaactgtccatctctttatggaagcaggcgagggagggtctgttctggagaaactggagagctgtggaccaatgagagaatttgaaattatttgggtgacaaagcatgttctcaagggacttgattttctacactcaaagaaagtgatccatcatgatattaaacctagcaacattgttttcatgtccacaaaagctgttttggtggattttggcctaagtgttcaaatgaccgaagatgtctattttcctaaggacctccgaggaacagagatttacatgagcccagaggtcatcctgtgcaggggccattcaaccaaagcagacatctacagcctgggggccacgctcatccacatgcagacgggcaccccaccctgggtgaagcgctaccctcgctcagcctatccctcctacctgtacataatccacaagcaagcacctccactggaagacattgcagatgactgcagtccagggatgagagagctgatagaagcttccctggagagaaaccccaatcaccgcccaagagccgcagacctactaaaacatgaggccctgaacccgcccagagaggatcagccacgctgtcagagtctggactctgccctcttggagcgcaagaggctgctgagtaggaaggagctggaacttcctgagaacattgctgattcttcgtgcacaggaagcaccgaggaatctgagatgctcaagaggcaacgctctctctacatcgacctcggcgctctggctggctacttcaatcttgttcggggaccaccaacgcttgaatatggctgaaggatgccatgtttgctctaaattaagacagcattgatctcctggaggctggttctgctgcctctacacaggggccctgtacagtgaatggtgccattttcgaaggagcagtgtgacctcctgtgacccgtgaatgtgcctccaagcggccctgtgtgtttgacatgtgaagctatttgatatgcaccaggtctcaaggttctcatttctcaggtgacgtgattctaaggcaggaatttgagagttcacagaaggatcgtgtctgctgactgtttcattcactgtgcactttgctcaaaattttaaaaataccaatcacaaggataatagagtagcctaaaattactattcttggttcttatttaagtatggaatattcattttactcagaatagctgttttgtgtatattggtgtatattatataactctttgagcctttattggtaaattctggtatacattgaattcattataatttgggtgactagaacaacttgaagattgtagcaataagctggactagtgtcctaaaaatggctaactgatgaattagaagccatctgacagcaggccactagtgacagtttcttttgtgttcctatggaaacattttatactgtacatgctatgctgaagacattcaaaacgtgatgttttgaatgtggataaaactgtgtaaaccacataatttttgtacatcccaaaggatgagaatgtgacctttaagaaaaatgaaaacttttgtaaattattgatgattttgtaattcttatgactaaattttcttttaagcatttgtatattaaaatagcatactgtgtatgttttatatcaaatgccttcatgaatctttcatacatatatatatttgtaacattgtaaagtatgtgagtagtcttatgtaaagtatgtttttacattatgcaaataaaacccaatacttttgtccaatgtggttggtcaaatcaactgaataaattcagtattttgcctt

SEQ ID NO: 311401 - DNA, 2518 bp, Artificial Sequence
  derived and/or modified sequence
aaatcctgttgccaatccttgtatgtcagtttcccatgggtcttgaatgcaaatacaaatatcgtaaactaaatatttgtgttttctttcctagactctccagaaagagcaacagtaatggagtacatgagcactggaagtgacaataaagaagagattgatttattaattaaacatttaaatgtgtctgatgtaatagacattatggaaaatctttatgcaagtgaagagccagcagtttatgaacccagtctaatgaccatgtgtcaagacagtaatcaaaacgatgagcgttctaagtctctgctgcttagtggccaagaggtaccatggttgtcatcagtcagatatggaactgtggaggatttgcttgcttttgcaaaccatatatccaacactgcaaagcatttttatggacaacgaccacaggaatctggaattttattaaacatggtcatcactccccaaaatggacgttaccaaatagattccgatgttctcctgatcccctggaagctgacttacaggaatattggttctgattttattcctcggggcgcctttggaaaggtatacttggcacaagatataaagacgaagaaaagaatggcgtgtaaactgatcccagtagatcaatttaagccatctgatgtggaaatccaggcttgcttccggcacgagaacatcgcagagctgtatggcgcagtcctgtggggtgaaactgtccatctctttatggaagcaggcgagggagggtctgttctggagaaactggagagctgtggaccaatgagagaatttgaaattatttgggtgacaaagcatgttctcaagggacttgattttctacactcaaagaaagtgatccatcatgatattaaacctagcaacattgttttcatgtccacaaaagctgttttggtggattttggcctaagtgttcaaatgaccgaagatgtctattttcctaaggacctccgaggaacagagatttacatgagcccagaggtcatcctgtgcaggggccattcaaccaaagcagacatctacagcctgggggccacgctcatccacatgcagacgggcaccccaccctgggtgaagcgctaccctcgctcagcctatccctcctacctgtacataatccacaagcaagcacctccactggaagacattgcagatgactgcagtccagggatgagagagctgatagaagcttccctggagagaaaccccaatcaccgcccaagagccgcagacctactaaaacatgaggccctgaacccgcccagagaggatcagccacgctgtcagagtctggactctgccctcttggagcgcaagaggctgctgagtaggaaggagctggaacttcctgagaacattgctgattcttcgtgcacaggaagcaccgaggaatctgagatgctcaagaggcaacgctctctctacatcgacctcggcgctctggctggctacttcaatcttgttcggggaccaccaacgcttgaatatggctgaaggatgccatgtttgctctaaattaagacagcattgatctcctggaggctggttctgctgcctctacacaggggccctgtacagtgaatggtgccattttcgaaggagcagtgtgacctcctgtgacccgtgaatgtgcctccaagcggccctgtgtgtttgacatgtgaagctatttgatatgcaccaggtctcaaggttctcatttctcaggtgacgtgattctaaggcaggaatttgagagttcacagaaggatcgtgtctgctgactgtttcattcactgtgcactttgctcaaaattttaaaaataccaatcacaaggataatagagtagcctaaaattactattcttggttcttatttaagtatggaatattcattttactcagaatagctgttttgtgtatattggtgtatattatataactctttgagcctttattggtaaattctggtatacattgaattcattataatttgggtgactagaacaacttgaagattgtagcaataagctggactagtgtcctaaaaatggctaactgatgaattagaagccatctgacagcaggccactagtgacagtttcttttgtgttcctatggaaacattttatactgtacatgctatgctgaagacattcaaaacgtgatgttttgaatgtggataaaactgtgtaaaccacataatttttgtacatcccaaaggatgagaatgtgacctttaagaaaaatgaaaacttttgtaaattattgatgattttgtaattcttatgactaaattttcttttaagcatttgtatattaaaatagcatactgtgtatgttttatatcaaatgccttcatgaatctttcatacatatatatatttgtaacattgtaaagtatgtgagtagtcttatgtaaagtatgtttttacattatgcaaataaaacccaatacttttgtccaatgtggttggtcaaatcaactgaataaattcagtattttgcctta

SEQ ID NO: 311402 - DNA, 893 bp, Artificial Sequence
  derived and/or modified sequence
cttctgccgctgccgccgccggatcccagtggcccggcgtgctcggctcccacaggcctgcagccagcatcgcaccgaaccttcggggggccgcggctggagcgctcggccggcgtgggagcgccaaggccgcagatgcaatcttcttaccgcgaagaagccaggggaataggtagccacatcttgtttgcagataagaaaggaagctaacgcagtatctgcaaagccaggagtctgactcagtacttttctcactcatgcatacaaagcagctaaaaatgacacagcttatttaccatgcccctgacactgcactgagcactttatgagcttgaactctgttaatcctcacgaccacctcatgagactctccagaaagagcaacagtaatggagtacatgagcactggaagtgacaataaagaagagattgatttattaattaaacatttaaatgtgtctgatgtaatagacattatggaaaatctttatgcaagtgaagagccagcagtttatgaacccagtctaatgaccatgtgtcaagacagtaatcaaaacgatgagcgttctaagtctctgctgcttagtggccaagaggtaccatggttgtcatcagtcagatatggaactgtggaggatttgcttgcttttgcaaaccatatatccaacactgcaaagcatttttatggacaacgaccacaggaatctggaattttattaaacatggtacgtttctttccgatcagttgggtgctatgtgctcagctttcctactgcagcttcatttaatgcagagtggtgtttgaatttggcttagatgggctggcaggcatgattttaaaaaatgtaatcatcagtaagaagtacttccatgttaaagatgcaaaaaaaaaa

SEQ ID NO: 311403 - DNA, 3090 bp, Artificial Sequence
  derived and/or modified sequence
cgggcgcccagagggcaaatgaggggcggcggggtggcgggtgggggggagacgcggaatttcccagcgcgggggctctggcttaccctgcaaccgggcagtctctttctgtttacggagagaaaggggaaatggaaaagtcggggaggcggtggctggcgtccgctgcgccgcccctgggcaggctcagacgccgtgagtcaggggcagagcagggcggtctgagcgtgcgggcgacgcgggtctcactcgtccgctccgctctggactgcgcgccacgctctggggtccggcgccctggttcctgcttctgccgctgccgccgccggatcccagtggcccggcgtgctcggctcccacaggcctgcagccagcatcgcaccgaaccttcggggggccgcggctggagcgctcggccggcgtgggagcgccaaggccgcagatgcaatcttcttaccgcgaagaagccaggggaataggtagccacatcttgtttgcagataagaaaggaagctaacgcagtatctgcaaagccaggagtctgactcagtacttttctcactcatgcatacaaagcagctaaaaatgacacagcttatttaccatgcccctgacactgcactgagcactttatgagcttgaactctgttaatcctcacgaccaccactctccagaaagagcaacagtaatggagtacatgagcactggaagtgacaataaagaagagattgatttattaattaaacatttaaatgtgtctgatgtaatagacattatggaaaatctttatgcaagtgaagagccagcagtttatgaacccagtctaatgaccatgtgtcaagacagtaatcaaaacgatgagcgttctaagtctctgctgcttagtggccaagaggtaccatggttgtcatcagtcagatatggaactgtggaggatttgcttgcttttgcaaaccatatatccaacactgcaaagcatttttatggacaacgaccacaggaatctggaattttattaaacatggtcatcactccccaaaatggacgttaccaaatagattccgatgttctcctgatcccctggaagctgacttacaggaatattggttctgattttattcctcggggcgcctttggaaaggtatacttggcacaagatataaagacgaagaaaagaatggcgtgtaaactgatcccagtagatcaatttaagccatctgatgtggaaatccaggcttgcttccggcacgagaacatcgcagagctgtatggcgcagtcctgtggggtgaaactgtccatctctttatggaagcaggcgagggagggtctgttctggagaaactggagagctgtggaccaatgagagaatttgaaattatttgggtgacaaagcatgttctcaagggacttgattttctacactcaaagaaagtgatccatcatgatattaaacctagcaacattgttttcatgtccacaaaagctgttttggtggattttggcctaagtgttcaaatgaccgaagatgtctattttcctaaggacctccgaggaacagagatttacatgagcccagaggtcatcctgtgcaggggccattcaaccaaagcagacatctacagcctgggggccacgctcatccacatgcagacgggcaccccaccctgggtgaagcgctaccctcgctcagcctatccctcctacctgtacataatccacaagcaagcacctccactggaagacattgcagatgactgcagtccagggatgagagagctgatagaagcttccctggagagaaaccccaatcaccgcccaagagccgcagacctactaaaacatgaggccctgaacccgcccagagaggatcagccacgctgtcagagtctggactctgccctcttggagcgcaagaggctgctgagtaggaaggagctggaacttcctgagaacattgctgattcttcgtgcacaggaagcaccgaggaatctgagatgctcaagaggcaacgctctctctacatcgacctcggcgctctggctggctacttcaatcttgttcggggaccaccaacgcttgaatatggctgaaggatgccatgtttgctctaaattaagacagcattgatctcctggaggctggttctgctgcctctacacaggggccctgtacagtgaatggtgccattttcgaaggagcagtgtgacctcctgtgacccgtgaatgtgcctccaagcggccctgtgtgtttgacatgtgaagctatttgatatgcaccaggtctcaaggttctcatttctcaggtgacgtgattctaaggcaggaatttgagagttcacagaaggatcgtgtctgctgactgtttcattcactgtgcactttgctcaaaattttaaaaataccaatcacaaggataatagagtagcctaaaattactattcttggttcttatttaagtatggaatattcattttactcagaatagctgttttgtgtatattggtgtatattatataactctttgagcctttattggtaaattctggtatacattgaattcattataatttgggtgactagaacaacttgaagattgtagcaataagctggactagtgtcctaaaaatggctaactgatgaattagaagccatctgacagcaggccactagtgacagtttcttttgtgttcctatggaaacattttatactgtacatgctatgctgaagacattcaaaacgtgatgttttgaatgtggataaaactgtgtaaaccacataatttttgtacatcccaaaggatgagaatgtgacctttaagaaaaatgaaaacttttgtaaattattgatgattttgtaattcttatgactaaattttcttttaagcatttgtatattaaaatagcatactgtgtatgttttatatcaaatgccttcatgaatctttcatacatatatatatttgtaacattgtaaagtatgtgagtagtcttatgtaaagtatgtttttacattatgcaaataaaacccaatacttttgtccaatgtggttggtcaaatcaactgaataaattcagtattttgcctta

SEQ ID NO: 311404 - DNA, 776 bp, Artificial Sequence
  derived and/or modified sequence
cgcggggaagcggggacccgctgtcactgcgcctcccgctgccgacgccgcctggacggccgcactctccctgcccgagacccgactctccagaaagagcaacagtaatggagtacatgagcactggaagtgacaataaagaagagattgatttattaattaaacatttaaatgtgtctgatgtaatagacattatggaaaatctttatgcaagtgaagagccagcagtttatgaacccagtctaatgaccatgtgtcaagacagtaatcaaaacgatgagcgttctaagtctctgctgcttagtggccaagaggtaccatggttgtcatcagtcagatatggaactgtggaggatttgcttgcttttgcaaaccatatatccaacactgcaaagcatttttatggacaacgaccacaggaatctggaattttattaaacatggtcatcactccccaaaatggacgttaccaaatagattccgatgttctcctgatcccctggaagctgacttacaggaatattggttctgattttattcctcggggcgcctttggaaaggtatacttggcacaagatataaagacgaagaaaagaatggcgtgtaaactgatcccagtagatcaatttaagccatctgatgtggaaatccaggcttgcttccggcacgagaacatcgcagagctgtatggcgcagtcctgtggggtgaaactgtccatctctttatggaagcaggcgagggagggtctgttctggagaaactggagagctgtgga

SEQ ID NO: 311405 - DNA, 1682 bp, Artificial Sequence
  derived and/or modified sequence
cagacgccgtgagtcaggggcagagcagggcggtctgagcgtgcgggcgacgcgggtctcactcgtccgctccgctctggactgcgcgccacgctctggggtccggcgccctggttcctgcttctgccgctgccgccgccggatcccagtggcccggcgtgctcggctcccacaggcctgcagccagcatcgcaccgaaccttcggggggccgcggctggagcgctcggccggcgtgggagcgccaaggccgcagactctccagaaagagcaacagtaatggagtacatgagcactggaagtgacaataaagaagagattgatttattaattaaacatttaaatgtgtctgatgtaatagacattatggaaaatctttatgcaagtgaagagccagcagtttatgaacccagtctaatgaccatgtgtcaagacagtaatcaaaacgatgagcgttctaagtctctgctgcttagtggccaagaggtaccatggttgtcatcagtcagatatggaactgtggaggatttgcttgcttttgcaaaccatatatccaacactgcaaagcatttttatggacaacgaccacaggaatctggaattttattaaacatggtcatcactccccaaaatggacgttaccaaatagattccgatgttctcctgatcccctggaagctgacttacaggaatattggttctgattttattcctcggggcgcctttggaaaggtatacttggcacaagatataaagacgaagaaaagaatggcgtgtaaactgatcccagtagatcaatttaagccatctgatgtggaaatccaggcttgcttccggcacgagaacatcgcagagctgtatggcgcagtcctgtggggtgaaactgtccatctctttatggaagcaggcgagggagggtctgttctggagaaactggagagctgtggaccaatgagagaatttgaaattatttgggtgacaaagcatgttctcaagggacttgattttctacactcaaagaaagtgatccatcatgatattaaacctagcaacattgttttcatgtccacaaaagctgttttggtggattttggcctaagtgttcaaatgaccgaagatgtctattttcctaaggacctccgaggaacagagatttacatgagcccagaggtcatcctgtgcaggggccattcaaccaaagcagacatctacagcctgggggccacgctcatccacatgcagacgggcaccccaccctgggtgaagcgctaccctcgctcagcctatccctcctacctgtacataatccacaagcaagcacctccactggaagacattgcagatgactgcagtccagggatgagagagctgatagaagcttccctggagagaaaccccaatcaccgcccaagagccgcagacctactaaaacatgaggccctgaacccgcccagagaggatcagccacgctgtcagagtctggactctgccctcttggagcgcaagaggctgctgagtaggaaggagctggaacttcctgagaacattgctgattcttcgtgcacaggaagcaccgaggaatctgagatgctcaagaggcaacgctctctctacatcgacctcggcgctctggctggctacttcaatcttgttcggggaccaccaacgcttgaatatggctga

SEQ ID NO: 311406 - DNA, 79 bp, Artificial Sequence
  derived and/or modified sequence
aatggaatcgaacggaatcatcatcaaacggaaccgaatggaatcattgaatggaatcaaaggcaatcatggtcgaatg

SEQ ID NO: 311407 - DNA, 69 bp, Artificial Sequence
  derived and/or modified sequence
ggaataatcatcatcaaacagaaccaaatggaatcattgaatggaatcaaaggcaatcatggtcgaatg

SEQ ID NO: 311408 - DNA, 348 bp, Artificial Sequence
  derived and/or modified sequence
gtgtctgggggcgtgcggctgcctgccagcgagcggcgcttcctgagctgctgccccctgcctgcccggcccctgctgcagaggctggccagccgccacccagccagcctgccctgcagccagcagctgctgtggaggagcagccgggccccacccctgctgcccagcctgcccctgggcgtgctgatcacagaccccctgaccaggcaccctggccaccaccacccagcccccttccacagcgctgccctgctggtgcctgtgaagccacccacagcctgggagggcaagagccggctggcccggccctgcctgagccaggccctggaggcctgccagctgacctag

SEQ ID NO: 311409 - protein, 361 aa, Artificial Sequence
  derived and/or modified sequence
MSKCARKKYIKTNPRQMTMETVESQHDGSITASLTESKSAHVQTQTGQNSIPALAQVSVAGSGTRRGSPAVTLVQLPSGQTIHVQGVIQTPQPWVIQSSEIHTVQVAAIAETDESAESEGVIDSHKRREILSRRPSYRKILNELSSDVPGVPKIEEERSEEEGTPPSIATMAVPTSIYQTSTGQYIAIAQGGTIQISNPGSDGVQGLQALTMTNSGAPPPGATIVQYAAQSADGTQQFFVPGSQVVVQDEETELAPSHMAAATGDMPTYQIRAPTAALPQGVVMAASPGSLHSPQQLAEEATRKRELRLMKNREAAKECRRRKKEYVKCLESRVAVLEVQNKKLIEELETLKDICSPKTDY

SEQ ID NO: 311410 - protein, 345 aa, Artificial Sequence
  derived and/or modified sequence
MTMETVESQHDGSITASLTESKSAHVQTQTGQNSIPALAQVSVAGSGTRRGSPAVTLVQLPSGQTIHVQGVIQTPQPWVIQSSEIHTVQVAAIAETDESAESEGVIDSHKRREILSRRPSYRKILNELSSDVPGVPKIEEERSEEEGTPPSIATMAVPTSIYQTSTGQYIAIAQGGTIQISNPGSDGVQGLQALTMTNSGAPPPGATIVQYAAQSADGTQQFFVPGSQVVVQDEETELAPSHMAAATGDMPTYQIRAPTAALPQGVVMAASPGSLHSPQQLAEEATRKRELRLMKNREAAKECRRRKKEYVKCLESRVAVLEVQNKKLIEELETLKDICSPKTDY

SEQ ID NO: 311411 - DNA, 1086 bp, Artificial Sequence
  derived and/or modified sequence
atgtccaagtgcgcccgaaagaagtatatcaaaaccaacccgagacagatgaccatggagactgtggaatctcaacacgacggatcaatcaccgcatccctcacagaatccaaatcagctcacgtgcagactcaaaccggccaaaatagtatcccagctcttgcacaggtgtctgtcgcaggatcagggaccagacgcggttcccctgccgtgactctcgtccaacttccatcgggtcagacaattcacgttcaaggggtcatccaaactcctcagccatgggtgatccagtccagcgaaatccacactgtacaggtggcggccattgctgagaccgacgagagcgcagagtctgagggcgttattgactcccacaagagaagggagatcctcagccggcggcccagttacaggaagatcctcaatgaattgtcctctgacgtacctggggtgcccaaaatcgaggaggaaagatccgaggaagagggcactccgccctccattgccaccatggctgtgccaacttcgatctaccagacgtctacgggacagtatattgccatcgcacagggaggcactatccagatcagcaatccaggcagcgatggcgtgcaaggcttgcaagcgttgaccatgacgaattccggtgcccctccgcctggggccacgatcgtgcagtatgcagcccaatcagccgacggcacccagcagtttttcgtgcctgggtcacaggtggtagtgcaggacgaagagaccgaacttgctccctctcacatggcggccgcgacaggtgacatgcccacgtaccaaatccgagcccccactgcggcactgccccagggagtggttatggcggcatctccaggaagcctacactcccctcaacagctggccgaggaggccacacggaagagagagctccgccttatgaaaaatcgcgaagccgcaaaagagtgcagaaggcgaaaaaaggaatacgtgaaatgcctggaatcccgggtggccgtgctggaggtacagaacaagaaattgatagaggaacttgaaaccctcaaggatatctgctctcctaagacagattattag

SEQ ID NO: 311412 - DNA, 1086 bp, Artificial Sequence
  derived and/or modified sequence
atgagcaaatgtgccaggaagaagtacatcaagaccaacccccggcagatgaccatggagaccgtggagagccagcatgatggcagcatcacagccagcctgacagagagcaagagcgcccacgtgcagacccagacaggccagaacagcatcccagccctggcccaggtgtctgtggccggcagcggcacccggcggggcagccctgctgtgaccctggtgcagctgcccagcggccagaccatccacgtgcagggcgtcatccagaccccccagccctgggtgatccagagcagcgagatccacacagtgcaggtggccgccatcgccgagacagatgaatctgctgagagcgagggcgtcatcgacagccacaagagaagagagatcctgagcagaagacccagctacaggaagatcctgaatgagctgagcagtgatgtgcctggggtgcccaagattgaggaggagaggtctgaggaggagggcaccccacccagcatcgccaccatggctgtgcccaccagcatctaccagaccagcacaggccagtacatcgccatcgcccagggcggcaccatccagatcagcaaccctggcagtgatggagtgcagggcctgcaggccctgaccatgaccaacagcggggcccctcctcctggggccaccatcgtgcagtatgctgcccagagcgcagatggcacccagcagttctttgtgcccggcagccaggtggtggtgcaggatgaggagacagagctggcccccagccacatggctgctgccactggagacatgcccacctaccagatccgggcccccacagctgccctgccccagggcgtggtgatggccgccagccctggcagcctgcacagcccccagcagctggccgaggaggccaccaggaagcgggagctgcggctgatgaagaaccgggaggccgccaaggagtgcagaagaaggaagaaggagtatgtgaagtgcctggagagccgggtggccgtgctggaggtgcagaacaagaagctgattgaggagctggagaccctgaaggacatctgcagccccaagacagactactag

SEQ ID NO: 311413 - DNA, 1086 bp, Artificial Sequence
  derived and/or modified sequence
atgagcaagtgcgcccggaagaagtacatcaagaccaacccccggcagatgaccatggaaactgtagagtctcaacacgatggctctatcaccgcgagtctgactgaatctaagagtgcacatgtgcagacccagacaggccagaattcgatcccggcactggcgcaggtaagcgtcgccggctccggaacacggagaggcagccctgcagtcacccttgtgcagctgccttccggacagacaatacacgtgcaaggagtgattcagactccacagccatgggtaatccagagctctgagattcatacagtccaagtggctgccatagctgagactgatgagagtgcagagtcagaaggcgtaatagacagtcacaaaaggcgggagattctatctcgccgcccatcctacagaaaaattctgaacgaactttcttccgatgttcccggagtacctaagatagaggaggagcgctccgaagaggaggggacacctccgtccatcgcaactatggccgtccccacatccatctaccagacaagtactgggcagtacattgccatcgcccagggcggcacaatccagataagcaaccctggttccgatggcgtacaaggactacaggcgctaacaatgactaactccggagccccacccccaggggcaactatcgtacagtacgccgcccagtctgccgatggtacgcaacagttctttgtccctggatctcaggtggtagtacaggacgaagagactgaactggcacctagtcacatggccgcagcaactggtgacatgcctacatatcaaatcagagcccctaccgccgcactacctcagggagtagtaatggccgcatcccccggcagcctccacagcccgcagcaactggcggaggaagccactaggaaaagggagctccggctaatgaaaaaccgggaggctgccaaagaatgccgtcgccgaaagaaggagtacgttaaatgcctggaaagccgcgttgctgtattggaagtacagaacaaaaagctgatcgaggaactggaaacactgaaagacatatgttccccaaaaactgactactag

SEQ ID NO: 311414 - DNA, 1086 bp, Artificial Sequence
  derived and/or modified sequence
atgtccaagtgtgccaggaagaagtatatcaagactaaccctagacagatgactatggagacggtggagtcgcaacacgatgggtccattaccgcttcacttacagagtctaagagcgcccacgttcagacacagaccggccaaaactccattccagccttagctcaagtgtcagtagcaggatctggaacaagaagaggaagcccagcagtgactcttgtgcagctgccgagcggacagaccattcacgtgcagggcgtaatccaaacgccacagccttgggtcatccagtcgtcagagatccatactgtgcaagtggccgctattgcggaaaccgatgagtctgctgagagcgaaggcgtgattgactcacacaaaaggcgagagattcttagtcgtaggcctagttaccgaaaaattctgaacgagctgtctagcgacgtgcctggtgtaccaaagatagaggaggaacgctccgaggaggaaggaactccaccttcgattgccacgatggcagttccaacaagtatttatcagaccagcacggggcagtacatagcaatcgcccagggcggtacgatccagattagcaaccccggttctgatggcgtacaggggctacaggctctaacaatgaccaactccggagcccctccgccaggcgctacaatagttcaatatgccgctcagagtgcggacggaactcagcagttcttcgtcccgggttcccaggtggtggtgcaggatgaagaaactgaattagccccatctcacatggctgccgctaccggcgatatgcctacctatcaaatccgggctcccactgcagccctgcctcagggtgtggtcatggcagcatcgcctggctccctgcactctcctcagcagctagcagaagaagccactcgcaaaagggagctgagactcatgaagaatcgtgaagcagcaaaagagtgccggcgacggaagaaggaatatgttaagtgtttggagagtcgcgtcgcagtgctagaggtacagaataagaagctcattgaagagctcgagacccttaaggatatttgcagccccaaaacagactactag

SEQ ID NO: 311415 - DNA, 2400 bp, Artificial Sequence
  derived and/or modified sequence
gacccgcctgcctcctcgcgaacttgggacgagttggaaaatcctccctgagagagccgtgcggctcaggggagcggtttaactcggaaaaggaaaaggaatccagaagataaataaagaaaacaggaaaggaggaaagcattgattacaaatatcttaacaatgagcaaatgtgcaaggaaaaaatatattaagacaaatccaagacaaatgaccatggaaacagttgaatcccagcatgatggaagtataacagcttctttgacagagagcaagtctgctcatgtgcagactcagactggccaaaattcaatccctgctttagctcaggtttctgtggctggatcaggcaccagaagaggctccccagctgtaactctagtgcagttaccttcgggccaaactatacatgtccagggagtaattcagacaccacagccatgggttattcagtcatcagaaatacacaccgttcaggtagcagcaattgcagagacagatgaatctgcagaatcagaaggtgtaattgattctcataaacgtagagaaatcctttcacgaagaccctcttataggaaaatactgaatgaactgtcctctgatgtgcctggtgttcccaagattgaagaagagagatcagaggaagaaggaacaccacctagtattgctaccatggcagtaccaactagcatatatcagactagcacggggcaatacattgctatagcccaaggtggaacaatccagatttctaacccaggatctgatggtgttcagggactgcaggcattaacaatgacaaattcaggagctcctccaccaggtgctacaattgtacagtacgcagcacaatcagctgatggcacacagcagttctttgtcccaggcagccaggttgttgttcaagatgaggaaactgaacttgccccaagtcacatggctgctgccactggtgacatgccaacttaccagatccgagctcctactgctgctttgccacagggagtggtgatggctgcatcgcccggaagtttgcacagtccccagcagctggcagaagaagcaacacgcaaacgagagctgaggctaatgaaaaacagggaagctgccaaagaatgtcgacgtcgaaagaaagaatatgtaaaatgtctggagagccgagttgcagtgctggaagtccagaacaagaagcttatagaggaacttgaaaccttgaaagacatttgttctcccaaaacagattactagaaatatttaactatgaactgaaggcagcatgtatagttgcttttgaaggaatacaatatatagctggcaagaatggtggcttcttttctttgtatcattcatcttcttctttaatcacttaacattcctaaaatgcttcactgtacgtagttaagtcgtagctataacttcaaattttttaaaagagacaaactgtaaaaaatgtgtgtattcttaaaatgcaatatttgtaaggcttgttccaatgccacatacttgcagctcccattctatgtgtcatcaatagtgtcctatgcaataaaattatttgcaggtctttaaatcattttaggaaaggatgatcaaaaataatgcatccagcagtacaataaaagtaaaccacaaaaaaatacctcaggaaagaatagaaagaaagtctatctaatgacatgcctatatgagaagaatagcctagatatgaatatatggcatttgcagatttttatattagttgctttgttaaaaaaaaaaagattgtattgctgtccttgaatgccatagtcaaagagagtttttaatagaaccatgttggttgcactttgtagtgtttggtgctcatttaaatatctgaacatttactacagtttttaactctactgtgtaatataaaagatcttgcagaagttcttagtgttggtttaatattacctaatgaaagtgatgacatattttttatatctggaatgagcctgttgggatcgcattgcataccttcggggtacaagtcagtttctacactgggtgctgatccttgcacgcgccctttctaccatctcacggtggggatggccgcagggctgtgcacccagaagaagatggctgttagcgtttcggccttcataatggcctgagactttctttctgtaggtggtctggagctgtccggctggtggccccctattttgccatttagcgaacaaccacaggaattttaaaaacaaaaacatcccaagattttttcatttcaaaatgcttcaaagtccacattagatcagatactccgctgtcggcacattcagctgaggttcattacaatcgagactgcaatgtgatctatgtttcatcttgtttttataataaaaagcttcagggaacaagcccaaagccctcacc

SEQ ID NO: 311416 - DNA, 1086 bp, Artificial Sequence
  derived and/or modified sequence
atgagcaagtgcgccagaaagaagtacatcaagaccaaccccagacagatgaccatggagaccgtggagagccagcacgacggcagcatcaccgccagcctgaccgagagcaagagcgcccacgtgcagacccagaccggccagaacagcatccccgccctggcccaggtgagcgtggccggcagcggcaccagaagaggcagccccgccgtgaccctggtgcagctgcccagcggccagaccatccacgtgcagggcgtgatccagaccccccagccctgggtgatccagagcagcgagatccacaccgtgcaggtggccgccatcgccgagaccgacgagagcgccgagagcgagggcgtgatcgacagccacaagagaagagagatcctgagcagaagacccagctacagaaagatcctgaacgagctgagcagcgacgtgcccggcgtgcccaagatcgaggaggagagaagcgaggaggagggcaccccccccagcatcgccaccatggccgtgcccaccagcatctaccagaccagcaccggccagtacatcgccatcgcccagggcggcaccatccagatcagcaaccccggcagcgacggcgtgcagggcctgcaggccctgaccatgaccaacagcggcgcccccccccccggcgccaccatcgtgcagtacgccgcccagagcgccgacggcacccagcagttcttcgtgcccggcagccaggtggtggtgcaggacgaggagaccgagctggcccccagccacatggccgccgccaccggcgacatgcccacctaccagatcagagcccccaccgccgccctgccccagggcgtggtgatggccgccagccccggcagcctgcacagcccccagcagctggccgaggaggccaccagaaagagagagctgagactgatgaagaacagagaggccgccaaggagtgcagaagaagaaagaaggagtacgtgaagtgcctggagagcagagtggccgtgctggaggtgcagaacaagaagctgatcgaggagctggagaccctgaaggacatctgcagccccaagaccgactactag

SEQ ID NO: 311417 - protein, 102 aa, Artificial Sequence
  derived and/or modified sequence
MAAATGDMPTYQIRAPTAALPQGVVMAASPGSLHSPQQLAEEATRKRELRLMKNREAARECRRKKKEYVKCLENRVAVLENQNKTLIEELKALKDLYCHKVE

SEQ ID NO: 311418 - protein, 245 aa, Artificial Sequence
  derived and/or modified sequence
MVAAIAETDESAESEGVIDSHKRREILSRRPSYRKILNELSSDVPGVPKIEEERSEEEGTPPSIATMAVPTSIYQTSTGQYIAIAQGGTIQISNPGSDGVQGLQALTMTNSGAPPPGATIVQYAAQSADGTQQFFVPGSQVVVQAATGDMPTYQIRAPTAALPQGVVMAASPGSLHSPQQLAEEATRKRELRLMKNREAAKECRRRKKEYVKCLESRVAVLEVQNKKLIEELETLKDICSPKTDY

SEQ ID NO: 311419 - protein, 333 aa, Artificial Sequence
  derived and/or modified sequence
MTMETVESQHDGSITASLTESKSAHVQTQTGQNSIPALAQVSVAGSGTRRGSPAVTLVQLPSGQTIHVQGVIQTPQPWVIQSSEIHTVQVAAIAETDESAESEGVIDSHKRREILSRRPSYRKILNELSSDVPGVPKIEEERSEEEGTPPSIATMAVPTSIYQTSTGQYIAIAQGGTIQISNPGSDGVQGLQALTMTNSGAPPPGATIVQYAAQSADGTQQFFVPGSQVVVQAATGDMPTYQIRAPTAALPQGVVMAASPGSLHSPQQLAEEATRKRELRLMKNREAAKECRRRKKEYVKCLESRVAVLEVQNKKLIEELETLKDICSPKTDY

SEQ ID NO: 311420 - DNA, 1002 bp, Artificial Sequence
  derived and/or modified sequence
atgaccatggaaacggtagaatcccagcacgacggtagcatcaccgcatccctgacagagagcaaaagtgctcatgtacagactcagacagggcaaaacagcattccagcacttgcgcaagtgagcgtagccgggtccggcacccgcaggggcagccccgctgttacactggtccaactcccttccggccagacaatccacgtgcagggtgtaatacagaccccccagccgtgggtgattcagtctagcgaaatccacaccgtacaggtcgcggccatcgccgagacggacgagtctgccgagtctgaaggcgtcatcgacagccataagcggcgggagatcctgtcacgccggccgtcttaccggaagatccttaatgagctctcttcagatgtccctggtgtgccaaagattgaggaggaacgctcagaggaagaagggactccaccgagtattgccacaatggccgtgcccacatccatctaccaaaccagcaccgggcagtatatagctatcgcgcaaggcggcaccatacaaatttcaaaccccggatctgacggggttcaaggactacaagccctgacgatgacgaattccggcgctccccctcccggggccaccatagtccagtacgccgctcaaagcgctgacggcacacaacagttcttcgttccaggtagccaagtcgtagtgcaggcagccaccggtgacatgcccacttatcagattcgggctccgaccgcagctctgccgcagggggtcgtgatggccgcttccccgggatccctccattcccctcaacagttggcagaggaggccactcggaagcgggagctgcgcctgatgaaaaacagagaggcagccaaggaatgcaggcggaggaagaaggaatacgtcaagtgtctggagtccagagtggctgtgctggaggtccagaacaaaaagcttattgaggagttagagacgctgaaggacatctgttctccgaagaccgactattag

SEQ ID NO: 311421 - DNA, 1002 bp, Artificial Sequence
  derived and/or modified sequence
atgaccatggagaccgtggagagccagcatgatggcagcatcacagccagcctgacagagagcaagagcgcccacgtgcagacccagacaggccagaacagcatcccagccctggcccaggtgtctgtggccggcagcggcacccggcggggcagccctgctgtgaccctggtgcagctgcccagcggccagaccatccacgtgcagggcgtcatccagaccccccagccctgggtgatccagagcagcgagatccacacagtgcaggtggccgccatcgccgagacagatgaatctgctgagagcgagggcgtcatcgacagccacaagagaagagagatcctgagcagaagacccagctacaggaagatcctgaatgagctgagcagtgatgtgcctggggtgcccaagattgaggaggagaggtctgaggaggagggcaccccacccagcatcgccaccatggctgtgcccaccagcatctaccagaccagcacaggccagtacatcgccatcgcccagggcggcaccatccagatcagcaaccctggcagtgatggagtgcagggcctgcaggccctgaccatgaccaacagcggggcccctcctcctggggccaccatcgtgcagtatgctgcccagagcgcagatggcacccagcagttctttgtgcccggcagccaggtggtggtgcaggccgccactggagacatgcccacctaccagatccgggcccccacagctgccctgccccagggcgtggtgatggccgccagccctggcagcctgcacagcccccagcagctggccgaggaggccaccaggaagcgggagctgcggctgatgaagaaccgggaggccgccaaggagtgcagaagaaggaagaaggagtatgtgaagtgcctggagagccgggtggccgtgctggaggtgcagaacaagaagctgattgaggagctggagaccctgaaggacatctgcagccccaagacagactactag

SEQ ID NO: 311422 - DNA, 1002 bp, Artificial Sequence
  derived and/or modified sequence
atgaccatggagaccgtggagagccagcacgacggcagcatcaccgcctcccttactgaatccaagtccgcgcacgtccagacgcagacaggacagaacagcatccccgcgcttgcgcaggtgtcagtggccgggagtggcactcggcgtggctcccccgctgtgactctcgtgcagcttcccagtggtcagaccattcacgtgcagggagtaatacaaaccccacagccttgggtgattcagtcttcagaaattcacactgtgcaagttgccgcaattgctgaaaccgatgagtccgccgagtccgaaggcgtgatcgattctcacaagaggagggagatcctctcgagacgaccttcgtacagaaaaattttgaatgaactttcttcagacgtgccaggggtacccaagatcgaggaggagaggtccgaggaggaagggactcccccatccatcgctacaatggctgttccgacctccatctaccagacctctacggggcagtacattgccattgcccagggcggtacaatacagattagtaaccctggatccgacggtgttcagggcctgcaggctctgacaatgaccaactcgggtgcccctccccccggggccacaatcgtgcagtacgccgcccagtctgccgatggtactcagcagttcttcgtgcctgggagtcaggtcgtggtccaggccgctactggcgacatgccaacctaccagatccgcgcaccaactgctgccttaccacagggggtggtgatggccgcaagccctggctcgcttcatagtccccagcagcttgctgaagaggctacacgcaagcgcgagctgcgcttgatgaagaatcgcgaagccgccaaggaatgccggcgccgcaagaaagagtacgtcaagtgccttgagagcagggtcgcggtcctggaagtccaaaacaagaaactgatcgaggagcttgagacactgaaagatatatgttcgccaaaaaccgattattag

SEQ ID NO: 311423 - DNA, 1002 bp, Artificial Sequence
  derived and/or modified sequence
atgaccatggagaccgtagaaagccaacacgacggatctatcactgccagtctcaccgaaagtaaatcagcgcatgtgcagacacaaacaggacagaattccatccccgctctagcacaggtgagtgtggccggaagtggcactcgtcgaggttcaccggcagtgaccctggtccaactgccatccggccagacaatacacgtgcaaggagtcatacagaccccccagccttgggtgatccagagttctgagatacacacagtccaggtggcagcaatcgcggagaccgatgaaagtgctgagtcagaaggggtgatcgactcgcataagcgtagagagatcctgagtagacggccttcctaccgtaagattctgaacgaacttagctctgatgtacccggtgtgccaaagattgaggaggagcgctctgaagaggaagggactccacccagcatcgccactatggccgtgcccactagcatttaccaaacaagcaccggtcagtatattgcaattgcgcagggaggcacgattcaaatctctaacccgggttcagatggagtacaaggactgcaggccctcaccatgaccaactcaggcgctccaccccctggcgctactattgtgcaatatgccgcacagtcggctgacggcactcagcaattttttgtgccagggagccaggtggtcgtgcaagctgcaacaggcgacatgccaacatatcaaatcagggccccaaccgccgctctgccacaaggggtggtaatggcagccagcccgggatctctacatagcccgcaacagcttgcagaagaagccaccaggaaacgggaactccggctgatgaaaaaccgcgaagctgctaaagaatgtcgaaggcggaaaaaagagtacgtaaagtgcctggagtcccgcgtggcggtcctggaagttcagaataagaagctgatcgaagagctggaaacactcaaggacatttgctcccccaaaacagactattag

SEQ ID NO: 311424 - DNA, 2157 bp, Artificial Sequence
  derived and/or modified sequence
atgaccatggaaacagttgaatcccagcatgatggaagtataacagcttctttgacagagagcaagtctgctcatgtgcagactcagactggccaaaattcaatccctgctttagctcaggtttctgtggctggatcaggcaccagaagaggctccccagctgtaactctagtgcagttaccttcgggccaaactatacatgtccagggagtaattcagacaccacagccatgggttattcagtcatcagaaatacacaccgttcaggtagcagcaattgcagagacagatgaatctgcagaatcagaaggtgtaattgattctcataaacgtagagaaatcctttcacgaagaccctcttataggaaaatactgaatgaactgtcctctgatgtgcctggtgttcccaagattgaagaagagagatcagaggaagaaggaacaccacctagtattgctaccatggcagtaccaactagcatatatcagactagcacggggcaatacattgctatagcccaaggtggaacaatccagatttctaacccaggatctgatggtgttcagggactgcaggcattaacaatgacaaattcaggagctcctccaccaggtgctacaattgtacagtacgcagcacaatcagctgatggcacacagcagttctttgtcccaggcagccaggttgttgttcaagctgccactggtgacatgccaacttaccagatccgagctcctactgctgctttgccacagggagtggtgatggctgcatcgcccggaagtttgcacagtccccagcagctggcagaagaagcaacacgcaaacgagagctgaggctaatgaaaaacagggaagctgccaaagaatgtcgacgtcgaaagaaagaatatgtaaaatgtctggagagccgagttgcagtgctggaagtccagaacaagaagcttatagaggaacttgaaaccttgaaagacatttgttctcccaaaacagattactagaaatatttaactatgaactgaaggcagcatgtatagttgcttttgaaggaatacaatatatagctggcaagaatggtggcttcttttctttgtatcattcatcttcttctttaatcacttaacattcctaaaatgcttcactgtacgtagttaagtcgtagctataacttcaaattttttaaaagagacaaactgtaaaaaatgtgtgtattcttaaaatgcaatatttgtaaggcttgttccaatgccacatacttgcagctcccattctatgtgtcatcaatagtgtcctatgcaataaaattatttgcaggtctttaaatcattttaggaaaggatgatcaaaaataatgcatccagcagtacaataaaagtaaaccacaaaaaaatacctcaggaaagaatagaaagaaagtctatctaatgacatgcctatatgagaagaatagcctagatatgaatatatggcatttgcagatttttatattagttgctttgttaaaaaaaaaaagattgtattgctgtccttgaatgccatagtcaaagagagtttttaatagaaccatgttggttgcactttgtagtgtttggtgctcatttaaatatctgaacatttactacagtttttaactctactgtgtaatataaaagatcttgcagaagttcttagtgttggtttaatattacctaatgaaagtgatgacatattttttatatctggaatgagcctgttgggatcgcattgcataccttcggggtacaagtcagtttctacactgggtgctgatccttgcacgcgccctttctaccatctcacggtggggatggccgcagggctgtgcacccagaagaagatggctgttagcgtttcggccttcataatggcctgagactttctttctgtaggtggtctggagctgtccggctggtggccccctattttgccatttagcgaacaaccacaggaattttaaaaacaaaaacatcccaagattttttcatttcaaaatgcttcaaagtccacattagatcagatactccgctgtcggcacattcagctgaggttcattacaatcgagactgcaatgtgatctatgtttcatcttgtttttataataaaaagcttcagggaacaagcccaaagccctcaccaca

SEQ ID NO: 311425 - DNA, 1002 bp, Artificial Sequence
  derived and/or modified sequence
atgaccatggagaccgtggagagccagcacgacggcagcatcaccgccagcctgaccgagagcaagagcgcccacgtgcagacccagaccggccagaacagcatccccgccctggcccaggtgagcgtggccggcagcggcaccagaagaggcagccccgccgtgaccctggtgcagctgcccagcggccagaccatccacgtgcagggcgtgatccagaccccccagccctgggtgatccagagcagcgagatccacaccgtgcaggtggccgccatcgccgagaccgacgagagcgccgagagcgagggcgtgatcgacagccacaagagaagagagatcctgagcagaagacccagctacagaaagatcctgaacgagctgagcagcgacgtgcccggcgtgcccaagatcgaggaggagagaagcgaggaggagggcaccccccccagcatcgccaccatggccgtgcccaccagcatctaccagaccagcaccggccagtacatcgccatcgcccagggcggcaccatccagatcagcaaccccggcagcgacggcgtgcagggcctgcaggccctgaccatgaccaacagcggcgcccccccccccggcgccaccatcgtgcagtacgccgcccagagcgccgacggcacccagcagttcttcgtgcccggcagccaggtggtggtgcaggccgccaccggcgacatgcccacctaccagatcagagcccccaccgccgccctgccccagggcgtggtgatggccgccagccccggcagcctgcacagcccccagcagctggccgaggaggccaccagaaagagagagctgagactgatgaagaacagagaggccgccaaggagtgcagaagaagaaagaaggagtacgtgaagtgcctggagagcagagtggccgtgctggaggtgcagaacaagaagctgatcgaggagctggagaccctgaaggacatctgcagccccaagaccgactactag

SEQ ID NO: 311426 - protein, 348 aa, Artificial Sequence
  derived and/or modified sequence
MSKCARKKYIKTNPRQMTMETVESQHDGSITASLTESKSAHVQTQTGQNSIPALAQVSVAGSGTRRGSPAVTLVQLPSGQTIHVQGVIQTPQPWVIQSSEIHTVQVAAIAETDESAESEGVIDSHKRREILSRRPSYRKILNELSSDVPGVPKIEEERSEEEGTPPSIATMAVPTSIYQTSTGQYIAIAQGGTIQISNPGSDGVQGLQALTMTNSGAPPPGATIVQYAAQSADGTQQFFVPGSQVVVQAATGDMPTYQIRAPTAALPQGVVMAASPGSLHSPQQLAEEATRKRELRLMKNREAARECRRKKKEYVKCLENRVAVLENQNKTLIEELKALKDLYCHKVE

SEQ ID NO: 311427 - protein, 95 aa, Artificial Sequence
  derived and/or modified sequence
MPTYQIRAPTAALPQGVVMAASPGSLHSPQQLAEEATRKRELRLMKNREAARECRRKKKEYVKCLENRVAVLENQNKTLIEELKALKDLYCHKVE

SEQ ID NO: 311428 - protein, 332 aa, Artificial Sequence
  derived and/or modified sequence
MTMETVESQHDGSITASLTESKSAHVQTQTGQNSIPALAQVSVAGSGTRRGSPAVTLVQLPSGQTIHVQGVIQTPQPWVIQSSEIHTVQVAAIAETDESAESEGVIDSHKRREILSRRPSYRKILNELSSDVPGVPKIEEERSEEEGTPPSIATMAVPTSIYQTSTGQYIAIAQGGTIQISNPGSDGVQGLQALTMTNSGAPPPGATIVQYAAQSADGTQQFFVPGSQVVVQAATGDMPTYQIRAPTAALPQGVVMAASPGSLHSPQQLAEEATRKRELRLMKNREAARECRRKKKEYVKCLENRVAVLENQNKTLIEELKALKDLYCHKVE

SEQ ID NO: 311429 - DNA, 1047 bp, Artificial Sequence
  derived and/or modified sequence
atgtcaaagtgtgcccggaagaagtacattaagaccaacccccgccaaatgactatggagacagtcgaatcccagcatgacggctctatcaccgcttcgttaacagagtcaaaaagcgcgcatgttcagacccagaccggtcaaaactctatccctgcactggctcaggtctctgtcgctggtagtgggactcgcagaggctcccccgctgtgacactggttcagctcccctccgggcagactatacacgtgcagggtgtcattcagacccctcaaccctgggtgatccaaagcagtgagattcacacagtgcaggtggctgcaatcgcagagacagacgagtccgcggaatccgagggagtcatcgattcccacaaacggcgggagatcttgagcagacgacccagttaccggaagatcctcaacgagctgtcttcagacgttccaggcgtgcctaaaatagaggaggaaagatcagaagaagagggcacacccccctctatcgctaccatggcagtgcctacaagtatttaccagactagcactggacagtacatcgccatcgcccaaggcgggacaatccagatcagcaatcctgggagcgacggcgtgcaaggacttcaagcacttactatgacaaattccggcgcccccccacccggtgcgaccatcgtgcagtacgccgctcaaagcgctgatgggacccagcagtttttcgtacctggtagtcaagtggtagtgcaggccgccactggagacatgcccacctaccagattcgtgcaccaacggccgctctgcctcagggcgtggtgatggctgcatctcctggaagtctccattccccccagcagctggcagaagaagcgacccggaagcgcgagctacggctaatgaagaatcgcgaggccgccagagaatgcagacgcaagaagaaggagtatgtgaaatgcctcgagaatagagtagcagtgctggagaaccagaacaagaccctgattgaggaacttaaagctctgaaagatttatactgccacaaggtagaatag

SEQ ID NO: 311430 - DNA, 999 bp, Artificial Sequence
  derived and/or modified sequence
atgaccatggagacagtggaatctcagcacgacggcagtatcactgcatctttaactgaaagcaaatccgcgcacgtgcaaacccagactggccagaatagcattcccgccctggcacaggtgtcagtggcgggcagtggcaccagacgaggatcaccggccgttacacttgtgcaactgccctctgggcagacaattcacgttcaaggggtcattcagaccccccaaccttgggtgattcagtcctcagagatccatacagttcaggtggcagctattgccgaaaccgatgagtctgccgaaagtgaaggggtgattgatagccacaagaggcgtgagattctgtctcggcgccccagctatcgcaagatactgaatgagctgagctccgatgtgccaggggtgcctaaaatcgaagaggagcggtctgaggaggagggaacacctccttccatcgccacgatggctgtgcctactagtatctaccagacaagtaccggacagtacattgctatcgcgcaagggggcaccattcagatctcaaatccgggtagcgacggggttcagggcctgcaggctcttactatgaccaactccggggcgcctcctcccggggcaactattgtacagtacgcggcacagtcagccgacggaacccagcagttcttcgtccccggttcccaagtggtggtccaagccgccaccggggacatgccaacctatcagatccgagctccaactgccgccttaccccagggtgtggtgatggccgcctcacccgggagcctacatagtccacaacagctcgctgaggaagccacccgcaagcgcgagctccgcctgatgaagaacagggaggccgcacgcgagtgccgccggaaaaaaaaagagtacgtcaaatgcttggagaatagagtggcagtactggagaatcaaaacaagacactgattgaagagttgaaagctctgaaggacctgtactgccacaaggtggagtag

SEQ ID NO: 311431 - DNA, 1047 bp, Artificial Sequence
  derived and/or modified sequence
atgagcaaatgtgccaggaagaagtacatcaagaccaacccccggcagatgaccatggagaccgtggagagccagcatgatggcagcatcacagccagcctgacagagagcaagagcgcccacgtgcagacccagacaggccagaacagcatcccagccctggcccaggtgtctgtggccggcagcggcacccggcggggcagccctgctgtgaccctggtgcagctgcccagcggccagaccatccacgtgcagggcgtcatccagaccccccagccctgggtgatccagagcagcgagatccacacagtgcaggtggccgccatcgccgagacagatgaatctgctgagagcgagggcgtcatcgacagccacaagagaagagagatcctgagcagaagacccagctacaggaagatcctgaatgagctgagcagtgatgtgcctggggtgcccaagattgaggaggagaggtctgaggaggagggcaccccacccagcatcgccaccatggctgtgcccaccagcatctaccagaccagcacaggccagtacatcgccatcgcccagggcggcaccatccagatcagcaaccctggcagtgatggagtgcagggcctgcaggccctgaccatgaccaacagcggggcccctcctcctggggccaccatcgtgcagtatgctgcccagagcgcagatggcacccagcagttctttgtgcccggcagccaggtggtggtgcaggccgccactggagacatgcccacctaccagatccgggcccccacagctgccctgccccagggcgtggtgatggccgccagccctggcagcctgcacagcccccagcagctggccgaggaggccaccaggaagcgggagctgcggctgatgaagaaccgggaggccgcccgggagtgcaggaggaagaagaaggagtatgtgaagtgcctggagaacagagtggccgtgctggagaaccagaacaagaccctgattgaggagctgaaggccctgaaggacctgtactgccacaaggtggagtag

SEQ ID NO: 311432 - DNA, 999 bp, Artificial Sequence
  derived and/or modified sequence
atgaccatggagaccgtggagagccagcatgatggcagcatcacagccagcctgacagagagcaagagcgcccacgtgcagacccagacaggccagaacagcatcccagccctggcccaggtgtctgtggccggcagcggcacccggcggggcagccctgctgtgaccctggtgcagctgcccagcggccagaccatccacgtgcagggcgtcatccagaccccccagccctgggtgatccagagcagcgagatccacacagtgcaggtggccgccatcgccgagacagatgaatctgctgagagcgagggcgtcatcgacagccacaagagaagagagatcctgagcagaagacccagctacaggaagatcctgaatgagctgagcagtgatgtgcctggggtgcccaagattgaggaggagaggtctgaggaggagggcaccccacccagcatcgccaccatggctgtgcccaccagcatctaccagaccagcacaggccagtacatcgccatcgcccagggcggcaccatccagatcagcaaccctggcagtgatggagtgcagggcctgcaggccctgaccatgaccaacagcggggcccctcctcctggggccaccatcgtgcagtatgctgcccagagcgcagatggcacccagcagttctttgtgcccggcagccaggtggtggtgcaggccgccactggagacatgcccacctaccagatccgggcccccacagctgccctgccccagggcgtggtgatggccgccagccctggcagcctgcacagcccccagcagctggccgaggaggccaccaggaagcgggagctgcggctgatgaagaaccgggaggccgcccgggagtgcaggaggaagaagaaggagtatgtgaagtgcctggagaacagagtggccgtgctggagaaccagaacaagaccctgattgaggagctgaaggccctgaaggacctgtactgccacaaggtggagtag

SEQ ID NO: 311433 - DNA, 1047 bp, Artificial Sequence
  derived and/or modified sequence
atgagcaagtgcgcccggaagaagtacatcaagaccaacccccggcagatgacaatggagacagttgaatcgcagcacgatggatccataacggccagcctcactgaatcaaaatcagctcacgttcaaacccagaccggacaaaattcaataccggcccttgcacaggtatccgtggctggctcaggaacccggagaggctcaccagccgtcacgctggtgcagctcccctctgggcagacaatacatgtgcagggggtgatccaaaccccacaaccgtgggtgattcagtccagtgagattcataccgttcaggtcgctgcaatcgccgaaactgatgaaagtgctgagagcgagggcgtaatcgattcacataagcgacgagaaatcctgtcccggcggcccagctatagaaaaattctcaatgaactcagttctgacgtgccaggggtccccaaaattgaggaagagcgttccgaggaggagggtacccccccctccatcgccacgatggctgtgccgaccagcatttatcaaacgagtacgggccagtatattgccattgcccaggggggcaccatccagatctcaaatccagggagtgatggtgttcagggcctgcaagcccttaccatgactaactccggggcacccccacctggtgctaccatcgtgcagtacgcagcccagagcgccgacggcactcagcagttcttcgtgccagggtcccaggtcgtggtgcaggccgctaccggcgatatgcctacttaccagatcagagcccccacagcagcgcttccacagggcgtggtcatggccgcttctcctggcagcctccacagtccgcaacagctagcagaggaggcaacgcggaagagagagctccggttgatgaagaaccgtgaggcggcacgcgagtgccggagaaagaagaaggaatacgtcaaatgccttgagaacagagttgctgttttagagaaccagaataagaccctaatagaagaactgaaggcgctaaaagacctgtactgtcacaaagtcgagtag

SEQ ID NO: 311434 - DNA, 999 bp, Artificial Sequence
  derived and/or modified sequence
atgaccatggagaccgtggagagccagcacgacggcagcatcaccgcctcactgacagaaagcaagagtgcccatgtgcagacacagaccggccagaatagcatccccgcactagctcaggtctcggtggctgggtcaggtaccagaaggggctcgcccgccgtgactcttgtgcagttgccctccggccagacaattcacgtccagggggtcatacagaccccgcagccatgggtgatacagagctcagagatccataccgtgcaggttgccgcaatagctgaaacggatgagtccgccgaatcggaaggtgtcattgactcccataaacggagagaaatcttatctcggcgccctagctacaggaaaatcctgaacgaacttagttcagatgtgcccggtgtgcctaagattgaagaggagcgctctgaggaagagggcacccccccgagcatcgcaactatggccgtacccacatctatataccagactagcacagggcagtacatagcaatagcccagggcgggactatccagataagtaaccccggctcagacggagtgcagggtctgcaggccctgacaatgaccaatagtggcgctcctccaccaggcgcaaccatcgtgcagtatgccgcccaatctgctgacggcacccaacaatttttcgtgcccggaagtcaggttgtggttcaggcagccacgggcgacatgccgacctatcagattcgggcccctaccgccgccttgccacaaggcgttgtaatggctgccagcccggggagcctgcacagcccacagcagcttgctgaagaagcaacgcgcaaaagagagttaaggctgatgaaaaaccgagaggcagctcgcgagtgccgtcgcaagaaaaaggaatatgtgaagtgcctagagaaccgggtcgccgtgctggagaaccagaataagacacttattgaagaattgaaagccctcaaggacctctactgtcacaaggttgaatag

SEQ ID NO: 311435 - DNA, 1047 bp, Artificial Sequence
  derived and/or modified sequence
atgtccaagtgcgcacgcaagaaatacattaagaccaaccctagacagatgaccatggagacagtggagagccagcacgatgggtctataacagcgagcctgaccgagtcaaagtcagcccacgtgcaaacgcagaccgggcagaactccataccagccctggctcaagtgtccgttgcaggatccggcactcgcaggggcagccctgcagtcaccctggtgcaattgcccagcggacagaccatccacgttcagggtgttatccaaacacctcagccatgggtcatacagagctctgaaatccataccgtacaggtggcagccatcgctgaaacggacgagagcgcagaaagtgagggcgtgatcgactcacacaaacgcagggaaatcctgtcgcgcagaccatcttacagaaagatcctgaatgaactgagcagcgatgtgcccggagtgccaaaaattgaagaagagaggagtgaagaagaaggaacaccgccttccattgccaccatggcggttcccacatccatctaccagacgtcaactggccagtacattgctatcgctcaggggggaactattcagatctccaatcctgggagcgacggtgtccagggacttcaggccctgactatgaccaactctggcgctccacccccaggagccaccattgtccagtatgctgctcaatccgcggatggcacccagcaattcttcgtccccggatcccaggtcgtagtccaggcggctacaggagacatgccaacttatcaaatacgagcacccactgcggctctcccgcagggggtggtcatggccgcatcacccggatctttgcactcacctcagcagttggctgaggaggcaactcgcaagcgggagctgagactcatgaagaaccgggaagcggcaagggaatgtagaagaaagaaaaaggaatacgtcaagtgcctggagaatagggtggcagtactagagaatcaaaataagacactgatcgaagagttgaaggccctcaaggatttgtactgtcataaggtagagtag

SEQ ID NO: 311436 - DNA, 999 bp, Artificial Sequence
  derived and/or modified sequence
atgactatggagaccgtggagtctcagcacgacggcagtatcaccgcgtctttgaccgaaagcaagagcgcgcacgtgcaaacacagacggggcagaattcaattccagcactagcgcaagtcagcgtcgcaggctcaggcacccgcaggggctcacctgctgttacgctcgtgcagctgccgtcaggtcaaaccatacacgtccagggtgtaattcagacccctcagccttgggtcatccagtccagcgagatccacaccgtgcaggtcgcagctatcgcggagacggatgagagcgcagaaagtgaaggcgtgatagactcacataagagacgtgaaatcttgtccagaagaccaagttaccggaaaattctaaatgagttgtcatctgatgttcccggagtccctaaaatcgaggaggagcgttcagaggaggaaggcacccccccaagcatcgctacaatggcggtgcctacatcaatatatcagacaagcaccggacagtatatcgcaatagctcagggaggcactatacagatcagtaaccctggtagtgatggtgtacaaggacttcaagccctcaccatgaccaactccggtgcaccaccacccggagcgactatcgtacagtacgcagcccaatctgctgatgggacacagcagttttttgtcccagggtcgcaggtggttgttcaggctgctacaggcgacatgcccacgtatcagatccgggctcccaccgccgctttaccacaaggtgtggttatggctgcatcacctggttccctgcacagtccccaacagctggccgaggaagctacgagaaagcgcgaactccggctcatgaagaaccgcgaggctgccagagaatgtcgcaggaagaaaaaagagtacgtgaagtgcctcgagaatagggttgccgtgctggaaaatcaaaataagacactgattgaggagctcaaggcccttaaagacttatattgccacaaagtggagtag

SEQ ID NO: 311437 - DNA, 2658 bp, Artificial Sequence
  derived and/or modified sequence
gataaataaagaaaacaggaaaggaggaaagcattgattacaaatatcttaacaatgagcaaatgtgcaaggaaaaaatatattaagacaaatccaagacaaatgaccatggaaacagttgaatcccagcatgatggaagtataacagcttctttgacagagagcaagtctgctcatgtgcagactcagactggccaaaattcaatccctgctttagctcaggtttctgtggctggatcaggcaccagaagaggctccccagctgtaactctagtgcagttaccttcgggccaaactatacatgtccagggagtaattcagacaccacagccatgggttattcagtcatcagaaatacacaccgttcaggtagcagcaattgcagagacagatgaatctgcagaatcagaaggtgtaattgattctcataaacgtagagaaatcctttcacgaagaccctcttataggaaaatactgaatgaactgtcctctgatgtgcctggtgttcccaagattgaagaagagagatcagaggaagaaggaacaccacctagtattgctaccatggcagtaccaactagcatatatcagactagcacggggcaatacattgctatagcccaaggtggaacaatccagatttctaacccaggatctgatggtgttcagggactgcaggcattaacaatgacaaattcaggagctcctccaccaggtgctacaattgtacagtacgcagcacaatcagctgatggcacacagcagttctttgtcccaggcagccaggttgttgttcaagctgccactggtgacatgccaacttaccagatccgagctcctactgctgctttgccacagggagtggtgatggctgcatcgcccggaagtttgcacagtccccagcagctggcagaagaagcaacacgcaaacgagagctgaggctaatgaaaaacagggaagctgcccgggagtgtcgcaggaagaagaaagaatatgtcaaatgtcttgaaaatcgtgtggctgtgcttgaaaaccaaaacaagactctcattgaggaactcaaggccctcaaagatctttattgccataaagtagagtaactgtctttgacttggaccttgtttactctaatcaaggcaggagatgcagcagtcctacttattgccatgtggacttgtgggaaggacacgtgtgacccttaagaatccagtttggattagtgtttgaaattgaattgggaatgttgttccaggatgtggaatgcagccgtgatcacacttaccgagcttactttgatctgtttgtcaatagcatgcaaaaaatgctttgtttgccctttgcttctgctttttttcagggaagctgccaaagaatgtcgacgtcgaaagaaagaatatgtaaaatgtctggagagccgagttgcagtgctggaagtccagaacaagaagcttatagaggaacttgaaaccttgaaagacatttgttctcccaaaacagattactagaaatatttaactatgaactgaaggcagcatgtatagttgcttttgaaggaatacaatatatagctggcaagaatggtggcttcttttctttgtatcattcatcttcttctttaatcacttaacattcctaaaatgcttcactgtacgtagttaagtcgtagctataacttcaaattttttaaaagagacaaactgtaaaaaatgtgtgtattcttaaaatgcaatatttgtaaggcttgttccaatgccacatacttgcagctcccattctatgtgtcatcaatagtgtcctatgcaataaaattatttgcaggtctttaaatcattttaggaaaggatgatcaaaaataatgcatccagcagtacaataaaagtaaaccacaaaaaaatacctcaggaaagaatagaaagaaagtctatctaatgacatgcctatatgagaagaatagcctagatatgaatatatggcatttgcagatttttatattagttgctttgttaaaaaaaaaaagattgtattgctgtccttgaatgccatagtcaaagagagtttttaatagaaccatgttggttgcactttgtagtgtttggtgctcatttaaatatctgaacatttactacagtttttaactctactgtgtaatataaaagatcttgcagaagttcttagtgttggtttaatattacctaatgaaagtgatgacatattttttatatctggaatgagcctgttgggatcgcattgcataccttcggggtacaagtcagtttctacactgggtgctgatccttgcacgcgccctttctaccatctcacggtggggatggccgcagggctgtgcacccagaagaagatggctgttagcgtttcggccttcataatggcctgagactttctttctgtaggtggtctggagctgtccggctggtggccccctattttgccatttagcgaacaaccacaggaattttaaaaacaaaaacatcccaagattttttcatttcaaaatgcttcaaagtccacattagatcagatactccgctgtcggcacattcagctgaggttcattacaatcgagactgcaatgtgatctatgtttcatcttgtttttataataaaaagcttcagggaacaagcccaaagccctcacc

SEQ ID NO: 311438 - DNA, 1425 bp, Artificial Sequence
  derived and/or modified sequence
atgaccatggaaacagttgaatcccagcatgatggaagtataacagcttctttgacagagagcaagtctgctcatgtgcagactcagactggccaaaattcaatccctgctttagctcaggtttctgtggctggatcaggcaccagaagaggctccccagctgtaactctagtgcagttaccttcgggccaaactatacatgtccagggagtaattcagacaccacagccatgggttattcagtcatcagaaatacacaccgttcaggtagcagcaattgcagagacagatgaatctgcagaatcagaaggtgtaattgattctcataaacgtagagaaatcctttcacgaagaccctcttataggaaaatactgaatgaactgtcctctgatgtgcctggtgttcccaagattgaagaagagagatcagaggaagaaggaacaccacctagtattgctaccatggcagtaccaactagcatatatcagactagcacggggcaatacattgctatagcccaaggtggaacaatccagatttctaacccaggatctgatggtgttcagggactgcaggcattaacaatgacaaattcaggagctcctccaccaggtgctacaattgtacagtacgcagcacaatcagctgatggcacacagcagttctttgtcccaggcagccaggttgttgttcaagctgccactggtgacatgccaacttaccagatccgagctcctactgctgctttgccacagggagtggtgatggctgcatcgcccggaagtttgcacagtccccagcagctggcagaagaagcaacacgcaaacgagagctgaggctaatgaaaaacagggaagctgcccgggagtgtcgcaggaagaagaaagaatatgtcaaatgtcttgaaaatcgtgtggctgtgcttgaaaaccaaaacaagactctcattgaggaactcaaggccctcaaagatctttattgccataaagtagagtaactgtctttgacttggaccttgtttactctaatcaaggcaggagatgcagcagtcctacttattgccatgtggacttgtgggaaggacacgtgtgacccttaagaatccagtttggattagtgtttgaaattgaattgggaatgttgttccaggatgtggaatgcagccgtgatcacacttaccgagcttactttgatctgtttgtcaatagcatgcaaaaaatgctttgtttgccctttgcttctgctttttttcagggaagctgccaaagaatgtcgacgtcgaaagaaagaatatgtaaaatgtctggagagccgagttgcagtgctggaagtccagaacaagaagcttatagaggaacttgaaaccttgaaagacatttgttctcccaaaacagattactagaaatatttaactatgaactga

SEQ ID NO: 311439 - DNA, 1047 bp, Artificial Sequence
  derived and/or modified sequence
atgagcaagtgcgccagaaagaagtacatcaagaccaaccccagacagatgaccatggagaccgtggagagccagcacgacggcagcatcaccgccagcctgaccgagagcaagagcgcccacgtgcagacccagaccggccagaacagcatccccgccctggcccaggtgagcgtggccggcagcggcaccagaagaggcagccccgccgtgaccctggtgcagctgcccagcggccagaccatccacgtgcagggcgtgatccagaccccccagccctgggtgatccagagcagcgagatccacaccgtgcaggtggccgccatcgccgagaccgacgagagcgccgagagcgagggcgtgatcgacagccacaagagaagagagatcctgagcagaagacccagctacagaaagatcctgaacgagctgagcagcgacgtgcccggcgtgcccaagatcgaggaggagagaagcgaggaggagggcaccccccccagcatcgccaccatggccgtgcccaccagcatctaccagaccagcaccggccagtacatcgccatcgcccagggcggcaccatccagatcagcaaccccggcagcgacggcgtgcagggcctgcaggccctgaccatgaccaacagcggcgcccccccccccggcgccaccatcgtgcagtacgccgcccagagcgccgacggcacccagcagttcttcgtgcccggcagccaggtggtggtgcaggccgccaccggcgacatgcccacctaccagatcagagcccccaccgccgccctgccccagggcgtggtgatggccgccagccccggcagcctgcacagcccccagcagctggccgaggaggccaccagaaagagagagctgagactgatgaagaacagagaggccgccagagagtgcagaagaaagaagaaggagtacgtgaagtgcctggagaacagagtggccgtgctggagaaccagaacaagaccctgatcgaggagctgaaggccctgaaggacctgtactgccacaaggtggagtag

SEQ ID NO: 311440 - DNA, 999 bp, Artificial Sequence
  derived and/or modified sequence
atgaccatggagaccgtggagagccagcacgacggcagcatcaccgccagcctgaccgagagcaagagcgcccacgtgcagacccagaccggccagaacagcatccccgccctggcccaggtgagcgtggccggcagcggcaccagaagaggcagccccgccgtgaccctggtgcagctgcccagcggccagaccatccacgtgcagggcgtgatccagaccccccagccctgggtgatccagagcagcgagatccacaccgtgcaggtggccgccatcgccgagaccgacgagagcgccgagagcgagggcgtgatcgacagccacaagagaagagagatcctgagcagaagacccagctacagaaagatcctgaacgagctgagcagcgacgtgcccggcgtgcccaagatcgaggaggagagaagcgaggaggagggcaccccccccagcatcgccaccatggccgtgcccaccagcatctaccagaccagcaccggccagtacatcgccatcgcccagggcggcaccatccagatcagcaaccccggcagcgacggcgtgcagggcctgcaggccctgaccatgaccaacagcggcgcccccccccccggcgccaccatcgtgcagtacgccgcccagagcgccgacggcacccagcagttcttcgtgcccggcagccaggtggtggtgcaggccgccaccggcgacatgcccacctaccagatcagagcccccaccgccgccctgccccagggcgtggtgatggccgccagccccggcagcctgcacagcccccagcagctggccgaggaggccaccagaaagagagagctgagactgatgaagaacagagaggccgccagagagtgcagaagaaagaagaaggagtacgtgaagtgcctggagaacagagtggccgtgctggagaaccagaacaagaccctgatcgaggagctgaaggccctgaaggacctgtactgccacaaggtggagtag

SEQ ID NO: 311441 - protein, 96 aa, Artificial Sequence
  derived and/or modified sequence
MPTYQIRAPTAALPQGVVMAASPGSLHSPQQLAEEATRKRELRLMKNREAAKECRRRKKEYVKCLESRVAVLEVQNKKLIEELETLKDICSPKTDY

SEQ ID NO: 311442 - protein, 154 aa, Artificial Sequence
  derived and/or modified sequence
MTMETVESQHDGSITASLTESKSAHVQTQTGQNSIPALAQVDEETELAPSHMAAATGDMPTYQIRAPTAALPQGVVMAASPGSLHSPQQLAEEATRKRELRLMKNREAAKECRRRKKEYVKCLESRVAVLEVQNKKLIEELETLKDICSPKTDY

SEQ ID NO: 311443 - DNA, 1038 bp, Artificial Sequence
  derived and/or modified sequence
atgactatggagacagtggagagccagcatgacggatcaattaccgcttcgctgaccgagagcaaatccgcccacgttcaaacacaaactggccaaaattcgatacctgctctggcacaagtgagcgtcgccggaagtgggacgaggcggggctcacctgctgtgaccctagtgcaactgccttccgggcagacaatacatgtgcagggggtgatccagactccccagccatgggtaatccagtcctccgaaatacacacggtccaagttgcagctattgcggagacagacgagagcgccgagtccgagggggtgattgattcccacaaaagaagagagattctatccagaagaccgagctatagaaaaatactaaatgaactgtcatctgacgttcctggcgtgccaaaaattgaagaagaaaggtccgaggaggaagggacgcccccctcaattgctacgatggcggtgccaaccagtatctaccagacaagcacagggcagtatatcgccatcgcccagggcgggacaattcagatatccaaccccggaagtgacggagttcagggtctccaggcactgacgatgacaaacagtggggcaccccctccaggtgctacaatcgtccaatatgcagcccagagtgctgatggcacgcagcagttcttcgtgcccggctcccaagtagttgtgcaggatgaggagactgagcttgcgccttcacacatggcagcagccactggcgacatgccgacgtaccaaattagggcccctaccgctgcccttcctcagggtgtcgtgatggctgccagccctggttcactgcactctccccagcagcttgcagaggaggccacaaggaagcgggagttgaggctgatgaagaatagagaagctgctaaagagtgcagacgccggaaaaaagaatacgtgaaatgcctggaatcacgagtggcagtcctggaagtgcagaataagaaactgatagaggagctcgaaacactgaaggacatctgctcacctaagaccgattactag

SEQ ID NO: 311444 - DNA, 1038 bp, Artificial Sequence
  derived and/or modified sequence
atgaccatggagaccgtggagagccagcatgatggcagcatcacagccagcctgacagagagcaagagcgcccacgtgcagacccagacaggccagaacagcatcccagccctggcccaggtgtctgtggccggcagcggcacccggcggggcagccctgctgtgaccctggtgcagctgcccagcggccagaccatccacgtgcagggcgtcatccagaccccccagccctgggtgatccagagcagcgagatccacacagtgcaggtggccgccatcgccgagacagatgaatctgctgagagcgagggcgtcatcgacagccacaagagaagagagatcctgagcagaagacccagctacaggaagatcctgaatgagctgagcagtgatgtgcctggggtgcccaagattgaggaggagaggtctgaggaggagggcaccccacccagcatcgccaccatggctgtgcccaccagcatctaccagaccagcacaggccagtacatcgccatcgcccagggcggcaccatccagatcagcaaccctggcagtgatggagtgcagggcctgcaggccctgaccatgaccaacagcggggcccctcctcctggggccaccatcgtgcagtatgctgcccagagcgcagatggcacccagcagttctttgtgcccggcagccaggtggtggtgcaggatgaggagacagagctggcccccagccacatggctgctgccactggagacatgcccacctaccagatccgggcccccacagctgccctgccccagggcgtggtgatggccgccagccctggcagcctgcacagcccccagcagctggccgaggaggccaccaggaagcgggagctgcggctgatgaagaaccgggaggccgccaaggagtgcagaagaaggaagaaggagtatgtgaagtgcctggagagccgggtggccgtgctggaggtgcagaacaagaagctgattgaggagctggagaccctgaaggacatctgcagccccaagacagactactag

SEQ ID NO: 311445 - DNA, 1038 bp, Artificial Sequence
  derived and/or modified sequence
atgaccatggagaccgtggagagccagcacgacggcagcatcaccgccagcttgaccgagtcaaagagcgctcatgtacagactcaaactggacagaactcgatacccgccctggcgcaagtctctgtggctggatctgggacacggcgtggcagcccagctgtgacactggtccagctgcctagcgggcaaacaatccacgtacagggcgtgatccagacgcctcagccatgggtaattcagtcctcggagatccatactgtgcaggtggccgcgatagcggagacagatgagtctgcagaatcggagggcgtgattgacagtcataaaaggcgagagattctgtctagacgaccaagttacagaaagattctgaatgaactatccagtgacgtgcccggagttcctaagatagaagaagaacggtccgaggaggaaggcacccccccttccatcgctaccatggctgtacctacaagcatctaccagacctctacgggacagtacattgctatcgctcaggggggtaccattcagatttcgaatccaggctccgatggggtgcagggacttcaggcacttaccatgaccaacagtggagcacccccacccggcgctaccattgtgcagtacgccgctcaatccgccgatggaactcagcagttcttcgtgcccggatcgcaagttgtggtccaggacgaagaaaccgagctggctccctcccatatggccgctgccactggggatatgccaacctaccagataagggctcctaccgctgcactcccgcagggtgtcgtgatggccgcctctcctggctccctgcactcccctcagcaactggctgaggaggctaccaggaaacgagagctgcgtctgatgaaaaatcgggaagctgccaaagagtgccggaggcggaagaaggagtatgtgaagtgtctggaaagccgggtagcagtgttggaagtgcaaaataaaaaactaattgaggagctggagactctgaaggacatctgctcccccaagaccgattattag

SEQ ID NO: 311446 - DNA, 1038 bp, Artificial Sequence
  derived and/or modified sequence
atgaccatggagacggtcgaatcgcagcacgacgggagcattaccgccagcctgactgaatctaaaagcgcccacgtccagactcagaccggccagaactctatcccagctctggcccaggtatcagtggctggtagcggaacaaggcgagggagccctgccgtgacactggtgcagctgccctccgggcagactattcatgtccaaggggtgatccagaccccacaaccctgggtcattcagtctagtgaaatccacacagttcaagtggctgcgatcgccgagactgatgagtccgcggaatctgaaggtgtgattgactctcacaaacgcagagagatactgagccgccgtccctcctatcgcaagatcctgaatgaacttagcagcgacgtcccgggagtgcccaagatcgaggaggagcggagcgaagaggagggtaccccacctagtattgccacgatggcagtgccaacttcaatttaccagacctccacaggtcaatatatagctatagcccaagggggtactatccagatttccaatcctgggtccgacggcgtccaaggcctgcaggccctaactatgaccaattcaggggcaccacctcccggagccacgattgtccaatacgcagcccagagcgcagatggaacccagcagtttttcgtgcccggatcccaggtcgttgtgcaggacgaagaaactgaactcgccccttcccatatggccgcagcaactggcgacatgccaacttaccagattcgcgctccgaccgctgcactaccacaaggggttgtgatggcggcaagtccaggcagcctgcatagccctcaacagctagccgaggaggcaacaagaaaaagagaactacggctgatgaagaaccgcgaagctgcaaaagaatgtcgtagacggaaaaaggagtacgtcaagtgcctcgaaagtcgtgtagcagtcttagaggtccaaaataagaagctgatcgaggagttggagaccttgaaggatatttgttcaccgaagactgattattag

SEQ ID NO: 311447 - DNA, 1038 bp, Artificial Sequence
  derived and/or modified sequence
atgaccatggaaacagttgaatcccagcatgatggaagtataacagcttctttgacagagagcaagtctgctcatgtgcagactcagactggccaaaattcaatccctgctttagctcaggtttctgtggctggatcaggcaccagaagaggctccccagctgtaactctagtgcagttaccttcgggccaaactatacatgtccagggagtaattcagacaccacagccatgggttattcagtcatcagaaatacacaccgttcaggtagcagcaattgcagagacagatgaatctgcagaatcagaaggtgtaattgattctcataaacgtagagaaatcctttcacgaagaccctcttataggaaaatactgaatgaactgtcctctgatgtgcctggtgttcccaagattgaagaagagagatcagaggaagaaggaacaccacctagtattgctaccatggcagtaccaactagcatatatcagactagcacggggcaatacattgctatagcccaaggtggaacaatccagatttctaacccaggatctgatggtgttcagggactgcaggcattaacaatgacaaattcaggagctcctccaccaggtgctacaattgtacagtacgcagcacaatcagctgatggcacacagcagttctttgtcccaggcagccaggttgttgttcaagatgaggaaactgaacttgccccaagtcacatggctgctgccactggtgacatgccaacttaccagatccgagctcctactgctgctttgccacagggagtggtgatggctgcatcgcccggaagtttgcacagtccccagcagctggcagaagaagcaacacgcaaacgagagctgaggctaatgaaaaacagggaagctgccaaagaatgtcgacgtcgaaagaaagaatatgtaaaatgtctggagagccgagttgcagtgctggaagtccagaacaagaagcttatagaggaacttgaaaccttgaaagacatttgttctcccaaaacagattactag

SEQ ID NO: 311448 - DNA, 1038 bp, Artificial Sequence
  derived and/or modified sequence
atgaccatggagaccgtggagagccagcacgacggcagcatcaccgccagcctgaccgagagcaagagcgcccacgtgcagacccagaccggccagaacagcatccccgccctggcccaggtgagcgtggccggcagcggcaccagaagaggcagccccgccgtgaccctggtgcagctgcccagcggccagaccatccacgtgcagggcgtgatccagaccccccagccctgggtgatccagagcagcgagatccacaccgtgcaggtggccgccatcgccgagaccgacgagagcgccgagagcgagggcgtgatcgacagccacaagagaagagagatcctgagcagaagacccagctacagaaagatcctgaacgagctgagcagcgacgtgcccggcgtgcccaagatcgaggaggagagaagcgaggaggagggcaccccccccagcatcgccaccatggccgtgcccaccagcatctaccagaccagcaccggccagtacatcgccatcgcccagggcggcaccatccagatcagcaaccccggcagcgacggcgtgcagggcctgcaggccctgaccatgaccaacagcggcgcccccccccccggcgccaccatcgtgcagtacgccgcccagagcgccgacggcacccagcagttcttcgtgcccggcagccaggtggtggtgcaggacgaggagaccgagctggcccccagccacatggccgccgccaccggcgacatgcccacctaccagatcagagcccccaccgccgccctgccccagggcgtggtgatggccgccagccccggcagcctgcacagcccccagcagctggccgaggaggccaccagaaagagagagctgagactgatgaagaacagagaggccgccaaggagtgcagaagaagaaagaaggagtacgtgaagtgcctggagagcagagtggccgtgctggaggtgcagaacaagaagctgatcgaggagctggagaccctgaaggacatctgcagccccaagaccgactactag

SEQ ID NO: 311449 - protein, 312 aa, Artificial Sequence
  derived and/or modified sequence
MSKCARKKYIKTNPRQMTMETVESQHDGSITASLTESKSAHVQTQTGQNSIPALAQVAAIAETDESAESEGVIDSHKRREILSRRPSYRKILNELSSDVPGVPKIEEERSEEEGTPPSIATMAVPTSIYQTSTGQYIAIAQGGTIQISNPGSDGVQGLQALTMTNSGAPPPGATIVQYAAQSADGTQQFFVPGSQVVVQDEETELAPSHMAAATGDMPTYQIRAPTAALPQGVVMAASPGSLHSPQQLAEEATRKRELRLMKNREAAKECRRRKKEYVKCLESRVAVLEVQNKKLIEELETLKDICSPKTDY

SEQ ID NO: 311450 - DNA, 939 bp, Artificial Sequence
  derived and/or modified sequence
atgtcgaagtgtgctaggaagaaatatatcaaaacgaatccacggcaaatgactatggagaccgttgaatctcagcacgacggaagtattaccgcttccttaaccgaaagtaagtcggctcacgtgcagactcagacaggtcagaactcaattcccgccttagctcaagtggcagccatcgcagagactgacgagagcgccgagtccgaaggtgtgattgactcccacaaaaggcgggaaattctgtctcggcgcccaagctataggaaaattcttaacgagctgagtagtgatgtgccaggggtgccaaagatcgaagaggaaagaagtgaggaggagggcacccctccttctatagctaccatggcagtgccgacatcgatctaccagacatccactgggcagtatatcgccatcgcccagggcggcactatccagatttctaaccccggctcagatggtgtgcagggcctgcaggctctcaccatgacaaacagtggagcccccccccctggggccaccattgtccagtacgcagcacagtctgctgacggtacccagcagtttttcgtgccaggatcccaggttgtagtgcaagatgaggagaccgagcttgctccatcacacatggccgccgccaccggtgacatgcctacctaccagataagggccccaacggccgctctgccccaaggggtggtaatggctgcaagtccagggagccttcacagcccccagcagcttgctgaagaagcgacgcgcaagcgggagctcaggctgatgaaaaaccgcgaagccgccaaggaatgcagacggcggaaaaaagaatatgtgaagtgtctggaatcccgggtggcggtactagaggtccaaaataagaaacttatcgaagagcttgagactctcaaagatatctgctcaccaaagacagactattag

SEQ ID NO: 311451 - DNA, 939 bp, Artificial Sequence
  derived and/or modified sequence
atgagcaaatgtgccaggaagaagtacatcaagaccaacccccggcagatgaccatggagaccgtggagagccagcatgatggcagcatcacagccagcctgacagagagcaagagcgcccacgtgcagacccagacaggccagaacagcatcccagccctggcccaggtggccgccatcgccgagacagatgagagcgctgagagcgagggcgtgattgacagccacaagaggcgggagatcctgagccggcggcccagctacaggaagatcctgaatgagctgagcagtgatgtgcctggggtgcccaagattgaggaggagaggtctgaggaggagggcaccccacccagcatcgccaccatggctgtgcccaccagcatctaccagaccagcacaggccagtacatcgccatcgcccagggcggcaccatccagatcagcaaccctggcagtgatggagtgcagggcctgcaggccctgaccatgaccaacagcggggcccctcctcctggggccaccatcgtgcagtatgctgcccagagcgcagatggcacccagcagttctttgtgcccggcagccaggtggtggtgcaggatgaggagacagagctggcccccagccacatggccgccgccaccggggacatgcccacctaccagatccgggcccccacagctgccctgccccagggcgtggtgatggccgccagccctggcagcctgcacagcccccagcagctggccgaggaggccaccaggaagcgggagctgcggctgatgaagaaccgggaggccgccaaggaatgtagaagaaggaagaaggagtatgtgaagtgcctggagagccgggtggccgtgctggaggtgcagaacaagaagctgattgaggagctggagaccctgaaggacatctgcagccccaagacagactactag

SEQ ID NO: 311452 - DNA, 939 bp, Artificial Sequence
  derived and/or modified sequence
atgagcaagtgcgcccggaagaagtacatcaagaccaacccccggcagatgacgatggaaacggtggagagccagcatgatggaagcattacagccagcctgaccgaatccaaatccgcgcatgtccagacacagactggtcagaactccattcctgctttggcccaggtggccgccattgctgaaacagatgagtcggcagaaagtgagggggtcatagacagtcataaacgccgggaaattttgagcagacgcccaagttacaggaaaatcttgaacgagctctcatccgatgttcccggcgtccccaaaattgaggaagagcgctccgaggaggaaggcactcctccgtccattgccactatggcagtgcccacgtctatctaccaaacgtcaacagggcaatatatagcgatcgcccaggggggcactattcagatctctaaccccgggagtgatggagtgcagggcctgcaggcccttacaatgaccaactccggtgcacctcctcccggcgcgacgatagtacagtacgcagcccagtctgctgacgggacccagcagttcttcgtgcccggcagccaggtggtggtgcaagacgaggaaaccgaactagcaccaagtcacatggccgccgccaccggcgatatgcctacctatcaaattcgtgcaccaaccgccgccttgccccaaggcgttgtcatggctgcgtcacctggctctcttcactctccccagcagttagctgaagaggcaacaagaaaacgagagctcaggctgatgaagaaccgcgaggccgccaaagaatgccgcagacgaaagaaagaatatgtgaaatgtttggaatcccgcgtggccgtgctcgaagttcaaaacaagaagcttattgaggagctcgagaccctcaaagacatatgtagccctaaaaccgactattag

SEQ ID NO: 311453 - DNA, 939 bp, Artificial Sequence
  derived and/or modified sequence
atgagcaagtgcgccagaaagaagtatatcaaaacgaatccacgccaaatgaccatggagactgtcgagtcgcaacacgacggttcaataactgcctctttgaccgaaagtaagtcagctcacgttcagacgcaaacagggcaaaattccatacccgctcttgcccaggttgccgcaatagcagagaccgacgagtcagcagagtccgagggcgtgatcgactcccacaaaaggcgggagatcttaagtcgcaggccgagttacagaaagatactaaatgagttatcatccgacgtcccaggcgtgcctaagattgaagaagagcgttctgaagaggaggggactcccccaagcatcgctactatggcggtgcccacctctatctaccagacctctacaggacagtacatcgccatcgcgcaggggggaaccatccaaataagcaatcccggttccgatggggtacagggattgcaggccttgacaatgaccaactctggcgctccacctcctggtgccaccattgtacaatacgcagctcagtcagccgacggtactcagcagttctttgtaccaggttcacaggtggtagtgcaagatgaagagaccgagttagctccctctcacatggccgctgccacaggggacatgcctacttaccagattagagccccaactgctgcactgccacaaggggtggtgatggctgcttcccctggcagcctgcattcgccacagcaattggcagaggaagcaactcgaaaacgcgaactgaggctgatgaagaaccgggaagctgccaaagaatgtcgtaggagaaagaaggagtacgtgaaatgtctggagtcacgggtggccgtgcttgaagttcagaacaaaaaactgattgaagagctggaaacgcttaaagatatttgctcccctaagaccgattactag

SEQ ID NO: 311454 - DNA, 939 bp, Artificial Sequence
  derived and/or modified sequence
atgagcaaatgtgcaaggaaaaaatatattaagacaaatccaagacaaatgaccatggaaacagttgaatcccagcatgatggaagtataacagcttctttgacagagagcaagtctgctcatgtgcagactcagactggccaaaattcaatccctgctttagctcaggtagcagcaattgcagagacagatgaatctgcagaatcagaaggtgtaattgattctcataaacgtagagaaatcctttcacgaagaccctcttataggaaaatactgaatgaactgtcctctgatgtgcctggtgttcccaagattgaagaagagagatcagaggaagaaggaacaccacctagtattgctaccatggcagtaccaactagcatatatcagactagcacggggcaatacattgctatagcccaaggtggaacaatccagatttctaacccaggatctgatggtgttcagggactgcaggcattaacaatgacaaattcaggagctcctccaccaggtgctacaattgtacagtacgcagcacaatcagctgatggcacacagcagttctttgtcccaggcagccaggttgttgttcaagatgaggaaactgaacttgccccaagtcacatggctgctgccactggtgacatgccaacttaccagatccgagctcctactgctgctttgccacagggagtggtgatggctgcatcgcccggaagtttgcacagtccccagcagctggcagaagaagcaacacgcaaacgagagctgaggctaatgaaaaacagggaagctgccaaagaatgtcgacgtcgaaagaaagaatatgtaaaatgtctggagagccgagttgcagtgctggaagtccagaacaagaagcttatagaggaacttgaaaccttgaaagacatttgttctcccaaaacagattactag

SEQ ID NO: 311455 - DNA, 939 bp, Artificial Sequence
  derived and/or modified sequence
atgagcaagtgcgccagaaagaagtacatcaagaccaaccccagacagatgaccatggagaccgtggagagccagcacgacggcagcatcaccgccagcctgaccgagagcaagagcgcccacgtgcagacccagaccggccagaacagcatccccgccctggcccaggtggccgccatcgccgagaccgacgagagcgccgagagcgagggcgtgatcgacagccacaagagaagagagatcctgagcagaagacccagctacagaaagatcctgaacgagctgagcagcgacgtgcccggcgtgcccaagatcgaggaggagagaagcgaggaggagggcaccccccccagcatcgccaccatggccgtgcccaccagcatctaccagaccagcaccggccagtacatcgccatcgcccagggcggcaccatccagatcagcaaccccggcagcgacggcgtgcagggcctgcaggccctgaccatgaccaacagcggcgcccccccccccggcgccaccatcgtgcagtacgccgcccagagcgccgacggcacccagcagttcttcgtgcccggcagccaggtggtggtgcaggacgaggagaccgagctggcccccagccacatggccgccgccaccggcgacatgcccacctaccagatcagagcccccaccgccgccctgccccagggcgtggtgatggccgccagccccggcagcctgcacagcccccagcagctggccgaggaggccaccagaaagagagagctgagactgatgaagaacagagaggccgccaaggagtgcagaagaagaaagaaggagtacgtgaagtgcctggagagcagagtggccgtgctggaggtgcagaacaagaagctgatcgaggagctggagaccctgaaggacatctgcagccccaagaccgactactag

SEQ ID NO: 311456 - protein, 270 aa, Artificial Sequence
  derived and/or modified sequence
MTMETVESQHDGSITASLTESKSAHVQTQTGQNSIPALAQVSVAGSGTRRGSPAVTLVQLPSGQTIHVQGVIQTPQPWVIQSSEIHTVQVAAIAETDESAESEGVIDSHKRREILSRRPSYRKILNELSSDVPGVPKIEEERSEEEGTPPSIATMAVPTSIYQTSTGQYTATGDMPTYQIRAPTAALPQGVVMAASPGSLHSPQQLAEEATRKRELRLMKNREAAKECRRRKKEYVKCLESRVAVLEVQNKKLIEELETLKDICSPKTDY

SEQ ID NO: 311457 - DNA, 813 bp, Artificial Sequence
  derived and/or modified sequence
atgaccatggaaaccgtcgagagtcagcacgacggatctatcacagcgagcctcacagagagcaaatccgctcacgtgcagacccaaacaggtcagaacagtatccctgccctcgcacaggtgagcgtagcgggttcaggaacaagaaggggatcacccgctgtaacgctggtccagctgccatcagggcagaccatccacgtccagggggtgatccaaacaccgcagccgtgggtcattcagtcgtccgagatacacacagttcaggtggccgctattgccgaaaccgacgaaagtgctgagtcggaaggcgtgatcgatagccataagcggagggagatcctgtcgcgtaggccttcctaccgaaaaatcctcaacgaattgagctctgatgtgcccggggttcctaaaatcgaagaagagagaagtgaagaagagggaacccctccctcaatcgccacaatggcggttcccacctccatttaccagacaagcaccggccagtatactgctacaggtgacatgccgacataccagatacgagccccaactgcagcgttgccgcagggagtggtgatggccgcatccccgggtagtctgcattcaccacagcagcttgccgaagaggccacgcgcaaacgggaattgagactgatgaagaacagagaagccgctaaggagtgccggcgtagaaagaaggagtatgtgaagtgcttggaatcgcgggtggctgtgctcgaagtccaaaacaaaaagctaatcgaggagctcgagaccctcaaagatatttgtagccccaaaaccgattattag

SEQ ID NO: 311458 - DNA, 813 bp, Artificial Sequence
  derived and/or modified sequence
atgaccatggagaccgtggagagccagcatgatggcagcatcacagccagcctgacagagagcaagagcgcccacgtgcagacccagacaggccagaacagcatcccagccctggcccaggtgtctgtggccggcagcggcacccggcggggcagccctgctgtgaccctggtgcagctgcccagcggccagaccatccacgtgcagggcgtcatccagaccccccagccctgggtgatccagagcagcgagatccacacagtgcaggtggccgccatcgccgagacagatgaatctgctgagagcgagggcgtcatcgacagccacaagagaagagagatcctgagcagaagacccagctacaggaagatcctgaatgagctgagcagtgatgtgcctggggtgcccaagattgaggaggagaggtctgaggaggagggcaccccacccagcatcgccaccatggctgtgcccaccagcatctaccagaccagcacaggccagtacacagccaccggggacatgcccacctaccagatccgggcccccacagctgccctgccccagggcgtggtgatggccgccagccctggcagcctgcacagcccccagcagctggccgaggaggccaccaggaagcgggagctgcggctgatgaagaaccgggaggccgccaaggaatgtagaagaaggaagaaggagtatgtgaagtgcctggagagccgggtggccgtgctggaggtgcagaacaagaagctgattgaggagctggagaccctgaaggacatctgcagccccaagacagactactag

SEQ ID NO: 311459 - DNA, 813 bp, Artificial Sequence
  derived and/or modified sequence
atgaccatggagaccgtggagagccagcacgacggcagcatcaccgctagccttacagaatccaaatccgcccacgtccagacacagactgggcaaaacagcattcctgccctggcacaggttagtgtggctgggtctggaaccaggcgcgggagtccagctgtcaccctcgttcagctgccttctggtcaaaccatccatgtgcagggcgtaatccagaccccccagccttgggtcattcagagctcggagatccataccgttcaagtggccgccatagctgagaccgatgaatccgcagagtccgaaggcgtgattgatagtcataaaaggcgggagattctgtctcggcgcccgagctatcgcaagatcctcaacgagttatcatctgatgtcccgggcgtgcctaagatagaggaggaacgctctgaggaagagggcacacctccctccattgccactatggccgtccctacttctatttaccagacttctactgggcagtacacagcaacaggagatatgcccacataccagatccgtgccccaacggcagctctgccacagggggtggtgatggctgcatccccggggagtttgcactccccacagcagttggccgaagaagccacacggaaacgcgagctccggctgatgaagaatcgggaagcagccaaggaatgcagacggcggaaaaaggaatacgtcaaatgcctggagtctcgagtggctgtgctcgaagtgcagaataagaaactcatcgaggaactggagacactgaaggatatatgttcccctaagaccgactactag

SEQ ID NO: 311460 - DNA, 813 bp, Artificial Sequence
  derived and/or modified sequence
atgaccatggagacagtcgagagtcaacacgatggctcgattaccgcatctctgaccgaatctaaaagcgctcacgttcagacccaaactggccaaaattcgattcctgccctggctcaagtgtctgttgcagggtcaggtacacggaggggttctccagccgttactcttgtccagctgccctctggccagacaattcatgtccaaggcgttatacagacgcctcagccttgggttatccagagtagtgaaatccatacagtgcaggtagcagctatcgccgagacagatgaaagcgctgagtcagaaggggttattgattcccacaaacggagggagatcctgtcccgcagaccgagctacagaaagattctgaatgaactgtcatctgacgtccctggcgtgccaaagattgaggaggaacgcagtgaagaagagggcaccccaccaagcatcgctaccatggcggtcccaacgtctatttatcagacctcaactgggcagtataccgctacaggagacatgcccacctatcagatcagggccccaacagctgcattgccccaaggagttgtcatggccgcttcacctgggtcacttcattctccgcagcagcttgcggaagaagccaccaggaaacgggagctccggcttatgaagaatagagaggctgccaaggaatgtcggcgaaggaagaaggaatacgttaaatgtttggaaagtcgagttgccgtgttggaagtgcagaacaagaaactcattgaggaacttgagaccttgaaagatatttgctcccctaaaactgactactag

SEQ ID NO: 311461 - DNA, 813 bp, Artificial Sequence
  derived and/or modified sequence
atgaccatggaaacagttgaatcccagcatgatggaagtataacagcttctttgacagagagcaagtctgctcatgtgcagactcagactggccaaaattcaatccctgctttagctcaggtttctgtggctggatcaggcaccagaagaggctccccagctgtaactctagtgcagttaccttcgggccaaactatacatgtccagggagtaattcagacaccacagccatgggttattcagtcatcagaaatacacaccgttcaggtagcagcaattgcagagacagatgaatctgcagaatcagaaggtgtaattgattctcataaacgtagagaaatcctttcacgaagaccctcttataggaaaatactgaatgaactgtcctctgatgtgcctggtgttcccaagattgaagaagagagatcagaggaagaaggaacaccacctagtattgctaccatggcagtaccaactagcatatatcagactagcacggggcaatacactgccactggtgacatgccaacttaccagatccgagctcctactgctgctttgccacagggagtggtgatggctgcatcgcccggaagtttgcacagtccccagcagctggcagaagaagcaacacgcaaacgagagctgaggctaatgaaaaacagggaagctgccaaagaatgtcgacgtcgaaagaaagaatatgtaaaatgtctggagagccgagttgcagtgctggaagtccagaacaagaagcttatagaggaacttgaaaccttgaaagacatttgttctcccaaaacagattactag

SEQ ID NO: 311462 - DNA, 813 bp, Artificial Sequence
  derived and/or modified sequence
atgaccatggagaccgtggagagccagcacgacggcagcatcaccgccagcctgaccgagagcaagagcgcccacgtgcagacccagaccggccagaacagcatccccgccctggcccaggtgagcgtggccggcagcggcaccagaagaggcagccccgccgtgaccctggtgcagctgcccagcggccagaccatccacgtgcagggcgtgatccagaccccccagccctgggtgatccagagcagcgagatccacaccgtgcaggtggccgccatcgccgagaccgacgagagcgccgagagcgagggcgtgatcgacagccacaagagaagagagatcctgagcagaagacccagctacagaaagatcctgaacgagctgagcagcgacgtgcccggcgtgcccaagatcgaggaggagagaagcgaggaggagggcaccccccccagcatcgccaccatggccgtgcccaccagcatctaccagaccagcaccggccagtacaccgccaccggcgacatgcccacctaccagatcagagcccccaccgccgccctgccccagggcgtggtgatggccgccagccccggcagcctgcacagcccccagcagctggccgaggaggccaccagaaagagagagctgagactgatgaagaacagagaggccgccaaggagtgcagaagaagaaagaaggagtacgtgaagtgcctggagagcagagtggccgtgctggaggtgcagaacaagaagctgatcgaggagctggagaccctgaaggacatctgcagccccaagaccgactactag

SEQ ID NO: 311463 - protein, 285 aa, Artificial Sequence
  derived and/or modified sequence
MSKCARKKYIKTNPRQMTMETVESQHDGSITASLTESKSAHVQTQTGQNSIPALAQVSVAGSGTRRGSPAVTLVQLPSGQTIHVQGVIQTPQPWVIQSSEIHTVQVAAIAETDESAESEGVIDSHKRREILSRRPSYRKILNELSSDVPGVPKIEEERSEEEGTPPSIATMAVPTSIYQTSTGQYTATGDMPTYQIRAPTAALPQGVVMAASPGSLHSPQQLAEEATRKRELRLMKNREAARECRRKKKEYVKCLENRVAVLENQNKTLIEELKALKDLYCHKVE

SEQ ID NO: 311464 - protein, 269 aa, Artificial Sequence
  derived and/or modified sequence
MTMETVESQHDGSITASLTESKSAHVQTQTGQNSIPALAQVSVAGSGTRRGSPAVTLVQLPSGQTIHVQGVIQTPQPWVIQSSEIHTVQVAAIAETDESAESEGVIDSHKRREILSRRPSYRKILNELSSDVPGVPKIEEERSEEEGTPPSIATMAVPTSIYQTSTGQYTATGDMPTYQIRAPTAALPQGVVMAASPGSLHSPQQLAEEATRKRELRLMKNREAARECRRKKKEYVKCLENRVAVLENQNKTLIEELKALKDLYCHKVE

SEQ ID NO: 311465 - DNA, 858 bp, Artificial Sequence
  derived and/or modified sequence
atgtcaaaatgtgcacgtaagaaatatataaaaacaaacccacggcagatgactatggaaacggtagaatcccaacatgatggatcgattaccgcaagcttaaccgagagtaaaagcgcccacgtgcagacacagacgggacaaaactctatccccgcactcgcgcaggtttcagttgccggttctggaactcgaaggggatctccagctgtcaccctcgtgcagctgccaagcggacagacaatccacgtgcaaggtgtgatccagactccacagccatgggtgattcagagcagcgagatccataccgtgcaggtggccgctatagctgaaactgatgagtcagcagagtccgagggcgtgattgacagccacaaaaggcgcgagattctctcacgacgcccatcgtatcggaaaatcctgaatgaattgagctctgacgtgcccggtgtgcctaaaattgaggaagagagaagtgaggaggagggaactcccccctctatcgccactatggccgttccaacaagtatctatcagacttccacaggtcagtatactgcaaccggcgatatgcccacataccagatccgcgcacccactgctgccctgcctcagggcgtggttatggcagcgagccctggctctctgcacagtccccagcaactagcagaagaagcaacccggaagcgggagctcaggcttatgaaaaacagggaagcggccagggagtgccgaaggaagaagaaagagtatgtaaaatgcctcgaaaatcgggtcgcagtgctggagaaccagaataagacactgatcgaggaactgaaggcacttaaggatctgtattgccataaggtggaatag

SEQ ID NO: 311466 - DNA, 810 bp, Artificial Sequence
  derived and/or modified sequence
atgactatggagaccgtcgaatctcagcatgatggatcaattacagccagcctgactgagagcaagtctgcccacgtgcagacccagaccggccaaaactccataccagcgttggcacaggttagcgtggcggggagtggtaccaggcggggaagcccagctgtgacactggtgcagcttcccagcggccagacgatacatgttcaaggcgtcatccagacaccacaaccatgggtcattcaatccagtgagatccatacagtccaggttgccgctatcgctgaaacagatgaaagtgccgagtccgagggcgtcattgattcccataaacggagagagatcctgagtcgccgtccttcttaccgaaagattctcaatgagctttcaagcgacgtccctggcgtgcctaaaatcgaggaggagaggtcagaggaagagggcactccaccaagcattgcaaccatggcagtgcctaccagcatttaccaaacatctactgggcagtacaccgccaccggcgatatgcccacctaccagatccgggctcctacggccgcgcttccccaaggggtggtgatggccgcatcccccggaagcctccactccccccagcagttagcagaggaggcaacaaggaagcgcgagctccggctcatgaagaatcgggaggccgcacgggaatgtcgccggaaaaagaaagagtacgtgaagtgcctcgagaaccgagtggccgtgctggaaaatcagaacaaaacactaatcgaggagctgaaagcccttaaggatctctactgccacaaagtggagtag

SEQ ID NO: 311467 - DNA, 858 bp, Artificial Sequence
  derived and/or modified sequence
atgagcaaatgtgccaggaagaagtacatcaagaccaacccccggcagatgaccatggagaccgtggagagccagcatgatggcagcatcacagccagcctgacagagagcaagagcgcccacgtgcagacccagacaggccagaacagcatcccagccctggcccaggtgtctgtggccggcagcggcacccggcggggcagccctgctgtgaccctggtgcagctgcccagcggccagaccatccacgtgcagggcgtcatccagaccccccagccctgggtgatccagagcagcgagatccacacagtgcaggtggccgccatcgccgagacagatgaatctgctgagagcgagggcgtcatcgacagccacaagagaagagagatcctgagcagaagacccagctacaggaagatcctgaatgagctgagcagtgatgtgcctggggtgcccaagattgaggaggagaggtctgaggaggagggcaccccacccagcatcgccaccatggctgtgcccaccagcatctaccagaccagcacaggccagtacacagccaccggggacatgcccacctaccagatccgggcccccacagctgccctgccccagggcgtggtgatggccgccagccctggcagcctgcacagcccccagcagctggccgaggaggccaccaggaagcgggagctgcggctgatgaagaaccgggaggccgccagagaatgtagaaggaagaagaaggagtatgtgaagtgcctggagaacagagtggccgtgctggagaaccagaacaagaccctcatcgaggagctgaaggccctgaaggacctgtactgccacaaggtggagtag

SEQ ID NO: 311468 - DNA, 810 bp, Artificial Sequence
  derived and/or modified sequence
atgaccatggagaccgtggagagccagcatgatggcagcatcacagccagcctgacagagagcaagagcgcccacgtgcagacccagacaggccagaacagcatcccagccctggcccaggtgtctgtggccggcagcggcacccggcggggcagccctgctgtgaccctggtgcagctgcccagcggccagaccatccacgtgcagggcgtcatccagaccccccagccctgggtgatccagagcagcgagatccacacagtgcaggtggccgccatcgccgagacagatgaatctgctgagagcgagggcgtcatcgacagccacaagagaagagagatcctgagcagaagacccagctacaggaagatcctgaatgagctgagcagtgatgtgcctggggtgcccaagattgaggaggagaggtctgaggaggagggcaccccacccagcatcgccaccatggctgtgcccaccagcatctaccagaccagcacaggccagtacacagccaccggggacatgcccacctaccagatccgggcccccacagctgccctgccccagggcgtggtgatggccgccagccctggcagcctgcacagcccccagcagctggccgaggaggccaccaggaagcgggagctgcggctgatgaagaaccgggaggccgccagagaatgtagaaggaagaagaaggagtatgtgaagtgcctggagaacagagtggccgtgctggagaaccagaacaagaccctcatcgaggagctgaaggccctgaaggacctgtactgccacaaggtggagtag

SEQ ID NO: 311469 - DNA, 858 bp, Artificial Sequence
  derived and/or modified sequence
atgagcaagtgcgcccggaagaagtacatcaagaccaacccccggcaaatgaccatggagaccgtcgaaagccaacacgatgggtccattacggcttccctcactgagtcgaaatcggcacacgtgcaaacgcagactggccagaatagcattcccgctttggcccaagtctcagtggctggctccggcaccaggagaggctctcctgccgtcacactggtgcagcttccatcgggccagacaattcacgtgcaaggagttatccagaccccccaaccctgggtcattcaatcttctgagattcacactgtgcaagtcgctgcaatcgccgagacggatgaatccgcagagtcggagggggtgatcgactcccacaagaggcgtgagatactgagccgacggccctcatacaggaagatcttgaatgagttatcctcagacgtccctggagtccctaaaattgaggaagagcggagcgaggaggagggcactcccccttccatagcaaccatggcagtccccacttcgatttaccagacgtccacaggacaatacaccgcaaccggagatatgccgacatatcagattcgcgctcctaccgccgctctcccacaaggcgtagtcatggcagctagtcccggcagcctccactccccgcagcagctggccgaggaggctaccagaaagagagaactcagactcatgaaaaacagagaagccgccagagaatgccgccgaaagaagaaggagtacgtcaagtgccttgagaacagggtggccgttttggaaaatcagaataagacccttatagaggagttgaaagccttgaaggatctgtactgccataaggttgagtag

SEQ ID NO: 311470 - DNA, 810 bp, Artificial Sequence
  derived and/or modified sequence
atgaccatggagaccgtggagagccagcacgacggcagcatcaccgcttccttgacagaatctaagtccgcccacgtacagactcagacaggccagaattcaattcccgctctggctcaggtctccgttgccggatcaggaacaaggcgcgggtcacccgccgtgacactggttcagctcccgagtgggcagaccatacatgtccagggtgtgattcagactccccagccatgggtgattcaatcaagtgaaatccatacggtccaggttgccgccatagcagagacagacgaatccgccgagagcgagggggttattgactcacataaacgtagagagatactgagccgcagaccctcgtatcggaagatacttaacgagctcagctcggatgtgccgggtgtacccaagatagaggaggagagatcggaggaggaaggaacacctccctcaattgctaccatggccgtacccacatctatataccagacgagcacaggccaatacacggccactggcgacatgcctacttatcaaatcagagctcctactgcggctttacctcaaggcgtggtgatggcggcttcgcctggtagcctgcattcacctcagcagctggccgaggaagctacacgaaaaagggagctccgcctaatgaagaaccgggaggccgctagagaatgccgccggaaaaagaaagaatacgttaaatgtctggaaaatcgagtggcagttctggaaaaccagaacaaaacccttatcgaggaacttaaagcactcaaagatctctattgtcacaaagtggaatag

SEQ ID NO: 311471 - DNA, 858 bp, Artificial Sequence
  derived and/or modified sequence
atgtctaaatgcgcccgtaagaagtacataaaaacgaatccaaggcagatgacaatggaaactgtggaaagccagcatgacggttcaattaccgccagtctcactgagtctaaaagcgcccacgtgcagacccaaaccggacagaatagtatcccagctctggcccaagtgagcgttgccggatctggcacaaggaggggcagcccagccgtgacactggtgcagttaccaagcggacaaactatccacgtgcaaggcgtgattcaaacaccccagccgtgggtgatacagtcgtcagagattcataccgtgcaagttgctgccatcgctgaaactgatgagagtgccgagtcggagggggtgatcgatagtcacaaaagaagagagattttgtctagacgtccaagttaccggaaaatcctgaacgagctttcgtctgatgtccccggagtgcctaaaattgaggaggaaaggtccgaggaggaaggcacgcctccttctattgcgactatggccgttcctacaagcatctaccagaccagcacagggcaatacactgcaaccggagacatgccaacttatcaaatcagggctcctaccgccgcactccctcaaggcgttgtgatggcagcctcaccgggaagcctgcactccccgcaacagttggctgaagaggccacacggaaacgagaacttcgtctgatgaagaatagagaggccgctagagagtgccgaagaaagaagaaggagtacgttaaatgcctggagaaccgtgtggccgtcttggagaaccagaacaagacacttattgaggagctcaaggccctgaaagatttatactgtcataaggtggagtag

SEQ ID NO: 311472 - DNA, 810 bp, Artificial Sequence
  derived and/or modified sequence
atgacaatggaaacagtcgaatcccaacatgatggatccattacagcaagcttgaccgaaagtaagagcgctcacgtgcaaacccagactggtcagaattccatacctgctctggctcaagtgagtgtcgcaggatcaggtactagacgaggttcacctgcagttacactggtccagttaccgtccggccagacaattcacgtccagggagtcatccagacaccccagccatgggttatccagagcagcgagattcatactgtccaggttgcagcgatagctgagaccgatgagagtgctgaaagcgagggcgtgatagattcccacaaacgacgcgaaattctgtctcgccgtcccagctataggaaaattctgaacgaattgtcctccgacgttccaggtgtcccaaagatcgaggaggagagaagcgaagaagagggcacccctcccagcatcgcgactatggccgttcccaccagtatctaccaaaccagcaccgggcagtatactgcaaccggagacatgccaacctaccaaattcgggcacccactgctgcattaccccagggagtggttatggccgcatcaccagggagcctgcactcccctcaacagttagccgaggaggcgacacgcaagcgggagctccgcctcatgaagaaccgggaggccgctagagagtgtagacggaagaagaaggaatacgttaaatgtctggagaatagggtggccgtattagagaaccagaataagaccttgatcgaagaattgaaagcccttaaggacctctactgccacaaagtggaatag

SEQ ID NO: 311473 - DNA, 2469 bp, Artificial Sequence
  derived and/or modified sequence
gataaataaagaaaacaggaaaggaggaaagcattgattacaaatatcttaacaatgagcaaatgtgcaaggaaaaaatatattaagacaaatccaagacaaatgaccatggaaacagttgaatcccagcatgatggaagtataacagcttctttgacagagagcaagtctgctcatgtgcagactcagactggccaaaattcaatccctgctttagctcaggtttctgtggctggatcaggcaccagaagaggctccccagctgtaactctagtgcagttaccttcgggccaaactatacatgtccagggagtaattcagacaccacagccatgggttattcagtcatcagaaatacacaccgttcaggtagcagcaattgcagagacagatgaatctgcagaatcagaaggtgtaattgattctcataaacgtagagaaatcctttcacgaagaccctcttataggaaaatactgaatgaactgtcctctgatgtgcctggtgttcccaagattgaagaagagagatcagaggaagaaggaacaccacctagtattgctaccatggcagtaccaactagcatatatcagactagcacggggcaatacactgccactggtgacatgccaacttaccagatccgagctcctactgctgctttgccacagggagtggtgatggctgcatcgcccggaagtttgcacagtccccagcagctggcagaagaagcaacacgcaaacgagagctgaggctaatgaaaaacagggaagctgcccgggagtgtcgcaggaagaagaaagaatatgtcaaatgtcttgaaaatcgtgtggctgtgcttgaaaaccaaaacaagactctcattgaggaactcaaggccctcaaagatctttattgccataaagtagagtaactgtctttgacttggaccttgtttactctaatcaaggcaggagatgcagcagtcctacttattgccatgtggacttgtgggaaggacacgtgtgacccttaagaatccagtttggattagtgtttgaaattgaattgggaatgttgttccaggatgtggaatgcagccgtgatcacacttaccgagcttactttgatctgtttgtcaatagcatgcaaaaaatgctttgtttgccctttgcttctgctttttttcagggaagctgccaaagaatgtcgacgtcgaaagaaagaatatgtaaaatgtctggagagccgagttgcagtgctggaagtccagaacaagaagcttatagaggaacttgaaaccttgaaagacatttgttctcccaaaacagattactagaaatatttaactatgaactgaaggcagcatgtatagttgcttttgaaggaatacaatatatagctggcaagaatggtggcttcttttctttgtatcattcatcttcttctttaatcacttaacattcctaaaatgcttcactgtacgtagttaagtcgtagctataacttcaaattttttaaaagagacaaactgtaaaaaatgtgtgtattcttaaaatgcaatatttgtaaggcttgttccaatgccacatacttgcagctcccattctatgtgtcatcaatagtgtcctatgcaataaaattatttgcaggtctttaaatcattttaggaaaggatgatcaaaaataatgcatccagcagtacaataaaagtaaaccacaaaaaaatacctcaggaaagaatagaaagaaagtctatctaatgacatgcctatatgagaagaatagcctagatatgaatatatggcatttgcagatttttatattagttgctttgttaaaaaaaaaaagattgtattgctgtccttgaatgccatagtcaaagagagtttttaatagaaccatgttggttgcactttgtagtgtttggtgctcatttaaatatctgaacatttactacagtttttaactctactgtgtaatataaaagatcttgcagaagttcttagtgttggtttaatattacctaatgaaagtgatgacatattttttatatctggaatgagcctgttgggatcgcattgcataccttcggggtacaagtcagtttctacactgggtgctgatccttgcacgcgccctttctaccatctcacggtggggatggccgcagggctgtgcacccagaagaagatggctgttagcgtttcggccttcataatggcctgagactttctttctgtaggtggtctggagctgtccggctggtggccccctattttgccatttagcgaacaaccacaggaattttaaaaacaaaaacatcccaagattttttcatttcaaaatgcttcaaagtccacattagatcagatactccgctgtcggcacattcagctgaggttcattacaatcgagactgcaatgtgatctatgtttcatcttgtttttataataaaaagcttcagggaacaagcccaaagccctcacc

SEQ ID NO: 311474 - DNA, 810 bp, Artificial Sequence
  derived and/or modified sequence
atgaccatggaaacagttgaatcccagcatgatggaagtataacagcttctttgacagagagcaagtctgctcatgtgcagactcagactggccaaaattcaatccctgctttagctcaggtttctgtggctggatcaggcaccagaagaggctccccagctgtaactctagtgcagttaccttcgggccaaactatacatgtccagggagtaattcagacaccacagccatgggttattcagtcatcagaaatacacaccgttcaggtagcagcaattgcagagacagatgaatctgcagaatcagaaggtgtaattgattctcataaacgtagagaaatcctttcacgaagaccctcttataggaaaatactgaatgaactgtcctctgatgtgcctggtgttcccaagattgaagaagagagatcagaggaagaaggaacaccacctagtattgctaccatggcagtaccaactagcatatatcagactagcacggggcaatacactgccactggtgacatgccaacttaccagatccgagctcctactgctgctttgccacagggagtggtgatggctgcatcgcccggaagtttgcacagtccccagcagctggcagaagaagcaacacgcaaacgagagctgaggctaatgaaaaacagggaagctgcccgggagtgtcgcaggaagaagaaagaatatgtcaaatgtcttgaaaatcgtgtggctgtgcttgaaaaccaaaacaagactctcattgaggaactcaaggccctcaaagatctttattgccataaagtagagtaa

SEQ ID NO: 311475 - DNA, 858 bp, Artificial Sequence
  derived and/or modified sequence
atgagcaagtgcgccagaaagaagtacatcaagaccaaccccagacagatgaccatggagaccgtggagagccagcacgacggcagcatcaccgccagcctgaccgagagcaagagcgcccacgtgcagacccagaccggccagaacagcatccccgccctggcccaggtgagcgtggccggcagcggcaccagaagaggcagccccgccgtgaccctggtgcagctgcccagcggccagaccatccacgtgcagggcgtgatccagaccccccagccctgggtgatccagagcagcgagatccacaccgtgcaggtggccgccatcgccgagaccgacgagagcgccgagagcgagggcgtgatcgacagccacaagagaagagagatcctgagcagaagacccagctacagaaagatcctgaacgagctgagcagcgacgtgcccggcgtgcccaagatcgaggaggagagaagcgaggaggagggcaccccccccagcatcgccaccatggccgtgcccaccagcatctaccagaccagcaccggccagtacaccgccaccggcgacatgcccacctaccagatcagagcccccaccgccgccctgccccagggcgtggtgatggccgccagccccggcagcctgcacagcccccagcagctggccgaggaggccaccagaaagagagagctgagactgatgaagaacagagaggccgccagagagtgcagaagaaagaagaaggagtacgtgaagtgcctggagaacagagtggccgtgctggagaaccagaacaagaccctgatcgaggagctgaaggccctgaaggacctgtactgccacaaggtggagtag

SEQ ID NO: 311476 - DNA, 810 bp, Artificial Sequence
  derived and/or modified sequence
atgaccatggagaccgtggagagccagcacgacggcagcatcaccgccagcctgaccgagagcaagagcgcccacgtgcagacccagaccggccagaacagcatccccgccctggcccaggtgagcgtggccggcagcggcaccagaagaggcagccccgccgtgaccctggtgcagctgcccagcggccagaccatccacgtgcagggcgtgatccagaccccccagccctgggtgatccagagcagcgagatccacaccgtgcaggtggccgccatcgccgagaccgacgagagcgccgagagcgagggcgtgatcgacagccacaagagaagagagatcctgagcagaagacccagctacagaaagatcctgaacgagctgagcagcgacgtgcccggcgtgcccaagatcgaggaggagagaagcgaggaggagggcaccccccccagcatcgccaccatggccgtgcccaccagcatctaccagaccagcaccggccagtacaccgccaccggcgacatgcccacctaccagatcagagcccccaccgccgccctgccccagggcgtggtgatggccgccagccccggcagcctgcacagcccccagcagctggccgaggaggccaccagaaagagagagctgagactgatgaagaacagagaggccgccagagagtgcagaagaaagaagaaggagtacgtgaagtgcctggagaacagagtggccgtgctggagaaccagaacaagaccctgatcgaggagctgaaggccctgaaggacctgtactgccacaaggtggagtag

SEQ ID NO: 311477 - protein, 312 aa, Artificial Sequence
  derived and/or modified sequence
MPALSTGSGSDTGLYELLAALPAQLQPHVDSQEDLTFLWDMFGEKSLHSLVKHFQERRLALRRPEILVQPLKVSNRKSSGFRKSFRLSRKDKKTNKSMYECKKSDQYDTADVPTYEEVTPYRRQTNEKYRLVVLVGPVGVGLNELKRKLLISDTQHYGVTVPHTTRARRSQESDGVEYIFISKHLFETDVQNNKFIEYGEYKNNYYGTSIDSVRSVLAKNKVCLLDVQPHTVKHLRTLEFKPYVIFIKPPSIERLRETRKNAKIISSRDDQGAAKPFTEEDFQEMIKSAQIMESQYGHLFDKIIINDDLTVA

SEQ ID NO: 311478 - DNA, 939 bp, Artificial Sequence
  derived and/or modified sequence
atgcccgctttgtccactggatctggcagcgataccgggctgtacgaactccttgcagctctgccagcccagcttcaaccgcatgtggattcacaggaggatctgacatttctgtgggacatgtttggagagaagtccctgcactctctcgttaaacactttcaggagagaaggctggccttgagaagaccagaaatcctggtgcagccgcttaaggtaagcaatcgcaagagcagcggcttcagaaaatcctttaggttaagtcgcaaagacaaaaaaacaaacaaaagtatgtatgagtgtaagaaatctgatcagtacgataccgcggatgttccgacctatgaagaggttactccgtatcgccgccagactaacgagaagtacaggctggtcgtgttagtggggccagtgggagtgggcttgaatgaactgaagcgtaaattgctgatctccgacacccaacactacggagtcactgtgccccatacaacaagggcacgccgaagccaggaatcggacggagtcgagtatatctttatctctaaacatctgttcgagacagatgtgcagaacaataaattcatagagtacggcgagtacaagaataattactacggtacaagcatcgatagtgtcagatctgtgttagcaaaaaataaagtatgccttttggatgtgcaacctcacacagtcaagcatctccgtacattggaatttaagccgtatgtaatttttattaagccgccctcaatagaacgcctccgcgagaccagaaaaaacgctaagattatatcctcgcgcgacgatcagggggccgcgaagccctttacggaggaagattttcaagaaatgatcaaaagtgcacagatcatggaaagccagtacggtcatctgttcgacaagatcattattaacgatgacctgacagtggcatag

SEQ ID NO: 311479 - DNA, 939 bp, Artificial Sequence
  derived and/or modified sequence
atgcctgccctgagcacaggcagcggcagtgacaccggcctgtatgagctgctggccgccctgcctgcccagctgcagccccacgtggacagccaggaggacctgaccttcctgtgggacatgtttggagagaagagcctgcacagcctggtgaagcacttccaggagcggcggctggccctgcggcggcctgagatcctggtgcagcccctgaaggtgagcaacaggaagagcagcggcttcaggaagagcttccggctgagcaggaaggacaagaagaccaacaagtccatgtatgagtgcaagaagagtgaccagtatgacacagcagatgtgcccacctatgaggaggtgaccccctaccgccggcagaccaatgagaagtaccgcctggtggtgctggtgggccctgtgggcgtgggcctgaatgagctgaagaggaagctgctgatcagtgacacccagcactatggagtgacagtgccccacaccacccgggcccggcgcagccaggagagtgatggagtggagtacatcttcatcagcaagcacctgtttgaaacagatgtgcagaacaacaagttcatcgagtatggagagtacaagaacaactactacggcaccagcattgacagcgtgcgctctgtgctggccaagaacaaggtgtgcctgctggatgtgcagccccacacagtgaagcacctgcggaccctggagttcaagccctacgtgatcttcatcaagcccccatccattgaaaggctgcgggagaccaggaagaatgccaagatcatcagcagcagagatgaccagggcgccgccaagcccttcacagaggaggacttccaggagatgatcaagagcgcccagatcatggagagccagtatggccacctgtttgacaagatcatcatcaatgatgacctgactgtggcctag

SEQ ID NO: 311480 - DNA, 1067 bp, Artificial Sequence
  derived and/or modified sequence
aaacggcttacaaaatatacagatcttggtagacaacgtggctgcaggctgttgaattggaattccctgtggctgtccgaaggcagggtgtccggagagcggtgggctgacctgttcctacaccttgcatcatgccagctttgtcaacgggatctgggagtgacactggtctgtatgagctgttggctgctctgccagcccagctgcagccacatgtggatagccaggaagacctgaccttcctctgggatatgtttggtgaaaaaagcctgcattcattggtaaagcatttccaggaaaggagattggctttgagacgaccagaaatattggttcagcccctgaaagtttccaacaggaaatcatctggttttagaaaaagttttcgtcttagtagaaaagataagaaaacaaataaatccatgtatgaatgcaagaagagtgatcagtacgacacagctgacgtacccacatacgaagaagtgacaccgtatcggcgacaaactaatgaaaaatacagactcgttgtcttggttggtcccgtgggagtagggctgaatgaactgaaacgaaagctgctgatcagtgacacccagcactatggcgtgacagtgccccataccaccagagcaagaagaagccaggagagtgatggtgttgaatacattttcatttccaagcatttgtttgagacagatgtacaaaataacaagtttattgaatatggagaatataaaaacaactactacggcacaagtatagactcagttcggtctgtccttgctaaaaacaaagtttgtttgttggatgttcagcctcatacagtgaagcatttaaggacactagaatttaagccctatgtgatatttataaagcctccatcaatagagcgtttgagagaaacaagaaaaaatgcaaagattatttcaagcagagatgaccaaggtgctgcaaaacccttcacagaagaagattttcaagaaatgattaaatctgcacagataatggaaagtcaatatggtcatctttttgacaaaattataataaatgatgacctcactgtggca

SEQ ID NO: 311481 - DNA, 939 bp, Artificial Sequence
  derived and/or modified sequence
atgcccgccctgagcaccggcagcggcagcgacaccggcctgtacgaactattagctgctctgccggcacagctccagccgcacgtcgattcccaagaggatctgacatttctttgggatatgtttggtgagaagagccttcatagcctggtgaagcatttccaagaaagaagactggctctgcgacgcccggagattttggtccagcccctgaaggtctctaatagaaagagcagcggattccgaaagtctttcagactgtcccggaaagacaagaagaccaataagagtatgtatgagtgcaagaagagcgaccagtatgacactgcggacgtacctacctacgaggaagttacaccttatcgcaggcagaccaatgagaaataccgattagtggtcctggttggaccggtcggtgtcgggcttaacgaacttaaacggaagctccttatcagtgatactcaacattatggagtcaccgtgccacacacaacgcgggcaaggcgctcacaagaaagcgacggggttgaatatatttttatctccaaacatctcttcgaaacggatgtgcagaacaataaattcatcgagtacggcgaatacaagaacaactactacggcacttctatcgattccgtgcgcagcgtgctagcgaagaacaaggtatgtctattggacgtgcagccacacaccgttaaacatctgaggacgctggagtttaaaccctacgtgatcttcatcaaaccaccatctatcgagagactcagggagacacgcaaaaatgccaagatcatctcttcgcgcgatgaccagggcgctgccaaaccattcactgaggaagacttccaggaaatgatcaagtctgctcagatcatggagagccagtacggccatttgtttgacaagattattatcaacgatgatctgaccgtcgcgtag

SEQ ID NO: 311482 - DNA, 939 bp, Artificial Sequence
  derived and/or modified sequence
atgcctgccttgtcaaccggctcagggtcagacacgggactgtacgagctgctggctgctcttcccgcacaattgcagcctcatgtggatagccaagaggacctcacattcctgtgggatatgtttggtgaaaagagcttgcatagcctggtcaaacatttccaagaacgccgtctggcgttacggcgacctgaaatcctggtacaaccgctaaaagtctcaaacagaaaatccagcggcttccggaagagttttagacttagccggaaggataagaagacaaacaagtccatgtatgagtgcaagaagagcgaccaatacgacactgcagatgtgcctacctacgaagaggtaacaccttaccgacgccaaacaaatgagaagtataggttggtggtcctggtgggtcccgttggcgtcggtctgaacgaattaaaaaggaaacttctgatttcagatacacagcactacggcgttaccgtcccgcataccactcgcgcaaggcggagccaggagtcagacggagtagagtacatttttatttccaaacatctctttgaaacagacgtgcagaacaataagtttatcgagtatggtgagtacaagaacaactactacggaaccagcatcgactccgtccgctccgtgctggcaaagaacaaggtgtgccttctcgatgtacagccgcacactgttaagcacctgcggactttagagtttaaaccttacgtaatcttcataaaacctccctctattgaaagactgagagaaactcggaagaacgctaagatcatctcaagcagagacgaccaaggcgctgccaagccattcacagaggaagatttccaggagatgataaaatctgcacaaatcatggagtctcaatacggccacttatttgacaagatcattataaatgacgatcttaccgtcgcctag

SEQ ID NO: 311483 - DNA, 939 bp, Artificial Sequence
  derived and/or modified sequence
atgcccgccctgagcaccggcagcggcagcgacaccggcctgtacgagctgctggccgccctgcccgcccagctgcagccccacgtggacagccaggaggacctgaccttcctgtgggacatgttcggcgagaagagcctgcacagcctggtgaagcacttccaggagagaagactggccctgagaagacccgagatcctggtgcagcccctgaaggtgagcaacagaaagagcagcggcttcagaaagagcttcagactgagcagaaaggacaagaagaccaacaagagcatgtacgagtgcaagaagagcgaccagtacgacaccgccgacgtgcccacctacgaggaggtgaccccctacagaagacagaccaacgagaagtacagactggtggtgctggtgggccccgtgggcgtgggcctgaacgagctgaagagaaagctgctgatcagcgacacccagcactacggcgtgaccgtgccccacaccaccagagccagaagaagccaggagagcgacggcgtggagtacatcttcatcagcaagcacctgttcgagaccgacgtgcagaacaacaagttcatcgagtacggcgagtacaagaacaactactacggcaccagcatcgacagcgtgagaagcgtgctggccaagaacaaggtgtgcctgctggacgtgcagccccacaccgtgaagcacctgagaaccctggagttcaagccctacgtgatcttcatcaagccccccagcatcgagagactgagagagaccagaaagaacgccaagatcatcagcagcagagacgaccagggcgccgccaagcccttcaccgaggaggacttccaggagatgatcaagagcgcccagatcatggagagccagtacggccacctgttcgacaagatcatcatcaacgacgacctgaccgtggcctag

SEQ ID NO: 311484 - protein, 297 aa, Artificial Sequence
  derived and/or modified sequence
MDSKYQCVKLNDGHFMPVLGFGTYAPAEVPKSKALEAVKLAIEAGFHHIDSAHVYNNEEQVGLAIRSKIADGSVKREDIFYTSKLWSNSHRPELVRPALERSLKNLQLDYVDLYLIHFPVSVKAMEKCKDAGLAKSIGVSNFNHRLLEMILNKPGLKYKPVCNQVECHPYFNQRKLLDFCKSKDIVLVAYSALGSHREEPWVDPNSPVLLEDPVLCALAKKHKRTPALIALRYQLQRGVVVLAKSYNEQRIRQNVQVFEFQLTSEEMKAIDGLNRNVRYLTLDIFAGPPNYPFSDEY

SEQ ID NO: 311485 - DNA, 894 bp, Artificial Sequence
  derived and/or modified sequence
atggacagtaaatatcagtgtgtcaagctgaatgatggccacttcatgccagtgctgggttttggcacgtatgcacctgccgaggtacctaaatcaaaggcccttgaagctgttaagctggccattgaggctgggttccaccacattgattctgcacacgtgtacaataacgaggaacaagtcgggttagcaatcaggagtaagattgctgacggcagcgtaaagcgagaagacatattttacacttccaaactgtggagcaactctcaccgacctgaactcgtccggcctgccctcgagagatctttgaaaaatctacagctggattatgtcgacctatacctgatccattttcctgtatcagtgaaggccatggaaaagtgcaaagatgccggactagccaaatctataggtgtctccaattttaaccaccgactcctggagatgatcctgaataagcccggactcaagtacaagcctgtctgtaatcaagtggagtgtcatccgtatttcaaccaaaggaagctgctggatttctgtaaatcgaaggatatagtgctggttgcctactcagcactgggatcgcatcgagaggagccctgggtggaccccaactcacctgtgctactggaggatcccgtcctgtgcgcgctggcaaaaaagcacaagcgaaccccagcactcatcgccctcaggtaccaattgcagcgtggggtggtggttctggctaaatcatacaacgaacagcgcattcgacagaatgtccaggtctttgagttccagctgacctccgaggaaatgaaagccattgatggccttaataggaacgtgaggtatctgacattggacatcttcgccgggccccctaattaccccttttccgacgaatactag

SEQ ID NO: 311486 - DNA, 894 bp, Artificial Sequence
  derived and/or modified sequence
atggacagcaagtaccagtgtgtgaagctgaatgatggccacttcatgcctgtgctgggcttcggcacctacgccccagctgaggtgcccaagagcaaggccctggaggccgtgaagctggccatcgaggccggcttccaccacattgattctgcccacgtgtacaacaatgaggagcaggtgggcctggccatccgcagcaagattgctgatggctctgtgaagcgggaggacatcttctacaccagcaagctgtggagcaacagccacaggcctgagctggtgcggcctgccctggagaggagcctgaagaacctgcagctggactatgtggacctgtacctgatccacttccctgtgtctgtgaaggccatggagaagtgcaaggatgctggcctggccaagagcattggagtgagcaacttcaaccaccggctgctggagatgatcctgaacaagccaggcctgaagtacaagcctgtgtgcaaccaggtggagtgccacccctacttcaaccagaggaagctgctggacttctgcaagagcaaggacatcgtgctggtggcctacagcgccctgggcagccaccgggaggagccctgggtggaccccaacagccctgtgctgctggaggaccctgtgctgtgtgccctggccaagaagcacaagaggaccccagccctgattgccctgcgctaccagctgcagaggggcgtggtggtgctggccaagagctacaatgagcagaggatccggcagaatgtgcaggtgtttgagttccagctgaccagcgaggagatgaaggccattgatggcctgaacagaaatgtgcgctacctgaccctggacatctttgctggcccccccaactaccccttcagtgatgagtactag

SEQ ID NO: 311487 - DNA, 1478 bp, Artificial Sequence
  derived and/or modified sequence
gctaaccaggccagtgacagaaatggattcgaaataccagtgtgtgaagctgaatgatggtcacttcatgcctgtcctgggatttggcacctatgcgcctgcagaggttcctaaaagtaaagctctagaggccgtcaaattggcaatagaagccgggttccaccatattgattctgcacatgtttacaataatgaggagcaggttggactggccatccgaagcaagattgcagatggcagtgtgaagagagaagacatattctacacttcaaagctttggagcaattcccatcgaccagagttggtccgaccagccttggaaaggtcactgaaaaatcttcaattggactatgttgacctctatcttattcattttccagtgtctgtaaaggccatggagaagtgtaaagatgcaggattggccaagtccatcggggtgtccaacttcaaccacaggctgctggagatgatcctcaacaagccagggctcaagtacaagcctgtctgcaaccaggtggaatgtcatccttacttcaaccagagaaaactgctggatttctgcaagtcaaaagacattgttctggttgcctatagtgctctgggatcccatcgagaagaaccatgggtggacccgaactccccggtgctcttggaggacccagtcctttgtgccttggcaaaaaagcacaagcgaaccccagccctgattgccctgcgctaccagctgcagcgtggggttgtggtcctggccaagagctacaatgagcagcgcatcagacagaacgtgcaggtgtttgaattccagttgacttcagaggagatgaaagccatagatggcctaaacagaaatgtgcgatatttgacccttgatatttttgctggcccccctaattatccattttctgatgaatattaacatggagggcattgcatgaggtctgccagaaggccctgcgtgtggatggtgacacagaggatggctctatgctggtgactggacacatcgcctctggttaaatctctcctgcttggcgacttcagtaagctacagctaagcccatcggccggaaaagaaagacaataattttgtttttcattttgaaaaaattaaatgctctctcctaaagattcttcacctactttggtctccataacttctatgttttctctccttctgacacactagtgcccccaaattgtgatttgcctatacgtttagggccggggttggaagatgttaacaaccatttaagattcatttctgcagtgggagtgggtggagtttcaccctctgggaaaggggcaggtgacaggtatttatcagtcagtgcctctctagctcttgtaggaagaagcacacgcaggatggagtctagaggatgagcgatattgactagcaattcatgggctccctccagcagtgcgagggtcagagtttctggagccttgggaggaggcatccctgtgagggggggtta

SEQ ID NO: 311488 - DNA, 894 bp, Artificial Sequence
  derived and/or modified sequence
atggacagcaagtaccagtgcgtgaagctgaacgacggccacttcatgcctgtgctagggttcggaacctatgctcccgccgaggtgccaaaatcaaaggccctggaggcagttaaactcgctatcgaggctggctttcaccatattgatagtgctcatgtctacaataacgaggagcaggtgggtttggccattaggagtaaaattgcagacggaagcgtaaagcgggaggacatcttttacacctcaaagctgtggtccaattcccatcgtcccgagctggtgaggcccgcccttgagagaagtttgaagaatctgcagctggattacgtcgacttgtacttaatacactttccggtttcagtcaaggctatggagaaatgtaaagacgcaggccttgctaagtccataggcgtatcgaactttaatcaccgcttattagaaatgatcctgaataagcccgggctgaaatataagcccgtgtgcaaccaggtggagtgtcatccctactttaatcagcggaagctgctcgacttttgcaagtctaaagacattgtactggttgcctacagcgctctcgggtcgcaccgagaggagccttgggtggaccccaattcccctgttctgttggaagaccccgttctctgcgctctggctaagaagcacaagaggactcccgccctgatcgcactccgataccagcttcagcgcggcgtggttgtactcgccaagtcttataatgagcagaggattcggcaaaatgtgcaggtgtttgaatttcagctcacgtccgaggaaatgaaggcaattgacggactgaatagaaatgtgcgctatctcaccctggacattttcgccggcccacccaattatcccttttccgacgaatattag

SEQ ID NO: 311489 - DNA, 894 bp, Artificial Sequence
  derived and/or modified sequence
atggattcaaaatatcagtgcgtcaaactcaacgacggacattttatgcccgtcctcggattcggcacctatgcacccgcagaagtccctaagagcaaggctctcgaagcagtaaaattggccatcgaagccggatttcatcatattgacagcgcccacgtgtataataatgaggaacaggttggattggcgatcaggtcaaaaatcgccgatggttctgtaaaaagagaagacatcttctacacctccaaactgtggagtaactctcaccggccagagcttgtacggccagccctcgaaaggtcactcaagaatttacagttggactacgtcgatctctaccttattcacttcccagtgtcagttaaagccatggagaaatgtaaagatgccggtttggcaaagtccatcggcgtttccaatttcaatcaccgcttactcgagatgatattgaacaagcccggacttaaatacaaacctgtgtgcaatcaggtggagtgccacccctacttcaaccagcgtaaactgctggatttctgtaaaagtaaagatattgtactggttgcctacagcgccctgggatctcatcgcgaggaaccatgggttgatcctaatagtccggtgctgctggaggacccagtcctctgcgccttggctaagaagcacaagcgcactccggcactcatcgcattacgctaccaacttcagaggggcgtcgtggtgttagctaagagttacaacgagcagaggattagacagaatgttcaggtattcgaattccaactaaccagcgaagaaatgaaggcaatcgatggccttaaccgcaatgtgcgctacctgactctggacatattcgccggtcccccaaattatcctttttcagacgagtactag

SEQ ID NO: 311490 - DNA, 894 bp, Artificial Sequence
  derived and/or modified sequence
atggacagcaagtaccagtgcgtgaagctgaacgacggccacttcatgcccgtgctgggcttcggcacctacgcccccgccgaggtgcccaagagcaaggccctggaggccgtgaagctggccatcgaggccggcttccaccacatcgacagcgcccacgtgtacaacaacgaggagcaggtgggcctggccatcagaagcaagatcgccgacggcagcgtgaagagagaggacatcttctacaccagcaagctgtggagcaacagccacagacccgagctggtgagacccgccctggagagaagcctgaagaacctgcagctggactacgtggacctgtacctgatccacttccccgtgagcgtgaaggccatggagaagtgcaaggacgccggcctggccaagagcatcggcgtgagcaacttcaaccacagactgctggagatgatcctgaacaagcccggcctgaagtacaagcccgtgtgcaaccaggtggagtgccacccctacttcaaccagagaaagctgctggacttctgcaagagcaaggacatcgtgctggtggcctacagcgccctgggcagccacagagaggagccctgggtggaccccaacagccccgtgctgctggaggaccccgtgctgtgcgccctggccaagaagcacaagagaacccccgccctgatcgccctgagataccagctgcagagaggcgtggtggtgctggccaagagctacaacgagcagagaatcagacagaacgtgcaggtgttcgagttccagctgaccagcgaggagatgaaggccatcgacggcctgaacagaaacgtgagatacctgaccctggacatcttcgccggcccccccaactaccccttcagcgacgagtactag

SEQ ID NO: 311491 - DNA, 1197 bp, Artificial Sequence
  derived and/or modified sequence
cgcggggatggagcccctgcgggtgctggagctatacagcggcgtgggcggcatgcaccacgcgctgagagaaagctgtatacctgcacaagtggtggctgccattgatgtcaacactgtcgctaatgaagtatacaagtataattttcctcacacacagttacttgccaagacgattgaaattacaaaaattaccaaagtatattcttttggaaaatgttaaaggttttgaagtatcttctacaagagacctcttgatacaaacaatagaaaattgtggctttcagtaccaagagtttctattatctccaacctctcttggcattccaaattcaaggctacgatattttcttattgcaaagcttcagtcagagccattaccctttcaagcccctggtcaggtactgatggagttccccaaaattgaatctgtacatccacaaaaatatgcaatggatgtagaaaataaaattcaagaaaagaacgttgaaccaaatattagctttgatggcagcatacagtgttctggaaaagatgccattctttttaagcttgaaactgcagaagaaattcacaggaaaaatcaacaagatagtgatctctctgtgaaaatgctaaaagattttcttgaagatgacactgacgtgaaccagtatcttttaccaccaaagtcattgctgcgatatgctcttctgttagacattgttcagcccacttgtagaaggtccgtgtgctttaccaaaggatatggaagctacatagaagggacagggtctgtgttacagactgcagaggatgtgcaggttgagaatatctacaaatcccttaccaatttgtcacaagaagaacagataacaaagctgttaatacttaaactgcgatatttcactcctaaagaaatagcaaatctccttggatttcctccagagttcggatttcctgagaagataacagtgaaacagcgttatcgcctacttggaaatagtctcaacgtgcatgtagtagctaaactaatcaaaatcttatatgaataattttgaaataactctgaaagatggtcatatgatattccttcattttcagagagtaattctgaaattctgttttgaactaattctggtgaaatttaactaaattattttaatctgtccttattaagaaatttggattttattaaaaaaatccatgtgtttcatc

SEQ ID NO: 311492 - protein, 310 aa, Artificial Sequence
  derived and/or modified sequence
MSTLSLMKYTSIIFLTHSYLPRRLKIGRQGDMTDSRTNSFLHILDILPRDLLIQTIENCGFQYQEFLLSPTSLGIPNSRLRYFLIAKLQSEPLPFQAPGQVLMEFPKIESVHPQKYAMDVENKIQEKNVEPNISFDGSIQCSGKDAILFKLETAEEIHRKNQQDSDLSVKMLKDFLEDDTDVNQYLLPPKSLLRYALLLDIVQPTCRRSVCFTKGYGSYIEGTGSVLQTAEDVQVENIYKSLTNLSQEEQITKLLILKLRYFTPKEIANLLGFPPEFGFPEKITVKQRYRLLGNSLNVHVVAKLIKILYE

SEQ ID NO: 311493 - DNA, 933 bp, Artificial Sequence
  derived and/or modified sequence
atgagcaccctgagcctgatgaagtacaccagcatcatcttcctgacccacagctacctgcccagaagactgaagatcggcagacagggcgacatgaccgacagcagaaccaacagcttcctgcacatcctggacatcctgcccagagacctgctgatccagaccatcgagaactgcggcttccagtaccaggagttcctgctgagccccaccagcctgggcatccccaacagcagactgagatacttcctgatcgccaagctgcagagcgagcccctgcccttccaggcccccggccaggtgctgatggagttccccaagatcgagagcgtgcacccccagaagtacgccatggacgtggagaacaagatccaggagaagaacgtggagcccaacatcagcttcgacggcagcatccagtgcagcggcaaggacgccatcctgttcaagctggagaccgccgaggagatccacagaaagaaccagcaggacagcgacctgagcgtgaagatgctgaaggacttcctggaggacgacaccgacgtgaaccagtacctgctgccccccaagagcctgctgagatacgccctgctgctggacatcgtgcagcccacctgcagaagaagcgtgtgcttcaccaagggctacggcagctacatcgagggcaccggcagcgtgctgcagaccgccgaggacgtgcaggtggagaacatctacaagagcctgaccaacctgagccaggaggagcagatcaccaagctgctgatcctgaagctgagatacttcacccccaaggagatcgccaacctgctgggcttcccccccgagttcggcttccccgagaagatcaccgtgaagcagagatacagactgctgggcaacagcctgaacgtgcacgtggtggccaagctgatcaagatcctgtacgagtag

SEQ ID NO: 311494 - DNA, 933 bp, Artificial Sequence
  derived and/or modified sequence
atgtccacgctctccctgatgaaatacacctcaatcattttcttgactcacagctacctgccacgcagattaaagatcgggcggcaaggcgacatgacagacagccggaccaacagcttccttcacattcttgacatcctgccccgagatttactcattcagacaatcgaaaattgcgggtttcagtaccaggaattcctgctgtctcctacgagtctggggatccccaattccaggctccgttacttcctaatcgctaagcttcagagcgagccccttccgttccaagcacccggacaagttttgatggagttcccaaagatcgaaagcgtacatccgcagaaatacgccatggacgtcgaaaacaagattcaggaaaaaaacgtcgagcccaacatcagttttgatggaagcatccagtgctctggtaaggatgctattttgttcaaactggagactgcagaggagattcataggaaaaaccagcaggactcggacttaagcgttaagatgctgaaagatttcttggaagatgatacagatgtaaatcagtatttattgccaccgaagtctttgctccggtatgccctgctcctggatattgtgcagccaacatgcaggcgatcagtgtgcttcacaaaaggatacgggtcctacattgagggtactggctccgtgctacaaacggccgaagacgtccaggtggagaatatatataaatctctgacaaatctgagtcaggaagaacaaattactaagctactgatactcaagctgcgctacttcacaccaaaagagatcgccaacctgctcggctttccccccgagttcggtttcccagaaaagatcaccgtgaaacagcgctaccgcttgctcggcaacagcctcaacgtgcacgttgtggccaaactcataaaaatcctgtacgaatag

SEQ ID NO: 311495 - DNA, 933 bp, Artificial Sequence
  derived and/or modified sequence
atgagcaccctgagcctgatgaagtacaccagcatcatcttcctgacccacagctacctgccccggcggctgaagattggccggcagggcgacatgacagacagcaggaccaacagcttcctgcacatcctggacatcctgccccgggacctgctgatccagaccatcgagaactgtggcttccagtaccaggagttcctgctgagccccaccagcctgggcatccccaacagccggctgcgctacttcctgattgccaagctgcagagcgagcccctgcccttccaggcccctggccaggtgctgatggagttccccaagattgagagcgtgcacccccagaagtatgccatggatgtggagaacaagatccaggagaagaatgtggagcccaacatcagctttgatggcagcatccagtgcagcggcaaggatgccatcctcttcaagctggagacagctgaggagatccacaggaagaaccagcaggacagcgacctgtctgtgaagatgctgaaggacttcctggaggatgacacagatgtgaaccagtacctgctgccccccaagagcctgctgcgctatgccctgctgctggacatcgtgcagcccacctgcagaagatctgtgtgcttcaccaagggctacggcagctacatcgagggcactggatctgtgctgcagacagcagaagatgtgcaggtggagaacatctacaagagcctgaccaacctgagccaggaggagcagatcaccaagctgctgatcctgaagctgcgctacttcacccccaaggagatcgccaacctgctgggcttccccccagagtttggcttccctgagaagatcaccgtgaagcagcgctaccgcctgctgggcaacagcctgaatgtgcacgtggtggccaagctgatcaagatcctgtatgaatag

SEQ ID NO: 311496 - DNA, 933 bp, Artificial Sequence
  derived and/or modified sequence
atgagcaccctgagcctgatgaagtacaccagcatcatcttcctgacgcactcctatttacccagaagactcaagatagggcgccaaggagatatgactgactcaagaaccaacagcttccttcacattctggacattctgccgcgagaccttctaattcaaaccatagagaactgcggctttcagtatcaggaatttttgctctcaccaaccagcctgggtatccctaattccagactgagatactttctcatcgccaaattacagagcgagccattgccattccaagcgccgggacaggtcctgatggagtttcctaagatcgaaagtgtacaccctcagaagtatgcaatggacgtggaaaataaaatccaggagaagaacgtggaaccaaatattagcttcgatggaagcattcaatgttcaggcaaagacgccatcctgttcaagctggagacagcagaagagatccacagaaaaaaccagcaggattcggacctcagtgtgaaaatgctcaaagacttcctggaagacgataccgatgtgaatcagtacctgctgcctcccaagagcttactgcgctatgccttgctcttggacatcgtccagcctacctgtaggcggagcgtttgttttaccaaggggtatgggtcatatattgaaggaacgggttcggtcctgcagacggccgaagatgtgcaggtggagaatatatacaaatcactgaccaacctgagccaggaagagcagattacaaagctgctgatcctcaaattacgttatttcactccaaaggaaatcgctaatctgttggggtttccacccgaatttggatttccggagaagatcactgtcaagcagaggtaccggcttcttggaaattcactcaatgtgcacgtagtcgcaaagcttattaagattttgtacgagtag

SEQ ID NO: 311497 - DNA, 933 bp, Artificial Sequence
  derived and/or modified sequence
atgtctactttgtccctcatgaaatacactagtatcatattcctcacccacagttacctccctagacgattgaagattggtcgtcagggtgatatgaccgacagccgaacgaacagttttctgcatatacttgacattctccccagggatctgctcatccagaccatcgaaaactgtgggtttcagtaccaagagttcctactaagccctacttctctggggattcctaactctagacttcgatacttcctcattgcaaaactgcaatccgaacccttgccttttcaagcaccagggcaagtactcatggagttccctaagatagagagtgtccatccccagaaatacgccatggacgtggaaaataaaatccaagagaagaatgtggaaccaaacatttcattcgacgggagtatccagtgtagcggaaaggacgctatccttttcaagcttgagaccgcagaagagatccatcgcaagaatcagcaagacagtgatctctccgtgaagatgcttaaggattttctcgaagacgataccgatgtgaaccagtatttgctgcccccaaagtcactgctgaggtatgcactgcttttagatattgtgcagccgacttgccggaggtcagtttgttttactaaaggatatggaagctacatagagggcaccggaagcgtgctgcaaactgcagaggacgtgcaggtggagaatatatacaaatctctcacgaatttgtcccaggaggaacagattactaaattgttaatcctgaagttgaggtatttcacaccaaaagagattgctaatcttctgggattcccacctgagtttggtttcccagaaaaaatcaccgtcaagcaacgatacagactgcttgggaacagtctgaatgtgcatgtcgtggcaaaactgatcaaaattctatatgaatag

SEQ ID NO: 311498 - DNA, 1131 bp, Artificial Sequence
  derived and/or modified sequence
cgcggggatggagcccctgcgggtgctggagctatacagcggcgtgggcggcatgcaccacgcgctgagagaaagctgtatacctgcacaagtggtggctgccattgatgtcaacactgtcgctaatgaagtatacaagtataattttcctcacacacagttacttgccaagacgattgaaagacctcttgatacaaacaatagaaaattgtggctttcagtaccaagagtttctattatctccaacctctcttggcattccaaattcaaggctacgatattttcttattgcaaagcttcagtcagagccattaccctttcaagcccctggtcaggtactgatggagttccccaaaattgaatctgtacatccacaaaaatatgcaatggatgtagaaaataaaattcaagaaaagaacgttgaaccaaatattagctttgatggcagcatacagtgttctggaaaagatgccattctttttaagcttgaaactgcagaagaaattcacaggaaaaatcaacaagatagtgatctctctgtgaaaatgctaaaagattttcttgaagatgacactgacgtgaaccagtatcttttaccaccaaagtcattgctgcgatatgctcttctgttagacattgttcagcccacttgtagaaggtccgtgtgctttaccaaaggatatggaagctacatagaagggacagggtctgtgttacagactgcagaggatgtgcaggttgagaatatctacaaatcccttaccaatttgtcacaagaagaacagataacaaagctgttaatacttaaactgcgatatttcactcctaaagaaatagcaaatctccttggatttcctccagagttcggatttcctgagaagataacagtgaaacagcgttatcgcctacttggaaatagtctcaacgtgcatgtagtagctaaactaatcaaaatcttatatgaataattttgaaataactctgaaagatggtcatatgatattccttcattttcagagagtaattctgaaattctgttttgaactaattctggtgaaatttaactaaattattttaatctgtccttattaagaaatttggattttattaaaaaaatccatgtgtttcatc

SEQ ID NO: 311499 - DNA, 1374 bp, Artificial Sequence
  derived and/or modified sequence
attcgggaagccttattgttttccgtcctttgttcccctctagacccttgccaatccccaggccgcgaggccctctgaagccctgagcctggagcggtaggagacgggggaactgaaacgccgcggaaccagaggctgagggagcggcgcgatggagggaggaggagcgacggaccggcaggcctagctccggggctgcggcggctgaggcgcggggatggagcccctgcgggtgctggagctatacagcggcgtgggcggcatgcaccacgcgctgagagaaagctgtatacctgcacaagtggtggctgccattgatgtcaacactgtcgctaatgaagtatacaagtataattttcctcacacacagttacttgccaagacgattgaagattggccggcagggtgatatgactgattcaaggacgaatagcttcttacatattctagatattctcccaagagacctcttgatacaaacaatagaaaattgtggctttcagtaccaagagtttctattatctccaacctctcttggcattccaaattcaaggctacgatattttcttattgcaaagcttcagtcagagccattaccctttcaagcccctggtcaggtactgatggagttccccaaaattgaatctgtacatccacaaaaatatgcaatggatgtagaaaataaaattcaagaaaagaacgttgaaccaaatattagctttgatggcagcatacagtgttctggaaaagatgccattctttttaagcttgaaactgcagaagaaattcacaggaaaaatcaacaagatagtgatctctctgtgaaaatgctaaaagattttcttgaagatgacactgacgtgaaccagtatcttttaccaccaaagtcattgctgcgatatgctcttctgttagacattgttcagcccacttgtagaaggtccgtgtgctttaccaaaggatatggaagctacatagaagggacagggtctgtgttacagactgcagaggatgtgcaggttgagaatatctacaaatcccttaccaatttgtcacaagaagaacagataacaaagctgttaatacttaaactgcgatatttcactcctaaagaaatagcaaatctccttggatttcctccagagttcggatttcctgagaagataacagtgaaacagcgttatcgcctacttggaaatagtctcaacgtgcatgtagtagctaaactaatcaaaatcttatatgaataattttgaaataactctgaaagatggtcatatgatattccttcattttcagagagtaattctgaaattctgttttgaactaattctggtgaaatttaactaaattattttaatctgtccttattaa

SEQ ID NO: 311500 - DNA, 864 bp, Artificial Sequence
  derived and/or modified sequence
atggagttcaacccaagtgatcacccgcgggcctcaacgatcttcctttccaaatctcagaccgatgtcagggaaaagcgcaagtccctgttcataaaccatcatcctccaggtcaaattgcacgaaaatactcttcatgctcgactattttcctcgacgactccaccgtttcgcaacctaatttaaagtacaccattaaatgtgtggcactggccatctattaccacattaagaatagggatcccgacggtcggatgctgttagacatctttgacgagaacttacaccccttaagcaaatcggaagtcccccccgactacgacaagcacaaccctgaacaaaagcaaatctacagattcgtgaggacgctgttttcagcagcccagcttaccgccgagtgcgccatagtgacattggtgtacctggaaagactgctgacttatgccgagatcgacatttgccctgccaattggaagagaatcgtgctgggagccatcctactcgcttccaaggtgtgggacgatcaggccgtatggaatgtagactactgccagattctgaaggacataacagtggaggacatgaacgaactggaacggcaatttttggagttgttgcagtttaatattaacgtgccttcttccgtctacgctaaatattactttgatctccgatcattggcagaagccaataatctcagctttccactagaaccactctctagagaaagagcccacaaattggaggcaattagtaggctttgtgaggacaagtacaaggatctaagacgcagtgcccgcaagaggagcgccagcgcagacaacctgacattacccagatggtctccggcaatcattagttag

SEQ ID NO: 311501 - DNA, 864 bp, Artificial Sequence
  derived and/or modified sequence
atggagttcaatcccagcgaccatccaagggcctctacgatattccttagcaagtctcagacagacgttcgtgagaaacgcaagagtttgtttattaatcaccacccacctggacagattgcccgtaagtatagtagctgtagcactatatttttggatgacagcaccgtgagtcaacccaacctcaaatacactattaagtgtgtcgccctggccatctattaccacatcaagaaccgagatccggatggcagaatgcttctggacatctttgatgaaaacctgcatccgctgtctaagagcgaggttccgcctgattatgacaaacacaatcctgagcagaaacagatttaccgctttgttagaactctgttttccgcggcgcagctaactgctgagtgcgctattgtgactctggtttacctggagcggctgctcacatacgccgaaatcgacatctgtcccgcgaattggaagcgcattgtactgggtgctatcctgttagccagcaaggtctgggatgatcaggccgtttggaatgtagactactgtcagatcctgaaagacatcaccgttgaggatatgaacgagctagagcgtcagtttctagaacttctgcaattcaatatcaatgtgcctagcagcgtgtacgccaagtattatttcgatttgagaagcctggctgaagctaacaacctgtcttttccactggagcctcttagcagggagcgggctcataaactcgaagctattagtaggctgtgtgaggacaagtacaaggatctccggaggtcagcaaggaagcgtagtgccagcgcagataacctcacactgcccaggtggtcccctgccatcatttcgtag

SEQ ID NO: 311502 - DNA, 864 bp, Artificial Sequence
  derived and/or modified sequence
atggagttcaaccccagcgaccacccccgggccagcaccatcttcctgagcaagagccagacagatgtgcgggagaagaggaagagcctcttcatcaaccaccaccccccaggccagatcgccaggaagtacagcagctgcagcaccatcttcctggatgacagcacagtgtcccagcccaacctgaagtacaccatcaagtgtgtggccctggccatctactaccacatcaagaacagagatcctgatggccgcatgctgctggacatctttgatgagaacctgcaccccctgagcaagtctgaggtgcccccagactatgacaagcacaaccctgagcagaagcagatctacagatttgtgaggaccctcttctctgctgcccagctgacagcagaatgtgccatcgtgaccctggtgtacctggagcggctgctgacctatgcagaaattgacatctgcccagccaactggaagagaattgtgctgggcgccatcctgctggccagcaaggtgtgggatgaccaggccgtgtggaatgtggactactgccagatcctgaaggacatcaccgtggaggacatgaatgagctggagcggcagttcctggagctgctgcagttcaacatcaacgtgcccagctctgtgtatgccaagtactactttgacctgcggagcctggccgaggccaacaacctgtccttccccctggagcccctgagccgggagcgggcccacaagctggaggccatcagccggctgtgtgaggacaagtacaaggacctgcggcgcagcgccaggaagaggtctgccagcgctgacaacctgaccctgccccgctggagccctgccatcatctcctag

SEQ ID NO: 311503 - DNA, 864 bp, Artificial Sequence
  derived and/or modified sequence
atggagttcaaccccagcgaccacccccgggccagcaccatcttcctgtctaaaagccagaccgatgtccgcgaaaaacgcaaatctctgttcattaatcaccaccccccagggcagatagcaagaaaatatagttcctgttcgaccatcttcctggacgactctaccgtatcccaacccaatctcaaatacacaatcaagtgcgttgcccttgctatctactaccacatcaagaatcgggatcccgacggccggatgcttttggatatttttgatgaaaatctgcacccattatccaagagcgaggtcccgccggattatgacaagcacaacccggaacagaaacaaatataccggtttgtgaggaccctgttctctgcggctcagcttaccgcagagtgcgcaattgtgactcttgtttatcttgagcgcctactcacctatgccgagatcgacatttgccctgcgaactggaaacgaatcgtgctaggggccatactgctcgcttcaaaggtatgggatgaccaggcagtatggaacgtcgattactgccaaatacttaaggacataacagtggaggatatgaatgagttggaaaggcagtttctggagctgctgcaattcaacataaacgtgccgtccagtgtatacgccaagtactacttcgatctgaggagtctcgccgaagccaacaacctttcgtttcccttagaacccctgtctagggaaagagctcacaagctagaagccatcagtcgcctgtgcgaagataagtacaaggacctaagacggtcagcccgaaagaggtcagcgtccgctgataatttgacacttccgagatggtctcctgcgattattagctag

SEQ ID NO: 311504 - DNA, 864 bp, Artificial Sequence
  derived and/or modified sequence
atggagttcaaccccagcgaccacccccgggccagcaccatcttcctgtccaaaagtcaaactgacgtccgggagaagcggaaatccttattcataaatcaccacccacctggccagatagcacggaaatactcaagttgtagcacaatttttctggatgactcaacagtgtctcaacctaatctgaagtacaccataaaatgtgttgctttagccatctactaccacatcaagaatagggatcccgacggcagaatgctccttgatattttcgatgagaacctgcaccccctgagcaagagtgaggtgccgccagattatgacaagcacaaccctgagcagaaacagatctaccgctttgtgagaacactgttctccgccgcccagctcaccgctgagtgtgcgatagtgactttagtttacctggagaggctcttgacgtacgccgaaattgacatctgtcctgcaaattggaaacggatcgtcctgggggctatcctactggcctcgaaggtgtgggatgaccaggcggtgtggaatgtagactactgccaaatcctgaaggatattactgttgaggacatgaatgaactagagcgacagttcctcgagctactgcaatttaacattaatgtgccttcctccgtctacgccaagtattattttgacttaaggtccctcgccgaggcaaacaacctctcttttccactcgagccattatccagagaaagggctcataagctggaggccatcagtcggttatgcgaagacaagtacaaggatttgcggaggagcgcacgcaaacggtcagcttcagccgacaatctgacactgcctaggtggtctcctgccattatctcctag

SEQ ID NO: 311505 - DNA, 864 bp, Artificial Sequence
  derived and/or modified sequence
atggaattcaacccttctgaccatcctagggctagtactatctttcttagcaaatcacagacagacgtgcgcgagaagaggaagagcctgttcattaaccaccaccctcctggacagattgccaggaaatacagcagctgcagcaccatcttcctggacgactcaacagtctcccagcccaacctgaagtacactattaagtgtgtggccctcgccatttactaccacataaaaaatagagacccagacgggagaatgctactcgacatattcgatgagaatctgcaccctctcagcaagagcgaggttcctcctgactacgataagcataatccggagcagaagcagatttataggttcgtgaggaccctttttagcgcggctcagttaacagccgaatgcgctatcgtcaccctagtgtacctggaacgcttgctgacctacgccgaaattgatatatgccctgccaattggaaaagaattgtgctgggggctatactactggctagcaaagtgtgggatgatcaagcagtatggaacgttgactactgccagatcctcaaggacataactgtggaggacatgaatgagctcgagcgacagttcttggaattattgcaatttaacatcaacgtgccctcatctgtgtatgcgaaatattatttcgatctccgaagccttgcagaagcaaacaatctttccttcccattggaaccattgtccagggaacgcgctcataagctggaagcgatatcacgcctatgtgaggataaatataaagatcttagaagatccgccagaaagcggagcgcctcggctgacaatctgacactccctcgatggtctcctgctatcatttcttag

SEQ ID NO: 311506 - DNA, 864 bp, Artificial Sequence
  derived and/or modified sequence
atggagttcaacccctcggatcacccacgcgcatctaccatcttcctcagtaaaagccaaaccgacgtgcgggagaagaggaagtcactctttattaaccatcatccccctggccaaattgccagaaagtattctagctgcagtaccatctttctggatgatagcaccgtcagccaacccaatttgaagtatacgattaagtgcgtggcactggctatttattaccatatcaagaatcgcgaccccgacggacgtatgctgttagatatattcgacgagaatcttcaccccttgagcaagagcgaagtgccacctgactacgataagcataacccagagcagaagcagatttacagattcgtgcggactctattttcggccgctcaacttactgcggagtgtgccatagtgactttggtttacctggaacggctattaacctatgctgagattgacatttgcccagcaaactggaagaggatcgtgctcggggctatcctgctggcttctaaggtttgggatgatcaagctgtctggaatgtggactattgtcagatcctgaaggacattaccgttgaggatatgaacgaactcgaacgtcagttcttggagttacttcaatttaatattaatgtgccctcctcggtgtatgccaagtattattttgatctgcgctccctggccgaggctaataatttgagcttcccactggagccactatcaagagagagggctcacaagttagaggcaatcagccgcctctgtgaagataaatacaaggacctcagaagatcggcccgaaagcgatccgcctcagcagacaatttaacactgccaagatggtcgcctgccattatcagttag

SEQ ID NO: 311507 - DNA, 864 bp, Artificial Sequence
  derived and/or modified sequence
atggagttcaaccccagcgaccaccccagagccagcaccatcttcctgagcaagagccagaccgacgtgagagagaagagaaagagcctgttcatcaaccaccacccccccggccagatcgccagaaagtacagcagctgcagcaccatcttcctggacgacagcaccgtgagccagcccaacctgaagtacaccatcaagtgcgtggccctggccatctactaccacatcaagaacagagaccccgacggcagaatgctgctggacatcttcgacgagaacctgcaccccctgagcaagagcgaggtgccccccgactacgacaagcacaaccccgagcagaagcagatctacagattcgtgagaaccctgttcagcgccgcccagctgaccgccgagtgcgccatcgtgaccctggtgtacctggagagactgctgacctacgccgagatcgacatctgccccgccaactggaagagaatcgtgctgggcgccatcctgctggccagcaaggtgtgggacgaccaggccgtgtggaacgtggactactgccagatcctgaaggacatcaccgtggaggacatgaacgagctggagagacagttcctggagctgctgcagttcaacatcaacgtgcccagcagcgtgtacgccaagtactacttcgacctgagaagcctggccgaggccaacaacctgagcttccccctggagcccctgagcagagagagagcccacaagctggaggccatcagcagactgtgcgaggacaagtacaaggacctgagaagaagcgccagaaagagaagcgccagcgccgacaacctgaccctgcccagatggagccccgccatcatcagctag

SEQ ID NO: 311508 - protein, 1267 aa, Artificial Sequence
  derived and/or modified sequence
MNHMFHIKRHSISAGTDAYKKTKPIQNLFQKPLYDHCSANNYKSMEPELENVRSSPPRGDRTSKVSLKEELQQDMQRFKNEIGMLKVEFQALEKEKVQLQKEVEEERKKHRNNEMEVSANIHDGATDDAEDDDDDDGLIQKRKSGETDHQQFPRKENKEYASSGPALQMKEVKSTEKEKRTSKESVNSPVFGKASLLTGGLLQVDDDSSLSEIDEDEGRPTKKTSNEKNKVKNQIQSMDDVDDLTQSSETASEDCELPHSSYKNFMLLIEQLGMECKDSVSLLKIQDAALSCERLLELKKNHCELLTVKIKKMEDKVNVLQRELSETKEIKSQLEHQKVEWERELCSLRFSLNQEEEKRRNADTLYEKIREQLRRKEEQYRKEVEVKQQLELSLQTLEMELRTVKSNLNQVVQERNDAQRQLSREQNARMLQDGILTNHLSKQKEIEMAQKKMNSENSHSHEEEKDLSHKNSMLQEEIAMLRLEIDTIKNQNQEKEKKCFEDLKIVKEKNEDLQKTIKQNEETLTQTISQYNGRLSVLTAENAMLNSKLENEKQSKERLEAEVESYHSRLAAAIHDRDQSETSKRELELAFQRARDECSRLQDKMNFDVSNLKDNNEILSQQLFKTESKLNSLEIEFHHTRDALREKTLGLERVQKDLSQTQCQMKEMEQKYQNEQVKVNKYIGKQESVEERLSQLQSENMLLRQQLDDAHNKADNKEKTVINIQDQFHAIVQKLQAESEKQSLLLEERNKELISECNHLKERQYQYENEKAEREVVVRQLQQELADTLKKQSMSEASLEVTSRYRINLEDETQDLKKKLGQIRNQLQEAQDRHTEAVRCAEKMQDHKQKLEKDNAKLKVTVKKQMDKIEELQKNLLNANLSEDEKEQLKKLMELKQSLECNLDQEMKKNVELEREITGFKNLLKMTRKKLNEYENGEFSFHGDLKTSQFEMDIQINKLKHKIDDLTAELETAGSKCLHLDTKNQILQEELLSMKTVQKKCEKLQKNKKKLEQEVINLRSHIERNMVELGQVKQYKQEIEERARQEIAEKLKEVNLFLQAQAASQENLEQFRENNFASMKSQMELRIKDLESELSKIKTSQEDFNKTELEKYKQLYLEELKVRKSLSSKLTKTNERLAEVNTKLLVEKQQSRSLFTTLTTRPVMEPPCVGNLNNSLDLNRKLIPRENLVISTSNPRASNNSMENYLSKMQQELEKNITRELKEAAAELESGSIASPLGSTDESNLNQDLVWKASREYVQVLKKNYMI

SEQ ID NO: 311509 - DNA, 3804 bp, Artificial Sequence
  derived and/or modified sequence
atgaaccacatgtttcatatcaagcgccattctatctcagctggaacagatgcatataaaaagactaagcccatccagaacctattccaaaagccactctacgaccattgtagcgctaacaactacaaatcgatggaacctgagctggagaatgttcggagcagtcccccacggggagatcgcaccagcaaagtgagcctgaaggaagagttgcagcaggacatgcaaaggttcaagaacgaaataggaatgctcaaggtcgaatttcaggcactagagaaggaaaaggtgcaactgcaaaaagaggtggaggaagaaaggaaaaagcacagaaacaatgaaatggaagtcagcgcaaatattcacgatggtgccacagacgacgccgaggatgatgacgatgacgatggcttaattcagaagagaaagagcggcgaaactgatcaccagcaattcccacggaaggagaacaaggagtatgcttccagtggcccagccctgcaaatgaaggaagtgaaaagtactgagaaagaaaagcgcacttccaaagaatctgtcaattctcccgtttttggaaaagcctccctcctcaccggagggctgctacaggtggacgatgactctagtctctcagagatcgacgaggacgaaggcagacccactaagaagacttctaacgagaagaataaagtgaaaaatcagatacagtcgatggatgacgtagacgatctgactcaatcctccgaaacagccagtgaggattgcgagttgccacacagctcttataagaactttatgttactgatagagcaattagggatggagtgtaaagactcagtcagcctgctcaagatccaggatgcggctctcagttgcgagcggctcctggagctgaagaaaaatcattgcgaactgctcacggtgaaaattaagaaaatggaagataaggtgaacgtgctgcagcgggaattgtccgagaccaaggagatcaagagtcagttagagcaccagaaggtcgaatgggagagggagctttgctcactgcgattcagtctgaaccaggaggaagaaaagcgtcggaacgctgacactctgtacgaaaagatccgcgagcagctccggcgcaaagaagagcaatatagaaaggaggttgaggtgaagcagcagctggaactcagcctccagactctggagatggagctgaggaccgtcaaaagtaatttgaatcaggtggtgcaggagaggaatgacgcccagcggcagttgtcaagggagcagaacgcgagaatgctccaggacggtatcctgactaaccacctctctaagcagaaggagattgagatggcccagaagaaaatgaattctgaaaacagccactcccatgaagaagagaaagatctttcccacaagaattctatgctccaggaggagatcgcgatgttgcgcttggagatcgatactatcaaaaatcaaaaccaggagaaggaaaaaaaatgttttgaggacctaaagattgtgaaggaaaaaaacgaagacttgcagaagacaattaagcaaaacgaagaaactttgacccaaacaatctcccagtataacgggcgcttgtcagtgctgaccgccgagaatgccatgctcaactccaagctggagaacgagaagcagagtaaggaacggctcgaggcggaggtggaatcctaccactccaggcttgccgcggccatacacgatcgtgatcagagcgaaacttctaaacgcgagctagagttggcctttcaaagagcccgggatgagtgctcgagactgcaggacaagatgaatttcgatgtttcaaacctcaaagacaacaacgagatcctctcacagcaacttttcaagactgagtctaaattgaactcgctggagatcgagttccatcacacccgggatgccctgcgagagaagacgctaggtcttgagcgagtccagaaagatctgagccaaactcagtgtcaaatgaaagaaatggagcagaagtaccagaacgagcaggtgaaagtgaataagtatatcggcaaacaggagtccgtggaggagcggctttcgcagctccagagtgagaacatgctcctgaggcagcagctagatgacgcccacaataaggcagataacaaagaaaagacggttattaacatccaagatcaattccacgccatcgtgcagaagctacaggccgagagtgaaaaacagtccctgctgctggaagagcgtaataaggaactgattagcgagtgtaatcacctgaaagaacggcagtatcagtacgaaaatgagaaagccgagagggaggtagtggtcagacagctgcagcaggaactcgccgacaccctgaagaagcaatccatgtctgaggcttcgctggaggttacgtcacgataccgaatcaaccttgaggacgaaactcaagatctcaaaaagaaattaggacagatccggaatcaactccaggaggcacaggatcggcataccgaggccgtacggtgcgctgaaaagatgcaggaccacaaacagaagctcgagaaggacaacgcgaagctaaaggtgaccgtaaagaaacagatggacaaaattgaagaactgcaaaagaatctactcaacgctaatttgtctgaagatgagaaagagcagctgaaaaagctgatggagctgaaacagtcgctcgagtgtaaccttgatcaggagatgaagaagaacgtggaactggaaagggagataacaggattcaaaaatcttctaaaaatgacaagaaaaaaacttaacgagtacgagaatggggagtttagttttcacggcgacctgaaaacaagccagttcgagatggatatccagatcaataaactgaagcacaagatagacgatctcaccgccgagttagagactgctggtagtaaatgcctgcacctggatacaaaaaatcaaatactccaagaggaattgcttagcatgaaaacagtgcaaaaaaagtgcgagaagctccagaagaacaaaaagaagctcgagcaggaagtcataaacttacgcagccacattgaaagaaacatggtggagctgggccaggtgaaacagtacaaacaggaaattgaggagcgagcccgtcaggagatcgccgaaaagctgaaggaagtgaacctttttttacaggcccaggcagcttctcaagagaatctagagcagttccgggagaataactttgcaagcatgaaaagccagatggaactccgcattaaagatttagagagcgagctgtccaagatcaagacctcccaggaggactttaataagaccgaacttgagaagtataagcagttataccttgaagagctgaaggtccgaaagtccctaagttccaaactgacaaaaaccaacgagagactagccgaggtcaacaccaaacttctagtggaaaaacaacagagtagaagtctctttaccactctgacgacacggcccgtgatggaacccccatgcgtcgggaacttgaacaactccctggacttaaataggaagctgattccccgcgaaaacctagtgataagtacatctaatccaagagcctcaaacaacagcatggagaactacttatccaagatgcagcaagaactggaaaaaaacataactcgagagctcaaagaggcagctgccgaattagagagtggaagcattgcgagccctctcggttctactgatgagagcaatctcaaccaggatcttgtgtggaaggccagccgggaatacgtccaggttttgaaaaaaaattacatgatctag

SEQ ID NO: 311510 - DNA, 642 bp, Artificial Sequence
  derived and/or modified sequence
taattccgggaaaataatttcgcctcaatgaagtctcagatggaactcagaattaaggatttagaaagcgagctcagtaagattaaaaccagccaggaagacttcaacaagaccgagcttgaaaaatacaaacagctttacctagaagagcttaaagtgcggaagagcctatcaagcaagctgacaaagacgaatgagcgcttagcagaagtgaacactaagctattagtggagaagcagcagagccggagcctcttcaccactctgaccacacggcccgtaatggaaccaccgtgcgtgggaaatttgaacaactcattggacctgaacagaaaactgatccctagagagaacctggtcataagcaccagtaacccccgtgcttctaataatagcatggagaactatctctcaaagatgcaacaagagcttgagaagaacatcaccagggagctgaaggaagctgctgccgaattagaatctggcagcatcgcctcacctctggggtccacagacgagtccaatcttaaccaggatttagtgtggaaggccagcagggaatacggccctagcgatgagacgccacacgactatgtgctgatgactgatcagtgcctgacaagcagaactgatctgcagtag

SEQ ID NO: 311511 - DNA, 3804 bp, Artificial Sequence
  derived and/or modified sequence
atgaaccacatgttccacatcaagaggcacagcatctctgctggaacagatgcctacaagaagaccaagcccatccagaacctcttccagaagcccctgtatgaccactgcagcgccaacaactacaagtccatggagcctgagctggagaatgtgcgcagcagcccccccaggggggacaggaccagcaaggtgtccctgaaggaggagctgcagcaggacatgcagcgcttcaagaatgagatcggcatgctgaaggtggagttccaggccctggagaaggagaaggtgcagctgcagaaggaggtggaggaggagaggaagaagcacagaaataatgagatggaggtgtctgccaacatccatgatggagccacagatgatgctgaagatgatgatgatgatgatggcctcatccagaagaggaagagcggggagacagaccaccagcagttccccaggaaggagaacaaggagtatgccagcagcggccctgccctgcagatgaaggaggtgaagagcacagagaaggagaagaggaccagcaaggagagcgtgaacagccctgtgtttgggaaggccagcctgctgaccggcggcctgctgcaggtggatgatgacagcagcctgtctgaaattgatgaagatgagggccggcccaccaagaagaccagcaatgagaagaacaaggtgaagaaccagatccagagcatggatgatgtggatgacctgacccagagcagcgagacagccagcgaggactgtgagctgccccacagcagctacaagaacttcatgctgctgattgagcagctgggcatggagtgcaaggacagcgtgtccctgctgaagatccaggatgctgccctgagctgtgagcggctgctggagctgaagaagaaccactgtgagctgctgactgtgaagatcaagaagatggaggacaaggtgaatgtgctgcagcgggagctgtctgagaccaaggagatcaagagccagctggagcaccagaaggtggagtgggagcgggagctgtgcagcctgcgcttcagcctgaaccaggaggaggagaagagaagaaatgctgacaccctgtatgagaagatccgggagcagctgcggaggaaggaggagcagtacaggaaggaggtggaggtgaagcagcagctggagctgagcctgcagaccctggagatggagctgaggacagtgaagagcaacctgaaccaggtggtgcaggagagaaatgatgcccagaggcagctgagccgggagcagaatgccaggatgctgcaggacggcatcctgaccaaccacctgagcaagcagaaggagattgagatggcccagaagaagatgaacagcgagaacagccacagccatgaggaggagaaggacctgagccacaagaacagcatgctgcaggaggagatcgccatgctgcggctggagattgacaccatcaagaaccagaaccaggagaaggagaagaagtgctttgaggacctgaagatcgtgaaggagaagaatgaagacctgcagaagaccatcaagcagaatgaggagaccctgacccagaccatcagccagtacaacggccgcctgtctgtgctgacagcagaaaatgccatgctgaacagcaagctggagaatgagaagcagagcaaggagcggctggaggccgaggtggagagctaccacagccggctggccgccgccatccatgaccgggaccagagcgagaccagcaagcgggagctggagctggccttccagagggccagagatgaatgttcccggctgcaggacaagatgaactttgatgtgagcaacctgaaggacaacaatgagatcctgagccagcagctgttcaagacagagagcaagctgaacagcctggagattgagttccaccacaccagagatgccctgcgggagaagaccctgggcctggagcgggtgcagaaggacctgagccagacccagtgccagatgaaggagatggagcagaagtaccagaatgagcaggtgaaggtgaacaagtacatcggcaagcaggagagcgtggaggagcggctgagccagctgcagagcgagaacatgctgctgcggcagcagctggatgatgcccacaacaaggctgacaacaaggagaagacagtcatcaacatccaggaccagttccacgccatcgtgcagaagctgcaggccgagagcgagaagcagagcctgctgctggaggagaggaacaaggagctgatcagcgagtgcaaccacctgaaggagcggcagtaccagtatgaaaatgagaaggccgagcgggaggtggtggtgcggcagctgcagcaggagctggccgacaccctgaagaagcagagcatgtctgaggccagcctggaggtgaccagccgctaccgcatcaacctggaggatgagacccaggacctgaagaagaagctgggccagatccggaaccagctgcaggaggcccaggacagacacacagaagctgtgcgctgtgccgagaagatgcaggaccacaagcagaagctggagaaggacaatgccaagctgaaggtgacagtgaagaagcagatggacaagattgaggagctgcagaagaacctgctgaatgccaacctgtctgaagatgagaaggagcagctgaagaagctgatggagctgaagcagagcctggagtgcaacctggaccaggagatgaagaagaatgtggagctggagcgggagatcaccggcttcaagaacctgctgaagatgaccaggaagaagctgaatgaatatgaaaatggagagttctccttccacggggacctgaagaccagccagtttgagatggacatccagatcaacaagctgaagcacaagattgatgacctgacagctgagctggagacagctggcagcaagtgcctgcacctggacaccaagaaccagatcctgcaggaggagctgctgtccatgaagacagtgcagaagaagtgtgagaagctgcagaagaacaagaagaagctggagcaggaggtgatcaacctgcggagccacatcgagaggaacatggtggagctgggccaggtgaagcagtacaagcaggagattgaggagcgggcccggcaggagattgctgagaagctgaaggaggtgaacctcttcctgcaggcccaggccgccagccaggagaacctggagcagttccgggagaacaactttgcctccatgaagagccagatggagctgcgcatcaaggacctggagagcgagctgagcaagatcaagaccagccaggaggacttcaacaagacagagctggagaagtacaagcagctgtacctggaggagctgaaggtgaggaagagcctgagcagcaagctgaccaagaccaatgaaaggctggccgaggtgaacaccaagctgctggtggagaagcagcagagccgcagcctcttcaccaccctgaccaccaggcctgtgatggagcccccctgtgtgggcaacctgaacaacagcctggacctgaacaggaagctgatcccccgggagaacctggtgatcagcaccagcaacccccgggccagcaacaacagcatggagaactacctgagcaagatgcagcaggagctggagaagaacatcacccgggagctgaaggaggccgctgctgagctggagagcggcagcatcgccagccccctgggcagcacagatgagagcaacctgaaccaggacctggtgtggaaggccagccgggagtatgtgcaggtgctgaagaagaactacatgatctag

SEQ ID NO: 311512 - DNA, 642 bp, Artificial Sequence
  derived and/or modified sequence
tgattccgggagaacaactttgcctccatgaagagccagatggagctgcgcatcaaggacctggagagcgagctgagcaagatcaagaccagccaggaggacttcaacaagacagagctggagaagtacaagcagctgtacctggaggagctgaaggtgaggaagagcctgagcagcaagctgaccaagaccaatgaaaggctggccgaggtgaacaccaagctgctggtggagaagcagcagagccgcagcctcttcaccaccctgaccaccaggcctgtgatggagcccccctgtgtgggcaacctgaacaacagcctggacctgaacaggaagctgatcccccgggagaacctggtgatcagcaccagcaacccccgggccagcaacaacagcatggagaactacctgagcaagatgcagcaggagctggagaagaacatcacccgggagctgaaggaggccgctgctgagctggagagcggcagcatcgccagccccctgggcagcacagatgagagcaacctgaaccaggacctggtgtggaaggccagccgggagtatggccccagtgatgagacccctcatgactatgtgctgatgacagaccagtgcctgaccagcaggacagacctgcagtag

SEQ ID NO: 311513 - DNA, 3804 bp, Artificial Sequence
  derived and/or modified sequence
atgaaccacatgttccacatcaagcggcacagcatcagcgccggcaccgacgcttacaagaagaccaaacctatacagaacctgttccaaaaacccttgtacgatcactgctcagccaacaattataagtcgatggagcctgagctcgagaacgtcagatcatcccctcctaggggggatcgcacatctaaggtttctttaaaagaggaactgcagcaggatatgcaaaggtttaaaaatgagatcgggatgctgaaagtcgaatttcaggcattggaaaaagagaaggtccagctccagaaagaagtagaggaggagaggaagaaacatcggaacaacgagatggaggtgagcgcaaatatacacgacggcgcaacagacgacgccgaggatgatgacgacgacgatgggcttatccaaaagcggaagagcggagagaccgatcaccagcagttccctcgcaaggagaataaggaatacgcatcatcagggcctgccttgcaaatgaaggaagtgaagtcgacagaaaaggaaaaacgcacatccaaagaaagtgttaactctcctgtattcggcaaggcttccctgctcactggcgggctgctgcaggtcgacgatgactcctctctctcggagatagacgaggacgaagggaggccaacaaaaaagaccagtaatgagaaaaacaaggtgaagaatcagattcagagcatggacgatgtggacgaccttacccagtctagcgagactgcctccgaagactgtgaactgcctcactctagctacaaaaacttcatgctgctcattgagcagttgggcatggagtgcaaggactcggtgagtcttctaaagatccaggacgccgcccttagttgcgaacgcctgctggaacttaagaaaaaccactgcgaattgctgacggttaaaatcaaaaaaatggaagacaaggtaaatgtgctgcaaagagagctgtccgagacaaaagagattaagagccaattggaacatcaaaaggtggaatgggaacgcgaactctgctctctgagattctccctaaatcaggaggaagagaagcgccggaatgccgatactctttacgaaaagattagagagcagctgcgccggaaagaggagcagtatagaaaggaagtcgaagtgaagcagcagctggagctgagcctgcagaccctggagatggaactgcgcacagtcaagtccaatctcaatcaggtggttcaggaacgcaacgacgcacagcggcagctctcccgcgagcagaacgccagaatgctgcaggatgggatacttactaatcacttatccaaacagaaagaaattgaaatggcccagaagaaaatgaatagcgagaactcgcattctcatgaggaggagaaggacctgagccataagaattcaatgctgcaagaggagattgctatgcttcgactggaaattgataccattaagaaccagaatcaagagaaggaaaaaaagtgcttcgaagatctgaagattgttaaagaaaaaaacgaagatctgcagaagactatcaaacagaacgaagaaactctgacacagactatttcccaatacaacggcaggttaagtgtactgactgcagagaacgccatgcttaattccaaattagagaatgagaagcagtctaaggaacgccttgaggcagaggtcgaaagctaccacagtaggcttgccgccgcaattcacgacagggaccagtccgagacatcaaaacgcgaactcgagttggcctttcagcgggcgcgggatgaatgtagcaggttgcaggacaaaatgaactttgatgtgtcaaacctgaaagataataatgagatcctgagccagcagctttttaagactgaaagcaaattaaacagcctcgagatcgaatttcaccatacaagagacgctcttcgggagaaaaccctggggctagaaagggtgcagaaagacctaagtcaaacacagtgccaaatgaaggagatggagcaaaagtatcagaatgagcaggtgaaggtgaacaagtacatcggcaagcaggagtccgtggaggaacggctgagtcagcttcagagcgagaatatgcttctccgccaacagctagatgatgctcacaataaggctgataacaaggagaaaactgtgatcaacattcaggatcagttccatgcaatagtacaaaagctgcaggcagagagcgagaagcagagcctgttgctggaggagcgaaacaaggagctcatttccgagtgtaaccacctcaaagaaaggcaataccagtacgagaacgagaaagcggagcgggaggtcgtggtgaggcagctgcagcaggaactagctgacacactgaaaaaacagagcatgtcggaagcttcactagaggtgacctcaaggtaccggatcaatctcgaggacgaaacccaggacctgaagaagaagttggggcaaattcgtaatcagctgcaggaggcgcaggatcgtcacaccgaggcggtgaggtgcgcagaaaagatgcaagatcacaagcagaagctagaaaaggataatgccaaactgaaagttacagttaagaagcaaatggataagatcgaggagctgcagaagaatctgttgaacgctaacctgtccgaggatgaaaaagaacagctgaagaaactcatggaactgaaacagtcactagagtgcaaccttgatcaggaaatgaagaaaaatgtcgagctagagagggagatcacagggttcaagaatctactgaagatgacgaggaaaaagctcaacgaatacgagaatggggaattctccttccacggagatcttaaaacatcccagtttgagatggatatccagataaataaactgaaacataagatagacgacctcaccgctgaactcgagacggccggtagcaaatgcctacatttagacaccaagaaccagattctccaagaagagttgctaagcatgaaaactgtacagaagaaatgcgaaaagctccagaagaataagaagaagctcgaacaggaggtgattaacttgaggtctcacatagagaggaacatggtagagctcggacaggtaaagcagtataagcaggaaattgaggaaagggcacggcaagagatcgccgagaagcttaaggaagtaaatctattcctgcaagctcaggccgctagtcaagagaacctcgagcagtttcgcgagaataacttcgcctcaatgaagtcccagatggagctccgcatcaaggacttagaaagcgagctcagtaagatcaaaacttcgcaggaggactttaataagactgaactagaaaaatataaacaactatacctggaggagctaaaagtgcgaaaatccctatcgagcaaacttacaaaaactaacgaaagactggccgaagtgaacacaaagctgcttgttgaaaagcagcagtcccggagtctcttcacaacccttaccacaagaccagtcatggagcctccttgcgtgggcaaccttaataactccttagatttgaacagaaagctgattccgagggagaatctcgttatctcaacaagcaatccccgggcttccaataatagcatggagaactatctgagcaagatgcagcaggagctcgaaaagaatattacgagggagcttaaagaagccgccgctgagctggaatctggctccatcgcgtccccgctaggcagcacagacgaatctaacctgaatcaggatctcgtatggaaggcatcacgggagtacgtgcaggtgctcaaaaaaaactacatgatctag

SEQ ID NO: 311514 - DNA, 642 bp, Artificial Sequence
  derived and/or modified sequence
tgattccgggagaacaacttcgccagcatgaagagccagatggagctccgcattaaagatctggaatccgaactgtcaaaaattaaaacttcccaagaggactttaacaaaacagagctcgaaaagtacaaacagctgtacttggaagagctgaaggttaggaagtccctgagctctaaactgactaagaccaacgagaggctcgccgaggtgaatacaaagctcttagttgaaaagcagcaatcaaggtcattgttcacgacattaactactcgtccagtgatggagcctccctgtgtggggaacctgaacaactctctcgatctgaacagaaaactaatacctcgagagaacttagttatctccacatcaaatccccgtgcatcgaataatagcatggagaattatttaagcaagatgcagcaggagctcgaaaaaaatattactcgggaactgaaggaagcggccgccgagttggaaagtggaagcatcgcaagtcctctgggctccacggatgaatctaacctgaatcaggatctggtgtggaaggcatccagggaatatggacccagtgacgagaccccacatgattacgtgctgatgacggaccaatgcctcacatcccggactgatctccagtag

SEQ ID NO: 311515 - DNA, 5278 bp, Artificial Sequence
  derived and/or modified sequence
atgaatcatatgtttcacataaaaaggcatagtatttctgctggtacagacgcttacaagaaaacaaaaccaatacagaacttgttccagaagccattatatgatcattgcagtgctaataactataaaagcatggaacctgaattagaaaatgtgaggtcttctccaccacgtggtgacagaacatcaaaagtatctctaaaagaagaattacagcaagatatgcaaaggtttaaaaatgagataggcatgttaaaagtagagttccaggctttggagaaagaaaaagtccaacttcaaaaagaggttgaagaagaaaggaaaaaacacagaaataatgaaatggaagtatcagcaaacatacatgatggtgctactgatgatgctgaagatgatgatgatgatgatggattaattcaaaaaagaaagagtggagaaactgatcatcagcaatttcccaggaaggaaaataaagagtatgctagtagtggtcctgccttgcaaatgaaggaagtaaagagcactgaaaaagaaaaacggacctcgaaagaatctgtgaattcaccagtgtttgggaaggccagtttactaactggtggcctgctacaagtggatgatgacagcagtttaagtgaaatagatgaggatgaaggaaggcctactaagaaaacatctaatgaaaagaacaaggtcaaaaaccaaatacagtctatggatgatgttgatgacttaactcagtcatctgaaacagcctcagaggattgtgagctaccccactctagttacaagaattttatgttgctcattgaacaacttggaatggagtgtaaagattctgttagcctattgaaaatccaggatgcagctctttcatgtgaaagattattagaacttaaaaaaaatcactgtgaactacttacagtaaaaattaaaaaaatggaagacaaggttaatgtactacaaagggagctatctgaaacaaaagaaataaaatcacagttagagcatcaaaaagttgaatgggaacgagaactgtgctctttgagatttagcttaaaccaagaagaagagaagagaagaaatgctgatacgttgtatgaaaaaattagggaacagttaagaagaaaagaagagcaatataggaaagaagttgaagtgaaacaacagcttgaactgagtctccaaacactggagatggaattgaggactgtaaaaagtaatttgaatcaggtcgttcaagagcgaaatgacgctcagaggcaactttctcgagaacagaatgccagaatgttacaagatggaattctgaccaatcacctttccaaacaaaaggagattgaaatggctcaaaagaaaatgaattctgagaattctcatagtcatgaagaagaaaaagacctatcgcataaaaatagcatgttgcaggaagaaattgctatgctaagactagaaatagacacaataaaaaatcaaaaccaggaaaaagaaaagaaatgttttgaggaccttaaaattgtaaaagaaaagaatgaagaccttcagaagactataaaacagaatgaggaaacattaacacaaacaatatcccagtataatggacggcttagtgttctgacagctgagaatgcaatgctaaattctaaactggagaatgaaaagcaaagcaaggaaagactggaagcagaagttgaatcataccattctagattggctgctgctatacatgatcgtgatcaaagtgagacatcaaaaagagaactagaacttgctttccagagagcaagagatgaatgttctcgtttacaggacaaaatgaattttgatgtgtctaacctaaaagataacaatgagattctttctcaacaactatttaaaactgaaagtaaactcaatagcctagaaattgagttccatcacacgagagatgccctcagagaaaagactttgggtttagaacgggtacaaaaggacctaagccaaacacagtgtcaaatgaaggaaatggaacaaaagtatcaaaatgaacaagttaaagtgaataaatacattggaaagcaggagtctgtagaggagagattgtctcaactacaaagtgagaatatgttgcttcgacaacaactggatgatgcccacaacaaggctgacaataaagagaagacagtgattaatatccaagaccagtttcatgctattgtgcaaaaacttcaagctgagagtgaaaagcaaagtcttctgctagaagaaagaaataaggagttaatcagtgaatgtaatcacttaaaagaaagacagtatcaatatgaaaatgaaaaggcagaaagagaagttgttgtgagacaacttcaacaagaactagctgataccctaaaaaaacaatctatgtcagaggcttcactggaggttacgtcacgttatcgtattaatttagaagatgagacacaggatttaaagaagaaattaggtcaaatcagaaatcaattgcaagaagcacaggatcgacatacagaagctgtcagatgtgctgagaagatgcaagatcacaagcaaaagcttgaaaaagataatgccaagttaaaagttacagtcaaaaagcaaatggacaaaattgaggagcttcagaaaaacctgttaaatgcaaatttgtctgaagatgaaaaggaacaattaaagaaacttatggaattaaaacagtcactggaatgtaatttggatcaagaaatgaagaaaaatgttgaattagaaagagagataactggatttaagaacctcttaaaaatgacaagaaagaagttaaatgaatatgaaaatggagaatttagtttccatggagatttaaaaactagtcaatttgaaatggatattcagattaataagctaaaacataagattgatgatcttacagcagaactggagactgcaggttcaaaatgtctacatctggatacaaagaaccaaattcttcaagaggagttgttatctatgaaaacagtacaaaagaaatgtgaaaaactacagaagaataaaaagaagttggaacaagaagtgatcaacctgagaagtcatatagaaaggaatatggtagaacttggtcaagtcaaacagtataaacaggagattgaagaaagagcaagacaggaaatagcagaaaaattaaaagaagtcaatctatttttacaggcacaagcagcatctcaagaaaacttagagcagtttagagagaataattttgcttcaatgaaaagtcagatggaactcagaattaaagatctggaatctgaactctccaaaataaaaacttctcaagaagactttaataaaaccgaactggaaaaatataagcaactctatctagaagaattaaaagttagaaaatctttgtcaagtaaactaaccaaaactaatgagaggctagcagaggtcaacaccaaacttcttgtggaaaaacagcagagcagatctttgttcaccactctcactaccaggccagtcatggagccaccttgtgtgggaaatcttaataatagtttagatctcaacagaaaacttattccaagagaaaacttagtgatctctacctcaaatccacgggcttcaaataatagcatggagaactacttgagcaagatgcagcaggagttggaaaaaaatataactagagaactcaaagaagctgctgctgaattggaatctggatcaatagcttcccctctagggtctactgatgagtcaaatctaaatcaagatctagtttggaaagcatcaagagaatatgtacaggttttaaagaaaaattatatgatctgaaagataagattttattactgggctgtttatgtgacattttgtttctcattaaatattaatatatgacatgtaaaaatattaaaggaacgtatttttgtatcatatatgtcagatcaaaatttatatagtattttaaacaatgttacttggcttctttaacttttaagtggattttgccaatgaaaaccaggaatattgagttttacatactcaaactgcccaaatgtgagctgtttaaacagccaaaccactaagttgtcattaatactttagtgcagttaattgatggcttatttgtattttgtaatttttatcactatatgtagtggtagatgtctaattggacttagacatcattttgttgtgcaggaactgtggtcattgttcatgtttggatgtattacaattgttacagtgccatcaaatttacataattttaattttaagcactgatttatatagctgttctcagggagaaacaagatttgcctgattcaccttttctgtttgtttatttatttttaattaaccttttggaaatagccttcagtttagagaaaatttcgaagttttagtacaaagactttctcctccgaacaatttgagagtaaattgctgacattatgtcatcacccctgattactttagtgggcattcctacaagtcaggacattctacataactacagtgcaaaccttgcaatcagaaagtcaacattaatacattctagtttgttacttctctgtaatgtcctttatagcaaaaggatcccattctaatccatggcttgtatttagttgttgtatctgttagatctttcagtctggaacagttcctcagtctttccttgaccttcatgaccttgaatattttgaagagtaaagtctggtaatataagaatgtccctcaattgggtttcatggtgattagatttagattatatgattttttggcaggagtatcacagaagtgacccagtgatcttctcattgcatcttacctgtgaccctacagttttgatttgccctgttactggtaatgttagcattgatcactaacagtggtatctgctgaatttctcctctgtaatgttattttttcaccttgtggttaattagtattttacagggaggtaatttgagactatgtacatatctctactccccatcgaaccctcaatttattcatttgcttgtatcaaataaaccatggattcatggtttattttattcagtgagttataattcattaatattgttattaaaaatttgtttttcttttaagaaatgttatattttgacaacttcagacttacagaaagattataagaggtagtacaaataatttttggatattattccccaaatgttaacattttactgcatttactttatcctttctcccccttctcctcctgtctttctagatgaatatgaatataggtacttaatacagattttttttctaaactgtt

SEQ ID NO: 311516 - DNA, 761 bp, Artificial Sequence
  derived and/or modified sequence
gtttagagagaataattttgcttcaatgaaaagtcagatggaactcagaattaaagatctggaatctgaactctccaaaataaaaacttctcaagaagactttaataaaaccgaactggaaaaatataagcaactctatctagaagaattaaaagttagaaaatctttgtcaagtaaactaaccaaaactaatgagaggctagcagaggtcaacaccaaacttcttgtggaaaaacagcagagcagatctttgttcaccactctcactaccaggccagtcatggagccaccttgtgtgggaaatcttaataatagtttagatctcaacagaaaacttattccaagagaaaacttagtgatctctacctcaaatccacgggcttcaaataatagcatggagaactacttgagcaagatgcagcaggagttggaaaaaaatataactagagaactcaaagaagctgctgctgaattggaatctggatcaatagcttcccctctagggtctactgatgagtcaaatctaaatcaagatctagtttggaaagcatcaagagaatatggaccttctgatgaaacccctcatgactatgttctgatgactgaccaatgtctcacttccaggacagacctgcaatagatgccactggataatgctgagatagactggtgcaggacaaaggacagaactcaaagtcatccctctgctgacctgagacaaatgtgtatctgagtgcttcctccgccctattgtctatgtc

SEQ ID NO: 311517 - DNA, 3804 bp, Artificial Sequence
  derived and/or modified sequence
atgaaccatatgtttcacatcaaaagacacagtatctctgcaggcactgacgcatataaaaagaccaagccgatacagaatctctttcagaaacccctctacgatcactgcagcgctaataactacaaaagcatggagccggagctggagaacgtgcggtccagcccccctaggggcgacaggacaagtaaggtctcactgaaggaggaactgcagcaggacatgcagaggtttaagaatgaaatcgggatgttaaaggtcgaatttcaagcgctcgagaaggaaaaagtgcagctgcagaaagaggttgaggaggagaggaagaaacacaggaacaacgaaatggaggtttccgccaatatccacgatggcgctaccgatgacgctgaggatgatgacgatgatgacggcctgatacaaaagcggaagtcaggagaaacagatcaccagcagtttcctaggaaagaaaacaaggaatacgcatcgagcggacctgctttgcaaatgaaggaggtcaagagtactgagaaagaaaagcggacctccaaagagtcagtgaactcgcccgtgttcgggaaggccagcctccttacaggcggacttctgcaggttgacgacgacagctctctatcagaaatcgatgaggatgaggggagacccactaaaaagaccagtaacgagaaaaataaggttaagaatcagatacaaagcatggatgatgttgatgacttgacacaatcctctgaaacggcttcagaggattgtgaattgcctcacagctcttacaagaactttatgctcctcatcgaacagcttgggatggagtgcaaagactccgttagtctgctaaaaatccaggacgccgcactgtcttgtgagcgattactggaacttaaaaaaaaccactgtgagctcctgaccgtcaaaatcaaaaagatggaagacaaagtcaatgtcctgcaaagggagctgagcgagactaaagagataaaatctcagctggaacaccagaaggttgagtgggagcgggaactgtgttcattgcggtttagtctcaatcaggaagaagagaagcggagaaatgccgacacactctacgagaaaatccgtgagcagttgaggcggaaagaagagcaatatcgaaaggaagtcgaggtgaagcagcagctggagctgtccctgcaaaccctggaaatggagctgcgaacagtgaagagcaacctgaatcaggtggtccaggagagaaatgacgcacaacgacagttgtcccgagaacaaaacgctaggatgctgcaggatggcatcctgacaaatcacttgtcaaagcaaaaggaaatcgagatggcccagaaaaaaatgaactctgaaaactcacacagccatgaagaagaaaaggatctcagtcacaagaatagcatgctccaggaggagattgctatgctgcgattggagattgacaccattaagaaccagaatcaggagaaggaaaaaaagtgcttcgaggatctgaagatagtgaaggagaagaatgaagatctccagaagaccattaagcaaaacgaggagaccctgacccagacaatttctcagtacaatggtaggctctcagtgttgactgccgagaacgcaatgctcaattcaaaactggagaacgaaaaacagtctaaggagagactggaagcagaagtggagagttaccattcccgcctagcagctgctattcacgacagggaccagagtgaaacctcgaagagggagttggagctggcattccagcgagccagagatgagtgcagccgtctccaagataagatgaatttcgatgttagcaacctgaaggacaacaacgagatcctatctcagcagctgttcaaaacagagagtaagcttaatagcttagaaatcgaattccatcataccagggacgccttaagggagaagactctgggactggagagggtccaaaaagacctgtcccaaactcagtgccagatgaaggagatggaacagaaatatcagaacgaacaggtcaaagtgaacaaatatattggtaagcaggaaagcgtggaagagcggctttcgcagctacagagcgagaacatgttgctgcgccaacagctggatgatgctcacaataaggctgacaacaaagagaaaacggtgataaatatccaagatcagtttcatgcgatcgttcaaaagctgcaggctgagtctgaaaaacaatctctgctgttggaagagagaaacaaggaacttatctccgagtgcaatcacttaaaggaacgacaataccaatacgaaaatgaaaaggcagagagggaggtcgtggttagacagctgcagcaggaattagctgacaccctgaagaaacaatcaatgtccgaggcgtctctcgaggttacaagcaggtaccgcattaacctcgaagatgaaacccaggatctgaagaagaaactaggccaaatccgaaaccagctccaagaagcccaggacagacacacagaggcagtgaggtgtgcagaaaagatgcaggaccacaagcagaaattagagaaagataacgcaaagttgaaggtcacggtgaaaaagcagatggataagatagaggaattgcaaaagaacctcctgaacgctaatctaagcgaggacgagaaagagcaactcaaaaaactcatggagctgaaacagagcctggaatgcaatttggaccaggagatgaaaaagaatgtggaactcgagcgtgagattaccggctttaagaacctgctcaagatgacgcgcaagaagctgaatgaatacgagaacggggagttctctttccatggcgacttgaagacgtctcagttcgagatggatatccagattaataagttgaagcacaagatcgacgatctgactgctgagctggaaactgccggatctaaatgccttcatcttgacacaaaaaaccagatcttacaggaagaactgctctcgatgaagaccgtccagaagaaatgcgaaaaactgcagaaaaataaaaagaagttggaacaggaagtcatcaacctccgatctcacattgagagaaacatggtggaattggggcaggtgaagcaatataaacaggagatcgaagaacgagctaggcaagagatagccgaaaagctaaaggaggttaatctttttttgcaggcgcaggcagcgagccaagagaatctggagcagtttagagagaataacttcgcgtcaatgaaatctcaaatggagctccggataaaagacctggaaagcgaattgagtaagatcaagactagccaggaggattttaacaaaacggaactggagaagtacaaacagctatacctggaggaactgaaggtgagaaaatctctctctagcaaactcaccaaaacaaacgagaggctggcagaggtgaataccaaactactcgtggaaaagcagcagagtcggtcattgtttacgactttgacgaccaggcccgtcatggaacccccttgtgtcggtaaccttaacaactctctcgatttaaatcgtaaacttatcccgcgagagaacctggtgattagtacgtctaacccgagagcatctaataactccatggagaactacctgagcaagatgcagcaggagttagagaaaaatattacccgggaacttaaggaggccgctgccgagttagaatcaggcagcatcgcgtctcctttgggaagcactgatgagtcgaaccttaatcaggatctggtgtggaaagcttccagagagtacgttcaggtcctgaaaaagaattatatgatttag

SEQ ID NO: 311518 - DNA, 642 bp, Artificial Sequence
  derived and/or modified sequence
tgatttagggagaataacttcgcatccatgaagtctcaaatggagctgcggataaaggatcttgagtccgaactgtcaaagataaaaactagccaggaggattttaacaagactgaacttgagaaatacaaacagttgtatttggaggaactgaaggtcaggaagtccctctcatccaagcttacaaaaaccaatgaaagactggccgaggtcaacaccaaactcctcgtagagaagcagcagtcgcgcagcctcttcaccaccttgacgactaggcccgtaatggagccaccttgcgttgggaatctgaacaacagtctggatctgaaccgtaagttgattccccgagaaaacctcgtgatatccacttcaaatcctagggcatccaacaatagcatggaaaactacctcagtaagatgcagcaggagctcgaaaaaaacataaccagggaactcaaggaagctgctgcagagttggaaagtggcagtatagccagtccacttggttcaacagatgaaagtaacctgaatcaagaccttgtctggaaagctagtcgcgaatacggaccttccgatgagacaccccatgattatgtgctgatgacagaccaatgtttgacttcccgcacagatctgcagtag

SEQ ID NO: 311519 - DNA, 3804 bp, Artificial Sequence
  derived and/or modified sequence
atgaaccacatgttccacatcaagagacacagcatcagcgccggcaccgacgcctacaagaagaccaagcccatccagaacctgttccagaagcccctgtacgaccactgcagcgccaacaactacaagagcatggagcccgagctggagaacgtgagaagcagcccccccagaggcgacagaaccagcaaggtgagcctgaaggaggagctgcagcaggacatgcagagattcaagaacgagatcggcatgctgaaggtggagttccaggccctggagaaggagaaggtgcagctgcagaaggaggtggaggaggagagaaagaagcacagaaacaacgagatggaggtgagcgccaacatccacgacggcgccaccgacgacgccgaggacgacgacgacgacgacggcctgatccagaagagaaagagcggcgagaccgaccaccagcagttccccagaaaggagaacaaggagtacgccagcagcggccccgccctgcagatgaaggaggtgaagagcaccgagaaggagaagagaaccagcaaggagagcgtgaacagccccgtgttcggcaaggccagcctgctgaccggcggcctgctgcaggtggacgacgacagcagcctgagcgagatcgacgaggacgagggcagacccaccaagaagaccagcaacgagaagaacaaggtgaagaaccagatccagagcatggacgacgtggacgacctgacccagagcagcgagaccgccagcgaggactgcgagctgccccacagcagctacaagaacttcatgctgctgatcgagcagctgggcatggagtgcaaggacagcgtgagcctgctgaagatccaggacgccgccctgagctgcgagagactgctggagctgaagaagaaccactgcgagctgctgaccgtgaagatcaagaagatggaggacaaggtgaacgtgctgcagagagagctgagcgagaccaaggagatcaagagccagctggagcaccagaaggtggagtgggagagagagctgtgcagcctgagattcagcctgaaccaggaggaggagaagagaagaaacgccgacaccctgtacgagaagatcagagagcagctgagaagaaaggaggagcagtacagaaaggaggtggaggtgaagcagcagctggagctgagcctgcagaccctggagatggagctgagaaccgtgaagagcaacctgaaccaggtggtgcaggagagaaacgacgcccagagacagctgagcagagagcagaacgccagaatgctgcaggacggcatcctgaccaaccacctgagcaagcagaaggagatcgagatggcccagaagaagatgaacagcgagaacagccacagccacgaggaggagaaggacctgagccacaagaacagcatgctgcaggaggagatcgccatgctgagactggagatcgacaccatcaagaaccagaaccaggagaaggagaagaagtgcttcgaggacctgaagatcgtgaaggagaagaacgaggacctgcagaagaccatcaagcagaacgaggagaccctgacccagaccatcagccagtacaacggcagactgagcgtgctgaccgccgagaacgccatgctgaacagcaagctggagaacgagaagcagagcaaggagagactggaggccgaggtggagagctaccacagcagactggccgccgccatccacgacagagaccagagcgagaccagcaagagagagctggagctggccttccagagagccagagacgagtgcagcagactgcaggacaagatgaacttcgacgtgagcaacctgaaggacaacaacgagatcctgagccagcagctgttcaagaccgagagcaagctgaacagcctggagatcgagttccaccacaccagagacgccctgagagagaagaccctgggcctggagagagtgcagaaggacctgagccagacccagtgccagatgaaggagatggagcagaagtaccagaacgagcaggtgaaggtgaacaagtacatcggcaagcaggagagcgtggaggagagactgagccagctgcagagcgagaacatgctgctgagacagcagctggacgacgcccacaacaaggccgacaacaaggagaagaccgtgatcaacatccaggaccagttccacgccatcgtgcagaagctgcaggccgagagcgagaagcagagcctgctgctggaggagagaaacaaggagctgatcagcgagtgcaaccacctgaaggagagacagtaccagtacgagaacgagaaggccgagagagaggtggtggtgagacagctgcagcaggagctggccgacaccctgaagaagcagagcatgagcgaggccagcctggaggtgaccagcagatacagaatcaacctggaggacgagacccaggacctgaagaagaagctgggccagatcagaaaccagctgcaggaggcccaggacagacacaccgaggccgtgagatgcgccgagaagatgcaggaccacaagcagaagctggagaaggacaacgccaagctgaaggtgaccgtgaagaagcagatggacaagatcgaggagctgcagaagaacctgctgaacgccaacctgagcgaggacgagaaggagcagctgaagaagctgatggagctgaagcagagcctggagtgcaacctggaccaggagatgaagaagaacgtggagctggagagagagatcaccggcttcaagaacctgctgaagatgaccagaaagaagctgaacgagtacgagaacggcgagttcagcttccacggcgacctgaagaccagccagttcgagatggacatccagatcaacaagctgaagcacaagatcgacgacctgaccgccgagctggagaccgccggcagcaagtgcctgcacctggacaccaagaaccagatcctgcaggaggagctgctgagcatgaagaccgtgcagaagaagtgcgagaagctgcagaagaacaagaagaagctggagcaggaggtgatcaacctgagaagccacatcgagagaaacatggtggagctgggccaggtgaagcagtacaagcaggagatcgaggagagagccagacaggagatcgccgagaagctgaaggaggtgaacctgttcctgcaggcccaggccgccagccaggagaacctggagcagttcagagagaacaacttcgccagcatgaagagccagatggagctgagaatcaaggacctggagagcgagctgagcaagatcaagaccagccaggaggacttcaacaagaccgagctggagaagtacaagcagctgtacctggaggagctgaaggtgagaaagagcctgagcagcaagctgaccaagaccaacgagagactggccgaggtgaacaccaagctgctggtggagaagcagcagagcagaagcctgttcaccaccctgaccaccagacccgtgatggagcccccctgcgtgggcaacctgaacaacagcctggacctgaacagaaagctgatccccagagagaacctggtgatcagcaccagcaaccccagagccagcaacaacagcatggagaactacctgagcaagatgcagcaggagctggagaagaacatcaccagagagctgaaggaggccgccgccgagctggagagcggcagcatcgccagccccctgggcagcaccgacgagagcaacctgaaccaggacctggtgtggaaggccagcagagagtacgtgcaggtgctgaagaagaactacatgatctag

SEQ ID NO: 311520 - DNA, 642 bp, Artificial Sequence
  derived and/or modified sequence
tgattcagagagaacaacttcgccagcatgaagagccagatggagctgagaatcaaggacctggagagcgagctgagcaagatcaagaccagccaggaggacttcaacaagaccgagctggagaagtacaagcagctgtacctggaggagctgaaggtgagaaagagcctgagcagcaagctgaccaagaccaacgagagactggccgaggtgaacaccaagctgctggtggagaagcagcagagcagaagcctgttcaccaccctgaccaccagacccgtgatggagcccccctgcgtgggcaacctgaacaacagcctggacctgaacagaaagctgatccccagagagaacctggtgatcagcaccagcaaccccagagccagcaacaacagcatggagaactacctgagcaagatgcagcaggagctggagaagaacatcaccagagagctgaaggaggccgccgccgagctggagagcggcagcatcgccagccccctgggcagcaccgacgagagcaacctgaaccaggacctggtgtggaaggccagcagagagtacggccccagcgacgagaccccccacgactacgtgctgatgaccgaccagtgcctgaccagcagaaccgacctgcagtag

SEQ ID NO: 311521 - protein, 374 aa, Artificial Sequence
  derived and/or modified sequence
MGKSDFLTPKAIANRIKSKGLQKLRWYCQMCQKQCRDENGFKCHCMSESHQRQLLLASENPQQFMDYFSEEFRNDFLELLRRRFGTKRVHNNIVYNEYISHREHIHMNATQWETLTDFTKWLGREGLCKVDETPKGWYIQYIDRDPETIRRQLELEKKKKQDLDDEEKTAKFIEEQVRRGLEGKEQEVPTFTELSRENDEEKVTFNLSKGACSSSGATSSKSSTLGPSALKTIGSSASVKRKESSQSSTQSKEKKKKKSALDEIMEIEEEKKRTARTDYWLQPEIIVKIITKKLGEKYHKKKAIVKEVIDKYTAVVKMIDSGDKLKLDQTHLETVIPAPGKRILVLNGGYRGNEGTLESINEKTFSATIVIETV

SEQ ID NO: 311522 - DNA, 1125 bp, Artificial Sequence
  derived and/or modified sequence
atgggtaagagtgacttccttacacctaaggccatcgccaatagaattaagtccaagggtttgcagaagttgaggtggtactgtcaaatgtgccagaaacagtgtagggacgagaacggattcaaatgccattgcatgagtgaatcacatcagagacagctgttgctggcaagcgagaacccacagcagtttatggactacttctctgaagagtttagaaacgacttccttgagctgctcaggaggcgtttcgggacgaaaagagtccacaacaatattgtctacaacgagtatatctctcatcgcgaacatattcatatgaatgctactcagtgggaaaccctgactgattttactaaatggttggggagggagggattgtgtaaggtcgatgagaccccaaaagggtggtatattcaatacatagacagggaccctgagaccattcgacggcaactggagctggaaaaaaagaaaaagcaggacttggatgacgaagagaagaccgccaagttcattgaagaacaggtacggcgcgggctggagggcaaggagcaggaggtcccaacatttacagagctttctagagagaacgatgaggaaaaagtgactttcaatctctcaaagggcgcctgctctagcagtggagctacatcttcaaaaagttctacgctcgggccatccgccctcaagaccatcggttcgagcgcctcagttaagagaaaggaatcaagccagagtagcacgcagagtaaggaaaaaaagaagaagaagagcgccctagatgagatcatggaaattgaggaggaaaaaaagagaaccgctaggactgactactggctccagcccgaaatcatcgtcaaaatcatcaccaagaagctaggggagaagtaccataaaaagaaggccatcgtcaaggaagtgatcgataaatataccgccgtcgtcaagatgatcgatagcggagataaactgaaactcgatcaaacccatctggagactgtaattcccgcccccggtaaacgaattctagtacttaatggaggctaccgaggcaatgaagggacattagagtccatcaatgagaaaacctttagcgccacaattgtgatcgagaccgtgtag

SEQ ID NO: 311523 - DNA, 1618 bp, Artificial Sequence
  derived and/or modified sequence
agctgggatttgtcccgcccaccgccgccagcccggttccgtttccggctggctgagtactggggtccagaaagtgatcgctgccgtggtcgccatggggaagtcggattttcttactcccaaggctatcgccaacaggatcaagtccaaggggctgcagaagctacgctggtattgccagatgtgccagaagcagtgccgggacgagaatggctttaagtgtcattgtatgtccgaatctcatcagagacaactattgctggcttcagaaaatcctcagcagtttatggattatttttcagaggaattccgaaatgactttctagaacttctcaggagacgctttggcactaaaagggtccacaacaacattgtctacaacgaatacatcagccaccgagagcacatccacatgaatgccactcagtgggaaactctgactgattttactaagtggctgggcagagaaggcttgtgcaaagtggacgagacaccaaaaggctggtatattcagtacatagacagggacccagaaactatccgccggcaactggaactggagaaaaagaaaaagcaggaccttgatgatgaagaaaaaactgccaaatttattgaagagcaagtgagaagaggcctggaagggaaggaacaggaggtccctacttttacggaattaagcagagaaaatgatgaagagaaagtcacgtttaatttgagtaaaggagcatgtagctcatccggagcaacatcttccaagtcaagtactctgggaccgagtgcactgaagacgataggaagttcagcatcagtgaaacgaaaagaatcttcccagagctcaactcagtctaaagaaaagaagaaaaagaaatctgcactggatgaaatcatggagattgaagaggaaaagaaaagaactgcccgaacagactactggctacagcctgaaattattgtgaaaattataaccaagaaactgggagagaaatatcataagaaaaaggctattgttaaggaagtaattgacaaatatacagctgttgtgaagatgattgattctggagacaagctgaaacttgaccagactcatttagagacagtaattccagcaccaggaaaaagaattctagttttaaatggaggctacagaggaaatgaaggtaccctagaatccatcaatgagaagactttttcagctactatcgtcattgaaactgtgtgagctaccacgccttgcctgagttgatcttctacaagagttcaaacaaaaaacagaccataccaggatgatcacttcaaacatgaggatgggtataagctgacgtcagacacagggttgatgggagacctacagaaaatacatataaatcatcagacatgaagtccagcacatagtaggtattgaataaatggcagtgagtggtcatgtccagaaatgaagccaagaagttgagcctggactactaagaatctggtctgaagaatttcaaaaaggagaatggttctccctgataacaaatagtgatgagtaaaaccagacaaattacatatgcctcccccaagtatgtacgtttggaatcaacttggtggttttcttcagagaaaaaatgtttcatgtctg

SEQ ID NO: 311524 - DNA, 1125 bp, Artificial Sequence
  derived and/or modified sequence
atgggcaagagtgacttcctgacccccaaggccatcgccaaccgcatcaagagcaagggcctgcagaagctgcgctggtactgccagatgtgccagaagcagtgcagagatgaaaatggcttcaagtgccactgcatgtctgagagccaccagaggcagctgctgctggccagcgagaacccccagcagttcatggactacttcagcgaggagttcagaaatgacttcctggagctgctgcggcggcgcttcggcaccaagagggtgcacaacaacatcgtgtacaatgagtacatcagccaccgggagcacatccacatgaatgccacccagtgggagaccctgacagacttcaccaagtggctgggccgggagggcctgtgcaaggtggatgagacccccaagggctggtacatccagtacatcgaccgggaccctgagaccatccggcggcagctggagctggagaagaagaagaagcaggacctggatgatgaggagaagacagccaagttcatcgaggagcaggtgcggcggggcctggagggcaaggagcaggaggtgcccaccttcacagagctgagcagagaaaatgatgaggagaaggtgaccttcaacctgagcaaaggagcctgcagcagcagcggggccaccagcagcaagagcagcaccctgggccccagcgccctgaagaccatcggcagcagcgcctctgtgaagaggaaggagagcagccagagcagcacccagagcaaggagaagaagaagaagaagagcgccctggatgagatcatggagattgaggaggagaagaagaggacagccaggacagactactggctgcagcctgagatcatcgtgaagatcatcaccaagaagctgggggagaagtaccacaagaagaaggccatcgtgaaggaggtgattgacaagtacacagctgtggtgaagatgattgattctggggacaagctgaagctggaccagacccacctggagaccgtcatcccagcccctgggaagaggatcctggtgctgaatggaggctacagaggaaatgaaggcaccctggagagcatcaatgagaagaccttcagcgccaccatcgtgattgaaacagtgtag

SEQ ID NO: 311525 - DNA, 1125 bp, Artificial Sequence
  derived and/or modified sequence
atgggcaagagcgacttcctgacccccaaggccatcgccaaccggatcaaatccaaagggttgcaaaagcttcgctggtactgtcagatgtgtcaaaagcaatgcagggatgaaaacggttttaagtgtcattgcatgtcagagagccaccaaaggcaattattacttgccagcgagaacccgcagcagtttatggattactttagtgaagaatttcgaaatgacttcctggaattacttcgcaggagattcggaactaaaagggtccataacaacatcgtgtataatgagtacattagccaccgggagcacatacatatgaacgccacccagtgggaaacactgacagactttaccaaatggcttgggagggaagggctctgtaaggtggacgaaacacccaagggctggtacatccagtacatagatagagatcccgaaacaatccgtcgccaattggagctcgagaagaaaaaaaaacaagatctggatgacgaagagaaaacagcaaagttcatcgaggaacaagtgcgcagagggctggaggggaaggaacaggaagtgcccactttcaccgaattgtcaagagagaatgatgaggaaaaggtgactttcaatctgtctaagggtgcatgctcatcctcaggagccacatcaagcaagagctccactctcggcccatcagcacttaagaccatcggctcttctgcatcagttaaacgaaaggaatcctctcagtcctccactcagtcaaaggagaaaaaaaaaaaaaaaagcgcactggacgagattatggagatagaagaggagaagaagcgcactgccagaactgattattggctccagcccgaaattattgtaaagataatcacaaagaaactgggcgaaaaataccataaaaaaaaagctatcgttaaagaggtgatagacaagtacaccgccgtggtcaagatgattgattccggggataaactcaaacttgaccagacgcacctcgagactgtcatacctgctccaggcaagcggatcttggtactgaacggcgggtacagaggtaacgaagggactttagaaagcatcaacgagaagaccttttccgccacaatcgtcatagagactgtatag

SEQ ID NO: 311526 - DNA, 1125 bp, Artificial Sequence
  derived and/or modified sequence
atgggaaagagtgactttctcacacccaaggccattgctaaccgaatcaaaagtaagggcctccaaaaacttcgttggtactgtcagatgtgccagaagcaatgtcgtgatgagaatggctttaaatgccactgtatgagtgaaagtcatcagcgacagctcctgttggcatccgagaacccacagcagtttatggattacttctctgaagagttccgtaatgattttctcgaactgcttaggcgaaggtttggtacaaaacgtgttcacaataacatcgtgtataatgagtacatttctcaccgtgaacatatacatatgaatgctacacaatgggagacactgaccgacttcactaagtggcttggtagagaggggttgtgcaaggtggatgaaacaccgaaaggatggtacatccagtacatagacagagaccctgaaaccatcagacgtcaactcgaactcgagaagaagaaaaaacaagacctggacgacgaggagaaaacagcaaagttcattgaggaacaggtgcgcaggggtcttgagggcaaggagcaggaagtaccaacctttacagagctttctagagaaaatgacgaggagaaagtgacctttaacctgtccaaaggagcttgtagcagcagcggggcaacatcgagcaagtctagtacactcggaccctcagccttgaaaactatcggatcgtccgcctctgtgaagcgcaaagagtcatcacagtcctccacacaaagcaaggagaagaaaaaaaagaagtccgctcttgacgagatcatggaaattgaagaagaaaaaaagagaaccgccaggaccgattactggctccagcctgaaatcattgtaaagatcattacgaagaaactcggagagaaatatcacaagaaaaaagccattgtgaaggaagtgatagacaagtatactgcggtcgttaagatgatcgactcaggggataagctcaaattggaccaaacccatctggagacagtaatccctgccccaggaaaacgaatcttggtactaaacgggggttatcgaggaaatgagggcacattagaatcgataaacgagaaaactttttcggccacaatcgtgattgagactgtttag

SEQ ID NO: 311527 - DNA, 1125 bp, Artificial Sequence
  derived and/or modified sequence
atgggcaagagcgacttcctgacccccaaggccatcgccaacagaatcaagagcaagggcctgcagaagctgagatggtactgccagatgtgccagaagcagtgcagagacgagaacggcttcaagtgccactgcatgagcgagagccaccagagacagctgctgctggccagcgagaacccccagcagttcatggactacttcagcgaggagttcagaaacgacttcctggagctgctgagaagaagattcggcaccaagagagtgcacaacaacatcgtgtacaacgagtacatcagccacagagagcacatccacatgaacgccacccagtgggagaccctgaccgacttcaccaagtggctgggcagagagggcctgtgcaaggtggacgagacccccaagggctggtacatccagtacatcgacagagaccccgagaccatcagaagacagctggagctggagaagaagaagaagcaggacctggacgacgaggagaagaccgccaagttcatcgaggagcaggtgagaagaggcctggagggcaaggagcaggaggtgcccaccttcaccgagctgagcagagagaacgacgaggagaaggtgaccttcaacctgagcaagggcgcctgcagcagcagcggcgccaccagcagcaagagcagcaccctgggccccagcgccctgaagaccatcggcagcagcgccagcgtgaagagaaaggagagcagccagagcagcacccagagcaaggagaagaagaagaagaagagcgccctggacgagatcatggagatcgaggaggagaagaagagaaccgccagaaccgactactggctgcagcccgagatcatcgtgaagatcatcaccaagaagctgggcgagaagtaccacaagaagaaggccatcgtgaaggaggtgatcgacaagtacaccgccgtggtgaagatgatcgacagcggcgacaagctgaagctggaccagacccacctggagaccgtgatccccgcccccggcaagagaatcctggtgctgaacggcggctacagaggcaacgagggcaccctggagagcatcaacgagaagaccttcagcgccaccatcgtgatcgagaccgtgtag

SEQ ID NO: 311528 - DNA, 696 bp, Artificial Sequence
  derived and/or modified sequence
taggagacgatcgtcaatgtgcttgactttaagaaggatgtcggcctctggcacgggattttgaccagcgtgatgaacatgatgcatgtgatctctattccctacagcctgatgaaagttaaccccctgagttggatccagaaggtgtgtcagtataaagctaaagtggcctgcgtaaagagccgggatatgcactgggcactggtagcgcacagagaccagagagacattaacctgtcctccttgagaatgctaattgtggcagacggggcgaacccctggtctatttccagctgcgacgcttttctgaatgtgttccagtccaaaggacttcgccaggaagtgatttgcccatgtgcaagttcaccagaggctctgaccgttgctatacgaagacccactgacgatagtaatcagcctccagggcgaggcgtactgtcaatgcatgggcttacgtacggagttattagagtagactcagaagagaagctctcagtgctcactgtacaggatgttggcctcgtgatgcccggcgcaattatgtgttcggtaaagccagatggcgtccctcaactgtgcaggacggacgagatcggcgaactgtgcgtgtgcgcggtagccaccggcacatcgtactatgggctgagcggcatgacaaaaaatacctttgaacacacctctaacaaaggcaaatag

SEQ ID NO: 311529 - DNA, 696 bp, Artificial Sequence
  derived and/or modified sequence
tgagaaaccatcgtgaatgtgctggacttcaagaaggatgtgggcctgtggcacggcatcctgacctctgtgatgaacatgatgcacgtgatcagcatcccctacagcctgatgaaggtgaaccccctgtcctggatccagaaggtgtgccagtacaaggccaaggtggcctgtgtgaagagccgggacatgcactgggccctggtggcccaccgggaccagagggacatcaacctgagcagcctgaggatgctgattgtggctgatggagccaacccctggagcatcagcagctgtgatgccttcctgaatgtgttccagagcaagggcctgcggcaggaggtgatctgcccctgtgccagcagccctgaggccctgactgtggccatcagaagacccacagatgacagcaaccagcccccaggccggggcgtgctgtccatgcacggcctgacctatggagtcatccgggtggacagcgaggagaagctgtctgtgctgactgtgcaggatgtgggcctggtgatgcctggggccatcatgtgcagcgtgaagccagatggagtgccccagctgtgcaggacagatgagatcggggagctgtgtgtgtgtgctgtggccaccggcaccagctactacggcctgagcggcatgaccaagaacacctttgagcacaccagcaacaagggcaagtag

SEQ ID NO: 311530 - DNA, 696 bp, Artificial Sequence
  derived and/or modified sequence
tgagagaccatcgtgaacgtgctggacttcaagaaggacgtgggcctctggcatggcatccttacatctgttatgaacatgatgcacgttatatccataccgtactccctgatgaaagtgaaccccctctcttggattcagaaagtctgccagtacaaggcaaaggtcgcatgtgtgaagtctagagatatgcactgggctttggtcgcacacagggaccagagggacataaatctgtctagcctgcgcatgctgatagtggctgacggggctaacccatggtccatttcttcgtgtgacgcttttttgaacgtctttcaaagcaagggactaaggcaggaagttatctgcccatgtgcttccagcccggaggccctaaccgtagccataagaagacctacagatgactctaatcagccccccggccgaggggtgctgagtatgcatgggctcacctatggcgtaatccgggtcgattccgaggaaaagttgtccgtgctgactgtacaagacgtgggactggtcatgcccggagctattatgtgtagtgtaaagcccgatggcgtgcctcagctctgtcgcacagacgaaataggtgagctatgcgtgtgcgccgtagctactggcacctcctactacggcctgagcggcatgaccaagaatacgttcgaacacaccagcaacaagggtaagtag

SEQ ID NO: 311531 - DNA, 696 bp, Artificial Sequence
  derived and/or modified sequence
taggaaactatcgtgaacgtcctcgattttaagaaagacgtggggttatggcacggcattctaacctcggtcatgaacatgatgcacgtaatttcaattccttattccctaatgaaagtcaatcccctctcctggatacagaaagtatgtcaatataaagcaaaagtggcctgtgtgaaatcgagggacatgcactgggcgctggtggcacaccgagatcagcgggacataaatttatcttctctgcgcatgctgatcgtagccgatggggctaacccttggtcgatcagcagttgcgacgccttcctgaatgtgttccagagtaaaggccttaggcaggaggtgatttgtccctgtgcctccagcccagaggctctgaccgttgcaattaggcggccaaccgatgatagtaatcagcctcccggaaggggggttttgtccatgcatggcttgacatacggcgtaatcagggtcgactccgaagaaaagctgtccgtgctgactgtgcaggatgtcggcctcgtcatgccaggcgctatcatgtgttctgttaaacctgacggggttccgcagctctgcagaacagacgagataggagagttatgcgtgtgcgctgttgcaaccggcactagctactacggtttgagtggcatgaccaagaatacctttgaacacactagcaataagggaaaatag

SEQ ID NO: 311532 - DNA, 696 bp, Artificial Sequence
  derived and/or modified sequence
tgagagaccatcgtgaacgtgctggacttcaagaaggacgtgggcctgtggcacggcatcctgaccagcgtgatgaacatgatgcacgtgatcagcatcccctacagcctgatgaaggtgaaccccctgagctggatccagaaggtgtgccagtacaaggccaaggtggcctgcgtgaagagcagagacatgcactgggccctggtggcccacagagaccagagagacatcaacctgagcagcctgagaatgctgatcgtggccgacggcgccaacccctggagcatcagcagctgcgacgccttcctgaacgtgttccagagcaagggcctgagacaggaggtgatctgcccctgcgccagcagccccgaggccctgaccgtggccatcagaagacccaccgacgacagcaaccagccccccggcagaggcgtgctgagcatgcacggcctgacctacggcgtgatcagagtggacagcgaggagaagctgagcgtgctgaccgtgcaggacgtgggcctggtgatgcccggcgccatcatgtgcagcgtgaagcccgacggcgtgccccagctgtgcagaaccgacgagatcggcgagctgtgcgtgtgcgccgtggccaccggcaccagctactacggcctgagcggcatgaccaagaacaccttcgagcacaccagcaacaagggcaagtag

SEQ ID NO: 311533 - DNA, 731 bp, Artificial Sequence
  derived and/or modified sequence
ctgaaaccattgtgaatgtgctggatttcaagaaggacgtcgggctctggcatggcatcctgacaagcgtcatgaacatgatgcatgtgatcagcatcccgtactcgctgatgaaggtgaaccctctctcctggatccagaaggtctgccagtacaaagcaaaagtggcgtgtgtgaaatcgagggatatgcattgggcattagtagcacacagagatcagagagacatcaacctctcctctctgcgaatgctgatagtggcggacggcgcgaacccctggtctatttcttcttgcgatgcatttctcaatgtcttccaaagtaaaggccttcgacaggaggtcatctgtccttgtgccagctcgccagaggccctcactgtggccatccggaggcccacggatgacagtaaccagcccccgggccggggtgtcctctccatgcatggactgacctatggggtcattcgtgtggactcggaagagaagctgtccgtgctcaccgtgcaggatgtcggcctcgtgatgcctggagccatcatgtgttcagtgaagccagacggggttcctcagctgtgcagaacggatgagatcggggagctgtgtgtgtgtgcagttgcgacgggcacgtcctactatggcctctctggcatgaccaagaacacctttgagcatacttccaacaagggcaaataacattttatgaatgaagagagattactttaaaactaa

SEQ ID NO: 311534 - DNA, 597 bp, Artificial Sequence
  derived and/or modified sequence
atgtcccatgctgctacctccgccttctgccgtagcattaagctgcaatgtgagctctatccatcccgcgaggtggcaatatgcctcgatccatactgcggcctgggctttgtgctgtggtgcttatgttcagtgtactcgggacatcagtccatcctcattcctccatctgaacttgagaccaaccctgctttatggctgctggccgttagccagtataaagttcgggacacattttgcagctattcggtaatggaactctgcactaaagggctgggctctcagacagagagcctgaaggctaggggactagacttaagtcgtgtgagaacatgcgtcgtcgtggccgaagagcgtccccgcatagctctgacccagtccttctctaaactctttaaggacctcgggcttcatccaagagcggtgtcaacatcattcggctgccgggtgaacctggctatatgcctccagtgttgggattacagacacgagccacctaggcccgccccaaaatgctttaagatggtttacaaggagggggtgcgctccgtgggagaagacaagatcagagaaaaacgcacaaagacatggagatag

SEQ ID NO: 311535 - DNA, 468 bp, Artificial Sequence
  derived and/or modified sequence
tgagtgtacagcggccatcagtccattttaattccgcccagtgagctcgaaacaaacccagccctgtggctgctcgcagtgagccagtataaggttcgggatactttctgcagctactctgtgatggaactttgcaccaagggattgggtagtcagactgagtcgctgaaagccagaggcctggacctttcgcgggtgagaacttgcgtggttgttgccgaagaaaggccaaggatagctttgacccagtcctttagcaaactgttcaaggatttaggactgcatccccgagccgtgtccacctcctttgggtgtagagtaaacctagcaatttgtttgcagtgctgggattaccgccacgaacccccaaggccagctcccaagtgttttaagatggtctacaaggaaggcgttagatctgtgggagaggacaagatcagagaaaaaaggacgaaaacgtggcgctag

SEQ ID NO: 311536 - DNA, 1116 bp, Artificial Sequence
  derived and/or modified sequence
atgcacggcctgacatacggggtgattagggtcgattccgaagagaaactgtcagtcctgacagtgcaggatgtcggattggtgatgcctggagccatcatgtgcagcgttaaacctgatggagtgccacagctttgtcgaacagatgaaattggcgagctgtgcgtatgcgcagtcgcaactggcacttcatactacggactatctggcatgaccaaaaatacctttgaggtgttccctatgacgtcatccggcgcccctattagtgagtatccctttatacgaactgggctgcttggtttcgtagggcccggtgggctggtgttcgtggtcgggaagatggatggcttaatggtggtgtcagggagacgacataacgcagatgacatcgtggccactgctttggccgtggaacctatgaagttcgtctatcgaggtcgaatcgccgtgttctctgtgaccgtgttacacgacgaacgaattgtcattgtggccgaacagagacctgattcaacagaggaagatagtttccagtggatgtctagagtgcttcaggccatcgactctattcatcaggtaggtgtgtactgtctggccctggtgccagcaaataccctgcccaaaacacctctggggggaattcatctctctgaaacgaagcagctcttcctggaaggcagtctccatccttgcaacgtcctgatgtgccctcacacatgcgtgaccaatcttccgaagccacgccagaaacagccagagattgggccggccagcgttatggttggtaacctcgtgagtgggaagcgcattgcccaagcttccggccgggacctgggacagatcgaggataatgatcaggcccgcaagtttctttttctttcagaggtactgcagtggcgcgctcagactactcctgaccacatattatataccctcctcaactgtagggtgcgccggggtgccgggctgccctggttgctggcttcacgcgggctcgcttggtttttaggtgccctcctcctgttgagcctaaatccgttcgcatccgtgctctgggaattttttctttgttttgcgatcttaactgaaacgtttgtcccaagggactgtttctag

SEQ ID NO: 311537 - DNA, 597 bp, Artificial Sequence
  derived and/or modified sequence
atgagccacgccgccaccagcgccttctgccgcagcatcaagctgcagtgtgagctgtaccccagccgggaggtggccatctgcctggacccctactgcggcctgggctttgtgctgtggtgcctgtgcagcgtgtacagcggccaccagagcatcctgatccccccatctgagctggagaccaacccagccctgtggctgctggccgtgtcccagtacaaggtgcgggacaccttctgcagctacagcgtgatggagctgtgcaccaagggcctgggcagccagacagagagcctgaaggcccggggcctggacctgagccgggtgaggacctgtgtggtggtggccgaggagcggccccgcatcgccctgacccagagcttcagcaagctgttcaaggacctgggcctgcaccccagggctgtgtccaccagctttggctgccgggtgaacctggccatctgcctgcagtgctgggactacagacatgagccccccaggcctgcccccaagtgcttcaagatggtgtacaaggagggcgtgcgctctgtgggggaggacaagatccgggagaagaggaccaagacctggaggtag

SEQ ID NO: 311538 - DNA, 468 bp, Artificial Sequence
  derived and/or modified sequence
tgagtgtacagcggccaccagagcatcctgatcccccccagcgagctggagaccaacccagccctgtggctgctggccgtgtcccagtacaaggtgcgggacaccttctgcagctacagcgtgatggagctgtgcaccaagggcctgggcagccagacagagagcctgaaggcccggggcctggacctgagccgggtgaggacctgtgtggtggtggccgaggagcggcccagaattgccctgacccagagcttcagcaagctgttcaaggacctgggcctgcaccccagggctgtgtccaccagctttggctgccgggtgaacctggccatctgcctgcagtgctgggactacagacatgagccccccaggcctgcccccaagtgcttcaagatggtgtacaaggagggcgtgcgctctgtgggggaggacaagatccgggagaagaggaccaagacctggaggtag

SEQ ID NO: 311539 - DNA, 1116 bp, Artificial Sequence
  derived and/or modified sequence
atgcacggcctgacctacggcgtcatccgggtggacagcgaggagaagctgtctgtgctgactgtgcaggatgtgggcctggtgatgcctggggccatcatgtgcagcgtgaagccagatggagtgccccagctgtgcaggacagatgaaattggagagctgtgtgtgtgtgctgtggccaccggcaccagctactacggcctgagcggcatgaccaagaacacctttgaggtgttccccatgaccagcagcggggcccccatcagcgagtaccccttcatcagaacaggcctgctgggctttgtgggccctgggggcctggtgtttgtggtgggcaagatggatggcctgatggtggtgtctggaagaagacacaatgctgatgacatcgtggccacagccctggccgtggagcccatgaagtttgtgtaccggggcagaattgctgtgttttctgtgacagtgctgcatgatgaaagaattgtgattgtggccgagcagaggccagacagcacagaggaggacagcttccagtggatgagccgggtgctgcaggccatcgacagcatccaccaggtgggcgtgtactgcctggccctggtgcctgccaacaccctgcccaagacccccctgggcggcatccacctgtctgagaccaagcagctgttcctggagggcagcctgcacccctgcaatgtgctgatgtgcccccacacctgtgtgaccaacctgcccaagccccggcagaagcagcctgagatcggccctgcctctgtgatggtgggcaacctggtgtctgggaagagaattgcccaggccagcggccgggacctgggccagatcgaggacaatgaccaggccaggaagttcctgttcctgtctgaggtgctgcagtggagggcccagaccaccccagaccacatcctgtacaccctgctgaactgccgggtgagaagaggagctggcctgccctggctgctggccagccggggcctggcctggttcctgggcgccctgctgctgctgagcctgaacccctttgcctctgtgctgtgggagttcttcctgtgctttgccatcctgacagagacctttgtgccccgggactgcttctag

SEQ ID NO: 311540 - DNA, 597 bp, Artificial Sequence
  derived and/or modified sequence
atgagccacgccgccaccagcgccttctgccggagcatcaagctgcagtgcgagctgtatccgagccgagaggtagcaatatgtctggacccttactgcggtctgggatttgtcttgtggtgtttgtgcagtgtttacagcgggcaccaaagcattttaatacctccatcagaactggagacaaacccagctctgtggcttttggcagtcagccaatataaagtcagggatacattttgctcctactcagtgatggagctgtgcaccaaggggctcgggtctcagacagagtcattgaaagcccggggacttgatctgagcagagtgagaacctgtgtcgtcgtggctgaggagagaccccgtattgcgctcactcagtctttcagtaaactgttcaaggacctgggtctgcatcccagagctgtgagcaccagcttcgggtgccgagtaaatctcgccatctgtctacaatgttgggactaccggcacgaaccacccagaccagcccccaaatgtttcaaaatggtctacaaagagggggttaggagcgtaggcgaagataagatcagagagaaacggacgaaaacctggcgttag

SEQ ID NO: 311541 - DNA, 468 bp, Artificial Sequence
  derived and/or modified sequence
tgagtgtacagcggccaccagagcatcctgatcccccccagcgagctggaaaccaaccctgcgttgtggctactggccgtttctcaatacaaggtccgggatacattttgttcttacagtgttatggagctgtgcactaagggcttgggaagccagacagaatccctgaaagcacgcgggctcgatttgtccagggtgcgcacatgcgtggtggtggcggaggagcgaccgcgcatagcattgactcagagcttctctaagctgtttaaagatcttgggctgcacccgcgggccgtgagtacctcgttcggctgcagggtaaacctcgccatctgcctccagtgttgggattaccggcacgagccccccaggccagccccaaagtgtttcaaaatggtgtataaggaaggggtgaggagcgtgggcgaggataaaatccgtgagaaacgaacgaagacttggcggtag

SEQ ID NO: 311542 - DNA, 1116 bp, Artificial Sequence
  derived and/or modified sequence
atgcacggcctgacctacggcgtgatccgggtggacagcgaggagaagctatctgtcctgacagttcaggacgtgggcctggttatgcccggcgccatcatgtgctcggtgaagcctgatggcgtccctcagctgtgtcgtaccgacgagattggtgagctgtgtgtatgcgccgtggccacaggaacctcctactacgggctgtccggaatgactaagaacacctttgaagttttccccatgacctcgtccggggcacctatatccgagtatcctttcattcggacgggattgctgggttttgtgggaccaggggggctcgtgtttgttgtagggaaaatggacgggctaatggtggtttcaggacgtcgccataatgccgatgacattgtggccactgccctggcagtcgaacccatgaagttcgtctaccgcggcagaattgcagtcttttccgtgacagtcctgcatgatgaacggatcgttattgtggcagagcagcgccccgacagtacagaggaagatagctttcagtggatgtctcgagttctccaggccattgacagtattcaccaagttggggtctattgcctggctctcgtccccgcaaatacacttccaaagacccctctgggcggaattcacttgagcgagacaaaacagctgttcttggagggatctttgcatccctgcaatgtcctcatgtgtccgcacacgtgcgttacaaatcttccaaagcccagacagaagcagccggaaatcggcccggcctccgttatggtggggaacctggtctctggtaaaaggatagcccaggccagtggacgagaccttggccagatcgaggacaacgatcaggcaaggaagtttctgtttctgagtgaagttctccaatggcgtgcccagacgactccagatcacatcctgtacactctccttaattgtagagtaaggcgcggcgcaggcttaccctggttactggcctcaagaggcctagcctggtttctgggggctctgttgctgctgagcttgaacccctttgcctctgtgttgtgggagttcttcctgtgtttcgctatcctgaccgaaaccttcgtccctagagactgtttctag

SEQ ID NO: 311543 - DNA, 597 bp, Artificial Sequence
  derived and/or modified sequence
atgtcccatgccgcaacctcagctttttgtcgcagcattaagctgcagtgcgaactttaccctagccgggaggtggctatctgcctagatccttactgtgggctgggcttcgtgctgtggtgcctgtgtagtgtgtatagcggtcaccagtctattttgatcccaccatctgagctcgaaactaatccagccctgtggctgctcgctgtctcacaatacaaggtacgggataccttttgcagctacagcgttatggaattgtgtacaaaggggttaggctcccagaccgaatcactgaaggccagaggtctggatctttcgagagtgcggacgtgcgttgtagttgccgaggagcggccaagaatagcactgacccagtctttcagcaaactgtttaaggacctgggcctgcaccctagagccgtaagcactagtttcgggtgcagggttaacctcgcgatttgtctgcaatgttgggattacagacacgagcccccacgccctgcccctaaatgtttcaaaatggtgtataaggaaggagttagatctgtaggcgaagataagattcgcgagaaaaggaccaagacctggcggtag

SEQ ID NO: 311544 - DNA, 468 bp, Artificial Sequence
  derived and/or modified sequence
taagtgtactctggtcaccaaagtatacttatccccccaagtgaactggaaacaaatccagctctttggctcttagccgtgagtcaatacaaggtgagggatactttttgctcatattctgtcatggagctgtgcactaaagggctgggatcccaaaccgagtcactcaaggcgcgagggctggatctgtcgagggtgcggacttgtgtcgtggttgcagaggaaaggccacggattgccctgactcagagctttagtaaattgttcaaagacctgggacttcatcccagagccgtgtctacatccttcggttgtagggttaacttggccatatgccttcagtgctgggactataggcatgaacctccgcgacccgctcctaaatgcttcaaaatggtatacaaggaaggtgtccggagcgttggggaggacaaaattcgtgaaaagagaaccaagacctggcgttag

SEQ ID NO: 311545 - DNA, 1116 bp, Artificial Sequence
  derived and/or modified sequence
atgcatggcctcacatatggggtcatccgagtggattcagaggaaaagctgagcgtgctgaccgtacaggatgtgggtctcgtcatgccgggagcaattatgtgcagcgtgaaacctgatggggtgcctcagctctgccgcacagacgagatcggagaactctgcgtttgtgcagtcgcaaccggaaccagctattatggactgtccggaatgaccaagaacacatttgaggtattccctatgacaagttcaggagcccctatcagcgagtacccttttatccgcaccggcctgctggggttcgtgggtccgggaggactggtctttgttgttggtaaaatggacgggctcatggtggtgagcggacggcgacacaacgccgacgacatcgtggcaacggctctcgcagtcgagccaatgaaatttgtctatcggggtagaatagccgtttttagcgtcaccgtgctgcacgacgagcggatagtgatcgtcgctgaacagcgccctgattctaccgaggaggactccttccaatggatgtcccgagtgctgcaagctatcgactccatccaccaggttggagtgtactgcctggctctggtgccagcaaacaccctgcctaagacaccactgggcggaatacacttatccgaaactaaacaactgtttctagagggaagcctacatccttgtaacgtccttatgtgtccacacacctgcgtaacaaacttgcctaagccacgacagaagcaaccagagatcggccctgcctcagtgatggtgggcaatcttgtctcaggtaagagaattgctcaagcttctgggcgtgatctcggccagatcgaggacaatgaccaggccaggaaatttctgttcctgtctgaggtgttacaatggcgggcacaaacaacgcccgaccacatcctatacaccctacttaattgccgagtgcgcagaggagcgggactcccgtggttactggcaagcagagggttagcttggtttctcggagccctgctccttctcagcctcaacccatttgcctctgtactttgggaattcttcctgtgctttgcaattttgaccgagacattcgttccacgtgattgcttctag

SEQ ID NO: 311546 - DNA, 597 bp, Artificial Sequence
  derived and/or modified sequence
atgagccacgccgccaccagcgccttctgcagaagcatcaagctgcagtgcgagctgtaccccagcagagaggtggccatctgcctggacccctactgcggcctgggcttcgtgctgtggtgcctgtgcagcgtgtacagcggccaccagagcatcctgatcccccccagcgagctggagaccaaccccgccctgtggctgctggccgtgagccagtacaaggtgagagacaccttctgcagctacagcgtgatggagctgtgcaccaagggcctgggcagccagaccgagagcctgaaggccagaggcctggacctgagcagagtgagaacctgcgtggtggtggccgaggagagacccagaatcgccctgacccagagcttcagcaagctgttcaaggacctgggcctgcaccccagagccgtgagcaccagcttcggctgcagagtgaacctggccatctgcctgcagtgctgggactacagacacgagccccccagacccgcccccaagtgcttcaagatggtgtacaaggagggcgtgagaagcgtgggcgaggacaagatcagagagaagagaaccaagacctggagatag

SEQ ID NO: 311547 - DNA, 468 bp, Artificial Sequence
  derived and/or modified sequence
tgagtgtacagcggccaccagagcatcctgatcccccccagcgagctggagaccaaccccgccctgtggctgctggccgtgagccagtacaaggtgagagacaccttctgcagctacagcgtgatggagctgtgcaccaagggcctgggcagccagaccgagagcctgaaggccagaggcctggacctgagcagagtgagaacctgcgtggtggtggccgaggagagacccagaatcgccctgacccagagcttcagcaagctgttcaaggacctgggcctgcaccccagagccgtgagcaccagcttcggctgcagagtgaacctggccatctgcctgcagtgctgggactacagacacgagccccccagacccgcccccaagtgcttcaagatggtgtacaaggagggcgtgagaagcgtgggcgaggacaagatcagagagaagagaaccaagacctggagatag

SEQ ID NO: 311548 - DNA, 1116 bp, Artificial Sequence
  derived and/or modified sequence
atgcacggcctgacctacggcgtgatcagagtggacagcgaggagaagctgagcgtgctgaccgtgcaggacgtgggcctggtgatgcccggcgccatcatgtgcagcgtgaagcccgacggcgtgccccagctgtgcagaaccgacgagatcggcgagctgtgcgtgtgcgccgtggccaccggcaccagctactacggcctgagcggcatgaccaagaacaccttcgaggtgttccccatgaccagcagcggcgcccccatcagcgagtaccccttcatcagaaccggcctgctgggcttcgtgggccccggcggcctggtgttcgtggtgggcaagatggacggcctgatggtggtgagcggcagaagacacaacgccgacgacatcgtggccaccgccctggccgtggagcccatgaagttcgtgtacagaggcagaatcgccgtgttcagcgtgaccgtgctgcacgacgagagaatcgtgatcgtggccgagcagagacccgacagcaccgaggaggacagcttccagtggatgagcagagtgctgcaggccatcgacagcatccaccaggtgggcgtgtactgcctggccctggtgcccgccaacaccctgcccaagacccccctgggcggcatccacctgagcgagaccaagcagctgttcctggagggcagcctgcacccctgcaacgtgctgatgtgcccccacacctgcgtgaccaacctgcccaagcccagacagaagcagcccgagatcggccccgccagcgtgatggtgggcaacctggtgagcggcaagagaatcgcccaggccagcggcagagacctgggccagatcgaggacaacgaccaggccagaaagttcctgttcctgagcgaggtgctgcagtggagagcccagaccacccccgaccacatcctgtacaccctgctgaactgcagagtgagaagaggcgccggcctgccctggctgctggccagcagaggcctggcctggttcctgggcgccctgctgctgctgagcctgaaccccttcgccagcgtgctgtgggagttcttcctgtgcttcgccatcctgaccgagaccttcgtgcccagagactgcttctag

SEQ ID NO: 311549 - DNA, 827 bp, Artificial Sequence
  derived and/or modified sequence
gcgtctgggtgagtcgctctgcctgtctgatgacgacacagctgatctgtaagttgctgcggtccagggaggcggcggcggctgtggacgtcaggacgtggcccctcatcctggacacagatgatttgccaaagaagcggcctgcccagatctgcaaaccttgcaacccagacactcttgcatatctcgacttcagcgtgtccacaactgggatgctagctggcgtaaagatgtctcacgcagccaccagtgccttctgccgttccattaagctgcagtgtgaactttacccctctagagaagtggccatctgcctggacccttactgtggactgggatttgtcctctggtgcctctgcagtgtgtattctgggcaccagtccatcctgatcccgccctctgagctggaaaccaaccccgccttgtggcttcttgccgtgagtcagtacaaagtccgagacacgttttgctcctactccgtgatggagctgtgcaccaaggggctgggctcgcaaacagagtccctcaaggcgcgagggctggacttgtcccgagtgaggacctgcgtggttgtggcggaagagaggcctcggatcgcactcacacagtcgttctcaaagctgtttaaggacctgggccttcacccgcgggccgtcagcacctcgttcggttgcagggtgaacctggcgatttgcttgcagtgctgggattacaggcatgagccaccacgcccagccccaaaatgttttaagatggtttacaaggaaggagtacgctcagtaggagaagataaaatacgtgaaaaaagaaccaaaacatggagatga

SEQ ID NO: 311550 - DNA, 721 bp, Artificial Sequence
  derived and/or modified sequence
tgtgtattctgggcaccagtccatcctgatcccgccctctgagctggaaaccaaccccgccttgtggcttcttgccgtgagtcagtacaaagtccgagacacgttttgctcctactccgtgatggagctgtgcaccaaggggctgggctcgcaaacagagtccctcaaggcgcgagggctggacttgtcccgagtgaggacctgcgtggttgtggcggaagagaggcctcggatcgcactcacacagtcgttctcaaagctgtttaaggacctgggccttcacccgcgggccgtcagcacctcgttcggttgcagggtgaacctggcgatttgcttgcagtgctgggattacaggcatgagccaccacgcccagccccaaaatgttttaagatggtttacaaggaaggagtacgctcagtaggagaagataaaatacgtgaaaaaagaaccaaaacatggagatgaaagaaaaacagcgcaggaaagggacagaatgaagaacagagttggcgtgctggtgttttccacaaggcttctgaagcgtgccaccgtccttacctcggcaccagggcggggcctgacacgtggtggatattgaatgaatgtgcgccgtgggagtgttgagcacggttctgtattcttaataggaaatggcaatatgttcttgtgcagaagacaattctgtcaatatgaccgctaaatcaaaattcagtattctaa

SEQ ID NO: 311551 - protein, 185 aa, Artificial Sequence
  derived and/or modified sequence
MMALVRDRRAHYVMSIVIRWVHCFSSSLRGTFGTRWEAMKAKATELRVCCARRKREAREFKPPQMRGSTRLNISDDLKIGFFSTDHATQTDSSEILSVKELSSSTQKLAQMMKSLQVDFGFLKQLLQLKFEDRLKEESLSLFTILHDRILEIEKHYQQNEDKMRKSFNQQLADAIAVIKGMYQPL

SEQ ID NO: 311552 - protein, 296 aa, Artificial Sequence
  derived and/or modified sequence
GRKIMEGLEASIEQFQFNPRLNISDDLKIGFFSTDHATQTDSSEILSVKELSSSTQKLAQMMKSLQVDFGFLKQLLQLKFEDRLKEESLSLFTILHDRILEIEKHYQQNEDKMRKSFNQQLADAIAVIKGMYQQFFEVEEENVSLQDASTVKTNILLRKLKEKEEVIKELKEELDQYKDFGFHKMESFAKETSSPKSNLEKENLEYKVENERLLQIISELEEEIQINLKENSGLEDELISMKEMAEKDHKTIQKLMDSRDRLREELHYEKSLVQDVINKQKEDKEMRKKYGSLSVK

SEQ ID NO: 311553 - DNA, 888 bp, Artificial Sequence
  derived and/or modified sequence
ggccggaagatcatggagggcctcgaggcctctattgaacaattccagttcaaccccagacttaacatttcagatgatttaaagattggctttttcagcacagaccatgccactcaaactgattccagtgaaatactgtcagtaaaagaattgagttcatctacgcaaaagttagcacagatgatgaaatccctccaggtagattttgggttcctcaaacaattgcttcagttgaagtttgaggaccgactgaaagaggaatctttgagtctcttcaccattctgcatgacaggatcctagaaattgaaaagcattatcaacagaatgaggataagatgagaaaatccttcaatcagcagttagctgatgccatagctgttatcaaaggaatgtaccagcaattctttgaggtagaagaagagaatgtttctttgcaagatgcgagtactgtcaaaacaaatattttgttaagaaaactgaaagagaaagaagaagttattaaagaattaaaagaagaactagaccaatataaagattttggatttcacaaaatggaatcttttgccaaagaaaccagctctccaaaatcaaacctagaaaaggaaaatttggagtacaaagtggaaaatgagaggctgcttcagatcatttcagagcttgaagaagaaatccagatcaatctaaaagaaaattcaggattagaagatgaacttataagtatgaaagagatggcagaaaaggatcacaaaactattcaaaagttaatggatagtagagacagattaagagaagagcttcattatgaaaaatcattagttcaggatgtgattaataaacagaaagaggacaaggaaatgagaaaaaagtatggcagcttaagtgtaaag

SEQ ID NO: 311554 - DNA, 891 bp, Artificial Sequence
  derived and/or modified sequence
ggcagaaagatcatggagggcctggaggccagcatcgagcagttccagttcaaccccagactgaacatcagcgacgacctgaagatcggcttcttcagcaccgaccacgccacccagaccgacagcagcgagatcctgagcgtgaaggagctgagcagcagcacccagaagctggcccagatgatgaagagcctgcaggtggacttcggcttcctgaagcagctgctgcagctgaagttcgaggacagactgaaggaggagagcctgagcctgttcaccatcctgcacgacagaatcctggagatcgagaagcactaccagcagaacgaggacaagatgagaaagagcttcaaccagcagctggccgacgccatcgccgtgatcaagggcatgtaccagcagttcttcgaggtggaggaggagaacgtgagcctgcaggacgccagcaccgtgaagaccaacatcctgctgagaaagctgaaggagaaggaggaggtgatcaaggagctgaaggaggagctggaccagtacaaggacttcggcttccacaagatggagagcttcgccaaggagaccagcagccccaagagcaacctggagaaggagaacctggagtacaaggtggagaacgagagactgctgcagatcatcagcgagctggaggaggagatccagatcaacctgaaggagaacagcggcctggaggacgagctgatcagcatgaaggagatggccgagaaggaccacaagaccatccagaagctgatggacagcagagacagactgagagaggagctgcactacgagaagagcctggtgcaggacgtgatcaacaagcagaaggaggacaaggagatgagaaagaagtacggcagcctgagcgtgaagtag

SEQ ID NO: 311555 - DNA, 891 bp, Artificial Sequence
  derived and/or modified sequence
gggaggaaaatcatggagggcctggaagcttcaatcgagcagttccaattcaatccaagactgaacatcagcgatgaccttaagattggcttcttttctacggaccacgctacacagacggacagctctgagatactgtctgtgaaagaactcagttccagtactcaaaagctggcgcagatgatgaagtccctacaggtcgactttggcttcctcaagcagctgctgcaattgaaatttgaagaccgcctgaaggaagagtctttgtctctctttactatcctgcacgatcgaatattagagatcgagaagcattatcagcagaatgaagacaagatgaggaagtcttttaatcagcagcttgctgatgccatcgccgtaattaagggcatgtaccaacagttttttgaggtggaagaagagaacgtctcccttcaggacgcgtctactgtgaaaactaatatcctgctgcgcaaactgaaggagaaagaggaagtgatcaaagagctgaaagaggaactcgaccagtacaaggactttggcttccacaaaatggagagcttcgctaaggagacctcctctcctaagagtaacctcgaaaaagagaatctggagtacaaagtagaaaacgaacggttactgcagataatatcggaactcgaggaggagatccagattaaccttaaggagaactctggtctggaggacgagctgatctccatgaaggagatggctgagaaggaccacaagacaatccagaaattaatggactcccgggatcgcctgagggaggaactgcactacgaaaagagtcttgtgcaggatgtgattaacaaacagaaggaggataaggagatgagaaaaaagtacggatccctcagcgtcaagtag

SEQ ID NO: 311556 - DNA, 891 bp, Artificial Sequence
  derived and/or modified sequence
ggcaggaagatcatggagggcctggaggccagcattgagcagttccagttcaacccccggctgaacatcagtgatgacctgaagattggcttcttcagcacagaccacgccacccagacagacagcagcgagatcctgtctgtgaaggagctgagcagcagcacccagaagctggcccagatgatgaagagcctgcaggtggactttggcttcctgaagcagctgctgcagctgaagtttgaagatcggctgaaggaggagagcctgagcctcttcaccatcctgcatgaccgcatcctggagattgagaagcactaccagcagaatgaagacaagatgaggaagagcttcaaccagcagctggctgatgccatcgccgtcatcaagggcatgtaccagcagttctttgaggtggaggaggagaatgtgtccctgcaggatgccagcacagtgaagaccaacatcctgctgaggaagctgaaggagaaggaggaggtgatcaaggagctgaaggaggagctggaccagtacaaggactttggcttccacaagatggagagctttgccaaggagaccagcagccccaagagcaacctggagaaggagaacctggagtacaaggtggagaatgaaaggctgctgcagatcatcagcgagctggaggaggagatccagatcaacctgaaggagaacagcggcctggaggatgagctgatctccatgaaggagatggccgagaaggaccacaagaccatccagaagctgatggacagccgggaccggctgcgggaggagctgcactatgagaagagcctggtgcaggatgtgatcaacaagcagaaggaggacaaggagatgaggaagaagtatggcagcctgtctgtgaagtag

SEQ ID NO: 311557 - DNA, 891 bp, Artificial Sequence
  derived and/or modified sequence
ggccggaagatcatggagggcctggaggccagcatcgagcagttccagttcaatcccaggctgaatatctcggatgacctgaaaattggatttttttcaacggaccacgcaacgcagaccgatagtagtgaaatactgtccgtcaaggaactaagctcatcaacccagaagttagcccagatgatgaaatctctgcaggtggactttgggtttctgaaacagttactacagctgaagtttgaggatagactgaaagaagaatcactctctctattcactattctgcatgatcgcatcctggaaatcgagaagcattatcagcagaacgaggacaagatgaggaaatcttttaatcagcagctggctgacgccatcgccgtgatcaaaggcatgtatcagcagttcttcgaagtggaagaagagaacgtatctctgcaggacgcctcaaccgtcaagacgaacattctgctccgtaagcttaaggagaaggaggaggtgatcaaagagttgaaagaagagctcgaccagtataaagatttcgggttccataagatggagtcttttgctaaggagacctcgtcaccaaaaagcaatctggagaaagagaacctggaatataaggtggagaatgagaggctcctccagattatatcggagctcgaagaggaaatacagatcaacctgaaagaaaattctggattggaggacgagcttatcagcatgaaagaaatggcggaaaaagaccacaagactatacaaaaattaatggactctcgggataggctgcgtgaggaattgcactatgagaagtcactggttcaggacgtcatcaataaacaaaaagaagataaggagatgagaaaaaagtatggcagcctgtcggtgaagtag

SEQ ID NO: 311558 - DNA, 891 bp, Artificial Sequence
  derived and/or modified sequence
gggagaaaaattatggaaggattggaggcgagcatcgagcagtttcagttcaatcctcgcttgaacattagtgatgatctgaagatcggctttttctccaccgatcatgctacacagaccgactcttctgagattctaagcgtcaaggaattgtcatcgagcacgcagaaactagcacagatgatgaagagccttcaggttgattttgggtttctgaaacagctgctccaactgaaattcgaggaccgcctgaaggaagagtctctgtcacttttcaccatcctccatgatcggatattggaaatagagaagcactaccagcagaatgaggacaagatgcgcaaatctttcaatcagcagctggcagacgctatagccgtgatcaagggcatgtaccagcaatttttcgaggtggaagaggagaatgtttccttgcaggatgcctccacagttaagacgaatattctcctgcggaaactgaaggagaaggaagaggtgattaaggaactgaaagaggagctggaccagtataaggactttggtttccacaaaatggaatcttttgcaaaagagacttcttccccaaagtctaatctcgagaaggagaacctggaatacaaggtggaaaacgagcggttactccaaattatatctgaactggaagaggaaattcaaatcaatttgaaggagaactcagggctggaagacgaattaatcagtatgaaagaaatggccgaaaaagaccacaaaacaattcagaaactgatggatagcagagataggttgagggaggaactccactatgaaaaatcattagtacaggatgtgattaataaacaaaaagaggacaaggaaatgcgaaagaaatacgggtccctttcagtgaaatag

SEQ ID NO: 311559 - protein, 94 aa, Artificial Sequence
  derived and/or modified sequence
MFTRHTLFRQFAVLADTSFNYIKVKPLLVQSRTTMTAISSSSHCTSSIDGKHVDVVSDQAALQLSPKGKLSESPKEESLEEPSMRQSSPAETVD

SEQ ID NO: 311560 - DNA, 640 bp, Artificial Sequence
  derived and/or modified sequence
atgtttacaaggcacacactgtttcgtcagtttgcagtgcttgctgacacatccttcaattatattaaagtaaaacccttattagtgcagtctagaacgaccatgacagctatatcctcttcaagtcattgtacatcttcaatagacggtaagcatgtggatgtagtcagtgatcaggcagcccttcaactttcaccaaaagggaagttgtcggaatccccaaaagaagagtccttggaggagccctccatgcgccagagcagccccgcagagactgttgattaacccagcagaagcctgggctgcgcagacggggcctcagaaagagtggcctcgccgtcctggtgtaaggtgcctccctcggaaaggatactatctccaaggattttctaaactaattgtttaatctctccagattatgtatattaaccagcactgcgctcgaatagacctcaatgcgcgccttgtgcgcgctcctttccacgcctttaaggaaagccctggctggtgctgggtgagcggggcgcactgaacctccggggcaaccacatccattcaggagctccggggactcagaagagcccaggcgtctaagagtgggaagggacggactttaattaaaaagtttgactccctctct

SEQ ID NO: 311561 - DNA, 800 bp, Artificial Sequence
  derived and/or modified sequence
aacatggtttggagtctcaaatagaagcattaaaggcaaatttagagaatgagaaaaagaaggtggaaaggtttaggaaggaagctgatcgactaaataaaagctgggaaaagagattctttattctcaggaacagctttcatgtccttaagaatgagatgtttacaaggcacacactgtttcgtcagtttgcagtgcttgctgacacatccttcaattatattaaagtaaaacccttattagtgcagtctagaacgaccatgacagctatatcctcttcaagtcattgtacatcttcaatagacggtaagcatgtggatgtagtcagtgatcaggcagcccttcaactttcaccaaaagggaagttgtcggaatccccaaaagaagagtccttggaggagccctccatgcgccagagcagccccgcagagactgttgattaacccagcagaagcctgggctgcgcagacggggcctcagaaagagtggcctcgccgtcctggtgtaaggtgcctccctcggaaaggatactatctccaaggattttctaaactaattgtttaatctctccagattatgtatattaaccagcactgcgctcgaatagacctcaatgcgcgccttgtgcgcgctcctttccacgcctttaaggaaagccctggctggtgctgggtgagcggggcgcactgaacctccggggcaaccacatccattcaggagctccggggactcagaagagcccaggcgtctaagagtgggaagggacggactttaattaaaaagtttgactccctctctaa

SEQ ID NO: 311562 - DNA, 285 bp, Artificial Sequence
  derived and/or modified sequence
atgttcaccagacacaccctgttcagacagttcgccgtgctggccgacaccagcttcaactacatcaaggtgaagcccctgctggtgcagagcagaaccaccatgaccgccatcagcagcagcagccactgcaccagcagcatcgacggcaagcacgtggacgtggtgagcgaccaggccgccctgcagctgagccccaagggcaagctgagcgagagccccaaggaggagagcctggaggagcccagcatgagacagagcagccccgccgagaccgtggactag

SEQ ID NO: 311563 - DNA, 285 bp, Artificial Sequence
  derived and/or modified sequence
atgttcacacgccatacactgtttcgtcagttcgccgtgctcgctgacacttcatttaattacattaaagttaaaccgcttctagtgcagtcccgtaccacaatgactgctatttccagctcaagccactgcacctccagcatcgacggcaaacacgtagacgttgtttccgatcaggcagctctgcaactctccccaaaagggaaactgagcgagtcacccaaagaggaatcactcgaagaaccctcgatgagacaatcaagtccagcagagaccgttgactag

SEQ ID NO: 311564 - DNA, 285 bp, Artificial Sequence
  derived and/or modified sequence
atgttcactagacacactctgttccgacagtttgctgtactagcggatacttcattcaattacatcaaagtcaagcctctgcttgtgcaatctcgcaccacaatgactgctatttcctcgagcagccattgcaccagctccattgacgggaagcatgttgacgttgtgagtgaccaggccgccctccaactgtccccaaagggtaaattgtcggagagtccaaaggaagaaagccttgaggaaccatccatgagacagagctctcctgcagagaccgtcgactag

SEQ ID NO: 311565 - DNA, 285 bp, Artificial Sequence
  derived and/or modified sequence
atgttcaccaggcacaccctcttccggcagtttgctgtgctggccgacaccagcttcaactacatcaaggtgaagcccctgctggtgcagagcaggaccaccatgacagccatcagcagcagcagccactgcaccagcagcattgatggcaagcacgtggatgtggtgtctgaccaggccgccctgcagctgagccccaagggcaagctgtctgagagccccaaggaggagagcctggaggagcccagcatgaggcagagcagccctgctgagaccgtggactag

SEQ ID NO: 311566 - DNA, 285 bp, Artificial Sequence
  derived and/or modified sequence
atgttcacccggcacaccctgttccggcagttcgccgtgctggccgatactagtttcaattatatcaaggtcaaacccctactagttcagtcaaggacgactatgaccgcaataagcagctcctcacactgcacaagcagtattgatgggaagcatgtcgatgtggtgtctgatcaagctgctcttcagctgtctcccaagggtaagctcagcgagagcccgaaagaagagagtcttgaagagccctcaatgcgtcagtcaagcccagccgagaccgtcgactag

SEQ ID NO: 311567 - DNA, 285 bp, Artificial Sequence
  derived and/or modified sequence
atgttcacccggcacaccctgttccggcagttcgccgtgctggccgatacctcattcaactacatcaaagtcaagccgctgttagttcagtccagaactaccatgaccgccatatcatcctcaagtcactgcacctctagcattgatggaaaacacgtggacgttgtctccgaccaagccgcgctccagctatcccccaaaggcaagctatctgaatcccctaaggaggagtccctcgaggagcccagcatgcgccagtcatcgcccgccgagactgtagattag

SEQ ID NO: 311568 - DNA, 285 bp, Artificial Sequence
  derived and/or modified sequence
atgtttactagacacactctgttccgacagtttgctgtcttagcagacactagcttcaactatatcaaagtaaagcccttattggtgcagagccgaaccaccatgaccgctatttccagctcgagccattgcacaagtagcattgatggcaagcacgtcgatgtggtgagtgaccaggctgcactgcagctgagtccaaagggaaagctctctgagtcacccaaagaggagtcgttagaggagccttctatgcgtcaaagctctcccgctgaaactgtggattag

SEQ ID NO: 311569 - DNA, 285 bp, Artificial Sequence
  derived and/or modified sequence
atgtttactcggcataccctgttccgacaatttgcggttcttgccgatactagcttcaattacatcaaagtcaagcctctgctagttcagagcagaaccactatgaccgccatatcctcttcttcacactgtacttcctctatagatggaaagcatgtcgatgtggtgtccgatcaggccgcactgcagttatccccgaagggtaaactcagcgagagccccaaggaagagtcgcttgaggagccctccatgcgccagtcatcccccgctgagaccgtcgactag

SEQ ID NO: 311570 - protein, 579 aa, Artificial Sequence
  derived and/or modified sequence
MPAERKKPASMEEKDSLPNNKEKDCSERRTVSSKERPKDDIKLTAKKEVSKAPEESKKKEEEEKKKHQEEERKKQEEQAKRQQEEEAAAQMKEKEESIQLHQEAWERHHLRKELRSKNQNAPDSRPEENFFSRLDSSLKKNTAFVKKLKTITEQQRDSLSHDFNGLNLSKYIAEAVASIVEAKLKISDVNCAVHLCSLFHQRYADFAPSLLQVWKKHFEARKEEKTPNITKLRTDLRFIAELTIVGIFTDKEGLSLIYEQLKNIINADRESHTHVSVVISFCRHCGDDIAGLVPRKVKSAAEKFNLSFPPSEIISPEKQQPFQNLLKEYFTSLTKHLKRDHRELQNTERQNRRILHSKGELSEDRHKQYEEFAMSYQKLLANSQSLADLLDENMPDLPQDKPTPEEHGPGIDIFTPGKPGEYDLEGGIWEDEDARNFYENLIDLKAFVPAILFKDNEKSCQNKESNKDDTKEAKESKENKEVSSPDDLELELENLEINDDTLELEGGDEAEDLTKKLLDEQEQEDEEASTGSHLKLIVDAFLQQLPNCVNRDLIDKAEKAFCNGNLARVNLLLRMAVKK

SEQ ID NO: 311571 - protein, 124 aa, Artificial Sequence
  derived and/or modified sequence
MIKGGGLKHVPCVEDEDFIQALDKMMLENLQQRSGESVKVHQLDVAIPLHLKSQLRKGPPLGGGEGEAESADTMPFVMLTRKGNKQQFKILNVPMSSQLAANHWNQQQAERREDENEKAHTRYQ

SEQ ID NO: 311572 - DNA, 375 bp, Artificial Sequence
  derived and/or modified sequence
atgatcaagggcggcggcctgaagcacgtgccctgcgtggaggacgaggacttcatccaggccctggacaagatgatgctggagaacctgcagcagagaagcggcgagagcgtgaaggtgcaccagctggacgtggccatccccctgcacctgaagagccagctgagaaagggcccccccctgggcggcggcgagggcgaggccgagagcgccgacaccatgcccttcgtgatgctgaccagaaagggcaacaagcagcagttcaagatcctgaacgtgcccatgagcagccagctggccgccaaccactggaaccagcagcaggccgagagaagagaggacgagaacgagaaggcccacaccagataccagtag

SEQ ID NO: 311573 - DNA, 375 bp, Artificial Sequence
  derived and/or modified sequence
atgatcaagggagggggcttgaagcatgtgccctgcgtagaggacgaggactttatacaggccctagacaaaatgatgctggagaacttacagcagcgcagcggggagtcagtaaaagtccatcagctcgacgttgccatcccactccaccttaagagtcagctgcgaaagggccccccattggggggcggcgagggcgaggcggagagtgcagataccatgccctttgtgatgcttactcggaagggaaataagcagcagtttaagattctgaatgttcctatgagctcacagctggcagccaatcactggaaccagcagcaggcggagcgacgcgaagatgaaaatgagaaggctcacactcgatatcaatag

SEQ ID NO: 311574 - DNA, 375 bp, Artificial Sequence
  derived and/or modified sequence
atgatcaagggcggcggcctgaagcacgtgccctgtgtggaggatgaggacttcatccaggccctggacaagatgatgctggagaacctgcagcagaggtctggagagagcgtgaaggtgcaccagctggatgtggccatccccctgcacctgaagagccagctgaggaaaggaccacccctgggcggcggggagggggaggccgagagcgctgacaccatgccctttgtgatgctgaccaggaagggcaacaagcagcagttcaagatcctgaatgtgcccatgagcagccagctggccgccaaccactggaaccagcagcaggccgagaggagagaagatgaaaatgagaaggcccacacccgctaccagtag

SEQ ID NO: 311575 - DNA, 375 bp, Artificial Sequence
  derived and/or modified sequence
atgatcaagggcggcggcctgaagcacgtgccctgcgtggaggacgaagatttcatacaagctctagacaaaatgatgctggaaaacctgcagcagcgcagcggagaatccgttaaggtgcatcagcttgatgtggcaatccccctccacctcaagagtcagttgagaaagggcccgcccctgggtggaggggagggcgaggcagaaagcgcagataccatgccatttgtgatgctgacacgcaaagggaacaagcagcagtttaagattttaaatgtgcccatgtctagccagctggccgctaaccattggaaccagcagcaggccgaaagaagggaggatgagaacgaaaaagctcatactcggtatcagtag

SEQ ID NO: 311576 - DNA, 375 bp, Artificial Sequence
  derived and/or modified sequence
atgatcaaaggaggcggtctgaaacacgtgccttgcgtcgaggatgaggacttcattcaagcactagacaaaatgatgttggaaaatctccagcagcgctccggagagagtgttaaggtccatcagctggacgtggctattcccctccacctgaaatcccaactgaggaaggggccaccccttggcggaggggagggggaggccgaatctgccgacaccatgcccttcgttatgcttacaagaaagggtaataagcagcagtttaaaatactgaatgtgccaatgagctcccagcttgccgctaaccactggaatcagcagcaagccgaacggcgtgaggacgagaacgaaaaggctcacacccggtaccagtag

SEQ ID NO: 311577 - DNA, 1740 bp, Artificial Sequence
  derived and/or modified sequence
atgcccgccgagagaaagaagcccgccagcatggaggagaaggacagcctgcccaacaacaaggagaaggactgcagcgagagaagaaccgtgagcagcaaggagagacccaaggacgacatcaagctgaccgccaagaaggaggtgagcaaggcccccgaggagagcaagaagaaggaggaggaggagaagaagaagcaccaggaggaggagagaaagaagcaggaggagcaggccaagagacagcaggaggaggaggccgccgcccagatgaaggagaaggaggagagcatccagctgcaccaggaggcctgggagagacaccacctgagaaaggagctgagaagcaagaaccagaacgcccccgacagcagacccgaggagaacttcttcagcagactggacagcagcctgaagaagaacaccgccttcgtgaagaagctgaagaccatcaccgagcagcagagagacagcctgagccacgacttcaacggcctgaacctgagcaagtacatcgccgaggccgtggccagcatcgtggaggccaagctgaagatcagcgacgtgaactgcgccgtgcacctgtgcagcctgttccaccagagatacgccgacttcgcccccagcctgctgcaggtgtggaagaagcacttcgaggccagaaaggaggagaagacccccaacatcaccaagctgagaaccgacctgagattcatcgccgagctgaccatcgtgggcatcttcaccgacaaggagggcctgagcctgatctacgagcagctgaagaacatcatcaacgccgacagagagagccacacccacgtgagcgtggtgatcagcttctgcagacactgcggcgacgacatcgccggcctggtgcccagaaaggtgaagagcgccgccgagaagttcaacctgagcttcccccccagcgagatcatcagccccgagaagcagcagcccttccagaacctgctgaaggagtacttcaccagcctgaccaagcacctgaagagagaccacagagagctgcagaacaccgagagacagaacagaagaatcctgcacagcaagggcgagctgagcgaggacagacacaagcagtacgaggagttcgccatgagctaccagaagctgctggccaacagccagagcctggccgacctgctggacgagaacatgcccgacctgccccaggacaagcccacccccgaggagcacggccccggcatcgacatcttcacccccggcaagcccggcgagtacgacctggagggcggcatctgggaggacgaggacgccagaaacttctacgagaacctgatcgacctgaaggccttcgtgcccgccatcctgttcaaggacaacgagaagagctgccagaacaaggagagcaacaaggacgacaccaaggaggccaaggagagcaaggagaacaaggaggtgagcagccccgacgacctggagctggagctggagaacctggagatcaacgacgacaccctggagctggagggcggcgacgaggccgaggacctgaccaagaagctgctggacgagcaggagcaggaggacgaggaggccagcaccggcagccacctgaagctgatcgtggacgccttcctgcagcagctgcccaactgcgtgaacagagacctgatcgacaaggccgagaaggccttctgcaacggcaacctggccagagtgaacctgctgctgagaatggccgtgaagaagtag

SEQ ID NO: 311578 - DNA, 1740 bp, Artificial Sequence
  derived and/or modified sequence
atgcccgcagaacgcaagaaacccgcctccatggaagagaaggactcactacccaataacaaggagaaagattgctccgagcgcagaacagtcagttccaaggagcgcccaaaggatgatatcaaactgaccgccaagaaagaagtttcaaaagcccccgaggagtcaaaaaaaaaagaagaggaagagaagaagaagcaccaggaggaggagcgcaagaaacaagaagaacaggctaagcggcagcaagaagaggaggccgctgctcaaatgaaggagaaggaggagtccatccagctgcatcaggaggcctgggagcgccaccacctgcgcaaagagctgcggtcaaagaaccagaatgcccctgattctcgtccagaagaaaatttcttctccagactggactcaagcttgaaaaaaaatactgctttcgttaagaagctgaagactatcaccgagcagcaacgagatagtctcagtcatgacttcaatggtctgaatctgtcgaagtacattgccgaagcagtagcatccatcgtcgaggctaagcttaaaatatcggacgtgaattgtgccgttcatctgtgtagcctgttccatcaacggtacgccgacttcgctccttcactacttcaagtctggaagaagcatttcgaagccaggaaggaagaaaagaccccgaatattaccaagctgcgcactgatctgcgtttcatcgctgagcttacaatcgtcggaatttttactgataaggaagggttgtccctaatctacgagcagttgaaaaacataataaacgctgaccgagagtcacacacccatgttagtgtcgtgatcagtttttgccgacattgcggtgatgacattgctggcctcgtgcccagaaaggtgaaatccgctgccgaaaaattcaatctgagtttccctccttccgaaataatcagccccgagaagcaacagccattccaaaatctattgaaggaatacttcacatcacttacaaagcacctgaaaagggaccaccgcgaacttcagaacaccgagcgccagaataggaggatattgcactctaagggagagctgtctgaagatagacacaagcaatacgaagaattcgctatgagttatcagaagcttctggcaaactcccagtcactggcggatttattggacgagaacatgcctgatttaccccaagataagccaaccccagaggagcacggccccggtattgacatcttcactcccggcaagccaggggagtacgacctggaaggaggcatatgggaggatgaggacgccaggaacttttacgaaaatttgatcgacctcaaagcgttcgtacctgctatcctatttaaagacaacgagaaaagttgccagaataaggagagtaacaaagacgataccaaagaggccaaagaatcaaaggagaacaaggaggtctcttcacctgatgatctggagttggagcttgaaaatctagagataaatgatgacacactggagctcgaggggggggatgaggccgaggatcttactaagaaactgctagatgaacaggaacaagaggatgaagaggcctccacaggctcacatctgaaactgatcgttgacgcattcctgcagcaattgccaaactgtgtgaatcgcgatttgattgacaaagctgagaaagccttctgcaatggaaacctggccagggtgaacctactgctacgcatggccgtgaaaaagtag

SEQ ID NO: 311579 - DNA, 1740 bp, Artificial Sequence
  derived and/or modified sequence
atgcccgctgaacggaagaaaccggccagcatggaggaaaaagactcgctgcctaataataaggaaaaagactgctcggagcggcgcaccgtctctagtaaggagcggcccaaggatgacataaaacttaccgccaaaaaggaagtgagtaaagcacccgaagagtcaaagaaaaaggaggaggaagagaagaaaaaacatcaggaagaggagagaaagaaacaggaggaacaggccaagcgccaacaggaggaggaggccgccgcacagatgaaagagaaggaagagtccatccagctgcatcaggaagcatgggagcgacatcacctccgcaaagagttaagatccaaaaaccagaatgcacccgactcaaggccagaggaaaacttcttctcacggctggactcgagccttaagaagaacaccgcctttgttaagaaattgaaaacaataactgagcagcagagggattcactgagccacgatttcaatggactgaacctgtcgaaatacatcgctgaggccgtagcgtcaatagtcgaggccaaactcaagatctctgacgtgaactgcgccgtacacctgtgtagcctgtttcaccagcggtacgcagattttgctccttctctactgcaggtgtggaagaagcacttcgaggcccgcaaggaagagaagacgccgaacatcaccaagctacggacagatctgcgcttcatcgcggagctgacgatcgttgggatcttcacagataaggagggcttgagcttgatctacgagcagttaaaaaatattatcaacgccgaccgggaaagccacacgcacgtgtctgtggtcatttccttctgtagacattgcggagacgacatagctggcctggtaccccgcaaggtgaaatccgcagctgagaaattcaatttgtcatttcctccatctgagataatctccccagagaagcagcaaccctttcagaacctgcttaaggaatacttcacttcccttacaaaacacctgaaacgggaccacagggagctccaaaatacagagcgccagaaccgacggattctgcattcgaagggcgaattgtccgaagaccgccataagcagtacgaagaatttgcgatgtcttaccagaagctccttgcaaacagtcagtctctcgccgacctgctcgacgaaaatatgcctgacctcccccaggataagccaacccctgaggagcatgggccaggaatcgatatttttactcctggcaagcccggcgagtacgatttggagggcggcatttgggaggatgaggacgcgcgcaatttctacgagaatctgatcgatttgaaagctttcgtgccagccatcctgttcaaagacaatgagaagagctgccaaaataaggagtctaacaaggacgataccaaggaggcgaaggaatcaaaggaaaataaagaggtgtcctctcccgacgatcttgagctcgagctcgagaacctggagataaacgacgatactctcgaactcgagggtggtgacgaggcggaagacctcactaagaagttgctggatgagcaagagcaagaagacgaggaggcttctaccggctcgcatctgaaacttatcgtggacgcctttcttcagcagctgcctaactgtgtgaatcgtgatctaatagataaggcggagaaggctttctgcaatggcaatctcgctcgagtcaatcttctcctccggatggctgtgaaaaagtag

SEQ ID NO: 311580 - DNA, 1740 bp, Artificial Sequence
  derived and/or modified sequence
atgcctgctgagaggaagaagccagcctccatggaggagaaggacagcctgcccaacaacaaggagaaggactgcagcgagaggagaacagtgagcagcaaggagcggcccaaggatgacatcaagctgacagccaagaaggaggtgtccaaggcccctgaggagagcaagaagaaggaggaggaggagaagaagaagcaccaggaggaggagaggaagaagcaggaggagcaggccaagaggcagcaggaggaggaggccgccgcccagatgaaggagaaggaggagagcatccagctgcaccaggaggcctgggagcggcaccacctgaggaaggagctgcggagcaagaaccagaatgccccagacagcaggcctgaggagaacttcttcagccggctggacagcagcctgaagaagaacacagcctttgtgaagaagctgaagaccatcacagagcagcagagggacagcctgagccatgacttcaacggcctgaacctgagcaagtacatcgccgaggccgtggccagcatcgtggaggccaagctgaagatcagtgatgtgaactgtgctgtgcacctgtgcagcctcttccaccagagatatgctgactttgcccccagcctgctgcaggtgtggaagaagcactttgaggccaggaaggaggagaagacccccaacatcaccaagctgaggacagacctgcgcttcatcgccgagctgaccatcgtgggcatcttcacagacaaggagggcctgagcctcatctatgagcagctgaagaacatcatcaatgctgaccgggagagccacacccacgtgtctgtggtgatctccttctgccgccactgtggagatgacattgctggcctggtgcccaggaaggtgaagtctgctgctgagaagttcaacctgtccttccccccatctgagatcatcagccctgagaagcagcagcccttccagaacctgctgaaggagtacttcaccagcctgaccaagcacctgaagagggaccaccgggagctgcagaacacagagcggcagaacagacgcatcctgcacagcaagggggagctgtctgaagatagacacaagcagtatgaggagtttgccatgagctaccagaagctgctggccaacagccagagcctggccgacctgctggatgagaacatgccagacctgccccaggacaagcccaccccagaggagcacggccctggcatcgacatcttcacccctgggaagccaggagaatatgacctggagggcggcatctgggaggatgaagatgccaggaacttctatgagaacctgattgacctgaaggcctttgtgcctgccatcctcttcaaggacaatgagaagagctgccagaacaaggagagcaacaaggatgacaccaaggaggccaaggagagcaaggagaacaaggaggtgagcagcccagatgacctggagctggagctggagaacctggagatcaatgatgacaccctggagctggagggcggagatgaagctgaggacctgaccaagaagctgctggatgagcaggagcaggaggatgaggaggccagcacaggcagccacctgaagctgattgtggatgccttcctgcagcagctgcccaactgtgtgaacagagacctgattgacaaggccgagaaggccttctgcaatggaaacctggcccgggtgaacctgctgctgaggatggctgtgaagaagtag

SEQ ID NO: 311581 - DNA, 1740 bp, Artificial Sequence
  derived and/or modified sequence
atgcccgccgagcggaagaagcccgccagcatggaggagaaggactcattgccaaacaataaggagaaggattgtagcgagaggcgcacagtttcgtcaaaagaacgcccaaaggatgacatcaagctcactgcgaagaaggaggtgtccaaggcccccgaagagagtaaaaaaaaggaggaggaagaaaagaaaaaacaccaggaggaagagagaaagaaacaggaagagcaggccaaaagacagcaggaagaggaggcagctgcgcagatgaaagagaaagaggaatcaatacaactccaccaggaggcctgggaacgccaccatttacggaaggagctcaggagcaagaaccagaacgcccccgattcccgacccgaggagaattttttttcgcggcttgacagctcgcttaagaaaaatacagccttcgtcaagaagctgaaaacgattaccgaacaacaacgcgactctctgagccacgattttaacgggctgaaccttagcaaatatattgccgaggctgtcgcctcgatcgtagaggccaagttaaaaatcagcgatgtcaactgcgctgtgcatctttgctctttgttccatcaacgctacgccgactttgctcctagcttgctgcaggtttggaaaaaacattttgaggcaagaaaagaggaaaagaccccaaacatcacaaagctgcgcaccgatctccggtttatagccgaacttacaatagttgggatcttcacggataaagaaggattaagcctgatatatgaacagctgaagaatatcatcaacgctgaccgagagtctcacacacatgtgtccgtggtgatttctttttgtagacactgtggcgatgacatagccggactggtgccccggaaagttaagtcagcggctgaaaaatttaacctctcattccctccttccgaaattatctcaccggaaaaacagcaaccttttcagaacctcctgaaggagtacttcacttccctgaccaagcacttgaagagggaccatcgagaactccagaacaccgaacggcaaaacaggcggatattgcactccaagggggagctctcagaagatcgtcataaacagtatgaagaattcgctatgtcctaccagaagctcctggctaacagtcagtccctggccgatctcctcgacgagaatatgccagacctgcctcaggataaacctacacccgaggagcatggacctggcattgacattttcacaccggggaagcctggcgaatacgatctggaaggtgggatctgggaggatgaggatgctaggaacttttatgaaaatttgatcgacctgaaagctttcgtgccagcaatactgttcaaagataacgagaagagctgccagaataaagagtcaaacaaggatgacactaaggaggccaaggaatctaaggagaacaaggaggtctcttctcccgatgacctggagctcgaactggaaaacttggagatcaatgacgataccctggaactcgaaggaggcgacgaggcagaagatctaactaaaaaattgctggatgagcaggagcaggaagacgaggaggccagcacggggagtcatctgaagctcattgtggatgcatttctgcaacagcttcccaactgcgttaaccgcgatctgatagacaaagccgagaaggcattctgtaatggaaacctggcccgggtgaatttactgctccgcatggccgtgaaaaagtag

SEQ ID NO: 311582 - DNA, 1740 bp, Artificial Sequence
  derived and/or modified sequence
atgcccgccgagcggaagaagcccgccagcatggaggagaaggactctctccctaacaacaaggaaaaagattgctccgagcgacgaactgtgtcttcaaaggaacgaccaaaggacgacatcaagttgacggcaaagaaggaggtttccaaagcgccagaagaatctaagaagaaggaagaggaggaaaagaagaaacatcaggaagaggaacgaaagaaacaggaggagcaagcaaaacgacagcaggaagaggaggctgcagctcagatgaaggagaaggaagaatctatccagctccaccaggaggcttgggagagacaccatttgagaaaagagctgagatccaagaatcagaatgcacctgactccaggcccgaagagaattttttcagcaggttggattcatccctgaaaaaaaacacagcatttgtaaaaaaacttaagaccatcacggagcagcagcgcgacagtctgagccatgacttcaacgggcttaatttgagcaagtacattgccgaagcagtggccagtatagtggaagcaaaactgaagatctcagacgtgaattgcgccgtccatttgtgctcactatttcaccagcgttacgcagattttgcaccatccctcctccaggtgtggaagaagcacttcgaagctagaaaggaggagaagacccctaacatcacaaagcttcgaacagatctaaggttcatagctgaactaaccatagtcggtatattcactgacaaggagggtcttagtctgatatacgagcaactaaaaaacattatcaacgcagatagagagtcgcacacgcacgtgagtgttgtcatttcattctgtaggcactgtggcgacgacattgcaggcttggtgcctagaaaagttaaaagtgccgccgaaaaattcaacctgtcgttccccccttcagagattatctccccagagaaacagcagccattccagaacttgctcaaagagtacttcacgtctctgaccaagcacctaaagcgagatcatagggagctgcagaacaccgagagacagaatcgacgaatactgcacagcaaaggagaactgtccgaagacaggcataagcagtacgaggagttcgctatgagttaccaaaaactgctcgcaaatagccagtcgctggccgacttactagacgagaacatgcccgacctgccgcaggacaagccgaccccagaagagcatggacccggtatagatatttttacgcccggcaaacccggtgagtatgacttagaaggaggcatctgggaagatgaggatgcacgtaacttctacgagaatttaattgacctcaaggcctttgtccctgcaatcttgttcaaggataacgaaaagtcgtgccagaataaggagagcaacaaagacgacaccaaagaggccaaagaaagtaaggaaaataaggaagtgagcagtcccgacgatcttgagctggaactggagaatctggagatcaacgacgataccctggagctggagggcggtgacgaagctgaggacctcactaagaagttgctagacgagcaggaacaggaggatgaagaagcaagcacaggctctcatttgaagctgattgtcgacgccttcctgcagcagctgcctaactgtgtgaatagagatctaattgacaaagcagaaaaagcattttgtaatggaaatttagctcgcgtgaatcttttactgcgcatggccgtgaagaagtag

SEQ ID NO: 311583 - DNA, 1740 bp, Artificial Sequence
  derived and/or modified sequence
atgcccgctgagcgcaagaagcctgcaagtatggaggaaaaagattcgttgccaaataacaaggagaaagattgcagcgagaggcgcaccgtatcctctaaggaacgacctaaggatgatattaagctcaccgcaaagaaagaggtttccaaggcccctgaggagtccaagaaaaaggaagaagaggagaaaaagaaacaccaggaggaagagcgcaaaaaacaagaggagcaggctaaaagacagcaagaggaagaggctgcagcccagatgaaagaaaaagaggaaagtattcagttgcatcaggaagcgtgggaacgacaccatctccggaaagaactaaggtcgaaaaatcaaaacgcccctgacagccgccctgaagaaaatttcttcagccgcctcgactctagtcttaagaagaacacggcgtttgtaaagaaactcaaaaccatcaccgagcagcaacgggactccctgagccatgacttcaatgggctcaacctctccaaatacattgcggaggcagttgcctcaatcgtggaggccaaactgaaaatcagtgatgtgaactgtgcggtgcacctgtgctctctgtttcatcagaggtatgccgatttcgccccttcccttctccaggtgtggaagaaacactttgaggccagaaaggaggagaaaactcctaacataacaaagctgaggaccgacctcaggtttattgctgagcttaccatagttggtatttttaccgataaagaaggactgagcctgatctatgaacagctgaaaaacatcattaatgctgatcgcgagtctcacactcacgtgtcggtagtgatcagcttttgcagacactgtggggatgatatcgccggtctcgtgcctaggaaagtgaaatccgccgctgagaagttcaacctttctttccctccatcagagattatctctccggagaaacaacaaccttttcagaatcttctgaaggagtactttacatcccttaccaagcatctgaaaagagaccaccgagagctccagaatacggagaggcagaaccgcagaatcttgcattctaaaggtgagctgtcggaggatagacacaaacagtatgaggaattcgcgatgtcataccaaaagctcctcgccaatagccagtctttggccgacttgctcgatgaaaatatgcccgacttgccccaggacaagccaactccagaggaacacggacctggaatcgatattttcaccccaggcaagcctggagagtatgatctggaagggggaatctgggaggatgaggacgcccgaaacttttatgaaaacctcattgacctaaaggcattcgtgccagcaattctttttaaggataatgaaaagtcttgtcagaataaagagtctaacaaggacgacaccaaggaagctaaagagtctaaagagaataaggaggtctcctctccagatgacttggaattagagctcgaaaacctggaaatcaatgacgacaccctggagctcgagggtggcgatgaggctgaggacctgactaagaaactgctggatgagcaggaacaggaggatgaagaggcttcaacggggtctcatcttaaactgatcgtggacgcctttttgcagcagctgcctaattgtgtgaacagggatctgattgacaaggccgagaaagccttttgcaatgggaacctagccagggtcaatctgctcctacgtatggcggtgaagaagtag

SEQ ID NO: 311584 - DNA, 1740 bp, Artificial Sequence
  derived and/or modified sequence
atgcccgcagagagaaaaaagcccgcaagcatggaggagaaggactcactgcctaacaacaaagaaaaggactgcagtgaaaggcgtacagtctcctccaaggaacgcccaaaggacgacattaaactgacagccaagaaggaggtatccaaggctcccgaagaatctaaaaagaaggaagaagaagagaagaagaaacaccaggaggaggaaagaaagaaacaagaggaacaggccaagaggcagcaggaagaggaagcggctgcccaaatgaaagaaaaagaagaatcgatacagttgcaccaggaggcttgggagaggcaccatctgaggaaagagctgcggagcaagaaccaaaatgcacccgacagcagacctgaggagaacttctttagcagacttgactccagtctcaagaagaacaccgcttttgtcaagaaactgaaaacaatcaccgagcagcagcgcgattcactgagccacgatttcaatggtctgaacctgtcgaaatatatagcagaggctgtcgcttctattgtagaagctaagcttaagatctcagacgtgaattgtgccgttcacctgtgcagtctattccaccagaggtatgccgacttcgccccatcattgctccaggtatggaaaaagcactttgaggcgagaaaagaggagaagactcccaatattaccaagttaagaacggacctgcgttttatcgctgagctcacgattgtgggaatctttactgacaaagaggggctgtcccttatatatgaacagttgaagaacattattaatgccgaccgagagtctcacacacatgtgtctgtggttatcagcttttgtaggcattgtggcgacgacatagctggccttgtccctaggaaggtcaagtcggcagcagaaaaattcaaccttagtttccccccttcagaaatcatcagccctgaaaaacagcagccttttcagaatctgctgaaagaatatttcaccagccttaccaagcatctgaagagagaccatagagagctgcagaacaccgagagacaaaataggcgtattctgcacagcaagggggaactcagtgaggacagacacaaacagtacgaagagttcgccatgtcctaccagaagctgctggccaattctcagtcccttgctgatctcctagacgagaacatgcctgacctgccacaagataagccaactcccgaagagcacggcccaggcatagacatttttacccccggaaagcctggcgagtacgacctggaagggggaatatgggaagacgaggatgccagaaacttctacgagaatctgatcgacttgaaggcattcgttccagctatcctcttcaaagacaacgagaagtcctgtcagaacaaagagagtaacaaagacgataccaaagaggctaaagagtccaaggagaataaagaggtgtccagtcctgacgatctggaacttgaattagaaaacttagagatcaatgacgacaccctcgagctggagggaggcgatgaggccgaagatctcaccaagaagctgctcgatgagcaggaacaggaagatgaggaagcctccactgggtcacatctgaagctgatcgtcgatgcctttctccaacagctgccaaattgcgtcaacagagatctaatagacaaggctgaaaaagctttctgtaacggcaacctagccagagtgaacctgcttctaaggatggccgtgaaaaaatag

SEQ ID NO: 311585 - DNA, 1740 bp, Artificial Sequence
  derived and/or modified sequence
atgccagctgagcgtaaaaagccagcaagtatggaagaaaaagactctttaccaaacaacaaggaaaaagactgcagtgaaaggcggacagtgagcagcaaggagaggccaaaagacgatatcaagctcactgccaagaaggaggtcagcaaggcccctgaagaatcaaagaaaaaagaagaggaagaaaaaaagaaacatcaagaggaagagagaaagaagcaagaagagcaggccaaacgtcagcaagaagaagaagcagctgctcagatgaaagaaaaagaagaatccattcagcttcatcaggaagcttgggaacgacatcatttaagaaaggaacttcgtagcaaaaaccaaaatgctccggacagccgaccagaggaaaacttcttcagccgcctcgactcaagtttgaagaaaaatactgcttttgtcaagaaactaaaaactattacagaacaacagagagactccttgtcccatgattttaatggcctaaatttaagcaaatacattgcagaagctgtagcttccatcgtggaagcaaaactaaaaatctctgatgtgaactgtgctgtgcacctctgctctctctttcaccagcgttatgctgactttgccccatcacttcttcaggtctggaaaaaacattttgaagcaaggaaagaggagaaaacacctaacatcaccaagttaagaactgatttgcgttttattgcagaattgacaatagttgggattttcactgacaaggaaggtctttccttaatctatgaacagctaaaaaatattattaatgctgatcgggagtcccacactcatgtctctgtagtgattagtttctgtcgacattgtggagatgatattgctggacttgtaccaaggaaagtaaagagtgctgcagagaagtttaatttgagttttcctcctagtgagataattagtccagagaaacaacagcccttccagaatcttttaaaagagtactttacgtctttgaccaaacacctgaaaagggaccacagggagctccagaatactgagagacaaaacaggcgcattctacattctaaaggggagctcagtgaagatagacataaacagtatgaggaatttgctatgtcttaccagaagctgctggcaaattctcaatccttagcagaccttttggatgaaaatatgccagatcttcctcaagacaaaccaacaccagaagaacatgggcctggaattgatatattcacacctggtaaacctggagaatatgacttggaaggtggtatatgggaagatgaagatgctcggaatttttatgagaacctcattgatttgaaggcttttgtcccagccatcttgtttaaagacaatgaaaaaagttgtcagaataaagagtccaacaaagatgataccaaagaggcaaaagaatctaaggagaataaggaggtatcaagtcccgatgatttggaacttgagttggagaatctagaaattaatgatgacaccttagaattagagggtggagatgaagctgaagatcttacaaagaaacttcttgatgaacaagaacaagaagatgaggaagccagcactggatctcatctcaagctcatagtagatgctttcctacagcagttacccaactgtgtcaaccgagatctgatagacaaggcggaaaaggccttttgtaatggaaatctcgcgagggttaatcttctcttgagaatggcagtcaagaaatga

SEQ ID NO: 311586 - DNA, 2840 bp, Artificial Sequence
  derived and/or modified sequence
gtggggggaggggaggggagagcccgagcgctggagttggtgctgggaaacccggggctaatgttgacaacaggctcgagattgtcctgggtcacataatgccagctgagcgtaaaaagccagcaagtatggaagaaaaagactctttaccaaacaacaaggaaaaagactgcagtgaaaggcggacagtgagcagcaaggagaggccaaaagacgatatcaagctcactgccaagaaggaggtcagcaaggcccctgaagaatcaaagaaaaaagaagaggaagaaaaaaagaaacatcaagaggaagagagaaagaagcaagaagagcaggccaaacgtcagcaagaagaagaagcagctgctcagatgaaagaaaaagaagaatccattcagcttcatcaggaagcttgggaacgacatcatttaagaaaggaacttcgtagcaaaaaccaaaatgctccggacagccgaccagaggaaaacttcttcagccgcctcgactcaagtttgaagaaaaatactgcttttgtcaagaaactaaaaactattacagaacaacagagagactccttgtcccatgattttaatggcctaaatttaagcaaatacattgcagaagctgtagcttccatcgtggaagcaaaactaaaaatctctgatgtgaactgtgctgtgcacctctgctctctctttcaccagcgttatgctgactttgccccatcacttcttcaggtctggaaaaaacattttgaagcaaggaaagaggagaaaacacctaacatcaccaagttaagaactgatttgcgttttattgcagaattgacaatagttgggattttcactgacaaggaaggtctttccttaatctatgaacagctaaaaaatattattaatgctgatcgggagtcccacactcatgtctctgtagtgattagtttctgtcgacattgtggagatgatattgctggacttgtaccaaggaaagtaaagagtgctgcagagaagtttaatttgagttttcctcctagtgagataattagtccagagaaacaacagcccttccagaatcttttaaaagagtactttacgtctttgaccaaacacctgaaaagggaccacagggagctccagaatactgagagacaaaacaggcgcattctacattctaaaggggagctcagtgaagatagacataaacagtatgaggaatttgctatgtcttaccagaagctgctggcaaattctcaatccttagcagaccttttggatgaaaatatgccagatcttcctcaagacaaaccaacaccagaagaacatgggcctggaattgatatattcacacctggtaaacctggagaatatgacttggaaggtggtatatgggaagatgaagatgctcggaatttttatgagaacctcattgatttgaaggcttttgtcccagccatcttgtttaaagacaatgaaaaaagttgtcagaataaagagtccaacaaagatgataccaaagaggcaaaagaatctaaggagaataaggaggtatcaagtcccgatgatttggaacttgagttggagaatctagaaattaatgatgacaccttagaattagagggtggagatgaagctgaagatcttacaaagaaacttcttgatgaacaagaacaagaagatgaggaagccagcactggatctcatctcaagctcatagtagatgctttcctacagcagttacccaactgtgtcaaccgagatctgatagacaaggcggaaaaggccttttgtaatggaaatctcgcgagggttaatcttctcttgagaatggcagtcaagaaatgagatggttcacttgactactgagcagttacaccaaggagagcgtgaaggagatgattgagccagagaagaaacgggttgtgatggtaatggtgtgggggaaatgaacttgagctttaaacttgatttgagtttcagtgtctctgaattgaacatcccacgttggaagaagatacatttgggggctccaggactacagtagaaaagtatagagcaagcaggaaaatcttctagtaaaacttacatgcaggacaacaaaatgatgaaagatatccaaataccagataatccaccaggaaggcttttgtttaggaatttgtttcaagaggaacaagggatgagggagaaaaatccgttttatccatcagagtcagtgctataaaattgcctattaaggtaaaagaaaaatgtggagactattttactatacagagagcattaattcagatggcttagaaaagtgataccagcccaagaacagggatctaggtgagcccattgtaagtatcattgaaaacaaaacatgcccgtcaacatgtcacagaaaacgaacgaaggacaacaagaagtggatgagaatattttgttgaccttcatgggtttacagcctctgtctctaaacaaagtatggaaacaagtagagcttttattttgcttttgtttttgttttgtttttttttttgttttcccccactaaatagaaatgagggtccttagtctgtttctgacaatctgttaatttcttaggacagctgtctttggtttgctttccagcaggcgtagtatatttagtcggagagcacatctgtatgcgacaacttgattacatctttttttctagctattttgcattttttcttttaccatgtttcagtttctgcatgtagatttaaataaaaaacaaaacttgtaaagttgtaacatttcacatggaaatgctgcccaatcttcaccagcttcagaaatctgacctttgccgatgctgcaataaagtgttgtaattta

SEQ ID NO: 311587 - DNA, 414 bp, Artificial Sequence
  derived and/or modified sequence
atgttccccgtgagccagcccttcgtggactacccctacaaccagtgcgccgtggtgggcaacggcggcatcctgaacaagagcctgtgcggcaccgagatcgacaagagcgacttcgtgttcagatgcaacctgccccccaccaccggcgacgtgagcaaggacgtgggcagcaagaccaacctggtgaccatcaaccccagcatcatcaccctgaagtacggcaacctgaaggagaagaaggccctgttcctggaggacatcgccacctacggcgacgccttcttcctgctgcccgccttcagcttcagagccaacaccggcaccagcttcaaggtgtactacaccctggaggagagcaaggccagacagaagtgcaagaccaagagaaagaccatcaacagcatcctgtag

SEQ ID NO: 311588 - DNA, 387 bp, Artificial Sequence
  derived and/or modified sequence
tgatacccctacaaccagtgcgccgtggtgggcaacggcggcatcctgaacaagagcctgtgcggcaccgagatcgacaagagcgacttcgtgttcagatgcaacctgccccccaccaccggcgacgtgagcaaggacgtgggcagcaagaccaacctggtgaccatcaaccccagcatcatcaccctgaagtacggcaacctgaaggagaagaaggccctgttcctggaggacatcgccacctacggcgacgccttcttcctgctgcccgccttcagcttcagagccaacaccggcaccagcttcaaggtgtactacaccctggaggagagcaaggccagacagaagtgcaagaccaagagaaagaccatcaacagcatcctgtag

SEQ ID NO: 311589 - DNA, 414 bp, Artificial Sequence
  derived and/or modified sequence
atgtttcctgtctcccaaccgtttgtcgattacccgtacaaccaatgtgctgtggtgggtaatggggggatcttaaataaatccctttgcggtaccgagatcgacaaatccgatttcgtatttagatgcaaccttcctccaaccaccggcgatgtcagtaaggacgtagggtctaagacaaacctggtaaccatcaatccaagcatcataacactgaagtatgggaatctgaaggaaaaaaaggctctattcctcgaagacattgctacatatggcgatgcgtttttccttttgcccgccttctcctttagggcgaatacgggcacgtcttttaaggtctattacactctcgaggaaagtaaggcgcgccagaagtgtaagacgaagaggaagaccattaactccattctgtag

SEQ ID NO: 311590 - DNA, 387 bp, Artificial Sequence
  derived and/or modified sequence
tgatacccatacaatcagtgcgccgttgtgggcaacggtggcatcctgaataaaagtctctgtgggaccgaaattgataagagcgactttgtgtttagatgtaatctgccaccaactactggcgacgtttcgaaagatgtggggtctaagaccaatttagtgacaatcaatccaagtattatcacactaaaatacggcaacctcaaggagaagaaagcgcttttcctcgaggacattgctacgtatggcgatgccttcttcctcctgccagcattttcttttagggccaataccggcacctctttcaaagtttactacactctcgaagaaagcaaagcaaggcagaagtgtaagaccaaacggaagaccatcaacagcatcctctag

SEQ ID NO: 311591 - DNA, 414 bp, Artificial Sequence
  derived and/or modified sequence
atgtttcctgtgtcccagccctttgtggactacccctacaaccagtgtgctgtggtgggcaatggaggcatcctgaacaagagcctgtgtggcacagaaattgacaagagtgactttgtgttccgctgcaacctgccccccaccactggagatgtgtccaaggatgtgggcagcaagaccaacctggtgaccatcaaccccagcatcatcaccctgaagtatggcaacctgaaggagaagaaggccctcttcctggaggacatcgccacctatggagatgccttcttcctgctgcctgccttctccttccgggccaacacaggcaccagcttcaaggtgtactacaccctggaggagagcaaggcccggcagaagtgcaagaccaagaggaagaccatcaacagcatcctgtag

SEQ ID NO: 311592 - DNA, 387 bp, Artificial Sequence
  derived and/or modified sequence
tgatacccctacaaccagtgtgctgtggtgggcaatggaggcatcctgaacaagagcctgtgtggcacagaaattgacaagagtgactttgtgttccgctgcaacctgccccccaccactggagatgtgtccaaggatgtgggcagcaagaccaacctggtgaccatcaaccccagcatcatcaccctgaagtatggcaacctgaaggagaagaaggccctcttcctggaggacatcgccacctatggagatgccttcttcctgctgcctgccttctccttccgggccaacacaggcaccagcttcaaggtgtactacaccctggaggagagcaaggcccggcagaagtgcaagaccaagaggaagaccatcaacagcatcctgtag

SEQ ID NO: 311593 - DNA, 414 bp, Artificial Sequence
  derived and/or modified sequence
atgttccccgtgagccagcccttcgtggactacccctacaaccagtgtgccgtggttgggaatggcggaatcctgaacaagtctctgtgtggtaccgaaatagacaagtccgatttcgtgttcaggtgtaatctgcccccaaccactggcgatgtctcaaaagatgtggggagcaagacgaaccttgtcacaatcaaccccagcatcataacactgaagtatggcaacctgaaggaaaaaaaggctctgtttttagaagacatagccacttacggagacgccttctttctgttgcccgccttctcattccgggctaacactggaacatcatttaaagtttactacactttagaagaatcaaaggcccgacagaaatgtaagactaagaggaagactattaactccatcctgtag

SEQ ID NO: 311594 - DNA, 387 bp, Artificial Sequence
  derived and/or modified sequence
tgatacccctacaaccagtgcgccgtggtgggcaacggcggcatccttaataaatccctttgtggcaccgaaatagataagagcgatttcgtgtttagatgcaacctgcccccgaccaccggggacgtctccaaagacgtgggcagtaaaaccaacttagtgaccattaacccgagtatcattactctcaagtatgggaatctgaaggagaaaaaggctctgttcctggaggacatcgcaacctacggtgacgccttcttcctgctacccgcgttctcttttcgtgcaaacacaggaacctcctttaaggtctactacaccctagaggaaagtaaggcacggcagaagtgcaagaccaaaaggaagaccattaacagcattctctag

SEQ ID NO: 311595 - DNA, 414 bp, Artificial Sequence
  derived and/or modified sequence
atgttccctgtcagccagcccttcgtggattatccttataatcagtgcgccgtggtgggaaacggtgggatcttgaacaaatccctctgtggtactgaaatagacaagtcagactttgtctttcgctgcaacttaccgccaaccacgggcgacgtctccaaggacgtcggctccaagactaatctcgttacaattaatccctccatcattaccctaaaatatggcaatctgaaggaaaagaaagctctctttctcgaggacattgctacttatggagacgcctttttcctgctgcccgcattctccttcagggcgaacaccggaaccagtttcaaggtttactatactctggaagagtctaaggccaggcagaagtgcaagaccaagcgcaagacgataaactcaatactctag

SEQ ID NO: 311596 - DNA, 387 bp, Artificial Sequence
  derived and/or modified sequence
taatacccatacaatcagtgtgctgtagtaggcaatgggggaattctgaataagtccctgtgcggcactgagatcgataaatctgattttgtgtttcgctgcaatctgccgcctacgacaggcgatgtgtcgaaagatgttgggagcaaaaccaatctggttacgatcaatccgtccattattaccctcaagtatggaaatctcaaggaaaaaaaagccctttttttggaggatatcgccacatacggcgatgcctttttcctgctaccagctttttctttccgcgctaacactggaaccagttttaaggtgtactacaccctggaggagagcaaggcccgacagaaatgcaagaccaagaggaagaccatcaactccatactttag

SEQ ID NO: 311597 - DNA, 697 bp, Artificial Sequence
  derived and/or modified sequence
ctacccttataatcagtgtgcagtggtcggaaatgggggaattctgaataagtctctctgtggaactgaaatagataaatccgacttcgtttttaggtgtaacctacccccaaccacaggagatgttagtaaagatgttggcagtaaaacaaatcttgtgactataaatccaagcatcataactctgaaatatgggaacttaaaggaaaaaaaagccctatttctggaggacattgcaacctatggagatgcattttttcttctgccagcattttccttcagggccaacacgggtacctctttcaaagtatactacacgctcgaagagtctaaagcaagacaaaagtgcaaaacaaaaagaaaaactataaactccatcttgtagatttgtagattcgccacaaccaagtctgactgtgacactcccaagaaatctgtatgtaatcagcattgcttaaatattgttagatctaatgtgatcttctgctcttaaaactcaagtacatctaagggcattgagaatggaaagtctgagttctggtactagacaagagcagccctttaggccaggcgcaatggctcacacctgtaatcccagcactttgggaggccaaggtgggtgggtcacttgaggccaggagtttgagactagcctgggcaacatagtgagtacccttctctacaaaaaacaaaaaaa
